United States Patent Application Publication US 2023/0026259 A1 - sequence listing, part 94

SEQ ID NO: 204037 - DNA, 2631 bp, Homo sapiens
  Payload ID: 20238
  Gene Name: zinc finger protein 85
  ENST ID: ENST00000612293
  CDS Start-End: 629-2239
agataaggaataggaacaggctatgacctaatgcttgcttggaccagtataagcatgccagggcaaatatttaggctaaaatgtgggagctaagaacacaaagtacattgatttctttatcacggctagcagatatctaagaatgtcagcacaggtgtttgaatacattttgcttctaagagaagttactatttattcctaattacacgaggaggaaagtccctttgaaaaggaacctctatttcacattttacgatgagcacaatatagttttgcattggtgtatatgaatttgaatgagcaaacagctcttcaagtttttggggtttttttgtttgttttgttttttgggtttttgttttttgtttttgagacggagtctcactctgtcatcaggctggagtgcagtggcacgatctcggctcactgcaacctccgcctcctgcgttcaagtattcccctgcctcagcctcccaagtagctgtgactaaagccgtgcaccacaacgtctggccaattttttgtattttagtagagacgaagtttcaccatattggccaggcgagtctcaaactcctgacctcgtgatccacccacctcagcctcccaaagtgcttggattatagacatgagcctcagcgcccagccctcttcaagtttttataaaccagtttcagaagttatgtgttctcattttgcccaagacctttggccggagcagaatataaaagattctttccaaaaagtgacactgaaaagatatggaaaatgtagacatgaaaatttaccattaagaaaaggctgtgaaagtatggatgagtgtaagatgcacaaaggaggttgtaatggacttaaccaatgtctcacagctacccagagcaaaatatttcaatgtgataaatatgtaaaagtcgctcataaattttcaaattcaaacagacatgagataagacatactaaaaagaaacctttcaaatgtacaaaatgtggcaaatcatttggcatgatttcatgcctaactgaacatagcagaattcatactagagtaaatttctacaaatgtgaagaatgtggaaaagcctttaactggtcctcaacccttactaaacataagagaattcatacgggagagaaaccttacaaatgtgaagaatgtggtaaagcctttaaccagtcctcaaaccttattaaacataagaaaattcatactggagagaaaccctacaaatgtgaagaatgtggcaaaacttttaaccgattctcaactcttactacccataagataattcatactggagagaaaccctacaaatgtaaagaatgtggtaaagcttttaaccgatcttcaacccttactacccatagaaaaattcatactggagagaaaccttacaaatgtgaagaatgtggcaaagcctttaagcagtcctcaaaccttactacacataagataattcatactggagagaaaccctacaaatgtaaaaaatgtggaaaagcctttaaccagtctgcacaccttaccacacatgaggtaattcatactggagagaaaccctacaaatgtgaaaaatgtggaaaagcctttaatcatttctcacaccttactacacataagataattcatactggagagaaaccttacaaatgtaaagaatgtggtaaagcttttaaacactcttcaacccttactaaacataagataattcatactggagagaagccttacaaatgtaaagaatgtgaaaaagcttttaaccaatcctcaaaacttactgaacataagaaaattcatactggagagaaaccctatgaatgtgaaaaatgtggcaaagcttttaaccagtcctcaaatcttactagacataagaaaagtcatacagaagagaaaccttacaaatgtgaagaatgtggcaaaggttttaaatggccctcaacccttactatccataagataattcatactggagagaaaccatacaaatgtgaagaatgtggcaaagcttttaaccaatcctcaaaacttaccaaacataagaaaattcatactggagagaaaccctacacatgtgaagaatgtggcaaagcctttaaccagtcctcaaaccttactaaacataagagaattcatactggagaaaaaccttacaaatgtgaagaatgtgacaaagcttttaaatggtcctcagtccttactaaacataagataattcataccggagaaaaattacaaatatgaaaattatggcaaagctttaatcaatttacaagtcttactaaacataagaaaatttatactggagagaaactactaacctgaaagatgtgacaataattttgacaacacctcagacttataaaagtaatcatactggtgagaaattctaaaaatgtgaagactatggcaaagtctttaaatggttgtcacactttaggtaagataattcatattggaacaaactacaagtgcaaacaatgtggcaaaacttaatttatgctcacaccttactgcacagaaaagaatttttagttgagaaaaagtatacaaatataaagaatgtggaaaagccgttaatatctgctcacatcttactcagcatcagaaagtacttaataaaagcattataaatg

SEQ ID NO: 204038 - DNA, 1531 bp, Homo sapiens; identical to SEQ ID NO: 204024
  Payload ID: 20238
  Gene Name: zinc finger protein 85
  Uniprot ID: Q03923
  ENST ID: ENST00000615882
  CDS Start-End: 126-389

SEQ ID NO: 204039 - DNA, 1689 bp, Homo sapiens; identical to SEQ ID NO: 204026
  Payload ID: 20238
  Gene Name: zinc finger protein 85
  Uniprot ID: Q03923
  ENST ID: ENST00000613159
  CDS Start-End: 1-1689

SEQ ID NO: 204040 - DNA, 2296 bp, Homo sapiens; identical to SEQ ID NO: 204025
  Payload ID: 20238
  Gene Name: zinc finger protein 85
  Uniprot ID: Q03923
  ENST ID: ENST00000615320
  CDS Start-End: 114-1901

SEQ ID NO: 204041 - DNA, 1259 bp, Homo sapiens; identical to SEQ ID NO: 204028
  Payload ID: 20238
  Gene Name: zinc finger protein 85
  ENST ID: ENST00000623537
  CDS Start-End: 201-368

SEQ ID NO: 204042 - DNA, 563 bp, Homo sapiens; identical to SEQ ID NO: 204033
  Payload ID: 20238
  Gene Name: zinc finger protein 85
  ENST ID: ENST00000623898
  CDS Start-End: 180-368

SEQ ID NO: 204043 - DNA, 549 bp, Homo sapiens; identical to SEQ ID NO: 204031
  Payload ID: 20238
  Gene Name: zinc finger protein 85
  ENST ID: ENST00000615413
  CDS Start-End: 163-549

SEQ ID NO: 204044 - DNA, 556 bp, Homo sapiens; identical to SEQ ID NO: 204027
  Payload ID: 20238
  Gene Name: zinc finger protein 85
  ENST ID: ENST00000624588
  CDS Start-End: 117-556

SEQ ID NO: 204045 - DNA, 483 bp, Homo sapiens; identical to SEQ ID NO: 204030
  Payload ID: 20238
  Gene Name: zinc finger protein 85
  ENST ID: ENST00000624369
  CDS Start-End: 117-483

SEQ ID NO: 204046 - DNA, 506 bp, Homo sapiens; identical to SEQ ID NO: 204032
  Payload ID: 20238
  Gene Name: zinc finger protein 85
  ENST ID: ENST00000625004
  CDS Start-End: 149-506

SEQ ID NO: 204047 - DNA, 7714 bp, Homo sapiens
  Payload ID: 20239
  Gene Name: zinc finger protein 850
  Uniprot ID: A8MQ14
  ENST ID: ENST00000591344
  CDS Start-End: 160-3432
gtttgctgtgccgatttagctgccgccgcgccttggagtcctgaggaacttggctaggctggccccgagcggaaccagagaatgctgaggctctaaccatggaatattcggaatgtcccattctatgaaggaggtttgctggctgcaacaggaatattcatgaacatggaggggttggtcatgttccaggatctgtctatagacttctctcaggaggaatgggagtgcctggacgctgctcagaaggacttatacagagatgtaatgatggagaactacagcagcctggtctcactaggtctctctatcccaaagcctgatgtgatttccttactggagcaagggaaagagccctggatggtttcaagggacgtgctgggaggatggtgccgagactcggagtttagatgtaagaccaaagattcatgtttgccaaaagaaatctatgaagtaacatcatctcagtgggtgagaatggaaaaatgtcatagccttgtgggctccagtgtcagagatgactgggaatgcaaaggccagtttcagcaccaagatataaatcaggagcgatatttggaaaaagcaataatgacttatgaaacaacaccaactttctgcctacagacatctctcactctgcatcatcggattcatcctggagagaaactgtataaatccacagaatgtatggcttttaagtatggctcagaacttacacaacagcaagaaacccatactggtgaaaaactctataaatgtaaggagtgtgggaaggcctttcatcacttttcctatcttgttaaacatcagagaattcatactggggaaaagccctgtgcatgtaaagaatatggaaaagcttttatttctggctcacatcttattcaacaccagaaaatgtatacagatgagagacctcatgagtgtcaggaatccgtgaaggcctttagaccgtctgcacatcttattcaacattggagaattcatactggtgacaaaccttatgaatgtaaagaatgtgggaaatcttttacttctggctcaacactaaatcaacatcagcaaattcacactggtgagaaaccctatcattgtaagcaatgtggaaaatcttttactgttggctcaacactaattcgacaccagcaaattcacactggtgagaaaccgtatgattgtaaggaatgtggaaaatcttttgcttcaggctcagcactaattcgacatcagcgaattcacactggtgagaaaccctatgactgtaaggaatgtggaaaatcttttacttttcactcagctctaattcgacatcagcgaattcacactggtgagaaaccctatgattgtaaggaatgtgggaaatcttttacttttcgctcagggttaattggacaccaggcaattcacactggtgagaaaccctatgattgtaaagaatgtggaaaatcttttactgctggctcaacactaattcaacatcagcgaattcacactggtgagaaaccctatgattgtaaggagtgtgggaaatcttttgcttcgggctcagcactacttcaacatcagcggattcacactggtgagaaaccctattgttgtaaggaatgtggaaaatcttttacttttcgctcaacacgcaatcgacaccagcgaatccacactggtgagaaaccctataattgtaaagaatgtggaaaatcttttgcttctggctcagcactacttcaacatcagcgaattcacactggtgagaaaccctatcattgtaaggaatgtggaaaatcttttacttttcgctcagggctaattggacatcaggcagttcacactggtgagaaaccctatgattgtaaagaatgtggaaaatcttttacttctcgctcagcactaattcaacatcagcgaattcacactggtgagaaaccctatcactgtaaggaatgtggaaaatcttttactgttggctcaacactacttcaacatcagcaaattcacactggtgagaaaccttatgattgtaaggaatgtgggaaggcctttagacttcgtttacgacttactcaacatcaacaaatccatactggtgagaaaccttatcaatgtcaggaatgtgggaaagcctttgtcagtgtctcaggactcacccaacatcacagaattcacactggtgagaaaccctatgaatgtccggactgtgggaaggcctttagacagcgtacataccttaatcaacatcggagaattcatactggtgagaaaccttatgaatgtaaagaatgtgggaaatcttttactttctgctcaggactaattcaacatcagcaaaatcacactgatgagaaaccctatgatggtaaggaatgtgggaaatcttttacttctcactcaacactaattcaacatcagcaaattcacactggtgagaaaccctatgattgtaaggaatgtgggaaatcttttacttctcactcaacactaattcaacatcagcaaatacacactggtgagaagctctatgattgtaaggaatgtgggaaatcttttacttctcattcaacactaattcaacatcagccacttcacactggtgagaaaccttatcattgcaaggaatgtgggaaatcttttactcttcgctcagcactaattcaacatcggccagttcacactggtgagaaacgctacagttgtaaagaatgtgggaaatcttttacttctcgctcaacactaattgaacatcagcgaattcacactggtgagaaaccctatcattgtaaggaatgtggaaaatcttttgcttttcgctcagcaataatccaacatcggcgaattcacactggtgagaaaccctatgattgtaaggaatgtggcaaggcctttagacgtcgttcaaaacttactcaacatcaacgaatccatactggtgagaaaccttatcgatgtcatgaatgtggaaaagcctttgtccgtttctcaggactcaccaaacatcacagtattcacactggcgagaaaccctatgaatgtaagacatgtgggaagtccttcagacagcgtacacaccttactctacatcagagaattcataccggtgacagaccttatgaatgtaaagaatgtgggaaatcttttacttgcggctcagaactaattcgacatcagcgaactcacactggtgagaaaccttatgattgtaaggaatgtgggaaggcctttagatgtccttcacaacttagtcaacataaacgaatccatactggtgagaaaacttatcaatgtccggaatgtgggaaagcctttttctatgcctcaggactcagccgacatcagagtgttcacactggcgagaaaccctatgaatgtaagacatgtgggaaggcctttaaacagcttacacagcttactcgacatcagagaattcatgacctaacataattaatgtaggaaactgttctcatgccatttgtcatggatcatcagcagattccatatgtgggtcaaatacaatggatgtgtattacttcatattcactttttccagaattacgacttttttttttttttttgagacggagtcttgctctgtcgcccaggctggagtgcagtggcgctatctcggctcactgcaagctctgcctcctgggttcatgccattctcctgcctcagcctccctagtagctgggactacaggtacctgccaccacgcctggctaatttttttgtttttgtatttttagtagagacagggtttcactgtgttagccaggatggtctcgatctcctgacctggtgatccacccaccaaaattaggacatttaatactgaaagaaattgataatgaatgtagatgagttttctatcatgattcaaagcttattgaagttatacaaattcatattagagaatgtggtcaatgacaaaagacaaccatttactacctacgtgacattaggctagttatgtaaattctctgtgccaaaattactaattgataaaatgttgatggcaatagttgtttttgtgtattttttgtttgtttgttttgttttgagacagagtcttgctctgttgcccaggctggagtgcagtggtgctatcttggctcactgcaacctctgcctcctgggttcaagtgattctcctgcctctgcctcctgagtagctcagattacaggcatgcaccaccatgcttggctaatttttgtatttttagtagagacggggtttcactgtgttggtcagggtggtctcaaacttttgacctcgtgatccccctacctcggcctcccaaagtgctgggattacaggtgtgagccaccacgcctggctagtaatagtttttttataataaataagtgtgactatatttttcatgtttgactactgactttgttttaagcttcgccttccctgtctatttccctgtctactttagcccataactgcaaaggtggctaagaaagtccttgctggaaagaaagcaagcaaaactaaagtctgtgcgcaccttctcctttggatccagtgggcaatttatattagaaattccaagccgggcgtggtggctcacgcctgtaatgccagcactttcggaggctgaggtgggtggatcacctgaggttaagagttcaagaccagcctggccaacatgttgaaaccccatctctactaaaaatacaaaatcagccagacatggtggcatatgcctgtaatcccagctattcaggaggcaaggctggagaatcgcttgaacctgggaggcggatgttgcagtgagccagtcagtggagcagtcagaacacacacagtgtttatcaattaagtttgtagtcagaacacacaccatgtttatcaattaagtttgctgtcttatatggacacagtttgtgatgccctaaaacaagtagtggtgcctaagataatcataggccaccataacagatataacaacaatgagaaagttgaaatattgttgggatcatccaaatatgacacagatacaaagtgagcacatgctggtgaataaatggagccaatagacttgttcactgcatggttacgtcagaggcgtgtaaaccagagcaacttcttcttgaataggagctgtgtaaagtaacactgaaacctactggactgcattcctagacagataagtcattctaagtcacaagatgagatatgaggtcagcataagatacaggtcataaagaccttgctgagaaaacatcttgcagtaaagaagtcggccaaatccaagatggtgacaagagtgacctctggtcgtcctcactgctatactcccagcagcaccatgacacccagctaagtttttattttttatttcagtagagttggagtcttgctttgttacccaggctggtcttgaattcctgtcttcaagcaatcttcccaccttatgaatataaagaatggcccaccttgtcctctcaaagtgctgggattacaatcatgagccactgcacctgggactttctttttcttttttcttttttttttttttgagatggagttttgctcttgttgcccaggctggagtgcaatggcacgatcttggctcactgcaacctccgcctcccaggttcaagcgattctcttgactcagcctcctgagtaactgggattacaggcatgctccaccatgcccgactaatttttgtattatttagtagagacggggtttctccatgttggtcaggctggtctctgaactctgggcaggactaatttagataaggtagtcaggaaaggcatttcttacaaggtggtatttgcatgaatgtagacatatggttgcattttattatatgtaaattacacttcaataaagttgatgaaaaaaatcttacctcatcgtctatgcacttcggattgttgtatttcattctatttaaattacacttgcgtttaaaaaatttaacacttctctaaaacatatctgttgatttgtacttttactaatatgcttatggatgatttatatacacacacacacacacacatatcttttaagaaggttattttaaggttaatcaattgaggctttgtctcaattgattttttttgagacagtctcgttctgtcgcccaggctggagtgcagtggcgtgatctcgactcactgcaagctccacctcccaggttcacgccattctcctgcctcagcctccctagtagctgtgactacaggtgcccgccaccacgcctggctaattttttgtatttgtagtagagacggaatttcaccatgttagccaggatggtctcaatctcctgacctcatgacccgcccacctcggcctcccaaagtgctgggattacaggcgtgagccaccccgcccggctcaattgattcttttgtctcaatttgtagtcagttgaggtttgtctcaatttatggaaacaaatcaaatgtttgttctcaaattcttactctgtcatttattattctccatgtttttgtaactgcttccttggagatatttaaacataaatatatacagagagggtgaagatggaggagtgctttttacagttcacagttgtctttttcatgtgtgacaggtttttgctgtgttgcccaggctggagtgcaatgccacaatcttggctcactgcagcctcaacttcccgggctcaatcgatcccccacctcagcctcccgagtagcaaggactacaggcgcacaccaccacacctagctaatttttgtatcttttgtagagacagggtttcaccatgttgtccaggctggtcttgaactcttgggctcaattggtcctagcacctcagcctcctaggtgctgggattacaggtgtgagccactgtgttcagccaatactcttaacgtttttacttttcacttttaaaaattaactctttttatgaaaaaagtagaattttttaaagagcagagaaaagcacaatgaagacagaaagatcacctgtatattcttattgaccaaagatgatctatttggggtaaatccttttttttttttttgagacgggagttttgctattgttgcccaggctggagtgcaatggcacgatctcggcttaccgcaacctctgcctcccaggtttaaacaattctcctgcctcagcctcctgagtagctgggattacaggcatgcaccaccacgcccggctaattttgtatttttaatagagacagggtttctccatgttgaggctgggcttgaactccagacctcaggtgatctgactgcctcggcctcccaaagtgctgggattacaggcaggatccacgtgcccggccggtaaatccttttaatagaggagtttcaatatttctcctctgccatagtattagaaagaaaagaatcattattgacatctttacgacattgagtttttctcttgtacctggtgtgtctttatttcagtaggtattcttttatgtgctttagtaagtctttatatttttagcataaaagtgtacacatttcttgttttacttatttctagatacttaatggcttttgtttataatatgattgggatattttttctgttgtgtaattgattactattactatgtactaaactgttggtttttgtctaaggattgtaacattgatgaactactttagtagatgaaatggtttcttcatgagattgaattgtctaaagagatgttggtattatttgtaaataaaagtatttgcctattc

SEQ ID NO: 204048 - DNA, 523 bp, Homo sapiens
  Payload ID: 20239
  Gene Name: zinc finger protein 850
  ENST ID: ENST00000589390
  CDS Start-End: 171-425
gtggcgggaccgtttgctgtgccgatttagctgccgccgcgccttggagtcctgaggaacttggctaggctggccccgagcggaaccagagaatgctgaggctctaaccatggaatattcggaatgtcccattctatgaaggaggtttgctggctgcaacaggaatattcatgaacatggaggggttggtcatgttccaggatctgtctatagacttctctcaggaggaatgggagtgcctggacgctgctcagaaggacttatacagagatgtaatgatggagaactacagcagcctggtctcactaggtctctctatcccaaagcctgatgtgatttccttactggagcaagggaaagagccctggatggtttcaagggacgtgctgggaggatggtgccgagacaggatgaagaaagcctgaaagaaatctattacaatggtgccaggtgcagtggctcaagcctgtaatcccagcactttgtgaggccgaggtgggcagatcacaaggtcaggagtttg

SEQ ID NO: 204049 - DNA, 7625 bp, Homo sapiens
  Payload ID: 20239
  Gene Name: zinc finger protein 850
  ENST ID: ENST00000614887
  CDS Start-End: 160-3336
gtttgctgtgccgatttagctgccgccgcgccttggagtcctgaggaacttggctaggctggccccgagcggaaccagagaatgctgaggctctaaccatggaatattcggaatgtcccattctatgaaggaggtttgctggctgcaacaggaatattcatgaacatggaggggttggtcatgttccaggatctgtctatagacttctctcaggaggaatgggagtgcctggacgctgctcagaaggacttatacagagatgtaatgatggagaactacagcagcctggtctcactagactcggagtttagatgtaagaccaaagattcatgtttgccaaaagaaatctatgaagtaacatcatctcagtgggtgagaatggaaaaatgtcatagccttgtgggctccagtgtcagagatgactgggaatgcaaaggccagtttcagcaccaagatataaatcaggagcgatatttggaaaaagcaataatgacttatgaaacaacaccaactttctgcctacagacatctctcactctgcatcatcggattcatcctggagagaaactgtataaatccacagaatgtatggcttttaagtatggctcagaacttacacaacagcaagaaacccatactggtgaaaaactctataaatgtaaggagtgtgggaaggcctttcatcacttttcctatcttgttaaacatcagagaattcatactggggaaaagccctgtgcatgtaaagaatatggaaaagcttttatttctggctcacatcttattcaacaccagaaaatgtatacagatgagagacctcatgagtgtcaggaatccgtgaaggcctttagaccgtctgcacatcttattcaacattggagaattcatactggtgacaaaccttatgaatgtaaagaatgtgggaaatcttttacttctggctcaacactaaatcaacatcagcaaattcacactggtgagaaaccctatcattgtaagcaatgtggaaaatcttttactgttggctcaacactaattcgacaccagcaaattcacactggtgagaaaccgtatgattgtaaggaatgtggaaaatcttttgcttcaggctcagcactaattcgacatcagcgaattcacactggtgagaaaccctatgactgtaaggaatgtggaaaatcttttacttttcactcagctctaattcgacatcagcgaattcacactggtgagaaaccctatgattgtaaggaatgtgggaaatcttttacttttcgctcagggttaattggacaccaggcaattcacactggtgagaaaccctatgattgtaaagaatgtggaaaatcttttactgctggctcaacactaattcaacatcagcgaattcacactggtgagaaaccctatgattgtaaggagtgtgggaaatcttttgcttcgggctcagcactacttcaacatcagcggattcacactggtgagaaaccctattgttgtaaggaatgtggaaaatcttttacttttcgctcaacacgcaatcgacaccagcgaatccacactggtgagaaaccctataattgtaaagaatgtggaaaatcttttgcttctggctcagcactacttcaacatcagcgaattcacactggtgagaaaccctatcattgtaaggaatgtggaaaatcttttacttttcgctcagggctaattggacatcaggcagttcacactggtgagaaaccctatgattgtaaagaatgtggaaaatcttttacttctcgctcagcactaattcaacatcagcgaattcacactggtgagaaaccctatcactgtaaggaatgtggaaaatcttttactgttggctcaacactacttcaacatcagcaaattcacactggtgagaaaccttatgattgtaaggaatgtgggaaggcctttagacttcgtttacgacttactcaacatcaacaaatccatactggtgagaaaccttatcaatgtcaggaatgtgggaaagcctttgtcagtgtctcaggactcacccaacatcacagaattcacactggtgagaaaccctatgaatgtccggactgtgggaaggcctttagacagcgtacataccttaatcaacatcggagaattcatactggtgagaaaccttatgaatgtaaagaatgtgggaaatcttttactttctgctcaggactaattcaacatcagcaaaatcacactgatgagaaaccctatgatggtaaggaatgtgggaaatcttttacttctcactcaacactaattcaacatcagcaaattcacactggtgagaaaccctatgattgtaaggaatgtgggaaatcttttacttctcactcaacactaattcaacatcagcaaatacacactggtgagaagctctatgattgtaaggaatgtgggaaatcttttacttctcattcaacactaattcaacatcagccacttcacactggtgagaaaccttatcattgcaaggaatgtgggaaatcttttactcttcgctcagcactaattcaacatcggccagttcacactggtgagaaacgctacagttgtaaagaatgtgggaaatcttttacttctcgctcaacactaattgaacatcagcgaattcacactggtgagaaaccctatcattgtaaggaatgtggaaaatcttttgcttttcgctcagcaataatccaacatcggcgaattcacactggtgagaaaccctatgattgtaaggaatgtggcaaggcctttagacgtcgttcaaaacttactcaacatcaacgaatccatactggtgagaaaccttatcgatgtcatgaatgtggaaaagcctttgtccgtttctcaggactcaccaaacatcacagtattcacactggcgagaaaccctatgaatgtaagacatgtgggaagtccttcagacagcgtacacaccttactctacatcagagaattcataccggtgacagaccttatgaatgtaaagaatgtgggaaatcttttacttgcggctcagaactaattcgacatcagcgaactcacactggtgagaaaccttatgattgtaaggaatgtgggaaggcctttagatgtccttcacaacttagtcaacataaacgaatccatactggtgagaaaacttatcaatgtccggaatgtgggaaagcctttttctatgcctcaggactcagccgacatcagagtgttcacactggcgagaaaccctatgaatgtaagacatgtgggaaggcctttaaacagcttacacagcttactcgacatcagagaattcatgacctaacataattaatgtaggaaactgttctcatgccatttgtcatggatcatcagcagattccatatgtgggtcaaatacaatggatgtgtattacttcatattcactttttccagaattacgacttttttttttttttttgagacggagtcttgctctgtcgcccaggctggagtgcagtggcgctatctcggctcactgcaagctctgcctcctgggttcatgccattctcctgcctcagcctccctagtagctgggactacaggtacctgccaccacgcctggctaatttttttgtttttgtatttttagtagagacagggtttcactgtgttagccaggatggtctcgatctcctgacctggtgatccacccaccaaaattaggacatttaatactgaaagaaattgataatgaatgtagatgagttttctatcatgattcaaagcttattgaagttatacaaattcatattagagaatgtggtcaatgacaaaagacaaccatttactacctacgtgacattaggctagttatgtaaattctctgtgccaaaattactaattgataaaatgttgatggcaatagttgtttttgtgtattttttgtttgtttgttttgttttgagacagagtcttgctctgttgcccaggctggagtgcagtggtgctatcttggctcactgcaacctctgcctcctgggttcaagtgattctcctgcctctgcctcctgagtagctcagattacaggcatgcaccaccatgcttggctaatttttgtatttttagtagagacggggtttcactgtgttggtcagggtggtctcaaacttttgacctcgtgatccccctacctcggcctcccaaagtgctgggattacaggtgtgagccaccacgcctggctagtaatagtttttttataataaataagtgtgactatatttttcatgtttgactactgactttgttttaagcttcgccttccctgtctatttccctgtctactttagcccataactgcaaaggtggctaagaaagtccttgctggaaagaaagcaagcaaaactaaagtctgtgcgcaccttctcctttggatccagtgggcaatttatattagaaattccaagccgggcgtggtggctcacgcctgtaatgccagcactttcggaggctgaggtgggtggatcacctgaggttaagagttcaagaccagcctggccaacatgttgaaaccccatctctactaaaaatacaaaatcagccagacatggtggcatatgcctgtaatcccagctattcaggaggcaaggctggagaatcgcttgaacctgggaggcggatgttgcagtgagccagtcagtggagcagtcagaacacacacagtgtttatcaattaagtttgtagtcagaacacacaccatgtttatcaattaagtttgctgtcttatatggacacagtttgtgatgccctaaaacaagtagtggtgcctaagataatcataggccaccataacagatataacaacaatgagaaagttgaaatattgttgggatcatccaaatatgacacagatacaaagtgagcacatgctggtgaataaatggagccaatagacttgttcactgcatggttacgtcagaggcgtgtaaaccagagcaacttcttcttgaataggagctgtgtaaagtaacactgaaacctactggactgcattcctagacagataagtcattctaagtcacaagatgagatatgaggtcagcataagatacaggtcataaagaccttgctgagaaaacatcttgcagtaaagaagtcggccaaatccaagatggtgacaagagtgacctctggtcgtcctcactgctatactcccagcagcaccatgacacccagctaagtttttattttttatttcagtagagttggagtcttgctttgttacccaggctggtcttgaattcctgtcttcaagcaatcttcccaccttatgaatataaagaatggcccaccttgtcctctcaaagtgctgggattacaatcatgagccactgcacctgggactttctttttcttttttcttttttttttttttgagatggagttttgctcttgttgcccaggctggagtgcaatggcacgatcttggctcactgcaacctccgcctcccaggttcaagcgattctcttgactcagcctcctgagtaactgggattacaggcatgctccaccatgcccgactaatttttgtattatttagtagagacggggtttctccatgttggtcaggctggtctctgaactctgggcaggactaatttagataaggtagtcaggaaaggcatttcttacaaggtggtatttgcatgaatgtagacatatggttgcattttattatatgtaaattacacttcaataaagttgatgaaaaaaatcttacctcatcgtctatgcacttcggattgttgtatttcattctatttaaattacacttgcgtttaaaaaatttaacacttctctaaaacatatctgttgatttgtacttttactaatatgcttatggatgatttatatacacacacacacacacacatatcttttaagaaggttattttaaggttaatcaattgaggctttgtctcaattgattttttttgagacagtctcgttctgtcgcccaggctggagtgcagtggcgtgatctcgactcactgcaagctccacctcccaggttcacgccattctcctgcctcagcctccctagtagctgtgactacaggtgcccgccaccacgcctggctaattttttgtatttgtagtagagacggaatttcaccatgttagccaggatggtctcaatctcctgacctcatgacccgcccacctcggcctcccaaagtgctgggattacaggcgtgagccaccccgcccggctcaattgattcttttgtctcaatttgtagtcagttgaggtttgtctcaatttatggaaacaaatcaaatgtttgttctcaaattcttactctgtcatttattattctccatgtttttgtaactgcttccttggagatatttaaacataaatatatacagagagggtgaagatggaggagtgctttttacagttcacagttgtctttttcatgtgtgacaggtttttgctgtgttgcccaggctggagtgcaatgccacaatcttggctcactgcagcctcaacttcccgggctcaatcgatcccccacctcagcctcccgagtagcaaggactacaggcgcacaccaccacacctagctaatttttgtatcttttgtagagacagggtttcaccatgttgtccaggctggtcttgaactcttgggctcaattggtcctagcacctcagcctcctaggtgctgggattacaggtgtgagccactgtgttcagccaatactcttaacgtttttacttttcacttttaaaaattaactctttttatgaaaaaagtagaattttttaaagagcagagaaaagcacaatgaagacagaaagatcacctgtatattcttattgaccaaagatgatctatttggggtaaatccttttttttttttttgagacgggagttttgctattgttgcccaggctggagtgcaatggcacgatctcggcttaccgcaacctctgcctcccaggtttaaacaattctcctgcctcagcctcctgagtagctgggattacaggcatgcaccaccacgcccggctaattttgtatttttaatagagacagggtttctccatgttgaggctgggcttgaactccagacctcaggtgatctgactgcctcggcctcccaaagtgctgggattacaggcaggatccacgtgcccggccggtaaatccttttaatagaggagtttcaatatttctcctctgccatagtattagaaagaaaagaatcattattgacatctttacgacattgagtttttctcttgtacctggtgtgtctttatttcagtaggtattcttttatgtgctttagtaagtctttatatttttagcataaaagtgtacacatttcttgttttacttatttctagatacttaatggcttttgtttataatatgattgggatattttttctgttgtgtaattgattactattactatgtactaaactgttggtttttgtctaaggattgtaacattgatgaactactttagtagatgaaatggtttcttcatgagattgaattgtctaaagagatgttggtattatttgtaaataaaagtatttgcctattcctttcta

SEQ ID NO: 204050 - DNA, 1968 bp, Homo sapiens
  Payload ID: 20240
  Gene Name: zinc finger protein 852
  Uniprot ID: Q6ZMS4
  ENST ID: ENST00000436261
  CDS Start-End: 162-1793
gcaactggggaagctgggaggtaggcgcggggcggtcggctgcggtggcggcgtttggatgattgtctctcggcggcggagtcgctcaatgtacttctccagttcctacccttcctcaagtggggaactcaggagaccaagcaggggcaactgtacttcggatggtcaggccccaggatactgtggcgtatgaggacctgtctgaggactatactcagaagaaatggaaaggtctcgcactcagtcagagagccctgcactggaacatgatgctggaaaatgaccgtagcatggcttctttgggtaggaacatgatggagagttcagagctgactccgaagcaggaaatttttaaaggatcagagtcatctaatagcacatcagggggactctttggggtggttcctgggggaacagagactggagatgtttgtgaagataccttcaaagagttagaaggacaaccctcaaatgaagaagggagcagactagaaagtgatttcttggaaataatagatgaggataagaaaaaatccacaaaagacagatatgaggaatataaggaagttgaggaacatccacctctgtcttccagtcctgttgaacatgaaggagttttaaagggacagaaatcctatcgatgtgatgaatgtggcaaagctttttattggagttcgcacctcattggtcatcggagaatccacactggagagaaaccctatgagtgtaatgagtgtgggaagaccttcaggcaaacctcccagctcattgttcatctcagaacccacacaggggaaaagccctatgaatgcagtgagtgtggaaaggcctataggcacagctcccatctcattcaacaccagagactccataatggggagaaaccctataaatgtaatgaatgtgcaaaagcttttaatcagagctccaaactcttcgaccaccagagaacccatactggggagaaaccttatgaatgtaaggagtgtggggcggcctttagtcggagtaaaaatcttgttcgacatcagtttctgcacactggtaagaaaccttataagtgtaatgaatgtgggagagcattctgttccaatagaaatctcattgaccatcagagaacccacactggggagaagccttataaatgtaatgaatgtggcaaagccttcagtcggagtaaatgtcttattcgacatcagagcctccacactggggaaaagccatacaaatgtagtgaatgtgggaaagccttcaatcagatctctcaacttgttgaacatgagcgaattcatactggagaaaaaccatttaagtgtagtgagtgtggtaaggcattcggtctgagtaaatgtcttattcggcaccagaggcttcacacaagtgaaaagccctataaatgcaatgagtgtggaaaatccttcaatcaaaactcatacctcattatacaccagagaattcacactggtgagaaaccctatgaatgtaatgagtgtgggaaggtcttcagttataattctagtcttatggtacatcagagaacccatactggggaaaaaccctataaatgcaatagttgtgggaaagcctttagtgacagctcacagcttactgtgcaccagagagtccacactggagagaaaaaccttatgaatgtattgagtgtgggaaagcctttagtcagcgttccacttttaatcaccaccagcgaactcatgctggagagaagccctcaggtctggctcggtcatcttcttaaggcatggttttctgagacagacagcaaagacctttgagttaagctgtctttataagaaggatgttcatcatggtctccttggagaccactaatcacagtggagaccatacctacttgcttttccttgggtcactaaggtgggagagtaggtgcaacttagtctgatccttacttagtaggaaattggggattacatctgtcattaacttgta

SEQ ID NO: 204051 - DNA, 1755 bp, Homo sapiens
  Payload ID: 20240
  Gene Name: zinc finger protein 852
  ENST ID: ENST00000616809
  CDS Start-End: 166-1755
gtgcgcaactggggaagctgggaggtaggcgcggggcggtcggctgcggtggcggcgtttggatgattgtctctcggcggcggagtcgctcaatgtacttctccagttcctacccttcctcaagtggggaactcaggagaccaagcaggggcaactgtacttcggatggtcaggccccaggatactgtggcgtatgaggacctgtctgaggactatactcagaagaaatggaaaggtctcgcactcagtcagagagccctgcactggaacatgatgctggaaaatgaccgtagcatggcttctttgggtaggaacatgatggagagttcagagctgactccgaagcaggaaatttttaaaggatcagagtcatctaatagcacatcagggggactctttggggtggttcctgggggaacagagactggagatgtttgtgaagataccttcaaagagttagaaggacaaccctcaaatgaagaagggagcagactagaaagtgatttcttggaaataatagatgaggataagaaaaaatccacaaaagacagatatgaggaatataaggaagttgaggaacatccacctctgtcttccagtcctgttgaacatgaaggagttttaaagggacagaaatcctatcgatgtgatgaatgtggcaaagctttttattggagttcgcacctcattggtcatcggagaatccacactggagagaaaccctatgagtgtaatgagtgtgggaagaccttcaggcaaacctcccagctcattgttcatctcagaacccacacaggggaaaagccctatgaatgcagtgagtgtggaaaggcctataggcacagctcccatctcattcaacaccagagactccataatggggagaaaccctataaatgtaatgaatgtgcaaaagcttttaatcagagctccaaactcttcgaccaccagagaacccatactggggagaaaccttatgaatgtaaggagtgtggggcggcctttagtcggagtaaaaatcttgttcgacatcagtttctgcacactggtaagaaaccttataagtgtaatgaatgtgggagagcattctgttccaatagaaatctcattgaccatcagagaacccacactggggagaagccttataaatgtaatgaatgtggcaaagccttcagtcggagtaaatgtcttattcgacatcagagcctccacactggggaaaagccatacaaatgtagtgaatgtgggaaagccttcaatcagatctctcaacttgttgaacatgagcgaattcatactggagaaaaaccatttaagtgtagtgagtgtggtaaggcattcggtctgagtaaatgtcttattcggcaccagaggcttcacacaagtgaaaagccctataaatgcaatgagtgtggaaaatccttcaatcaaaactcatacctcattatacaccagagaattcacactggtgagaaaccctatgaatgtaatgagtgtgggaaggtcttcagttataattctagtcttatggtacatcagagaacccatactggggaaaaaccctataaatgcaatagttgtgggaaagcctttagtgacagctcacagcttactgtgcaccagagagtccacactggagagccttatgaatgtattgagtgtgggaaagcctttagtcagcgttccacttttaatcaccaccagcgaactcatgctggagagaagccctcaggtctggctcggtcatcttcttaa

SEQ ID NO: 204052 - DNA, 1968 bp, Homo sapiens; identical to SEQ ID NO: 204050
  Payload ID: 20240
  Gene Name: zinc finger protein 852
  Uniprot ID: Q6ZMS4
  ENST ID: ENST00000628759
  CDS Start-End: 162-1793

SEQ ID NO: 204053 - DNA, 1755 bp, Homo sapiens; identical to SEQ ID NO: 204051
  Payload ID: 20240
  Gene Name: zinc finger protein 852
  ENST ID: ENST00000630640
  CDS Start-End: 166-1755

SEQ ID NO: 204054 - DNA, 3857 bp, Homo sapiens
  Payload ID: 20241
  Gene Name: zinc finger protein 853
  Uniprot ID: P0CG23
  ENST ID: ENST00000457543
  CDS Start-End: 559-2538
gcccggccagcggcccgcacggacgcactcccgggcgggcgggcgagcccagggggacccggccttgccgcggcgcccgccccgcccccgccccggcccccgcgcggcccggcccaggccgcccgcaggctccgggcacctgtagcccccgaggacccgcgtcgcctggccgccgccgaccccaggcggggccaccccgtggtgccgaccccgggcgccggcctggatcccgctgcccgcgatggtcccggggggccggccctgagccccgcgcgggattcggggccctgcctcccgccccagcccccgccggagagtctccaccaacttctgctcggccgctcctctcagccccttcccttggcccagggcgacctcggcagcccagagggcgtggaccctccggagtgcccagaaagcccccggggtggccctgcgcctcctggctctttctggatggaggcgcctccggaaggagccggctgcacgccgtggccttcacctcgcagcctctgctgaccacacctccctagcgcagaggctgcccgggagcaggaaatgctccaccagccgactcccgggaatcggggtctgaccgccaggatggaagtggggccagccaccgagaccttcgtgctggaacttcaatgtcttgaggatgggggcccagggcctgacaccctctcaggtggcagcggtgggagcgagagtcaggaggaggaagagcctcaggagaggaacagcagtccacagcggccagcagtctcggccccagtgggggccagtgaaatcgctgaggaaacccggccgggacaacgagagttgcaactgcagcagttagaacagcagcccgagccgcagcaacagccgcaacacgagcagctgcaacagccgcagccacacctagaactgcaacagcagccgcagcaagatgggcaacaacagctatctcaactacaacaggaaaaacaccaatccgtgcaccatcaggaactgaaaccagaactgcagctaatgcaccagcagcaacagttacagccacagcaagtgcaagagcaacagcggttgcagcagcagcaggagcagttacagacgcagcaagcacaagagcaacaggtattgcagcagcaggaacagctacagcagcaagtgcaagagcaacagctgttacagcaacagcaggaacagttacagcagcagcagctgctacaacagcaggaacagttacagcagcaacagtttcaacagcagcaggaacagttacagcagcagcagcagctactattgctgcagcagcagggacagttacagcagcaactgttgcagcagcagcaggcacagttacaacagcagctgctggaacagcagcaggcacagttacagcagcagctactgctgcagcagcaggaacagttacagcagcagcagcaacagcagctgttgcaacagcagcaggaacaattgcagcagcaacaactgcagcctcctcccctggagcccgaggaggaggaagaggtggagctggagctcatgccggtggacctggggtcagagcaggagctggagcagcagcggcaggagttggagcggcagcaggagctggaacggcagcaggagcagcggcagctgcagctcaaactgcaggaggagctgcagcagctggagcaacagctggagcagcagcagcagcagctggagcagcaggaggtgcagctggagctgaccccggtggagctaggcgcccagcagcaggaggtgcagctggagctgacccccgtgcagccggagctgcagctggaactggtgccagccgcagggggcggcggagcggcggtcccgggggctccggccgcggtcgtggtggctcccccgggctacgtggtggtgcaggagctcatggtgctgcccgccgtggcagcgccggccgtggtggccatcccgggcccggcaggcagcgcggcgttgacccctgcacggcagcggcggcggcggcgcgctcgggaccggccgaccatctgcggggagtgcggcaagggcttcagccgcagcacggacctggtgcgccaccaggccacgcacacgggtgagcggccacaccgctgcggcgagtgcggcaagggcttctcgcagcactcgaatctggtgacgcaccaacgcatccacacgggcgagaaaccctacgcctgctcctactgcgccaagcgcttcagcgagagctcggcgctcgtgcagcaccagcgcacgcacaccggggagcgaccctacgcctgcggggactgtggcaagcgcttcagcgtctcctccaacctgctgcgccaccggcgcacgcactcgggcgagcggccctacgtgtgcgaggactgtggcgagcgcttccgacacaaggtgcagatccgccgccacgagcgccagctgcacggcgcgggccgctccaggggcctcggcctgctgcgcgcctcgcggccggcggccctcggtggcccagcccgcgcggagcaggccgctacagccactgcgcccgcagacaaggcgctgtgagggccgtgatcggggctgcctggccgggaggggaccccccacccgcctccacctgaaaagctccttgacccgggttcatgggcgctggaggcgtcctggaatatccctggagtaaaaggcttccaccatcatcatcatcatcatcttccggattccctgagaaaataccaggttcacagatttcaccgccagaaaaatccatccgccaaaagagaagtggaccggggctgaaacagcacacgggacacgtttgtctgccctttgaggggtctgccaaaggttttccctccgggaaaactggacttactacgaacgaggaaaaacccccagtggcgagacgattaatgacactggccgaggactggacacccaccagggaatcaagacgtggtgagacacacgtggaaaatcttcgatcctggtgaaaatgatcgcaaggagaaattcggggaggaagcaaacttgtttgcactatgtagaaactgaccaaggcatcgaatcgtcctcagaggcatttgccttgaaaatactttccaagatgaaaattcatcagggtgggtataattctgatgaaaacgcctgtgttcatcaacacagggtcagagcgctcaccgggtcgatgtgcaaatccaagccaggaagtcctgctccgggtggaaggtaaaaccttccctccagggaaccaggggctccggcgggcatcggaggcagcttcttggcctctgctgctgtgtcccccagtccccccagcccgcattaatgtcctctggaataagagcctgtggctgaagcagagggccttctgggagagctctccaaggtctggaaggagggtcccccagaaggagctccggggtagccccactgtggcccccctggactccaccagcttcatgcttctcagatgctacccaggggccggcccggggagaccagggcagatttctcccgcaccaggctgtggaggtttggagggctgcctgagcagacactgtgccattgctggggctggggaaagaatatctgagacgacgtttgggagcaatgctctttaccacgttcaccaagtcgtctggggcaggggttgtgagctgcagcagttgctggtgccttgtgggaaggtggggcagggaggaggctgcccgccacctctgcccccagtcacttcctgcttgacctgactcttcacatgtggctgcttaattcctgcccctctccccccagctgcttctcctttactaacacacctgctacattttacacatgtgttggtaagtgagaaacagaaacgaaaaataaattaaaatgcagaaatacaa

SEQ ID NO: 204055 - DNA, 3098 bp, Homo sapiens
  Payload ID: 20242
  Gene Name: zinc finger protein 860
  Uniprot ID: A6NHJ4
  ENST ID: ENST00000360311
  CDS Start-End: 550-2448
gcacacgatgctgcgccagacgctcctacacagtaacctggaaattatcaccggcggagcaaagtcacagctcagggaggccctccgcgttgtctggcggaggaggggagtggcaggtgatcctcacagtcactctaggaaagccagctgccatgacataaggatactcaggccaccaatggatagcccaggcaggaggcatgaaggtgtgccagccactgtgtcagtcaccttataagcagattttctgagacctgctaacagccatgtgagtgaccttggaagtaggttgtcaccagtcaagccttgagatgactgcagccatgacccacagcttgactacaacccagagagacactgagccaggaacacccagctgaagtgcctccaaaccccgacccacagcgactgtgagataatcagtgtttgttgccttaagccacgaagtttgtgataatttgtttctcggaaacagataactaatacagagcaggaagcagatcgcctcagtgaaggtcacactgcagcactattgatttctaaagactcatgttacgtgaggaagcagctcagaagaggaaagaaaaggagccaggcatggctcttcctcagggacacttgacttttagggatgtggctatagaattctctttggaggagtggaaatgcctggaccctacgcagagggctttatacagggccatgatgttggagaactacaggaacctgcattctgtggatatctcttccaaatgcatgatgaagaagttctcatcaacagcgcaaggcaatacagaagtggacacagggacattagaaagacatgaaagtcatcacattggagatttttgcttccagaaaattgggaaagatattcatgactttgagtttcaatggcaagaagacaaaagaaatagccatgaagcaactatgacacaaatcaaaaagttgactggtagcaccgacagatatgatcgaaggcatcctggaaacaagcctatcaaagatcagcttggattaagctttcattcgcatcttcctgaactccacatatttcagaccaaagggaaagttggtaatcaagttgagaagtctatcaacgatgcttcctcagttctaacgtcccaaagaatttcttctaggcccaaaatccatatttctaataactatgaaaataatttcttccattcatcattactcacactaaaacaggaagtacacataagagaaaaatctttccaatgtaatgagagtggcaaagcctttaattgtagctcactcttaaggaaacatcagataatctatttaggagggaaacaatataaatgtgatgtatgtggcaaggtctttaatcagaagcgataccttgcatgccatcatagatgtcacactggtgagaaaccttacaagtgtaatgaatgtggcaaggtttttaatcaacaatcaaaccttgcaagtcatcatagacttcatactggagagaaaccttacaaatgtgaagaatgtgacaaagtttttagtcgcaaatcaaatcttgaaagacataggagaattcatactggagagaaaccatacaaatgtaaggtttgtgaaaaggctttcaggcgtgattcacacctcacacaacacactagaattcacactggagagaaaccttacaagtgtaatgagtgtggcaaagcctttagtgggcagtcaacacttattcaccatcaagcaatccatggtatagggaaactttataaatgtaatgattgtcacaaagtcttcagtaatgctacaaccattgcaaatcattggagaatccataatgaagagagatcttacaagtgtaataaatgtggcaaattttttagacgtcgttcatatctcgtagttcattggcgaactcatactggagagaaaccttacaagtgtaatgagtgtggcaagaccttccatcacaattcagcccttgtaattcataaggcaattcatactggagagaaaccttacaagtgtaatgagtgtggcaagaccttccgtcacaattcagcccttgtaattcataaggcaattcatactggagagaaaccttacaagtgtaatgaatgtggcaaggtttttaatcaacaagcaacccttgcacgtcatcatagacttcatactggagagaaaccttacaaatgtgaagaatgtgacacagttttcagtcgcaaatcacaccatgaaacacataagagaattcatactggagagaaaccttacaaatgtgatgattttgacgaggccttcagtcaagcttcatcttatgcaaaacaaaggagaattcatatgggagagaaacatcacaagtgtgatgattgtggcaaagcctttacttcacattcacatcgcattagacatcagagaatccataccggacagaaatcttacaaatgtcataagcgtggcaaggtcttcagttagaggtcactccttgcaaaacatcagaaaattcattcctgagataattgttccaaatgcaatgagtatagcaaaccatcaagcattaattgacattagagtcaattcagcattgacttgagtttcagttgacttgacattgagttcaagcattaattgacattaaagtgtttacgttaagaggattgggctgggcagggtggcttatacctgtaatcccagcactgtgggaggtcaagacggatagatcacttgaggtcaggagtttgagaccatcctggccaaaagacgtgagccacttttcctagcctgttttttgtttctgatagggatttttatgggtattgtgttgaatctaaatcacattgggttatataatcatttaacaatattaatctttccaatccatcaatatgggtcatatctctatttatataagtttttaatcattttgatcaatgtttgtagatttcaaggtacaaacttctcacctttttacgtttattcctaaatatttcttactgtaagttctctagcaaatggaagtgttttcttaattttcttttaacattgtttattgttaatgtatggaaatttaactaatttttggtactgatattgtattctgcaaatacactgtgtttattagcttc

SEQ ID NO: 204056 - DNA, 6950 bp, Homo sapiens
  Payload ID: 20243
  Gene Name: zinc finger protein 862
  Uniprot ID: O60290
  ENST ID: ENST00000223210
  CDS Start-End: 246-3755
ggctgggcagtgaccgtaaagctgttcgctcggtgcgacgcaagtctcagctcagcgcgcttatcctgggtccaccggcgctaccgccccccgacgtgagagagcgaagttcttgggccgcgctccctccctacctgggtgccctccccctccgggagcctgggtccccggggcggtcgcggcggctgcatcctcaggccaggccgcggggggagggggcggcacgggcctccgaaagcggggccatggagcccagagagtcggggaaggctcctgtgacgtttgatgacatcactgtgtacttactccaggaggaatgggtgctgctgagccagcaacagaaggagctctgtggttccaacaagctggtggcaccactgggaccaactgttgccaatcctgagctgttccgcaagttcggacgagggccagagccatggcttggcagcgtccagggccagaggagccttctggagcatcacccaggaaaaaaacagatgggctacatgggagaaatggaggtgcaaggtcccaccagggagagtggacagtccctcccgcctcagaagaaagcctacctttcccacctcagtacaggcagtggacacatcgagggagactgggccggaagaaacaggaaacttctgaagccccggtccatccagaagtcgtggtttgtgcagtttccgtggctgatcatgaatgaggagcagacggctctgttctgctctgcttgccgagaatacccctccatcagggacaaacggtcaagactaatagaaggttatacaggaccattcaaggtggagactctcaaataccacgcgaagagcaaggcccacatgttctgtgtcaatgccttggcagcgagggaccccatctgggcagcccggttccggagcatcagagacccacctggagatgttctggccagcccggagccgctcttcactgcagattgccccatattctaccccccagggcctctgggaggatttgatagcatggctgagctcctgccaagttcaagagctgaactagaggaccctgggggggatggagcaattcctgcaatgtatctagactgcatttcagatttgaggcaaaaagaaatcactgatggcatccacagctcctcagacattaatattttatataatgatgcagtagaatcctgcattcaggacccttctgcagaggggctgtcggaggaggttcctgtggtgtttgaggagctgccggtggtgttcgaggatgtggcagtgtatttcacccgggaggagtggggcatgctagacaagcggcagaaggagctgtacagagacgtgatgcggatgaactacgagctgttggcatccttgggacctgccgctgccaagccagacttgatctccaaactggagcggagggctgcaccctggatcaaggacccaaatgggccaaagtgggggaaaggtcgtcctccagggaacaagaagatggtggcagtgagagaggcagacacacaggcctcggctgcagactccgcgttgcttccaggctctcccgtggaggcccgtgcctcctgctgcagttccagcatttgtgaggaaggagatggacctaggagaatcaagaggacatacaggccccgttccattcagaggtcatggtttgggcagttcccatggttagtaattgaccccaaagagaccaaactcttctgctcagcctgcatagaaagacctaatctccatgataaatcatctcggttagtcagaggttacacggggccttttaaagtggagactttaaaataccatgaagtcagcaaagcgcacaggctctgtgtcaacacggttgaaatcaaggaagacacccctcacactgccctcgttccagagatctccagcgacctcatggccaacatggagcactttttcaatgccgcctactccattgcataccactcaaggcccctgaatgactttgagaagatcctgcagctcctccaaagcacggggaccgtgatattaggcaagtaccgcaatcgcacggcgtgcactcagttcatcaagtacatctcagagaccctgaagagggagatcctggaggacgtgcggaactcgccctgtgtgagcgtgctgctggacagctccaccgacgcctccgagcaggcctgcgtggggatttacatccgctacttcaagcagatggaggtgaaagagtcctacatcactctggcccctctctacagtgagacagcagatgggtacttcgagaccatcgtttctgccctggatgagctggacatccccttccggaagcctggctgggtggtggggctggggacggatggctcagccatgttgagctgcagaggaggccttgtggaaaagttccaggaggtcatcccgcagctgctgcctgtccactgcgtggcccaccggctgcacctggctgtggtggacgcctgcgggagcatcgatctggtgaagaagtgtgaccggcacatccgcaccgtcttcaagttttatcagtcctcaaacaagaggctgaacgagctgcaggaaggtgcggcgcctctggagcaggagatcatccgcctgaaggatctgaatgcggtccgctgggtggccagcaggaggcgcacgctgcacgcgctgctcgtgagctggcccgccctggccaggcacctccagagggtggcagaggctgggggccagattgggcaccgggccaaagggatgctgaagctcatgcgcggcttccactttgtcaagttctgccacttcctgttggacttcctgagcatctacaggcctctgtccgaggtgtgccagaaggagatcgtgctgattacagaggtgaacgccacgctgggccgcgcctacgtggcactggagagcctccgtcaccaggcagggcccaaagaggaagaattcaacgccagcttcaaggatgggcggctccacggcatctgcttggacaaactggaggtagcggaacagcggttccaggcggatagggagaggacagtcctgacggggattgagtacctccagcagaggtttgacgcagaccgacccccacagctgaagaacatggaggtgtttgacaccatggcctggccaagtgggattgaacttgccagttttgggaatgatgacattctcaacctggccaggtatttcgagtgctccctcccaacaggatacagtgaggaagctctgctggaggagtggctgggcctgaaaaccattgcccagcacctcccgttctccatgctctgcaaaaacgccctggcccagcactgccgcttccccctgctaagcaagctcatggccgtggtggtctgtgtgcccatctccacctcttgctgtgagcgggggttcaaggccatgaaccgaatcaggaccgatgagaggaccaagctctccaacgaggtgctcaacatgctcatgatgacagctgtgaacggcgtggccgtcacggagtacgacccccagcccgccatccagcactggtacctgacctcctcaggccggcgtttcagccatgtctacacctgtgcccaggtgccagcccgctcccctgcaagcgccaggctcaggaaggaggagatgggagccctctatgtggaggagcccaggacccagaagccacccatcctgccctccagggaagcagcggaggttctgaaggactgcatcatggagcctcccgagagactcctgtatccccacaccagccaggaggcccccgggatgtcctgagggacagggagtccttgggactgccttggagacgcctctgtgatcactgggacaggctctgcagattctaggctgccctaggatcttctgctggtggcgatggtctctaagcaccaggaagtgggcagtggcatcccagagcagcaggggtatcaggaggtgcatgacctgtttcctgaggccccactcagcacagccatgcctcacagcacacaaatgtgccagaaggttctatatctcaagttcatttttaaggtgctgcagaaaataaccccatcatgaaaggtttcagcccctgagttttggtggcaagaggagtgtcctggtaggggagactgttggacatccctggggaatgttccagggaggctgcccacagtctaagtgggaatgggaaagaccaccttgttagagggggaggttgcccctgctctagggacagctggcctggctgcaagagcccccagaggcattgttctgggacttcctaccctggctcccacagcagaagcagtgaggccgtggtctcgtgcggaactctacctcttcccagggcttcctttagggcgaaacaatcacaagccctttgcacagagcacccaagaaagttctcttcctgcagctccagatggtggagctgggctcttctggcagggggtctggtgcttcccggagagccgagccgcgtttaacccgtggcatgcccggcccggtttacccaggagaggatgggacgaagttggagttgggaggcttgggatgcagccccagctctgctgcaggcagtggtctgattaatcccttcctctttgtgcctcagtttccctctccatgaagtggcagcagagatccaagtgcctgctgactccccatctgccctaggattagtgaatgagagcctcgagctccctcaaagacctctggctgcagtgtggacttagctgccatctgccccatcctcgtccttagtgggacaggtaggaatttgtctccaaagtccttgttgtaggagttgctctctgaatgcaccatctgcacgacaggctagtccactcttctctgagctgccctggggactctgcaccaggatctccagggcccactgagacatccccgaatgggcgctcagtgacaagggctttgaacaacctcctccagggactttgggcctgctctagcttcagaaccacagaaccaccgccctagaggcacagaggggcttctggcactgctaggttcacaccctcctcgccccgatcttccttccacctaaagtgaagcacttttccttccaagggcagctccgtcttggcaggctcaggaggccgcttatcaggaggaggatgattttgtctaggttctgccttccttaaccatgggcaggaaatgaggcaagtcagcaggcagggtttctctgccctgcctgatacttgttttaaacaggcaggaagtgggcgccatccatcccagcttgcttgctgcctggctcaggcaggtcctgtgctgtgctgcaggcccctgtgggtgggccctttctccatagtctgccgcttcccattcccagggtagatgctggcatctgagcacctgagtacccttcctattcccagggtagaagctgctgtctgagtacccttcccattcccagggtagatgctggcatctgagcacctgagtacccttcctattcccagggtagaagctgctgtctgagtacccttcccattcccagggtagatgctggcgtccgagcccctccctggtaccgcaggtaccctggtaccccacctgccctttcatccccaccccagtacttagccttagcactgttgctttcgtgtcattttcagttctagtcaggaattcctttcttgctttctgcctttgacctgtggaaatgtctcccagccctgtgggtctggcggtcagagggaccccacaggcctgtggtgcgggagctctgggaggtgttactatctgcgtggctaaggcacacacaggcctccttctccccatcaccgtctccatgggcgttcaggaacttgcccaggtcaggcactgtggatgtgaactcgtggaaagggagggagaaaggcttttttaggtggggctatagcctctgccctacccacagggattccacatcaaggtgctgttccagcacacatgcttcctgcggcctcttcatccttgaagaatccctcagagcaggaggccatcctgtgagcagccgtgagtgggtctctgtgggagtagttctggagctgaggtggaagctaggggaagcaactcgccctctccacgtcagcatcagcgtgctccgaggacaccggccagtgccttccttaggtggtgggaaaggggggtccctgtgcagcggggccactgagaatgctgtttgtcataaaatttgcactacccgatttctcaaggggcacaggcctgctccgttcccctttgtcagccaatggccaagaaggaagaagatgactgccatcttattcctgaacttcctcattcaggacccccgtggaaacacagtgagcatccttatcagaggccctggcccaggctggcccctttgctttgtttggagaggctggctgagtttcagcccctagtgctggagacccccttgttggagaggcttcctgtttatgcctcacaagaagaaaaaccacagggctctgggaggggaagaagcatgcactcccgctttggctggagtcccagcgcttgtcgccaccctcctccttgcctgtagtcttgacagcatccgtatgtacgtgtcctggcatttcccctccctctccctgatgactgatacccaccgggtctgacattccaagtaaccagtatgtaactggtagtttgatcccaatagccatagcgactccaggtgggagtgagggagcccagccccctgtcctggaagataccttagagtatgtgaccgcgctccagacccttgcttctctctcctgcagaggatgagtttctagggtgctaagtacctatcagaacagtgtggaggggcgggtccctcatacaggtgtgtgcttagccaaatacagtaactgtgactggcccagggatgttctctcctctattttcaaagatgaaaggaggttttaaaaaccatgtttgattcctaaccttttgctacctgaataaagcagagtctatttcaacaca

SEQ ID NO: 204057 - DNA, 594 bp, Homo sapiens
  Payload ID: 20243
  Gene Name: zinc finger protein 862
  ENST ID: ENST00000460379
  CDS Start-End: 316-594
agtgaccgtaaagctgttcgctcggtgcgacgcaagtctcagctcagcgcgcttatcctgggtccaccggcgctaccgccccccgacgctcctgtgacgtttgatgacatcactgtgtacttactccaggaggaatgggtgctgctgagccagcaacagaaggagctctgtggttccaacaagctggtggcaccactgggaccaactgttgccaatcctgagctgttccgcaagttcggacgagggccagagccatggcttggcagcgtccagggccagaggagccttctggagcatcacccaggaaaaaaacagatgggctacatgggagaaatggaggtgcaaggtcccaccagggagagtggacagtccctcccgcctcagaagaaagcctacctttcccacctcagtacaggcagtggacacatcgagggagactgggccggaagaaacaggaaacttctgaagccccggtccatccagaagtcgtggtttgtgcagtttccgtggctgatcatgaatgaggagcagacggctctgttctgctctgcttgccgagaatacccctccatcagggacaaacggtcaagacta

SEQ ID NO: 204058 - DNA, 4005 bp, Homo sapiens
  Payload ID: 20244
  Gene Name: zinc finger protein 865
  Uniprot ID: P0CJ78
  ENST ID: ENST00000568956
  CDS Start-End: 355-3534
aagaggcgggcattcaaagcgcaggcgcacctggctcagttcgcccaccggaatcggcccgggctttcactgctcgcgtccccgagtcagtgcgcaagcgcatttcccccctcctggtccccgccaccgcctcctctttccgatcctccacgccggcgcctcgggaacgggcgcgacttccgcttccgggcgggcgggcaggcgggcggtgcggggctgccggggaggggggagggggcggcacttccggtcgggccctcgggtctccccggagcggcggcgcctcctccgcctcctcggcctcctcccggcggagaccccggcgccgggtctcccgtctcccacccgccggagatggaggcgaacccagcgggcagcggcgccgggggtggcgggagcagcggcatcgggggcgaggacggggtgcacttccagagctaccccttcgacttcctggaattcctcaaccaccagcgcttcgagcccatggaactgtatggggaacacgccaaggcggtggcggccctgccctgcgcccccggccccccgccgcagcccccgccgcagccccctcccccgcagtatgactacccgccccagtccaccttcaagcccaaggcggaggtgccctcctcgtcctcgtcctcgtcctcctcctcctcctcttcgtcctcctcgtcgtcatcttcgtcctcttcctcttcccaagccaagaagcccgatccgcccctgccgcccgccttcggggcgccccctcctcccctctttgacgctgctttccccactccgcagtggggcatcgtggacctctcggggcaccagcacttgtttgggaacctgaagcgaggagggcccgcgtccgggccgggggtgacgcctgggctgggcgctcccgcgggggccccagggccgcttcctgccccctcgcagaccccgccaggaccccccgcggcggcggcctgcgaccccaccaaggacgacaagggctacttccggagactgaagtacctgatggagcggcgcttcccctgcggcgtgtgccagaagtccttcaagcagtcctcgcacctggtccagcacatgctggtgcactcgggggagaggccctacgaatgcggcgtctgcggccgcacctacaaccacgtgtccagcctcatccgccaccgccgctgccacaaggacgtgccaccggccgcggggggcccgccccagcccggcccccacctcccgccgctgggcctcccagcacccgctgccagcgccgccaccgccgccgccccctccacggtgtcctcgggccctccagccacgcccgtggcgcctgccccctccgcagacgggagcgccgcccctgctggtgttggggtgccccctcctgccaccgggggtggcgatggcccgttcgcctgcccactctgctggaaggttttcaagaagcccagtcacctccaccagcaccagatcatccacacgggcgagaagcccttctcctgctccgtgtgcagcaaaagcttcaaccgcagggagagtctgaagcgccacgtgaagacgcactcggccgacctcctgcgcctgccctgcggcatctgcgggaaggccttccgcgacgcctcctacctcctcaagcaccaggcggcccacgcgggggcgggcgccggggggcctcggcccgtgtacccctgcgacctgtgcggcaagtcctactcggctccgcagagcctgctccgccacaaggccgcccacgccccgcccgctgccgctgcggaggcgcccaaggacggggcggcctcggccccgcagcccccgcccaccttccccccgggcccgtacctcctgccccccgaccctcccaccacagacagcgagaaggcggcggcggccgcggcggcggtggtgtacggcgctgtgcccgtcccgctcctgggcgcccacccgctgctgctcggcggcgcggggaccagcggggcgggaggctcgggcgccagcgtcccaggaaagacgttctgctgcggcatctgcgggcgcggcttcgggcgccgcgagaccctgaagcgccatgagcgcatccacacgggcgagaagccccaccagtgccccgtgtgtgggaagcgcttccgcgaatccttccacttgagcaagcatcacgtggtgcacacgcgcgagcggccctacaagtgcgagctctgcggcaaggtcttcggctacccgcagagcctcacccgccaccgccaggtgcaccggctccagctgccctgcgccctggccggggcagccggcctcccctccacccaaggcacaccgggggcctgtgggcccggggcctcgggcacgtctgcagggcccaccgatgggctgagctacgcctgctcggactgcggcgagcacttcccggatctctttcacgtcatgagtcacaaggaggtccacatggcagagaagccatacggctgcgacgcctgcggcaagaccttcggcttcatcgagaacctcatgtggcacaagctggtccaccaggccgcccccgagcgcctgctcccgcccgcacccggcggcctgcagcccccggacggctccagcggcacggatgcggccagcgtgctggacaacgggctggcgggggaggtgggggcggccgtggcggcactggcaggggtgtctgggggtgaggacgcaggcggggcggcggtggcaggtgctggcgggggtgccagttccggccccgagcgcttcagctgtgccacgtgcggccagagtttcaagcacttcctgggcctcgtgactcacaagtacgtgcacctggtgcgacggaccctgggctgcggcctctgcggccagagcttcgcgggcgcctacgacttgctcctacaccgccgcagccatcggcagaagcggggtttccgctgcccggtgtgcgggaagcgcttctgggaggcggccctgctgatgcgccaccagcgctgccacacggaacagcggccgtaccgatgtggcgtgtgcggccgaggcttcctgcgctcctggtacctgcggcagcaccgcgtggtgcacactggcgagcgggccttcaagtgcggcgtgtgcgccaagcgcttcgcgcagtcgtccagcctggcagagcaccggcggctgcacgctgtggcccggccccagcgctgcagcgcctgtggcaagaccttccgctaccgctccaacctgctggagcaccagcggctgcacctgggcgagcgcgcctaccgctgtgagcactgcggcaagggcttcttctacctgagctccgtgctgcgccaccagcgcgcccatgagccgccgcggcccgagctccgctgccccgcctgcctcaaggccttcaaggatcccggctacttccgtaagcacctggctgcccaccagggcggccggcccttccgctgctcctcctgcggcgagggcttcgccaacacctacggcctcaagaaacaccgcctggcgcacaaggccgagaacctcggggggcctggagcaggggcgggcaccttggccgggaaggatgcctgaccgaggggttcccatcccactcccatcaaaagcccccttctggactcccacctcccaggactgatcagactcttcccccctcctcgctgttgccccatccttcagaacttcacacggactggcgaccttcagggcgcacgcccgacaggctcaagactgaatcactcccatcctcgacctctctgccctcccctcatcccatcagacactgaaccctatcctccgtccaaccctcgtttgtgacccgcatcagcccccgccccagcagcactctgcccccagtaagttttggcggagatgggtctgaaccgcccctccccctcctttggaatctggctggacagtggagtatgagcagagttgggagggcacaagggagtgctgggtgctttttggggtgggggggtggggggcggggtggcagacgcggcttgtacagagcggagaataataaatcttaccatgagggcc

SEQ ID NO: 204059 - DNA, 99 bp, Homo sapiens
  Payload ID: 20244
  Gene Name: zinc finger protein 865
  ENST ID: ENST00000630143
  CDS Start-End: 1-99
ccagttccggccccgagcgcttcagctgtgccacgtgcggccagacgctgcagcgcctgtggcaagaccttccgctaccgctccaacctgctggagcac

SEQ ID NO: 204060 - DNA, 1734 bp, Homo sapiens
  Payload ID: 20245
  Gene Name: zinc finger protein 878
  Uniprot ID: C9JN71
  ENST ID: ENST00000547628
  CDS Start-End: 139-1734
gttaaggtctggggctttcttgctccgagagggaccagttacttccgccgtagctgctgttgctctgtcgactgcgctgtgacctgcactgttcacgggacctttagagaggacgccagaatacctggaagccaggaaatggattcggtggcctttgaggatgtggctgtgaacttcacccaggaggagtgggctttgctggatccttcccagaaaaatctctacagggaagtgatgcaggaaaccttgaggaacctgacctccataggaaaaaaatggaacaaccagtacattgaagatgagcaccaaaatcctaggagaaacctaagaagacttataggggagagactctctgaaagtaaagaaagtcatcagcatggagaagttttgacacaggttccagatgacacactgaagaagaaaactcctggagtacaatcatatgaaagcagtgtgtgtggagaaatcggcataggtctttcatcccttaataggcacctcagagcctttagttattccagtagccttgcaatacatggaagaactcacactggggaaaagccttatgaatgtaaggaatgtgggaaagcattcaggtttcccagttctgttcgtagacatgaaagaatccactctgcaaaaaaaccctatgaatgtaagcagtgtgggaaagcattcagttttcccagttctgttcgtagacatgaaagaatccactctgcaaaaaaaccctatgaatgtaagcagtgtgggaaagcattatcttatcttgtaagctttcagacacacatgagaatgcacactggagagagacctcataaatgtaacatatgtgggaaagcctttttttctcccagttcgttaaaaagacacgagaaaagtcacactggagagaaacgctataaatgcaagcaatgtgataaagccttcaattgtcccagttcctttcaatatcatgaaaggactcacagtggagagaaaccctatgagtgtacacaatgtaggaaagccttcagatctgtcaagtacctgcgagtacatgaaagaaaacacactggagagaaaccctatgagtgtaagctatgtggtaagggatttatttcttccacttcctttcgctatcatgaaaagactcacactggagagaaaccttatgaatgtaaaaaatgtgtgaaagccttcagttttgtcaaggatcttcgaatacatgaaaggacacacactggagagaaaccctttgaatgtaaacaatgtgggaaaaccttcacttcttccaattcctttcactatcatgaaaggactcacactggagagaaaccctatgagtgtaagcaatgtgggaaagccttcagatctgcctcagtccttcaaaagcacatacgaactcacacaggagagaaaccctatggatgtaagcaatgtggtaaagtctttagagttgcctcacaacttaaaatgcatgaaaggactcacacaggagagaaaccctatgagtgtaagcaatgtggaaaagccttcatttcttctaattctattcgctatcataaaaggactcacactggagagaaaccctataaatgtaaacagtgtgggaaagccttcatttcttccaactcttttctctaccatgaaaggattcatactggagagaaaccctatgagtgtaagcaatgtggtaaagcctttagatctgcctcaatccttcaaaagcatgtaaggactcacgctggctag

SEQ ID NO: 204061 - DNA, 3304 bp, Homo sapiens
  Payload ID: 20246
  Gene Name: zinc finger protein 879
  Uniprot ID: B4DU55
  ENST ID: ENST00000444149
  CDS Start-End: 189-1880
acaaacgctgcggttcagccagggaaacccgtcggctctccggcgcgcaggcgcagttgcgcccggcagcgacgggaaacgtctctgaattaggtgttccgctcgcctcttgtgcggtgtggagctgcgcgccccccgccgaggcgggcccaggtgccttctccaagagaggcagcagggagggagaaatggcaaggaggttgctgccagcccatgtacaggagtccgtgacgttcagggatgtggccgtgttcttcagccaggacgagtggttgcacctggactctgcccagagagccttgtaccgggaggtgatgctggagaactacagcatcctggtctcactggggattctcttttccaagccaaaggtcatctcccagttagagcaaggagaagacccctggatggtggagagtggagttccccaaggcgcacatctcggatgggaaagcttgtttggaaccatagtttctaaagaagaaaatcaggaagtcatgaaaaaactcataattgatggcacatttgacttcaagttggagaagacctacataaatgaagataagttagagaagcaacaaggcaaaaagaacagacttttcagtaaagtgttagttaccatcaaaaaagtctacatgaaggagaggagctttaaaggtgttgaatttgggaaaaatcttggtctaaaatcatcgcttattagaaaaccgagaatagtttccagaggaaggagaccccgttcacagcagtattcagttctctttaaacaactgggggtcaacacagtgcgtaaatgttataaatgtaatatctgtgggaaaatcttcctccacagttcctccctgagtaaacaccagagaatccacactggagagaagctctataaatgtaaggaatgtaggaaagccttcagccaaagctcatccctaactcagcacttgagggttcatacaggagagaaaccttatatatgtagtgaatgtggaaaagccttcagtttcaccacatctcttattggacaccagagaatgcatactggagagagaccttataaatgcaaggaatgtggaaaaacatttaaaggtagttcatctcttaataatcaccagcgaattcacacaggagagaagccctataagtgtaatgaatgtgggagggccttcagtcagtgctcatctctcattcagcaccacagaattcatactggggagaaaccgtatgaatgtactcagtgtgggaaagccttcacttcaatatcgcggctaagtaggcaccatcgaattcatactggagagaaaccctttcattgtaacgagtgtggaaaagtattcagctatcactcagcccttatcatacatcagagaattcacactggtgagaaaccatatgcatgcaaagaatgtgggaaagccttcagccaaagctcagctctcatacaacatcaaagaattcacactggagaaaaaccctacaaatgtaatgaatgtgggaaagccttctcttggatttcacggcttaatatacatcacagaattcacactggagagaaaccatataattgtaaggaatgtggaaaagccttcagttcccactcaggcgttaatactcatcgaaaaattcatactggagaaaaaccttataaatgtaatgactgtgagaaagccttcaaccaaagctcagctctaattcagcaccagagaattcatactggagagaaaccatataattgtaaagtgtgtgggaaagccttcagacagagttcatcccttatgacacacatgagaattcatacaggggaaaaaccttataaatgtaaagaatgtgggaaggcttttagtcagagctcatctcttactaatcatcaaaggactcataattgagaaaaactgtataaatgcatgtaggaactgaagttatattccatactgagtatcaaaaaattcattgtggggagaaagtgatgaagagtagttaatcataggtaaaacttcagcattagacctcatcacacatcagagacttcatgatgcagggtaaccttgggaatgctagaaaagcttctataaaatgtttattcatatgttcttaagttattaccatgaaatggagaatttttaagattgcagggttagtatttgattgtctagtgatgtacgataacagccaccagctttcctgagcatcactgggaagcctgctgtttatgtacaagtacagccataaaatccagacacagataaatctaggaatctattttttgaaactattatgcaagccagtggtactagaaagaatgttttagaaaagaaatatgtacaggtgacccatagctacctcactgtcactaaaatgttttttaataatcttaaagcagattctgcacttcatggtaaagactttgaattgtttctctgctttctaagccattcacctgagaagaaaatcactccataaactatgcagacgtactgtctttgcgttttcttcctgactacttgttccaaactctgagtcagatctaaagtcactttaagtcacagaacgcatggtatttcacttgtttttctcattaaaagtgattacctttgctgtattaaattgataagtaaaggtcattcagacaaccactgcttttgcaatttactgaaaaatgttataaattatctcagaatgtagccaatagcaagcacagctcagctcccagggtctgcctgcttctgtgagctttctggttaccagccaccagaaggcccaggaacaatgtagaactcaggtcatcatccttggaggtaaaatgaaccagatgattttcacccttacttccactttttcgccttcatcagacaaggttcactttctccccacactctaaaggtcactgggcaaatatttaggctctgagttcagatactctttcttccagcaaatggacttacactcttcaacaagtgatttagctcatttcagcatttctaaaatgtgaatcataagattagcaagctaaaaacagttatctcacaagtcaaaattgttgggctttacagaggctaacatctagtttagccaagtttatcaggagggggcaagcacttaagggctgaaacgacccatttcataaagtgctaagtttttctgccaaggaactttaaaaaatagaaaactggctgggtgcagtggctcacgcctgtaatcccggcactttgggaggccaagacgggcagatcatgaggtcaggagatcgagaccatcctggctaacatggtgaaaccacgtctccactaaaaatacaaaaaaaaaaaaaaaa

SEQ ID NO: 204062 - DNA, 553 bp, Homo sapiens
  Payload ID: 20246
  Gene Name: zinc finger protein 879
  ENST ID: ENST00000522442
  CDS Start-End: 150-553
gcagttgcgcccggcagcgacgggaaacgtctctgaattaggtgttccgctcgcctcttgtgcggtgtggagctgcgcgccccccgccgaggcgggcccaggtacaggctgccggtgccttctccaagagaggcagcagggagggagaaatggcaaggaggttgctgccagcccatgtacaggagtccgtgacgttcagggatgtggccgtgttcttcagccaggacgagtggttgcacctggactctgcccagagagccttgtaccgggaggtgatgctggagaactacagcatcctggtctcactggggattctcttttccaagccaaaggtcatctcccagttagagcaaggagaagacccctggatggtggagagtggagttccccaaggcgcacatctcggatgggaaagcttgtttggaaccatagtttctaaagaagaaaatcaggaagtcatgaaaaaactcataattgatggcacatttgacttcaagttggagaagacctacataaatgaagataagttagagaagcaacaaggcaaaaagaa

SEQ ID NO: 204063 - DNA, 543 bp, Homo sapiens
  Payload ID: 20246
  Gene Name: zinc finger protein 879
  ENST ID: ENST00000519896
  CDS Start-End: 137-460
gcagttgcgcccggcagcgacgggaaacgtctctgaattaggtgttccgctcgcctcttgtgcggtgtggagctgcgcgccccccgccgaggcgggcccaggtgccttctccaagagaggcagcagggagggagaaatggcaaggaggttgctgccagcccatgtacagtcctggatgaacaggagtgggtttgccattccaggagtccgtgacgttcagggatgtggccgtgttcttcagccaggacgagtggttgcacctggactctgcccagagagccttgtaccgggaggtgatgctggagaactacagcatcctggtctcactggggattctcttttccaagccaaaggtcatctcccagttagagcaaggagaagacccctggatggtggagagtggagttccccaaggcgcacatctcggatgggaaagcttgtttggaaccatagtttctaaagaagaaaatcaggaagtcatgaaaaaactcataattgatggcacatttgacttcaagttggagaagacctacataaatgaag

SEQ ID NO: 204064 - DNA, 690 bp, Homo sapiens
  Payload ID: 20246
  Gene Name: zinc finger protein 879
  ENST ID: ENST00000521285
  CDS Start-End: 568-690
ttttcttgcgcccttgtttttttggggccagggagaatgggtaacgctacctttaagcagctttgataactgtttttgataaaggaagtaaatcttacaagaggaagaaaagaggactaatttttggttggctgttcctaaaaaagagcatcagttcttcaactgctgtttttcgtattgaacaacatccaagtgcagatgtgtggaatattgtgtcatttcctattactttatctgaatgagccttgcctgattctgcccttgaccctgttaaggcacggcagatggtcttcatcccttcgctcctttcgtctttatcgtaaagcactggcagaaaggtagcaggcccggtgactctgaacctgcttcccacactggtttaagtggccggacttagggcccctctggcctgggcagttccaggctccttctctgcaggtgctcagcttatggcttctaacctggtctggcctaatgagggtgggcatgcaggctggatgaaaagacctcacagcttttttctccattccaggtgccttctccaagagaggcagcagggagggagaaatggcaaggaggttgctgccagcccatgtacaggagtccgtgacgttcagggatgtggccgtgttcttcagccaggacgagtggttgcacctggactctgcccagagagccttgtaccgggag

SEQ ID NO: 204065 - DNA, 496 bp, Homo sapiens
  Payload ID: 20247
  Gene Name: zinc finger protein 880
  Uniprot ID: Q6PDB4
  ENST ID: ENST00000344085
  CDS Start-End: 28-324
ggaagcagattacgtggagtgacggtcatgctgcggcgtggacacttggcattcagggacgtggccatagaattccctcaggaggagtggaaatgtctggaccctgctcagaggactttatacagggaagtgatggtggagaactacaggaacctggtctttctgggaatctgtcttcctgacctgagtgttatctccatgttggagcaaaggagagatccccggaatctgcagagtgaagtgaaaatagcaaacaatccagggtcttgctctgtcacccaggctgtcgtagagtggcaatcatcagtggcaatcgtggcttaactcatagcctcaaactcctggtctcaagtgatcctccttcctctgcttccgaaagtggtgggattacaagcatgagccactgtaccctgcaaaaccacactttgagtttctgtttgggagctctctgcaagtgagagaattctttgggaaaataaaagtttaaatcctgtga

SEQ ID NO: 204066 - DNA, 2230 bp, Homo sapiens
  Payload ID: 20247
  Gene Name: zinc finger protein 880
  Uniprot ID: Q6PDB4
  ENST ID: ENST00000422689
  CDS Start-End: 16-1749
cgtggagtgacggtcatgctgcggcgtggacacttggcattcagggacgtggccatagaattccctcaggaggagtggaaatgtctggaccctgctcagaggactttatacagggaagtgatggtggagaactacaggaacctggtctttctgggaatctgtcttcctgacctgagtgttatctccatgttggagcaaaggagagatccccggaatctgcagagtgaagtgaaaatagcaaacaatccaggtggcagggagtgcatcaaaggtgtgaacgcagagagcagctctaaattgggaagcaatgccggaaacaagtctcttaaaaatcaacttggattaacctttcagttacatctgagtgaactgcagctatttcaagctgaaaggaatatttctggatgtaaacatgtcgaaaaacctatcaacaattccttagtttcaccacttcaaaaaatttattctagtgtcaaatcccacattttaaataaatacagaaatgattttgatgattctccatttctcccacaagaacaaaaagcacaaataagggaaaaaccgtgtgaatgtaatgagcatggcaaagcctttagagtgtcttcaagacttgctaacaatcaagtaatccacactgcagataacccttacaaatgtaatgaatgtgacaaggtcttcagtaacagttcaaaccttgtacaacatcaaagaattcatactggagagaagccttacaagtgtcatgaatgtggcaagctcttcaatcgaatttcactccttgcacgacatcagagaatacatactggagagaaaccttacaaatgtcatgagtgtggcaaagtcttcactcaaaattctcaccttgcaaatcatcacagaatccacactggagagaaaccttacaaatgtaatgagtgtggcaaggtcttcaacagaaatgcacaccttgcacgacatcagaaaattcatagtggagagaaaccttacaaatgtaaggaatgtggcaaagcattttcagggggttcaggccttactgctcatcttgtaattcacactggagagaaactttacaaatgtaataaatgtggcaaggtcttcaatcgaaatgcacaccttaccagacatcaaagaatccatactggagagaaaccttatgaatgtaaagaatgtggcaaggtcttcaggcacaagttttgtctaaccaatcatcatagaatgcacacgggagagcaaccttacaaatgtaatgaatgtggcaaagcatttagagactgttcaggccttactgcccatctactaattcacactggagagaaaccttacaaatgtaaagaatgtgccaaggtcttcaggcatagattatccctaagcaatcatcagagatttcatactggagagaaaccttacagatgtgatgaatgtggcaaggacttcactcgaaattcaaaccttgcaaatcatcacagaatccatactggagagaaaccttacaaatgcagtgaatgtcacaaagtctttagtcacaattcacaccttgcacgacataggcaaattcatactggagagaagtcttacaaatgcaatgaatgtggcaaggtcttcagccacaagttatacctaaaaaaacatgagagaattcatactggggagaaaccgtacagatgtcatgaatgtggtaaggacttcactcgaaattcaaacctggcaaatcatcacagaatccatactggagagaaaccgtacagatgaaatgtgtgtggtaagatctttagtaataattcacaccttgcacagcatgagataattcattcatgagagagttcttacaaactgagtatggcaaactcttcatgctaagttctagcattaatcaacatcagagattccatactaaagagaaatcatagcaatgtatgtgaatcaggtctcttgaggcctgccaaatgactagatatcaaaacatacatcttggatgaaaccatacagatggattatgtatgctgaggctattattcaaggaccattactatggaacatgataagatttacacaagcgataattcagtctctagttctccaatatttatgatactgcatgctgcagaaaagtcacagctccaaatacgttgaatctcatgacgcgatgcatgtcgaaggtccaagggcatgtggaaatggtcagttatattcaggcaattaaaaaacctaattatatggggttttttgaaaa

SEQ ID NO: 204067 - DNA, 558 bp, Homo sapiens
  Payload ID: 20247
  Gene Name: zinc finger protein 880
  ENST ID: ENST00000424032
  CDS Start-End: 50-427
gcgcgcagtttcctggagacccggaagcagattacgtggagtgacggtcatgctgcggcgtggacacttggcattcagggacgtggccatagaattccctcaggaggagtggaaatgtctggaccctgctcagaggactttatacagggaagtgatggtggagaactacaggaacctggtctttctgggaatctgtcttcctgacctgagtgttatctccatgttggagcaaaggagagatccccggaatctgcagagtgaagtgaaaatagcaaacaatccaggtggcagggagtgcatcaaaggtgtgaacgcagagtctcgctctgtcacccaggctggagtgcaatgccgcgatctcggctcactgcaaccttcgcttcctggattcaagcaattcttctgcatcggcctccccaagtgctaggattacaggcagagcagctctaaattgggaagcaatgccggaaacaagtctcttaaaaatcaacttggattaacctttcagttacatctgagtgaactgcagctatttcaagctgaaaggaatatttctgg

SEQ ID NO: 204068 - DNA, 953 bp, Homo sapiens
  Payload ID: 20247
  Gene Name: zinc finger protein 880
  ENST ID: ENST00000600321
  CDS Start-End: 31-408
cccggaagcagattacgtggagtgacggtcatgctgcggcgtggacacttggcattcagggacgtggccatagaattccctcaggaggagtggaaatgtctggaccctgctcagaggactttatacagggaagtgatggtggagaactacaggaacctggtctttctgggaatctgtcttcctgacctgagtgttatctccatgttggagcaaaggagagatccccggaatctgcagagtgaagtgaaaatagcaaacaatccaggtggcagggagtgcatcaaaggtgtgaacgcagagtctcgctctgtcacccaggctggagtgcaatgccgcgatctcggctcactgcaaccttcgcttcctggattcaagcaattcttctgcatcggcctccccaagtgctaggattacaggcgtgagcctccgcgcctggcctcatttttaatttttttagagacagggtttcactctgctgcccaggctagatggcagtggtgcagttttaggtcgctgcatccttgactttgagggcagaactgctcttcccagctcaggtgatccacccgcctcagcctcccaaagttctgggattacaggcatgagtcactgtacccggctctgatatttttaataatgcttcaatgaacatgggtttctaaatatctctttaagctgctatcttagttcttttgtatatatacccagatgaggaattgttgcctatactggtaatttgattttggattatttgagaaaatgtcatacttatttttttttttattattattttcgagacagggtttcactctgtcacccaggatagagtgtggtatacaatctcagttcactgcaacctccgtctcccaggttcaagtgattcttgtacctcagcctcccaagtagctgggattacaggcgtgtgcctccatacccatctaatttttgtactt

SEQ ID NO: 204069 - DNA, 491 bp, Homo sapiens
  Payload ID: 20247
  Gene Name: zinc finger protein 880
  ENST ID: ENST00000597976
  CDS Start-End: 21-374
gattacgtggagtgacggtcatgctgcggcgtggacacttggcattcagggacgtggccatagaattccctcaggaggagtggaaatgtctggaccctgctcagaggactttatacagggaagtgatggtggagaactacaggaacctggtctttctgggaatctgtcttcctgacctgagtgttatctccatgttggagcaaaggagagatccccggaatctgcagagtgaagtgaaaatagcaaacaatccaggtggcagggagtgcatcaaaggtgtgaacgcaggtaagagcttggatggccagagtggaggccccataattttttttttttttaaacagggtcttgctctgtcacccaggctgtcgtagagtggcaatcatcagtggcaatcgtggcttaactcatagcctcaaactcctggtctcaagtgatcctccttcctctgcttccgaaagtggtgggattacaagcatgagccactgtac

SEQ ID NO: 204070 - DNA, 15455 bp, Homo sapiens
  Payload ID: 20248
  Gene Name: zinc finger protein 891
  Uniprot ID: A8MT65
  ENST ID: ENST00000537226
  CDS Start-End: 354-1988
gttcaggccacgctccgcccccagcccgtcagccgcgcgccccgggaccctagagccggcgattcgtcgccggcgccgcagccgccactctgtgccggaccctgcgggccttcggcccagagcgcgtccgtgacgcacagaccaggcccctctgcggggcggcgcaggagctcctgggaaacgtagttcggcctcgcgtccccctcgggcgggaccgcggacgcctggaggcaggcactgaggacggggagaacttcgggtgaaatgcatccctcctgtgactggattggagacacaagaacagaaacatcctgatctctctactctactgtgcaggcttatgtactcataaaatggcagttatggacctatcctccccatgggctttaactaaacaggactctgcctgtttccatctgagaaatgctgaagaggaaaggatgattgctgtatttctgacaacctggttacaggaaccaatgactttcaaagatgtagctgtggagttcactcaggaggagtggatgatgctggattctgctcaaagaagtctgtacagagatgtgatgttggaaaactatagaaatctcacctccgtggaatatcagttgtacaggcttactgtgatctccccattggatcaagaagagataaggaatatgaaaaagagaattccccaagccatctgtccagaccagaagattcaacctaaaaccaaagaatcaactgtgcagaaaattttgtgggaggaaccatccaatgcagtgaaaatgataaaactcacaatgcataattggtcctccacattaagagaagactgggaatgccataagatcagaaaacagcataagattccagggggacattggaggcaaatgatatatgccccaaagaaaacagtacctcaggagctattccgtgactatcatgaattagaggaaaactctaaacttggatcaaaacttattttttcacagagcattttcaccagtaaacattgccaaaaatgttactcagagattggatgtttgaaacacaattcaatcataaacaattatgtgaaaaactctataagtgagaagctctatgaaagtcatgaatgtgatacaactctatggcattttcagagaaatcaaacagtacaaaaagagtacacatattctaaacatggaatgcacttcacacataatatgtttcctgtacctaacaatttgcatatggcacagaatgcctgtgaatgtaataaagatgaaacgctgtgtcatcaatcatcccttaagaaacaaggacaaactcatactgaaaagaaacatgaatgcaatcaatgtggaaaagccttcaaaaggatttctaatcttactttatacaagaaaagtcacatgggtgagaaacaatatgaatgtaaagaatgtggtaaagtgttcaatgattcctcaaccttaaggagacatgtaagaactcacactggagagaaaccctatgaatgtaatcaatgtggaaaagctttcagtcaaaaaacatcccttaaggctcacatgagaactcacactggagagaaaccttatgaatgtaatcagtgtggaaaatcctttggcacaagctcttaccttatagtgcacaagagaatacacactggagaaaaactctatgaatgcagtgagtgtggaaaagccttcaacacgagctctcaccttaaagttcataagaaaattcataccggagagaatgtttatgaatgcagtgactgtgggaaagttttcagtggggtctcatcccttagaatgcatataagaactcacactggagagaaaccctatgaatgtaaggaatgtaggaaagccttcagtgtttcctcttcccttaggaggcatgtgagaattcacactggagagaaaccctatgaatgtattcaatgtggaaaagccttcagtcagagctcttcacttattatacacaagagaattcatactgagagagaaaccctgtaagtgttatgaatgtggaattgctgttttcattgtcttaaggtggattccaagctccttgtctcagtctttgttctctaaaagaacgatttaaggttacaaatggctctttttttaatataacattttctgtaaatactaattatgactttttttgatccatggctgtttagaattaggtatttttaatatgtgaggtaggtatattttcagttatctttttattgttggtttctaggttaattccattgtgttcagagaatctggactatattttactgctttgttggtgtttttataaaagttgttttctggcccagtgagactggtattgctagcagccaaccaaacatttgagctcatctttccttactaatgaattccatcttagccaagaacaataaggtctctggttatagaacgcttctttgacttcttgtagctaagggtagccatatcattcattcttgctgattcaaaaatagacatatcactgggatcagaactatctatcttgtcctctactttttgcacttcatctttgtccctatgaattggccattcctgaagctgctgaaagagctatcttgtgatcatgaaaatgacagctgtagccaagggatgaagtagaagaaagagatccctgttcctcaaagaaatctttaaatagttgtaccagccctgcactacttgtatctggatatgttcctacatgagaaaaataaggttttttgtttgttttttgagatggagtctcggtatgttgcccaggctggagtgcagtggcacaatctcagctcactgcaacctccacctcccaggttcaggtgattctcctgcctcagcctcctgagtagctgggattacaggcaccaccgccatgcctggctaattttagtatttttaatagagacggggtttcaccatgttggccaggttggtctcaaactcctgacctcaggtgatccacccacctaggcgtcccaaagtgttggcattacaggcgtgagccactgtgcccggccaagaaaaatatgttaattgattttttctttttttttttcaatttttcagacagagtctctgtctctcaggctagaatgcagtggtgtggtcatggctcattgcaacctcgacctcctgggctcaggtgatccaccacagtctcctcagtagttgggatcacaaatgcatgccaccatgcctggctaattttaaaaatatatattttgtagagacaggctcttcctacattgctcagactggtctgaaactcctgggctcaagcagtcctcctgcctttgcctcccaaagtgctaggattccaggcatgagttaccatgcctggctcttactgattttttttaaagcactacataaatacagtcaacgcagtcaccatattgtagaaaaacagaagtatatacagttaaatgttttatgttggatgtacacatttgaagaggaacatagaaaaaaagtatggaaaaggaatgttgaccgagcttttatgcttaagcagcagatgaagatagaaccaagatcactgaaagcaagtgtttagaacagcaaaaagagtatcccaacatttcagcattggaactacagaaagttttcagacagaggggaagttaccaattttaaatgctaagtaaagcatgagattttgctgcttgatcttgcagatactgaccagattagttctaacaaaatatggaaggagtggcatacggtggaagaaagaaggcagtagctgctgttgtagttattcatgttagcctcagaggatggtgagacatccagatgaagaggttggtacgcaattctagaattgaggaggtgtctagatagagatataaattgtagtgacatcagtaaagagacaataacaggctttggaaggtgagtaagaatgaaaagggaaggtctgccacctaccctgaagacatacatttaaaggaactatagtagagagataagaggaaaacaagaagagtggagtttcactgaaccaagacaaacaagtttcaaaaaggaaggtgaagttggccaggtgtggtggttcacgcctgtaatcctggcactttgagaggctgaggcaggcggatcacaaggtcagatcgagaccatcctggccaacatggtgaaaccctggttctactaaaatacaaaaattagccgggtgtggtggcacatgcctgtagtcccagctactcaggagctgaggcagaagaatcacttgaacctgggaggcagaggttgcagtgagatgagatctcaccactgcactccagcctggtgacagagcaggacttcatctcaaaaaaaaaaaaaaaaaaaggaaggtgaaggtaaatgtttttagtgttacttagggatccaattagatgaagtctaaaaaggtaaacatatacagccaagtgaagatcatttgtgattgtagttggaaataacatagtggtacataatgaagatggttgctagattgggctgactttaggaatcaataaagggcaaagaagtaaagactggatgtagacaagtttgaataataggagaaagggtagtagctggagagatttggagtaaagagataatatgtttaaaatatgaaaaactagaacatgtttgaattctaatgtgatgaatgtagtatggtgaggtttaatatgcagcataataaagtttaatataagcttctgagaatggggtgtagatgtttagagcacaaacaaaagtattggtgtttgccatgaggcggagggatactcccaccattctttcaggagtagaaaaatgggtgggttggtttaaattacttgtttatttatttacacctaactgtactaagcagtgatcagaatatgtgaactatataatgttttgtgtttcctaagaactgtgtggcagccactgctaattactaaccaaatatatatattttttattctttatgaatagatcttcagttttgctaacagtagtattgtatttagctacaaaactacttatcccaacctctttgtagccttgatgccatttctactgttcctggccagtaaaatatagatatatgattataggtttcatggtaagattatctgctaagaggaaggtggatgaaattctgcaaggaggttttagtgaagaagatctctatgtatttgaaagtccttccaagttatcaatagagccatcagtggagaagacagcaaagcaagtagcaaagtctatgtgattgaggagaggtcatttaaataaaagatagcaaggaagagagggagaaagtggtataactagatggtatgaacttcaaaggaaggagtggttttctccaggctgcaatggttagaagcagtgttagggagtaaggaagatactgatcccacttccaacctgtggatatgtggaatacatgagaataagcccccttgtgatgtgattgttgtcaggtaggtgttttttccttcccagggaacagccaagtttaaattaatgaaaggaaatgttcagggaaatagttgaggatattaagggagtttattaagggaatctcagagggcaccatgaaagagtctccagaagggcaggggtttagggtttctggctttggcctgaggaatacagaagattgtaatgacattattgatagaggaaaaaagaccagatcaggggctatgaccagtgaaaacaaaatttagagggagtataggttaaatcccagcagtctgtaagaagatgatgggtatttaggtctactgggattcatttgtagcttggaaaggagagcctgcagtcatgctgtgaaaccaagtggtttcaggtgttagcagccctggtgggtatagcactagccatcagtagttagaaaatggtcccaactggccgggtgcagtggctcacgcttctaatcccagcactttgggaggccgaggcaggcggatcacgaggtcaggagattgagaccatcctggctaacatgatgaaacctcgtctctactaaaaatacaaaaaattagccaagtgtggtggtgggcgcctgtagtaccagctactcgggaggctgaggcaggagaatgctgtgaacccgggaggcagaggttgtggtaagccgagatcgcaccactgcattccggcctaggtgacagagcaagactccgtctcaagaaaatcgtcccaactgcatgtggtccttgggtgagatcatcttaaggagtactcagcaagggattgtactttgcttggttaggactggaatttacactctaattttggcccagtgatcttggaacagattgagcatctcaaatctgaaaatctgaaattcagaatgctccaaaacctgaaaccttgtgcgccgatgtgactttcaaaagaaatgctcattggagcatttaaaattttggattttcagatttgtgatgctcaactagtaggtataatgcaaatattccaaaatccaaaacagttctggtcccaagtgttttgaataaggaatactcatcctgtacaccaggaggtagactcaggcacagtctcgcccagcatctcacctggattttattgcaatagcctcctaactggtttctctgacttgaatcatactttcctttagtatgttttctatgcagctgccatggtatcctattaaaaaacaaaacaaaacaaaacaaaaactttgtggtttttaataataaaactaatacatgcataggagaaaacaatgtaaataacttctgccctacacagaaggaaaccctggattctactgccttaaaaaattaatatcgtaggtgaatgtgcattctgtcagactttatgtacatacaaacattttataaaaattgagttataccttttatcccacatcttttttttttttttttttttttttttgagaaggagttttgctttttcccaggctggagtgcagtggcacgttctcggctcacagcaacctctgcctcctgggttcaagcaattctcctgcctcagcctcccaagtagctgggattacaggcatgtgccaccactcctggctaattttgtatttttagtagagacagggtttctccatgttggtcaggctggtctcaaactcctaacctcaggtgatccgcctgcctcagcctcccaaattgttgggattgtgaggccatcgcccccagcctatccaacatctttttaaacatctttccatgtcagtgcatgtagttctatttcatttgtaatagctgcttagtatttgattatatgcttgtaccataatgtatttgatccatttgcctccagagtttttataacaatactgcaatcaataatattgtttatatattgtgctttcctatcaactgttctctacacttcccagggtgatccatctaaagtactaacctgatcacataacatttcacgtttaatcttcttctggcctttttctccagttaagataaaatctttttacaagaccttgctcaaactcttgccttttcaggccttatctctggttattccctttatcttcactgtctccctaatttaacctgtcctatttatcctttaggtattgtgtccttcatctgctttaacaatacttgtcacactttcacactgtattgcctgtttgtgtattgtgccctctacactgtaagttttggtaaggtgggaactttgtctaaatttttcattgttttattacttggcccagtgtaggtgttcagttaaatatttacggttcttcagcaaattttgtgccttttcttttacttaccattctagtggaagtttaacttaaaagctatttaagtgattgtaaggtaaaagttgcaaggaggtgggtgcaatggcctgtgcctgtagtcctatctgctctggaggctgacgtgggaggattgcttgagcccaggagtttgagaccagcctgagtaacatgagactccattatagtaaaaatgcatggaattaatttttcttctaggtataggaaaatgttgcaccataacaggtgtgcagaaactaagactgttaggacaacagcagtttaatgttatttatattatgtccctctcctagtccttctcctctcttccctcatcccactcaccaccaccccattcactacacagacttattttttgtagagcaagtgttcatattctgttccattatgtattataatatgaaaagggatgagttgaccaagtattggtgggtgtgtcgtatacttgctttagactaccaatggaagcgtaaattagtacaaacttactgggtgggtgtggtggctcacatctgtaatcccagcactttgagaggctgaggtgagtagattgcttgagcccaggagtttgaaaccagcctaggcaacatggcaaaaccccatctctaccaaaaaaaaaaaattacccatggtgtcatgaatctgtggtcccagccactagggatgctggggtaggaggatcacttgagctgcagtggggttgagtctgcagtgagctgtgtgcaccactgcactccagcctgggtgacagagtaagaccctgtctaaaaacaaaaacaaaccaaaaaaaacttgggacagtaaagcaataaatgtccaaagctggaatatttataacctttaaatatttaaaacccagcaattttaaactgagattttataaaaggatttttcatgtataagtaacaatattcacctgtttcatgccctagtgaaaaactggaaaattcctaaattcccagtaacagtcaataaaatggaatataatgcagtcattaaaatgtatttgtgtggattgacatgtggagatatatttgatacattatgaattttaaacagtcacaaaatatggtatgactttttaatgcatgttataaatatgtgtgtgtgcattgaaaatatggaaagacataacaccaaagttttatcaatggttatgtcataatttttttcttttgtctttttttaagatgtctagtttagtgaacagagctgtggtctatttcttaaaaataattctatcattaactttttaataaatactttttaaagcatgattttaatatcttcaaagttgtaaagtaaataatttgcttaggctgttgttggacacatagattcttttcatttttttaaataccagattaaaaaaattgaaaaatatatttttttatattttataaatatatttttaataaataaatataaatatatatatatatattttttgagacagagtcttgctctgtcgcccaggctgtagtgcagtggcacgatctctgctcaccgcaagctccacctcctgggttcatgccattctcctgcctcagcctcccgagtagctgggactacaggcgcacgccaccatgcccagctaattttttgtatttttagtagagacagggtttcaccgtattagccaggatggtctcgatctcctgacctcgtgatctgcccgtctcggcctcccaaagtgctggggaaaatatattttttaacttaccatttctatctcctactttttaaaggcaaactttttgaaagtgttgataaagggtgtggatactttttagacttcctcttactctaggcagaattcaaaatatgaaggatacaaataagtttctctgataagaacagggaattgtgttagaaaaagcagtcagggctaggcgcagtggcgcacgcctgtaatcccagtgttttcgggaggcagaggtgggtggattgcctgagctcaagagttcaagaccagcctgggcaacatggtgaaaccccatgtctactaaaaatacaaaaactagctgggcgtggtggcacacacctgtagtcccagctactgggaggctgaggcaggagaatcacttgaacccaggaggcggaggttgcagtgagccaagatagtgccactgcactccagcctgggtgacagagcaagactgtgtctcaaaaaaaaaaaagaaggtctccatgagaaaataacatttaacttgaaatacgaagttaaagaaggagtagggagctccttcttctggctccatgggcagagggtggagggacagaggaagagctttctaaatagaacagcaagagcaaaaagactcatcaggatttgacatatttgtggaacagaaagtaagtccagtaaatggaaaactgttaggcaaaggggtaaggagaagagtatgtgaaaccagattgaaaggaggcaggggccagataaagaccttgctagctatgacatgagtttatactttatttgaagagttatgaggaactatttaagtttttcagagattgaaattatttgttttaaaaagatcacatttttgtataaaaaaatcttgagagactaggaagctatttgcaatagttcatgtatgaaatttgaatgccaaaaactaatttccttagcattcacttttttatttatttttctttattttttaattttctgtaagttactgggtttcctttttaatttttccataagttgcattcactttttaaaagacaatgagatttgttttagcataaacaggaaattcatggctaatacatgtcatgacttaaattcacctctaacttaagaaatgcatgtcaaatacataaaattatattttctacctatgagcacagtttcatgggagttttgatttttctaaaatattttttgatgcaatatccatttttttccatgcaattttgtcctttgtgatattgagggtgttcatgatgcagaatttattttaaaaaattatttctgtaatatttatttctccctttttttgagacagtgtctcactcttgcccagactggagtgtagtggcacaatctcagctcactgccacctcaaccttctgggctcatgtgatcctcctacctcagcctcctcagttgtggggaccacaggcatgtgctattacacctggataatttttttatttgtattttttgtagaaatggggtctcactgcattgcccaggctggtatcaaactcctgggctcaagcaatctttctgccttggcctcccaaagtgctgggttacataatttatttttttttgttttgtttccttaaaagaattgttaacataccagataattttttacactttttgccactttttctatgtcctgccttttaaaggcagactttttgaatgagttgctaaggactcagactctttcttccaaatcaatcatacccaataggcaggttttgctacctctctttgctctgaaatttcttggatctcttcagagggatttaacaaatttcctgtcctttttctcttttctttttcttttgttggttttgttttgttttgttgagatggaatcttgctttgtcgcccaggctggaatacagtagcgtgatctcggctcactgcaacctccacctcctgggttcaagtgattctccatgcctcagcctccatgagtagcttggattacaggcatgcaccgccacacccaactaattttttgtatttttagtagcaatggggtttcaccatgttggccaggctgattttaaactcttgacctcaagtgatctgcctgcctcagcctcccatgctgggatcatgctgggattacaggcacaagtcacttagccccctgccttacatacattgatgtatgatagaaaattcttttgggcacatcacagcaacaaaagttaacccagctttacctatttgtgagtatcttaagtctcccaaagcatttgattgttgctttccaagaaaatacagaattgtggtcattctcccatgactattctttactaatattgattgcatctgttgttctgtcgcctttctgcattcatagtaacttctttttccaatgctgaagattagttttaataaccttttgggagacttcttttaaaaaacttttttttcctgaagaataatacataaaggcatgcagctttatgaatttccccaaatagaacacacttaaccagtccccagatcatgagagccaaattaatacttttactacttttgcaatattcctagactcatcttttaaacgtctccctcctttcttgtgctattgtcgtgctatttacttcggtgtattttataatccaccagatattgttatgaaagtaaatatttatatcagagttgacaaactttgtctgaaggtcctgagagtaaataaatattctaggttttctttttttttgagacggagtctcgctctgtcacccaggctggagtacagtggcgcaatctcagctcactgcaagctccgcctcccaggttcacgccattcttctgcttcagcctctcaagcagctgggactacaggcgtctgccaccacgcccggccaatattctaggttttgcaggccatatatggtaactgttgcatattcttatttttctaagcagctttttaaagatgttaaaatcattcttagctcaaaggccttgatttggtccatagaccataatttcccaacacctgacttgtatttatcaacatatttacccctccagtgttatttatttctgcatttccaagtttctaagatcatttcatactgcctgaaaaattatttcttttagcataagaatgctaccgtaaatttcctctatttttattctgaaacatctttatttctgaaggatattttagctcagtatgaaaagaggttagcagtttttcacagtgtacatatgagccccccgtcccccactgcaatagtttttcttaaagggacctgcctctcccttagttgagaatatttaagtgaacttgagaatatttaagtgaactggcttcaaccatatgtcaagtagtatgtttgtgggctatcaatttatttctaggaaccctatgatcatttagccattgccacctatatggttaaaattctcattaacagtgcatcccttggactcttgtgcagattttacccaacccctcccatgccaagatcctatgatctctactgaaattgggatcttactttcattatagaagttctgcatcatctacagtctagagagggtgggtaccacagagttgtccaaggatggtggtaaactcctcaccaatgtatttcttaataccctgacgggaatgtcttttggcctttctctggctaagggaaaaaatgaacataataattcattgatagttacatctccctctaaagcagaggtgtccaatcttttggcttccctgggctacaccagaagaagaattttcttgagccacaataactgatagctatcattagtgttcacgtattttatatgtggcccaagacaattcttccaatgtggcccagggatgccaaaagattggacactggattccatccagtatgacttttcagatatctaagaagattttgctacacttattacaatggtagttttcccacagtgtaattctctgatataggtttgaaatattgcagaaattcactctacattcatttatacagttgctttttctcctacaagagtattaaaatttaagtattgcattgtaattgaaggcattcccaaatcactgtgtttgtatcactttggttaattggagattgctccaaagtaaacgttctcaatgttggctgcactcaacaaaaactagagggcaaagatttgatgtagtcaggggttggccaagtttttctgtaaagggctagatagtaaatgtttaacctttatggctgtatattaaactcttcagttatagaggtaaggagccatagactatgtaaatgaatacctggcccatgggctgtagcttgatgacctctgatatagttcatgaggtgcatccccacagagtaaacagtaggaaggaaagtggatgtggagcagataatgggagaaattgagtatactcttaaataaataaataatgaatttttcatatcctaattttgctgacagggtaacttgatttttaccctgatacaaaccattcctgcctgagaaaaccaaatcagatactagatacccatatgtaataaggcatgctgcttgaggacaccaaatcagatattaaatacccatatgtaataaggcatgctgcttgagaaaatcaaatcagatattagatacccatacgtagtaaggcatgctgcttgtattcgagtcagactgtacactattgtaagataaatcagcctctctgaaacaactcttatggaaacttgagaagcttctaaatgtatgtaccaatatggcatgccaatggcaggtttgaggaaatacacttctgataatgtatttagaactctagtacatgtaaataaggtgtttttgggctaaaacttttataaatttcacctcttacaaaattacttatatttatctaataacacctcctacaaatgtgccctcaatgcagccattacattaatgctcactaaattcattcctattcatattctctacctctctttctacaaaataaaattgcttaccttcctgattaaggcaaactaaccctgatggtgtgacctttgtcagctgggcaggtggtaatgccagaacagttttaaatacctgcttacaaaagaacggttttcaccgtacatggaacaaaacaggaagaataccttggtaattttctgtgatgtatcttatatttgtttcacactgaataacaaatgtctatagtcagattcaaggataactgtcagcattaccttaaatccaaactctgtctgaaagttaaaatcataaaacacctaaaaacactttgttatgtttgtatgtttcaacaagaaaaactactgtttattttttatgtcaatattgtagttacattttcagaatcacatgctgtgggaaaaaatcagcaagcagaaggtttataataaaccaaaagatttatttataacattttctgaattcacttaaaaaacaaaaaggaatcccccttccctcaaaatagaaccgtttcctacagattccatccagtatgacttttcagatatctaaggagattttgctacacttattacaatggtagttttcccacagtgtaattctctgatataggtttgaaatattgcagaaagtcactctacattcatttatacagttgctttttctcctacaagagtattaaaatgtaagtattgcattgtaaatgaaggcattcccaaatcactgtgtttgtatcactttgcttaaatatgaattttctgatctccaaagtgcatcatctttgtaaagctcatcccttgtccatgctttctgtcctggttgacagatgcggaatgagggctaatctctggctttctccaatctattggatatgtattctttcctggtaggaatttacacacgtaaagtaagggactcctaccaaatgaagtcttctcaacattaccagatggaagaatcttctcaacaatattgatttcaccttgttattgcaaaaaaataaaagagtggttattaatggcttttccacata

SEQ ID NO: 204071 - DNA, 2310 bp, Homo sapiens
  Payload ID: 20249
  Gene Name: zinc finger protein 90
  Uniprot ID: Q03938
  ENST ID: ENST00000418063
  CDS Start-End: 113-1918
ggtgctccaaatctggtcttagctgcttcgtgtcttcttctccagcctctgtggccctgtgacctgcaggtattgggagatccacagctgagggacccccggaagcctagaaatgggaccattggaatttagagatgtggccatagaattctctctggaggagtggcattgcctggacactgcacagcagaatttatatagggatgtgatgttagagaactacagacacctggtcttccttggtattgttgtcactaagccagacctgatcacctgtctggagcaaggaaaaaaacccttcactgtgaagagacatgagatgattgccaaatccccagttatgtgttttcattttgcccaagacctttgtccagagcagagcctaaaagattccttccaaaaagtgatagtgacaagatatgaaaaacgtgaatatggcaatttagagttaaaaaaaggttgtgaaagtgtggatgagggtaaagtacacaaaagaggttataatggacttaaccaatgtttgacagctacccagagcaaagtatttcaatgtgatacatatgtgaaagtctctcatatattttcaaattcaaacagacataagataagagatactggaaaaaaacctttcaaatgtatagaatgtggcaaagctttcaaccagtcctcaacccttgctacacataagaaaattcatactggagagataacctgcaaatgtgaagaatgtggcaaagccttcaacaggtcctcacaccttacttcacataagagaattcatactggagagaaacggtacaaatgtgaagattgtggcaaagaattaaagtattcctctacccttactgcacataagagaattcatactggagagaaacggtacaaatgtgaagattgtggcaaagaattaaagtattcctctacccttactgcacataagagaattcatactggagagaaaccctacaagtgtgataaatgtggcagagcatttatttcatcctcgatcctttatgtacataagataagtcatactgaagagaaaccctacaaatgtgaagaatgtggcaaagccttcaagctctcctcaatccttagtacacataagagaatccatactggagagaaaccctacaaatgtgaagaatgtggcaaagccttcaggcgctccttagtccttcgtacacataagagaattcatactggagagaaaccctacaagtgtgataaatgtggcaaagcatttatttcatcctcactcctttataaacataagataagtcatagtgaaaagaaaccctacaaatgtgaagaatgtggcaaagccttcaagcgctcctcaacacttactatacataagataagtcatactgaagagaaaccctacaaatgtcaagaatgtgacaaagtcttcaaacgctcctcagcccttagcacacataagataattcatagtggagagaaaccctacaaatgtgaagaatgtggcaaagccttcaagcgctcctcaaaccttactacacataagataagtcatactgaagagaaactctacaaatgtcaagaatgtgacaaagccttcaagtactcctcagcccttagcacacataagataattcacagtggagagaatccctacaaatgtgaagaatgtggcaaagccttcaagcgctcctcagtccttagtaaacataagataattcatactggagcgaaaccctacaaatgtgaagaatgtggcaaagcctttaagcgctcctcacagcttactagtcataagataagtcatactggagagaaaccctacaaatgtgaagaatgtggcaaagcttttaacttgtcctcagaccttaatacacataagaggattcatattggacagaaagcctacatagtgaagaacatggcaaatctttgaaatattcctcaacccttaataaacataagataattcatactggagagaaaccgtataaatgtgatgactgttggaaagcctttgaccacccctctactcttactaaatatgagaatttatatgaaacataactcctacaaaaataaagaatgtgacaaatcattttaaggaagttctcaacccttactacacataattcatactggacggaaactctacaggtgtgaaaaatgcagcaaagcctataacaagttctcaattctttttttttttttttaagaaggagtttcatgcttctcacccagcctggagtgcaatggcacgatctctgctcactgcaacctcttcctcctggttcaagccattaacctgcttcagcctccaccaccatg

SEQ ID NO: 204072 - DNA, 756 bp, Homo sapiens
  Payload ID: 20249
  Gene Name: zinc finger protein 90
  ENST ID: ENST00000473524
  CDS Start-End: 129-359
gtctcttgctgcagctggtgctccaaatctggtcttagctgcttcgtgtcttcttctccagcctctgtggccctgtgacctgcaggtattgggagatccacagctgagggacccccggaagcctagaaatgggaccattggaatttagagatgtggccatagaattctctctggaggagtggcattgcctggacactgcacagcagaatttatatagggatgtgatgttagagaactacagacacctggtcttccttggtattgttgtcactaagccagacctgatcacctgtctggagcaaggaaaaaaacccttcactgtgaagagacatgagatgattgccaaatccccaggctgaatatccttcaggactttgctctgtagggcagacactagggcatgtttttgcagtcgggtctgcatatggtgggccttgtatcaggatgtggatgagtatggctctgactgagtaccagacagcatttcctcagttatgtgttttcattttgcccaagacctttgtccagagcagagcctaaaagattccttccaaaaagtgatagtgacaagatatgaaaaacgtgaatatggcaatttagagttaaaaaaaggttgtgaaagtgtggatgagggtaaagtacacaaaagaggttataatggacttaaccaatgtttgacagctacccagagcaaagtatttcaatgtgatacatatgtgaaagtctctcatatattttcaaattcaaacagacata

SEQ ID NO: 204073 - DNA, 1918 bp, Homo sapiens
  Payload ID: 20249
  Gene Name: zinc finger protein 90
  ENST ID: ENST00000469078
  CDS Start-End: 140-478
cgcggccatttgtctcttgctgcagctggtgctccaaatctggtcttagctgcttcgtgtcttcttctccagcctctgtggccctgtgacctgcaggtattgggagatccacagctgagggacccccggaagcctagaaatgggaccattggaatttagagatgtggccatagaattctctctggaggagtggcattgcctggacactgcacagcagaatttatatagggatgtgatgttagagaactacagacacctggtcttccttggtattgttgtcactaagccagacctgatcacctgtctggagcaaggaaaaaaacccttcactgtgaagagacatgagatgattgccaaatccccagatggagtccactttctcatccaggctggagtgcagcagcgcaatctctgtgtgatcattgcaaccttcacctcccaagttcaagcgattctcctgcctcagtctcccaagtagcaaggactacagcgccgcgcggtgaggttctctagtccacgctcgcagccatgccgtccaagggcccgctgcaatcggtgcaagtcttcggacgcaagaagacagccacagctgtggcgcactgcagacgcggcaatggtctcatcaaggtgaacgggcagcccctggagatgactgagccgcgcatgctacaatacgagctgctggagccagttctgcttcttggcaaggagcgatttgctggtgtggacatccgtgtccgtgtgaagggtggtgctcatgtggcccagatttatgctatccgtcagtccacctccaaagccctggtggcctattaccagaaatatgtggatgaggcttccaagaaggagatcaaagacatcctcatccagtatgaccggaccctgctggtagctgatccccgtcgctgcaagtccaaaaagtttggaggtcctggtgcccgtgcttgctaccagaaatcctaccgataagcccatcatgactatcaaaattcacctgtataataaacagtttttgagggattttaaagtttccaggaaaaaaaaagttcattagctttttatgaaggatttatccttttttttcagtgtgctgtttattgctgagaagtggctgccctgccagaaaactgctattctcagctgtaaccacattgactaatagtgagtggaagtgcagtggataaaaagcaaatgtgtcttctctgtatcttttttcatttattggctgaagaacaggaggatgcggaagatggaagaaaatataatctctgaaagataatgaagaagctctcctaaatagaagaaaacctcataggggatttttttttcatcattttactctctgcttctatgcgtttaaattttttttttttttttttgagacagtctcgctctgttgaccaggccagagtgcagcggcatgatcccgactaactgctccctccacctcctgggttcaagcgattctgcctcagccttctgagtagctgggattacaggtgtgtgccaccacgcctgactaatttttgcatttttagttgtggtgcggtttcctcatgttggtgaggctggtctcgagctcctggcctcgtgatttgttcaccttggccttccaaagtgctgggattacgtgcatgagcccctgcacctgatggagtctcattctgtcgctcaagctgaagggcagtgccgtgatcttgacccactgcaacctccgcctccaaggttcaagcaattctagtgcctcagcattccaagtagctgagattacaggtgtgcaccaccaaacccggctaatttttgtatttttagtagaggcaggctttcaccatgttgaccaggctgattagtttgtatatttctttcttcctttccttttttatttctagaagcatgttaattttaaaatataaattat

SEQ ID NO: 204074 - DNA, 491 bp, Homo sapiens
  Payload ID: 20249
  Gene Name: zinc finger protein 90
  ENST ID: ENST00000434475
  CDS Start-End: 47-436
ggttgcagcgccgcgcggtgaggttctctagtccacgctcgcagccatgccgtccaagggcccgctgcaatcggtgcaagtcttcggacgcaagaagacagccacagctgtggcgcactgcagacgcggcaatggtctcatcaagctgctggagccagttctgcttcttggcaaggagcgatttgctggtgtggacatccgtgtccgtgtgaagggtggtgctcatgtggcccagatttatgctatccgtcagtccacctccaaagccctggtggcctattaccagaaatatgtggatgaggcttccaagaaggagatcaaagacatcctcatccagtatgaccggaccctgctggtagctgatccccgtcgctgcaagtccaaaaagtttggaggtcctggtgcccgtgcttgctaccagaaatcctaccgataagcccatcatgactatcaaaattcacctgtataataaacagtttttgagggatttt

SEQ ID NO: 204075 - DNA, 5489 bp, Homo sapiens
  Payload ID: 20250
  Gene Name: zinc finger protein 91
  Uniprot ID: Q05481
  ENST ID: ENST00000300619
  CDS Start-End: 207-3782
atctaatcagggacgctgggctgggaactgtccaatcaggcacaaagctggagcggacagggcggcttccgggatgtggctgggcctttgtctctcgctgccgccggagtttccaggtctcgacttcactgctctgtgtcctctgctccaggaggcccagcctgtgtggccctgtgacctgcaggtattggagagccacagctaagatgccaggaacccctggaagcctagaaatgggactgttgacatttagggatgtggccatagaattctctccggaggagtggcaatgtctggacactgcacagcagaatttatataggaatgtgatgttagagaactacagaaacctggccttcctgggtattgctctctctaagccagacctgattacttatctggagcaaggaaaagagccctggaatatgaagcaacatgagatggtggatgaacccacaggtatatgtcctcattttcctcaagacttttggccagagcagagcatggaagattcttttcaaaaagtattactgagaaaatatgaaaaatgtggacatgagaatttacagttaagaaaaggttgtaaaagtgtggatgagtgtaaggtgcacaaagaaggttataataaacttaaccagtgtctcacaactgcccagagcaaagtatttcaatgtgggaaatatttgaaagtcttctataaatttttaaattcaaacagacatacgataagacatactggaaagaaatgcttcaaatgtaaaaaatgtgtcaagtcattttgcatccgtttacacaaaacccaacataaatgcgtttatattacagagaagtcctgtaaatgtaaagaatgtgaaaaaacctttcattggtcctcaacccttactaatcataaggaaattcatactgaagataaaccctacaaatgtgaagaatgtggcaaagcttttaagcagctctcaacccttactacacataaaataatctgtgctaaagagaaaatctacaagtgtgaagaatgtggcaaagcatttctatggtcctcaaccctaactagacataagaggatacacactggagagaaaccctacaaatgtgaagaatgtggcaaagcttttagccattcttcaacccttgctaaacataagagaattcatactggagagaaaccctacaaatgtgaagaatgtggcaaagcttttagccgttcttcaacccttgctaaacataagagaattcatactggagagaaaccctacaaatgtaaagaatgtggcaaagcttttagcaattcctcaacccttgctaatcataagataactcatactgaagagaaaccctacaaatgtaaagaatgtgacaaagcttttaagcgactctcaacccttactaaacataaaataatacatgctggagagaaactctacaaatgtgaagaatgtggcaaagcttttaatcgatcttcaaatcttactatacataagtttattcatactggagagaaaccttacaagtgtgaagaatgtggcaaagcatttaactggtcctcaagccttactaaacataaaagatttcatactagagagaaacccttcaaatgtaaagaatgtggcaaagcatttatatggtcttcaaccctaactagacataagaggatacacactggagagaagccctacaaatgtgaagaatgtggcaaagcttttaggcaatcctcaacccttactaaacataagataattcatactggagagaaaccctacaaatttgaagaatgtggcaaagcttttagacaatccttaacccttaataaacataagataattcatagtagagagaaaccctacaaatgtaaagaatgtggcaaagcttttaagcaattctcaacccttactacacataaaataattcatgctggaaagaaactctacaaatgtgaagaatgtggcaaagcttttaatcattcctcaagtctttctacacataagataattcatactggagagaagtcttacaagtgtgaagaatgtggcaaagcatttctatggtcctcaaccctaagaagacataagaggatacacactggagagaaaccctacaaatgtgaagaatgtggcaaagcttttagccattcttcagcccttgctaaacataagagaattcatactggagagaaaccctacaaatgtaaagaatgtggcaaagcttttagcaattcctcaacccttgctaatcataagataactcatactgaagagaaaccctacaaatgtaaagaatgtgacaaaacttttaagcgactctcaacccttactaaacataaaataatacatgctggagagaaactctacaaatgtgaagaatgtggcaaagcttttaatcgatcttcaaatcttactatacataagtttattcatactggagagaaaccttacaagtgtgaagaatgtggcaaagcatttaactggtcctcaagccttactaaacataaaagaattcatactagagagaaacccttcaaatgtaaagaatgtggcaaagcatttatatggtcttcaaccctaactagacataagaggatacacactggagagaagccctacaaatgtgaagaatgtggcaaagcttttagccgttcctcaacccttactaagcataagacaattcatactggagagaaaccctacaaatgtaaagaatgtggcaaagcttttaagcactcctcagcccttgctaaacataaaataatacatgctggagagaaactctacaaatgtgaggaatgtggcaaagcttttaatcaatcttcaaatcttacgacacataagataattcatactaaagagaaaccttccaagagtgaagaatgtgacaaagcatttatctggtcctcaacccttactgaacataagagaattcataccagagagaaaacctacaaatgtgaagaatgtggcaaagcatttagccagccttcacaccttactacacataagaggatgcacactggagagaaaccctacaaatgtgaagaatgtggcaaagcttttagccaatcctcaacccttactacacataagataattcatactggagagaaaccctacaaatgtgaagaatgtggcaaagcttttaggaaatcttcaactcttactgaacataagataattcatactggagagaaaccctacaaatgtgaagaatgtggcaaagcatttagccaatcctcaaccctaactagacatacgaggatgcacactggagagaaaccatacaaatgtgaagaatgtggcaaagcttttaatcgatcctcaaagcttactacacataagataattcatactggagagaaaccttacaagtgtgaagaatgtggcaaagcatttatatcatcctcaaccctaaatggacataagagaattcatactagagagaaaccctacaaatgtgaagaatgtggcaaagcatttagccaatcttcaaccctaactagacataagaggttgcacaccggagagaaaccctacaaatgtggagaatgtggcaaagcctttaaagagtcctcagctcttactaaacataagataattcacactggagagaaaccctacaaatgtgaaaaatgtggcaaagcctttaaccagtcttcaatccttactaaccataagaaaattcatactatcacacctgtaatcccactactttgggaggccgaggcgggcggatcacgaggtcaggagatggagaccatcctggctaacacagtgaaaccccttctctactaaaaaatacaaaaaattagccgggcgtggtggcgggcgcctgtagtcccagctatgcgagaggctgaggcaggagaatggcgtgaacccgggaggcggagcttgcagtgagccgagatcacgccactgcactcaagcctgggcgacagagcgagactccgtctcaaaaaaaaaaaaaagaaaattcatactagagagaaaccctacaaatataaagaatgtggcaaatcttttaaccggtcttcaacctttactaaacataaggtaattcatactggagtaaaactctacaaatgtgaagaatgtggcaaatcctttttctggtcctcagccctaaccagacataagaaaattcatactggacagcaaccctacaaacaggaaaaatttggcaaagcctttaaccagttttcacaccttactacagataagataactcatattggagagaaatcttacaagtgtgaataatgtggtaaagtctataaaaagtcctgaattcttaacagacataatattattcatactggagagaaactctacaaacctgaaagatgtgccaacgcttttgacaagtcaaacttttctaaacatcaagaaaatcatgctgctgagaaatcctagaaatgtgaagaatgtgacaaagcctctaaatgattgtcacacttgatcgtaggtaagataattcatactggagaaaactaccagtgtgaacaatgtggccaagctttgaactaatgctcacaccttaatgcataggaaagcatttatgcttgagaaaaagtgaacaaatatagacaaaaagccattaatacctgctcacatcgtactcaaattcagagcgttcatactaaataagaagtgtaattactgtcaaacgactgatcagaaaatatgtctttaaagtacagaagagtattttgaaaaagcattacaaatatgaagaggcattatttatgaccttttctatggaaaggtaaggacattaaaaatgtaagatgcatgatgaaaatttaagtagagaggatctttatggttaacttataatatcgagtgatgcatgaggtagatgttcagattaatattctgcattattatgaaagaaaaacattcttaattttagttaaagtttagtatgatttattgtatttttatgaaatatatgtagcatatttttaaattataaattgcatgtgaacttttcaaccaaacagttttaacatgttaaatactatcatgaattcaatgaagtgttattatgccagtaactttaacctattccaccttactcaagggtgtaggtaaaagatggtaaaaatacactatttggtaagataatggactgacatctctagtgattttttttgccagtgagttttaattgccattaagttaaagaatattgttcccataggctaaatttttatttttattttctcatttaaatgtatttgacttaatttttgtggatacctaatatgtgtacatattatgccatatgtggcatattttgatacggacacacaatatataacaatcgcattagactaaatgcggtctccattacctctagcatttattctttgtattacaaataattcaattctacagttttagttatttttaaatgtacaattaaattgttgttgactacaggattatttttatggtcataataaaacttatatacaaacataagtaaaatccata

SEQ ID NO: 204076 - DNA, 3572 bp, Homo sapiens
  Payload ID: 20250
  Gene Name: zinc finger protein 91
  Uniprot ID: Q05481
  ENST ID: ENST00000397082
  CDS Start-End: 93-3572
aggtctcgacttcactgctctgtgtcctctgctccaggaggcccagcctgtgtggccctgtgacctgcaggtattggagagccacagctaagatgccaggaacccctggaagcctagaaatgggactgttgacatttagggatgtggccatagaattctctccggaggagtggcaatgtctggacactgcacagcagaatttatataggaatgtgatgttagagaactacagaaacctggccttcctgggtatatgtcctcattttcctcaagacttttggccagagcagagcatggaagattcttttcaaaaagtattactgagaaaatatgaaaaatgtggacatgagaatttacagttaagaaaaggttgtaaaagtgtggatgagtgtaaggtgcacaaagaaggttataataaacttaaccagtgtctcacaactgcccagagcaaagtatttcaatgtgggaaatatttgaaagtcttctataaatttttaaattcaaacagacatacgataagacatactggaaagaaatgcttcaaatgtaaaaaatgtgtcaagtcattttgcatccgtttacacaaaacccaacataaatgcgtttatattacagagaagtcctgtaaatgtaaagaatgtgaaaaaacctttcattggtcctcaacccttactaatcataaggaaattcatactgaagataaaccctacaaatgtgaagaatgtggcaaagcttttaagcagctctcaacccttactacacataaaataatctgtgctaaagagaaaatctacaagtgtgaagaatgtggcaaagcatttctatggtcctcaaccctaactagacataagaggatacacactggagagaaaccctacaaatgtgaagaatgtggcaaagcttttagccattcttcaacccttgctaaacataagagaattcatactggagagaaaccctacaaatgtgaagaatgtggcaaagcttttagccgttcttcaacccttgctaaacataagagaattcatactggagagaaaccctacaaatgtaaagaatgtggcaaagcttttagcaattcctcaacccttgctaatcataagataactcatactgaagagaaaccctacaaatgtaaagaatgtgacaaagcttttaagcgactctcaacccttactaaacataaaataatacatgctggagagaaactctacaaatgtgaagaatgtggcaaagcttttaatcgatcttcaaatcttactatacataagtttattcatactggagagaaaccttacaagtgtgaagaatgtggcaaagcatttaactggtcctcaagccttactaaacataaaagatttcatactagagagaaacccttcaaatgtaaagaatgtggcaaagcatttatatggtcttcaaccctaactagacataagaggatacacactggagagaagccctacaaatgtgaagaatgtggcaaagcttttaggcaatcctcaacccttactaaacataagataattcatactggagagaaaccctacaaatttgaagaatgtggcaaagcttttagacaatccttaacccttaataaacataagataattcatagtagagagaaaccctacaaatgtaaagaatgtggcaaagcttttaagcaattctcaacccttactacacataaaataattcatgctggaaagaaactctacaaatgtgaagaatgtggcaaagcttttaatcattcctcaagtctttctacacataagataattcatactggagagaagtcttacaagtgtgaagaatgtggcaaagcatttctatggtcctcaaccctaagaagacataagaggatacacactggagagaaaccctacaaatgtgaagaatgtggcaaagcttttagccattcttcagcccttgctaaacataagagaattcatactggagagaaaccctacaaatgtaaagaatgtggcaaagcttttagcaattcctcaacccttgctaatcataagataactcatactgaagagaaaccctacaaatgtaaagaatgtgacaaaacttttaagcgactctcaacccttactaaacataaaataatacatgctggagagaaactctacaaatgtgaagaatgtggcaaagcttttaatcgatcttcaaatcttactatacataagtttattcatactggagagaaaccttacaagtgtgaagaatgtggcaaagcatttaactggtcctcaagccttactaaacataaaagaattcatactagagagaaacccttcaaatgtaaagaatgtggcaaagcatttatatggtcttcaaccctaactagacataagaggatacacactggagagaagccctacaaatgtgaagaatgtggcaaagcttttagccgttcctcaacccttactaagcataagacaattcatactggagagaaaccctacaaatgtaaagaatgtggcaaagcttttaagcactcctcagcccttgctaaacataaaataatacatgctggagagaaactctacaaatgtgaggaatgtggcaaagcttttaatcaatcttcaaatcttacgacacataagataattcatactaaagagaaaccttccaagagtgaagaatgtgacaaagcatttatctggtcctcaacccttactgaacataagagaattcataccagagagaaaacctacaaatgtgaagaatgtggcaaagcatttagccagccttcacaccttactacacataagaggatgcacactggagagaaaccctacaaatgtgaagaatgtggcaaagcttttagccaatcctcaacccttactacacataagataattcatactggagagaaaccctacaaatgtgaagaatgtggcaaagcttttaggaaatcttcaactcttactgaacataagataattcatactggagagaaaccctacaaatgtgaagaatgtggcaaagcatttagccaatcctcaaccctaactagacatacgaggatgcacactggagagaaaccatacaaatgtgaagaatgtggcaaagcttttaatcgatcctcaaagcttactacacataagataattcatactggagagaaaccttacaagtgtgaagaatgtggcaaagcatttatatcatcctcaaccctaaatggacataagagaattcatactagagagaaaccctacaaatgtgaagaatgtggcaaagcatttagccaatcttcaaccctaactagacataagaggttgcacaccggagagaaaccctacaaatgtggagaatgtggcaaagcctttaaagagtcctcagctcttactaaacataagataattcacactggagagaaaccctacaaatgtgaaaaatgtggcaaagcctttaaccagtcttcaatccttactaaccataagaaaattcatactatcacacctgtaatcccactactttgggaggccgaggcgggcggatcacgaggtcaggagatggagaccatcctggctaacacagtgaaaccccttctctactaa

SEQ ID NO: 204077 - DNA, 662 bp, Homo sapiens
  Payload ID: 20250
  Gene Name: zinc finger protein 91
  ENST ID: ENST00000599743
  CDS Start-End: 104-472
ccggagtttccaggtctcgacttcactgctctgtgtcctctgctccaggaggcccagcctgtgtggccctgtgacctgcaggtattggagagccacagctaagatgccaggaacccctggaagcctagaaatgggactgttgacatttagggatgtggccatagaattctctccggaggagtggcaatgtctggacactgcacagcagaatttatataggaatgtgatgttagagaactacagaaacctggccttcctgggtattgctctctctaagccagacctgattacttatctggagcaaggaaaagagccctggaatatgaagcaacatgagatggtggatgaacccacagacggagtcttgctccatcgccaggctggagtgcagtggcgcgatctcgtcccactgctcactgcaacctctgcctcccctattgaagtgattctcctgtctcagcctcctgagtagctgggactacaggcacacaccaccacgctcagctaatttttgtattttcagaagagacggggtttcatcatattcaccaggctggtcttgatctcttgacctcgtgataccctcacctcaccctcccaaagtgctgggactacaggcgtgagccaccgcacccaaccaaatctatacatttcaatgaagg

SEQ ID NO: 204078 - DNA, 695 bp, Homo sapiens
  Payload ID: 20250
  Gene Name: zinc finger protein 91
  ENST ID: ENST00000595533
  CDS Start-End: 139-695
ctgctccaggaggcccagcctgtgtggccctgtgacctgcaggtattggagagccacagctaagatgccaggaacccctggaagcctagaaatggtatatgtcctcattttcctcaagacttttggccagagcagagcatggaagattcttttcaaaaagtattactgagaaaatatgaaaaatgtggacatgagaatttacagttaagaaaaggttgtaaaagtgtggatgagtgtaaggtgcacaaagaaggttataataaacttaaccagtgtctcacaactgcccagagcaaagtatttcaatgtgggaaatatttgaaagtcttctataaatttttaaattcaaacagacatacgataagacatactggaaagaaatgcttcaaatgtaaaaaatgtgtcaagtcattttgcatccgtttacacaaaacccaacataaatgcgtttatattacagagaagtcctgtaaatgtaaagaatgtgaaaaaacctttcattggtcctcaacccttactaatcataaggaaattcatactgaagataaaccctacaaatgtgaagaatgtggcaaagcttttaagcagctctcaacccttactacacataaaataatctgtgctaaagagaaaatctacaagtgtgaagaatgtggcaaagcatttctatggtcctcaaccctaactagacataa

SEQ ID NO: 204079 - DNA, 3210 bp, Homo sapiens
  Payload ID: 20251
  Gene Name: zinc finger protein 92
  Uniprot ID: Q03936
  ENST ID: ENST00000328747
  CDS Start-End: 200-1960
aatcaggcacgcaactggagcggacagcacagcttccgggatttggcggggcctttgtctctcgctgcagccggcgctccacgtctagtcttcactgctctgcgtcctgtgctgataaaggctcgccgctgtgaccctgttacctgcaagaacttggaggttcacagctaagacgccaggaccccctggaagcctagaaatgggaccactgacatttagggatgtgaaaatagaattctctctagaggaatggcaatgcctggacactgcgcagcggaatttatatagagatgtgatgttagagaactacagaaacctggtcttccttggtattgctgtctctaagccagacctgatcacctggctggagcaaggaaaagagccctggaatctgaagagacatgagatggtagacaaaaccccagttatgtgttctcattttgcccaagatgtttggccagagcacagcataaaagattctttccaaaaagtgatactgagaacatatggaaaatatggacatgagaatttacagctaagaaaagaccataaaagtgtggatgcatgtaaggtgtacaaaggaggttataatggacttaaccagtgtttgacaactactgacagcaagatatttcagtgtgataaatatgtgaaagtctttcataaatttccaaatgtaaatagaaataagataagacatactggaaagaaacctttcaaatgtaaaaaccgtggcaaatcattttgcatgctttcacaattaactcaacataagaaaattcatactagagagtattcttacaaatgtgaagaatgtggtaaagcctttaactggtcctcaacccttactaaacataagataattcatactggagaaaaaccctacaaatgtgaagaatgtggcaaagcttttaaccggtcctcaaatcttactaaacataaaataattcatactggagagaaaccctacaaatgtgaagaatgtggcaaagcttttaaccggtcctcaacccttactaaacataaaagaattcatacagaagagaaaccctacaaatgtgaagaatgtggcaaggcctttaaccagttctcgattcttaataaacataagagaattcatatggaagataaaccctacaaatgtgaagaatgtggcaaagcctttagagtattctcaattcttaaaaaacataagataatccatactggggaaaaaccatacaaatgtgaagaatgtggcaaagcctttaaccagttctcaaaccttactaaacataagataattcatactggagagaaaccctacaaatgtgatgaatgtggcaaagcctttaaccagtcctcaacccttactaaacataaaagaattcatacgggagaaaaaccctacaaatgtgaagaatgtggcaaagcttttaaacagtcctcaacccttactgaacataagataattcatactggagagaaaccctacaaatgtgaaaaatgtggcaaggcctttagctggtcctcagcttttactaaacataagagaaatcatatggaagataaaccctacaaatgtgaagaatgtggcaaagcctttagtgtattctcaacccttactaaacataaaataattcatactagagaaaaaccctacaaatgtgaagaatgtggcaaagcctttaaccagtcctcaatttttactaaacataagataattcacactgaagggaaatcctacaaatgtgaaaaatgtggcaatgcttttaaccagtcctcaaaccttactgcacgtaagataatttatactggagagaaaccctacaaatatgaagaatgtgacaaagcctttaacaagttctcaacccttattacacatcagataatttatactggagagaaaccctgcaaacatgaatgtggcagagcctttaacaaatcctcaaattatactaaagagaaactacaaacctgaaagatgtgacaatgattttcactacacctcaaacttttctaaacataaaccatattggtgccctagaaatgtgaggaatatgacaaggactttaaatggttgtcacgcttgattgtaggtaagataatttatattggagaaaaatcctccaagtatgaagaatgtggcaaacttttaaccaatcctcacaccttattgcacaggaaagcatttatacttgagaaaaattgtataaagaatatggaaaagccatttatatctgctcacatgtaaaaacatcagttcatacttaataaaatgcaattaccgtcaaatctttcagaaaatataagcctttaatacgaggaagagtattcttaagatgaacattacaaatagaaagagggttgtagtacctttagttttatgatagatcttattgtacacattttgtaccagaggaaaaccctaaagcattagttgctcaaactttgttcgacatcagggaatttgtattggagaaaaaccctgcaaatgtaataaatatggaaaaacattttttcaaaaactacagcttggaaaacatcagagagttcatactaaaatatatttttgcagatgcagtaaatatgaaaaatatttaatcccaaattaagtctatgtaaatatcagaattcacagtagaaatcataaggcataaggcactgatacttcagacattacactaaattagagtgttgagtataggagatccaaaactaaaattgttaggtaagttatttatatataactttaaaagaagtagaagattttttggagatttataattacattcaaagtatacttttttcttgaaaaaaattacagattttttgaaaagcaattgatgtaatttaactctcaaattcatgtttttcttcattcctattatattcacatgtgaaagcaagtgatctgttgttgctgaatcagagatatgagagattcttttttataggtgggcattatttatgcccctttctgtggaagagtaagaaaattaaaatacaagatgcatgaggaaaatgtagagatgctctttgtgattaacttagaatattaagtgctacttgaggtacatgttcagactaacattcttttgcagtatagtgagaaaaaaacattttaaaattaattatcattttgttgattgtgcttttatgtaataaaatgcagtactttaaaacatttagattgtgtgtgaacttaattttgtaattaaacattttttt

SEQ ID NO: 204080 - DNA, 3124 bp, Homo sapiens
  Payload ID: 20251
  Gene Name: zinc finger protein 92
  Uniprot ID: Q03936
  ENST ID: ENST00000357512
  CDS Start-End: 200-1864
aatcaggcacgcaactggagcggacagcacagcttccgggatttggcggggcctttgtctctcgctgcagccggcgctccacgtctagtcttcactgctctgcgtcctgtgctgataaaggctcgccgctgtgaccctgttacctgcaagaacttggaggttcacagctaagacgccaggaccccctggaagcctagaaatgggaccactgacatttagggatgtgaaaatagaattctctctagaggaatggcaatgcctggacactgcgcagcggaatttatatagagatgtgatgttagagaactacagaaacctggtcttccttgttatgtgttctcattttgcccaagatgtttggccagagcacagcataaaagattctttccaaaaagtgatactgagaacatatggaaaatatggacatgagaatttacagctaagaaaagaccataaaagtgtggatgcatgtaaggtgtacaaaggaggttataatggacttaaccagtgtttgacaactactgacagcaagatatttcagtgtgataaatatgtgaaagtctttcataaatttccaaatgtaaatagaaataagataagacatactggaaagaaacctttcaaatgtaaaaaccgtggcaaatcattttgcatgctttcacaattaactcaacataagaaaattcatactagagagtattcttacaaatgtgaagaatgtggtaaagcctttaactggtcctcaacccttactaaacataagataattcatactggagaaaaaccctacaaatgtgaagaatgtggcaaagcttttaaccggtcctcaaatcttactaaacataaaataattcatactggagagaaaccctacaaatgtgaagaatgtggcaaagcttttaaccggtcctcaacccttactaaacataaaagaattcatacagaagagaaaccctacaaatgtgaagaatgtggcaaggcctttaaccagttctcgattcttaataaacataagagaattcatatggaagataaaccctacaaatgtgaagaatgtggcaaagcctttagagtattctcaattcttaaaaaacataagataatccatactggggaaaaaccatacaaatgtgaagaatgtggcaaagcctttaaccagttctcaaaccttactaaacataagataattcatactggagagaaaccctacaaatgtgatgaatgtggcaaagcctttaaccagtcctcaacccttactaaacataaaagaattcatacgggagaaaaaccctacaaatgtgaagaatgtggcaaagcttttaaacagtcctcaacccttactgaacataagataattcatactggagagaaaccctacaaatgtgaaaaatgtggcaaggcctttagctggtcctcagcttttactaaacataagagaaatcatatggaagataaaccctacaaatgtgaagaatgtggcaaagcctttagtgtattctcaacccttactaaacataaaataattcatactagagaaaaaccctacaaatgtgaagaatgtggcaaagcctttaaccagtcctcaatttttactaaacataagataattcacactgaagggaaatcctacaaatgtgaaaaatgtggcaatgcttttaaccagtcctcaaaccttactgcacgtaagataatttatactggagagaaaccctacaaatatgaagaatgtgacaaagcctttaacaagttctcaacccttattacacatcagataatttatactggagagaaaccctgcaaacatgaatgtggcagagcctttaacaaatcctcaaattatactaaagagaaactacaaacctgaaagatgtgacaatgattttcactacacctcaaacttttctaaacataaaccatattggtgccctagaaatgtgaggaatatgacaaggactttaaatggttgtcacgcttgattgtaggtaagataatttatattggagaaaaatcctccaagtatgaagaatgtggcaaacttttaaccaatcctcacaccttattgcacaggaaagcatttatacttgagaaaaattgtataaagaatatggaaaagccatttatatctgctcacatgtaaaaacatcagttcatacttaataaaatgcaattaccgtcaaatctttcagaaaatataagcctttaatacgaggaagagtattcttaagatgaacattacaaatagaaagagggttgtagtacctttagttttatgatagatcttattgtacacattttgtaccagaggaaaaccctaaagcattagttgctcaaactttgttcgacatcagggaatttgtattggagaaaaaccctgcaaatgtaataaatatggaaaaacattttttcaaaaactacagcttggaaaacatcagagagttcatactaaaatatatttttgcagatgcagtaaatatgaaaaatatttaatcccaaattaagtctatgtaaatatcagaattcacagtagaaatcataaggcataaggcactgatacttcagacattacactaaattagagtgttgagtataggagatccaaaactaaaattgttaggtaagttatttatatataactttaaaagaagtagaagattttttggagatttataattacattcaaagtatacttttttcttgaaaaaaattacagattttttgaaaagcaattgatgtaatttaactctcaaattcatgtttttcttcattcctattatattcacatgtgaaagcaagtgatctgttgttgctgaatcagagatatgagagattcttttttataggtgggcattatttatgcccctttctgtggaagagtaagaaaattaaaatacaagatgcatgaggaaaatgtagagatgctctttgtgattaacttagaatattaagtgctacttgaggtacatgttcagactaacattcttttgcagtatagtgagaaaaaaacattttaaaattaattatcattttgttgattgtgcttttatgtaataaaatgcagtactttaaaacatttagattgtgtgtgaacttaattttgtaattaaacattttttttagcatgcta

SEQ ID NO: 204081 - DNA, 2957 bp, Homo sapiens
  Payload ID: 20251
  Gene Name: zinc finger protein 92
  Uniprot ID: Q03936
  ENST ID: ENST00000450302
  CDS Start-End: 198-1751
gtctagtcttcactgctctgcgtcctgtgctgataaaggctcgccgctgtgaccctgttacctgcaagaacttggaggttcacagctaagacgccaggaccccctggaagcctagaaatggtattgctgtctctaagccagacctgatcacctggctggagcaaggaaaagagccctggaatctgaagagacatgagatggtagacaaaaccccagttatgtgttctcattttgcccaagatgtttggccagagcacagcataaaagattctttccaaaaagtgatactgagaacatatggaaaatatggacatgagaatttacagctaagaaaagaccataaaagtgtggatgcatgtaaggtgtacaaaggaggttataatggacttaaccagtgtttgacaactactgacagcaagatatttcagtgtgataaatatgtgaaagtctttcataaatttccaaatgtaaatagaaataagataagacatactggaaagaaacctttcaaatgtaaaaaccgtggcaaatcattttgcatgctttcacaattaactcaacataagaaaattcatactagagagtattcttacaaatgtgaagaatgtggtaaagcctttaactggtcctcaacccttactaaacataagataattcatactggagaaaaaccctacaaatgtgaagaatgtggcaaagcttttaaccggtcctcaaatcttactaaacataaaataattcatactggagagaaaccctacaaatgtgaagaatgtggcaaagcttttaaccggtcctcaacccttactaaacataaaagaattcatacagaagagaaaccctacaaatgtgaagaatgtggcaaggcctttaaccagttctcgattcttaataaacataagagaattcatatggaagataaaccctacaaatgtgaagaatgtggcaaagcctttagagtattctcaattcttaaaaaacataagataatccatactggggaaaaaccatacaaatgtgaagaatgtggcaaagcctttaaccagttctcaaaccttactaaacataagataattcatactggagagaaaccctacaaatgtgatgaatgtggcaaagcctttaaccagtcctcaacccttactaaacataaaagaattcatacgggagaaaaaccctacaaatgtgaagaatgtggcaaagcttttaaacagtcctcaacccttactgaacataagataattcatactggagagaaaccctacaaatgtgaaaaatgtggcaaggcctttagctggtcctcagcttttactaaacataagagaaatcatatggaagataaaccctacaaatgtgaagaatgtggcaaagcctttagtgtattctcaacccttactaaacataaaataattcatactagagaaaaaccctacaaatgtgaagaatgtggcaaagcctttaaccagtcctcaatttttactaaacataagataattcacactgaagggaaatcctacaaatgtgaaaaatgtggcaatgcttttaaccagtcctcaaaccttactgcacgtaagataatttatactggagagaaaccctacaaatatgaagaatgtgacaaagcctttaacaagttctcaacccttattacacatcagataatttatactggagagaaaccctgcaaacatgaatgtggcagagcctttaacaaatcctcaaattatactaaagagaaactacaaacctgaaagatgtgacaatgattttcactacacctcaaacttttctaaacataaaccatattggtgccctagaaatgtgaggaatatgacaaggactttaaatggttgtcacgcttgattgtaggtaagataatttatattggagaaaaatcctccaagtatgaagaatgtggcaaacttttaaccaatcctcacaccttattgcacaggaaagcatttatacttgagaaaaattgtataaagaatatggaaaagccatttatatctgctcacatgtaaaaacatcagttcatacttaataaaatgcaattaccgtcaaatctttcagaaaatataagcctttaatacgaggaagagtattcttaagatgaacattacaaatagaaagagggttgtagtacctttagttttatgatagatcttattgtacacattttgtaccagaggaaaaccctaaagcattagttgctcaaactttgttcgacatcagggaatttgtattggagaaaaaccctgcaaatgtaataaatatggaaaaacattttttcaaaaactacagcttggaaaacatcagagagttcatactaaaatatatttttgcagatgcagtaaatatgaaaaatatttaatcccaaattaagtctatgtaaatatcagaattcacagtagaaatcataaggcataaggcactgatacttcagacattacactaaattagagtgttgagtataggagatccaaaactaaaattgttaggtaagttatttatatataactttaaaagaagtagaagattttttggagatttataattacattcaaagtatacttttttcttgaaaaaaattacagattttttgaaaagcaattgatgtaatttaactctcaaattcatgtttttcttcattcctattatattcacatgtgaaagcaagtgatctgttgttgctgaatcagagatatgagagattcttttttataggtgggcattatttatgcccctttctgtggaagagtaagaaaattaaaatacaagatgcatgaggaaaatgtagagatgctctttgtgattaacttagaatattaagtgctacttgaggtacatgttcagactaacattcttttgcagtatagtgagaaaaaaacattttaaaattaattatcattttgttgattgtgcttttatgtaataaaatgcagtactttaaaaca

SEQ ID NO: 204082 - DNA, 2947 bp, Homo sapiens
  Payload ID: 20251
  Gene Name: zinc finger protein 92
  ENST ID: ENST00000431504
  CDS Start-End: 165-1697
atttggcggggcctttgtctctcgctgcagccggcgctccacgtctagtcttcactgctctgcgtcctgtgctgataaaggctcgccgctgtgaccctgttacctgcaagaacttggaggttcacagctaagacgccaggaccccctggaagcctagaaatgttatgtgttctcattttgcccaagatgtttggccagagcacagcataaaagattctttccaaaaagtgatactgagaacatatggaaaatatggacatgagaatttacagctaagaaaagaccataaaagtgtggatgcatgtaaggtgtacaaaggaggttataatggacttaaccagtgtttgacaactactgacagcaagatatttcagtgtgataaatatgtgaaagtctttcataaatttccaaatgtaaatagaaataagataagacatactggaaagaaacctttcaaatgtaaaaaccgtggcaaatcattttgcatgctttcacaattaactcaacataagaaaattcatactagagagtattcttacaaatgtgaagaatgtggtaaagcctttaactggtcctcaacccttactaaacataagataattcatactggagaaaaaccctacaaatgtgaagaatgtggcaaagcttttaaccggtcctcaaatcttactaaacataaaataattcatactggagagaaaccctacaaatgtgaagaatgtggcaaagcttttaaccggtcctcaacccttactaaacataaaagaattcatacagaagagaaaccctacaaatgtgaagaatgtggcaaggcctttaaccagttctcgattcttaataaacataagagaattcatatggaagataaaccctacaaatgtgaagaatgtggcaaagcctttagagtattctcaattcttaaaaaacataagataatccatactggggaaaaaccatacaaatgtgaagaatgtggcaaagcctttaaccagttctcaaaccttactaaacataagataattcatactggagagaaaccctacaaatgtgatgaatgtggcaaagcctttaaccagtcctcaacccttactaaacataaaagaattcatacgggagaaaaaccctacaaatgtgaagaatgtggcaaagcttttaaacagtcctcaacccttactgaacataagataattcatactggagagaaaccctacaaatgtgaaaaatgtggcaaggcctttagctggtcctcagcttttactaaacataagagaaatcatatggaagataaaccctacaaatgtgaagaatgtggcaaagcctttagtgtattctcaacccttactaaacataaaataattcatactagagaaaaaccctacaaatgtgaagaatgtggcaaagcctttaaccagtcctcaatttttactaaacataagataattcacactgaagggaaatcctacaaatgtgaaaaatgtggcaatgcttttaaccagtcctcaaaccttactgcacgtaagataatttatactggagagaaaccctacaaatatgaagaatgtgacaaagcctttaacaagttctcaacccttattacacatcagataatttatactggagagaaaccctgcaaacatgaatgtggcagagcctttaacaaatcctcaaattatactaaagagaaactacaaacctgaaagatgtgacaatgattttcactacacctcaaacttttctaaacataaaccatattggtgccctagaaatgtgaggaatatgacaaggactttaaatggttgtcacgcttgattgtaggtaagataatttatattggagaaaaatcctccaagtatgaagaatgtggcaaacttttaaccaatcctcacaccttattgcacaggaaagcatttatacttgagaaaaattgtataaagaatatggaaaagccatttatatctgctcacatgtaaaaacatcagttcatacttaataaaatgcaattaccgtcaaatctttcagaaaatataagcctttaatacgaggaagagtattcttaagatgaacattacaaatagaaagagggttgtagtacctttagttttatgatagatcttattgtacacattttgtaccagaggaaaaccctaaagcattagttgctcaaactttgttcgacatcagggaatttgtattggagaaaaaccctgcaaatgtaataaatatggaaaaacattttttcaaaaactacagcttggaaaacatcagagagttcatactaaaatatatttttgcagatgcagtaaatatgaaaaatatttaatcccaaattaagtctatgtaaatatcagaattcacagtagaaatcataaggcataaggcactgatacttcagacattacactaaattagagtgttgagtataggagatccaaaactaaaattgttaggtaagttatttatatataactttaaaagaagtagaagattttttggagatttataattacattcaaagtatacttttttcttgaaaaaaattacagattttttgaaaagcaattgatgtaatttaactctcaaattcatgtttttcttcattcctattatattcacatgtgaaagcaagtgatctgttgttgctgaatcagagatatgagagattcttttttataggtgggcattatttatgcccctttctgtggaagagtaagaaaattaaaatacaagatgcatgaggaaaatgtagagatgctctttgtgattaacttagaatattaagtgctacttgaggtacatgttcagactaacattcttttgcagtatagtgagaaaaaaacattttaaaattaattatcattttgttgattgtgcttttatgtaataaaatgcagtactttaaaacatttagattgtgtgtgaacttaattttgtaattaaacattttttt

SEQ ID NO: 204083 - DNA, 2648 bp, Homo sapiens
  Payload ID: 20252
  Gene Name: zinc finger protein 93
  Uniprot ID: P35789
  ENST ID: ENST00000343769
  CDS Start-End: 29-1891
agacaccaggacccctggaagcctagaaatgggaccattgcaatttagagatgtggccatagaattctctctggaggagtggcattgcctggacactgcacagcggaatctatataggaatgtgatgttagagaactacagtaacctggtcttccttggtattgttgtctctaagccagacctgatcgcccatctggagcaaggaaaaaaacctttgactatgaagagacatgagatggtagccaacccctcagttatatgttctcattttgcccaagatctttggccagagcagaacataaaagattctttccaaaaagtgatactgagaagatatgaaaaacgtggacatggaaatttacagttaataaaaaggtgtgaaagtgtagatgagtgtaaggtgcacacaggaggttataatggacttaaccagtgtagtacaactacccagagcaaagtatttcaatgtgataaatatgggaaagtctttcataaattttcaaattcaaatagacataatataagacatactgaaaaaaaacctttcaaatgcatagaatgtggcaaagcttttaaccagttctcaacccttataacacataagaaaattcatactggagagaaaccctacatttgtgaagaatgtggcaaagcctttaagtactcctctgcccttaatacacataagagaattcatactggagagaaaccatacaagtgtgataaatgtgacaaagcctttattgcatcctcaacccttagtaaacatgagatcattcatactggaaagaaaccctacaagtgtgaagaatgtggcaaagcttttaaccaatcctcgacacttactaaacataagaaaattcatactggagagaaaccctacaaatgtgaagaatgtggcaaagcttttaaccaatcctcaacacttactaaacataagaaaattcatactggagagaagccctacgtttgtgaagaatgtggcaaagcctttaagtactcccgtatccttactacacataagagaattcatactggagagaaaccatacaagtgtaataaatgtggcaaagcctttattgcatcctcaacccttagtagacatgagttcattcatatgggaaagaaacattacaaatgtgaagaatgtggcaaagccttcatttggtcctcagtcctaactagacataagagagttcatactggagagaagccctacaaatgtgaagaatgtggcaaagcctttaagtactcctctacccttagttcacataagagaagtcatactggagagaaaccctacaaatgtgaagaatgtggcaaagcctttgttgcatcctcaacccttagtaaacatgagatcattcatactggaaagaaaccctacaagtgtgaagaatgtggcaaagcttttaaccagtcctcatcccttactaaacataagaaaattcatactggagagaaaccctacaaatgtgaagaatgtggcaaagcttttaaccagtcctcttcccttactaaacataagaaaattcatactggagagaaaccctacaaatgtgaagaatgtggcaaagcttttaaccagtcctcaacccttattaaacataagaaaattcatactagagagaaaccctacaaatgtgaagaatgtggcaaagcttttcacctatccacacaccttactacacataagatacttcatactggagagaaaccttatagatgtagagaatgtggcaaagcttttaaccattctgcaaccctttcttcacataagaaaatccattctggagagaaaccatacgagtgtgataaatgtggcaaagcctttatttcaccctcaagccttagtagacatgagataattcatactggggagaaaccctagaagtgtgaagaatgtggcaaagccttcaagtggtcctcacaccttactatacactgagagttctgaacttactctgtaaccatcccaaactcctcccaggcacagtctggcagaggtcctgccatttcggagacctggaggaagtggcccatttacagccatgtaggcaggcctgcagaccttggcctttactacggtacctgaagtggttcaatgactcagtttcagttacctgagccacagcttaaggtcagttctgcctatatagaaacccacacagttaacctgaggaaatgctctctggtactcactgaaagccacactcatccacatcctgatacaaggcccaccatatgcagacctgactgccaaaacatgccctagtgtctgccgtacagagtgaagtcctgaaggatatttagtctgtccaaaactaaaatgaagatttcaactccccaaccccctctaacaagccagctaaaggtggactatagtgcagacccagcaaccttgtgaccaggctaaaacccctcatcactacaaattcagagggcatctcatcaccctaagggcccaacgaaagatctttaccttctaacatcagtttatgaaaacttgaaaaggtgtttgctccatcaaattcagacaccagtacaaaactatattatgcccattgtctggttctattttaatgtagcactggaagtgtgtggcagaagaattagtcaaagaaataaaaatagccattgaaattgaa

SEQ ID NO: 204084 - DNA, 1334 bp, Homo sapiens
  Payload ID: 20252
  Gene Name: zinc finger protein 93
  ENST ID: ENST00000592160
  CDS Start-End: 119-490
ggtctcctcttcactactctgtgtcctgtgctcctacaggcccagcctctgtggccctgtgacctgcaggtattgggagatccacagctaagacaccaggacccctggaagcctagaaatgggaccattgcaatttagagatgtggccatagaattctctctggaggagtggcattgcctggacactgcacagcggaatctatataggaatgtgatgttagagaactacagtaacctggtcttccttggtattgttgtctctaagccagacctgatcgcccatctggagcaaggaaaaaaacctttgactatgaagagacatgagatggtagccaacccctcaggtgcacgcctgttatcccagcactttgggaggccaaggtgggtggatcccgaggtcaggagatcgagaccatctggccaacatggtgaaatcccatctctactaaaatacaaaaaattagccaggcatggtggcccatgcctgtagtacgagctactcaggaggttgaggcaggggaatcactagaacccaggaggcactccagcctgggagacagagtgagactccatctcaaaatatatatatatttccaaatattcagtttggtcttattatattgacattgttatgcaacatatcactagagtgttttttatcttgcaaagctaaatctcagtacacagtaaataactaccaatcctttgtattttgtggttcttttcaaacaccactctgttttctgtttctaagagtataactgctttatatatctcatccaatctctgtctttttgcggctgggtcactttattttgcataatgtcatcaatatttatcttaatagttgttacagtattttctgctttttgaaaactgagtgataattcctgtacttttgtgtctactgaatgatttggtgacacaaatttcgattacttttacctagtggcttgcagtaacaatgctacaataattatgtgaaagttaatgtaatatatttgctgcattctgttttattagtctactttttcacctttatactcataccaaattattttaattctgtagctttttgatgtgttttgaaatcagaaatggtattgcctgtaacattgttcctgtttttgaagattgctgggtactttattgtctgtttggattccatatacttttaaatttgttgtttttatttctttgaaaatgctgtgagtcatttgaaagacattgcattaaatctgtagattaaattgagcagtaaagacatcttcaaaatattgtttttcaattgtttgtttttgagatggagttaaatttacctgccttaccagtta

SEQ ID NO: 204085 - DNA, 570 bp, Homo sapiens
  Payload ID: 20252
  Gene Name: zinc finger protein 93
  ENST ID: ENST00000588146
  CDS Start-End: 209-570
gtctctcggtgcagccggagctccaggtctcctcttcactactctgtgtcctgtgctcctacaggcccagcctctgtggccctgtgacctgcaggtattgggagatccacagctaagacaccaggacccctggaagcctagaaatggtattgttgtctctaagccagacctgatcgcccatctggagcaaggaaaaaaacctttgactatgaagagacatgagatggtagccaacccctcagttatatgttctcattttgcccaagatctttggccagagcagaacataaaagattctttccaaaaagtgatactgagaagatatgaaaaacgtggacatggaaatttacagttaataaaaaggtgtgaaagtgtagatgagtgtaaggtgcacacaggaggttataatggacttaaccagtgtagtacaactacccagagcaaagtatttcaatgtgataaatatgggaaagtctttcataaattttcaaattcaaatagacataatataagacatactgaaaaaaaacctttcaaatgcatagaatgtggcaaagcttttaaccagtt

SEQ ID NO: 204086 - DNA, 590 bp, Homo sapiens
  Payload ID: 20252
  Gene Name: zinc finger protein 93
  ENST ID: ENST00000591366
  CDS Start-End: 162-521
tggtttggcgggtcctttgtctctcggtgcagccggagctccaggtctcctcttcactactctgtgtcctgtgctcctacaggcccagcctctgtggccctgtgacctgcaggtattgggagatccacagctaagacaccaggacccctggaagcctagaaatgggaccattgcaatttagagatgtggccatagaattctctctggaggagtggcattgcctggacactgcacagcggaatctatataggaatgtgatgttagagaactacagtaacctggtcttccttggtattgttgtctctaagccagacctgatcgcccatctggagcaaggaaaaaaacctttgactatgaagagacatgagatggtagccaacccctcagggccaggtgtggttgtggtgctcatgtgtaatcccaggattttgggaggtcaagccaagaggatccctggagcccaaaagtttgagaacagcctgggcaacatatggagacccctctctatgaaaaaaatttaataatagccaggcatggtggtgtgcagctgtggtcccagctacttgggagattgaagggagtcaaaattg

SEQ ID NO: 204087 - DNA, 583 bp, Homo sapiens
  Payload ID: 20252
  Gene Name: zinc finger protein 93
  ENST ID: ENST00000586021
  CDS Start-End: 144-398
gtctctcggtgcagccggagctccaggtctcctcttcactactctgtgtcctgtgctcctacaggcccagcctctgtggccctgtgacctgcaggtattgggagatccacagctaagacaccaggacccctggaagcctagaaatgggaccattgcaatttagagatgtggccatagaattctctctggaggagtggcattgcctggacactgcacagcggaatctatataggaatgtgatgttagagaactacagtaacctggtcttccttggtattgttgtctctaagccagacctgatcgcccatctggagcaaggaaaaaaacctttgactatgaagagacatgagatggtagccaacccctcagatggagtcaatctctgtcatccaggctagcgtgcagtggtgcggtcttggctcactgcaacctccacctccaggttcaagccattctcgtgcctcagtctcccaagtagatgggattacagttatatgttctcattttgcccaagatctttggccagagcagaacataaaagattctttccaaaaagtgatactgagaagatatgaaaaacgtg

SEQ ID NO: 204088 - DNA, 2338 bp, Homo sapiens
  Payload ID: 20253
  Gene Name: zinc finger protein 98
  Uniprot ID: A6NK75
  ENST ID: ENST00000357774
  CDS Start-End: 123-1841
gtctttgtctctcgctgcagccggagttcctggtctcgtcttcgcccttctgtgtcctctgctcgtagaggcccagcctctgtggccctgtgacctgcaggtattgggaatccacagctaagatgccaggaccccttggaagcctagaaatgggagtgttgacatttagggatgtggccttagaattctctctggaggagtggcaatgcctggacaccgcacagcagaatttatataggaatgtgatgttagagaactacagaaacctggtctttgtgggtattgctgcctctaagccagacctgatcacctgtctggagcaaggaaaagaaccttggaatgtgaagagacatgagatggtaactgaacccccagttgtatattcttattttgcccaagacctttggccaaagcagggcaaaaaaaattatttccaaaaagtgatactgagaacatataaaaaatgtggacgtgaaaatttacagttaagaaaatactgtaaaagcatggatgagtgtaaggtgcacaaagaatgttacaatggacttaaccagtgtttgacaactacccagaacaaaatatttcaatatgacaaatatgtgaaagtctttcataaattttcaaattcaaacagacataagataggacatactggaaagaaatctttcaagtgtaaagaatgtgaaaagtcattttgcatgctttcacacttagctcaacataaaagaattcatagtggagagaaaccctacaaatgtaaagaatgtgggaaagcctataatgaggcctcaaacctttctacacataaaagaattcatactggaaagaaaccctacaaatgcgaagagtgtggaaaagcctttaaccggctctcacaccttactacacataagataattcatactggaaagaaaccctacaaatgtgaggagtgtggcaaagcttttaaccaatctgcaaaccttactacacataagagaattcatactggagagaaaccctacaaatgtgaagaatgtggcagagcttttagccagtcctcaacccttactgcacataagataattcatgctggagagaaaccttacaaatgtgaagaatgtggcaaagcttttagccagtcctcaacccttactacacataagataattcatactggagagaaattctacaaatgtgaagaatgtggtaaggcctttagccggttatcccaccttactacacataagagaattcattctggagagaaaccctacaagtgtgaagaatgtggcaaagcttttaaacaatcctcaacccttactacacataagagaattcatgctggagagaaattctacaaatgtgaagtatgtagcaaagcctttagccggttctcacaccttactacacataagagaattcatactggagagaagccctacaaatgtgaagaatgtggcaaagcttttaacctatcatcacaacttactacacataagataattcatactggagagaaaccctacaaatgtgaagaatgtggcaaagcttttaaccagtcctcaactctttctaaacataaggtaattcatactggagagaagccctacaaatgtgaagaatgtggcaaagcttttaaccagtcctcacaccttactacacataagatgattcatactggagagaaaccctacaagtgtgaagaatgcggcaaagcctttaacaactcctctattcttaacagacataagatgattcatactggagagaaactctacaaacctgaaagttgtaacaatgcttgtgacaacattgcaaagatttccaaatataaaagaaattgtgctggtgagaaataatagaaatatgaatgtgacaaagcctttaaatggttatcacactggattgtaggtaaggtaattcattctggagaaaacttctacaagtgtgaacagtgtggcaaaacttacacaatgctcaaaccttattgcacaggaaagcctttatacttgatgagaacaaatgtacaaatataaagaaagtaaaaaagtgattaatatctgcacacatcttattcagcatcagagaatttatacttaatagcattaaaggtgcaattactgtcaaaagagttcagaaaatataagcatttaaagtgctgaagaggatttattttgaagacaaacattacaaatataaacgaagttgtggtaactttacttgtaacacagatcttgttgtattcattctgtattagagcaaaccctgaggcaattgctcaaactttgttcaacatcagagaatttatatcaaagaaaaaccctgtaaatgtaataaatttagaaaaaaacattta

SEQ ID NO: 204089 - DNA, 566 bp, Homo sapiens
  Payload ID: 20253
  Gene Name: zinc finger protein 98
  ENST ID: ENST00000601553
  CDS Start-End: 131-394
gtggcggggtctttgtctctcgctgcagccggagttcctggtctcgtcttcgcccttctgtgtcctctgctcgtagaggcccagcctctgtggccctgtgacctgcaggtattgggaatccacagctaagatgccaggaccccttggaagcctagaaatgggagtgttgacatttagggatgtggccttagaattctctctggaggagtggcaatgcctggacaccgcacagcagaatttatataggaatgtgatgttagagaactacagaaacctggtctttgtgggtattgctgcctctaagccagacctgatcacctgtctggagcaaggaaaagaaccttggaatgtgaagagacatgagatggtaactgaacccccaggtttacagtgacagccaagacagccctcttcatggcacataagagactgtgaaatctgactgctttttcattgtttttgaaaacacatagataatctgcataattttgagaaactctatgttaaactgtttttcaagttctgtttttacatcatgtcctaaatgtgtgagagcagtggtttct

SEQ ID NO: 204090 - DNA, 595 bp, Homo sapiens
  Payload ID: 20253
  Gene Name: zinc finger protein 98
  ENST ID: ENST00000593657
  CDS Start-End: 205-595
gatgtggcggggtctttgtctctcgctgcagccggagttcctggtctcgtcttcgcccttctgtgtcctctgctcgtagaggcccagcctctgtggccctgtgacctgcagggagtgttgacatttagggatgtggccttagaattctctctggaggagtggcaatgcctggacaccgcacagcagaatttatataggaatgtgatgttagagaactacagaaacctggtctttgtgggtattgctgcctctaagccagacctgatcacctgtctggagcaaggaaaagaaccttggaatgtgaagagacatgagatggtaactgaacccccagttgtatattcttattttgcccaagacctttggccaaagcagggcaaaaaaaattatttccaaaaagtgatactgagaacatataaaaaatgtggacgtgaaaatttacagttaagaaaatactgtaaaagcatggatgagtgtaaggtgcacaaagaatgttacaatggacttaaccagtgtttgacaactacccagaacaaaatatttcaatatgacaaatatgtgaaagtctttcataaattttcaaattcaaacagac

SEQ ID NO: 204091 - DNA, 493 bp, Homo sapiens
  Payload ID: 20253
  Gene Name: zinc finger protein 98
  ENST ID: ENST00000593802
  CDS Start-End: 100-493
agtcgcacagttgcgcggtggccgacaggaattgttccccagtggtaagccgcaatctagctgacgtggccccaaccccacattccttcctgccctgcaatgtctgaagaaaccctacagagcaaattggcggctgcaaagaaaaagctgccttggggtgcggtgcaggggtccagagccatgtcggacctgttactgttactactggacctgactctgttactgctgctgatgctgctgggctttgccgggtactcagggcagttggctggggtggcagtgagtgccggctcaccccccatccctacaagttccatgtggagccctatggtgagactgggtggcttctcaccagagctgcagcatctcccccaaactctgctccatcgctgtccactaggacaaccctgcatgggagtgttgacatttagggatgtggccttagaattctctctggaggagtggcaatgcctggacaccgcacagcagaatt

SEQ ID NO: 204092 - DNA, 3114 bp, Homo sapiens
  Payload ID: 20254
  Gene Name: zinc finger protein 99
  ENST ID: ENST00000397104
  CDS Start-End: 1-3114
atgtctttttggtctgaaaaatgtacaagacttattctgtatgatttaaaaatagcactcaaaaatggatcgttgacattttgggatgtgaccatagaattcgctctggaggagtggcaatgcctggacatggctcagcagaatttatataggaatgttatgttagagaactacagaaacctggtcttcctgggtatcgctgtctctaagctagacttgataacttgtctgaagcaagggaaagagccttggaatatgaagagacatgagatggtaactaaacccccagttattagttctcattttacacaagacttttggccagatcagagcataaaagattctttccaagaaataatattgagaacatatgcaagatgtggacataagaatttacgattaagaaaagattgtgaaagtgtcaatgagggtaagatgcacgaagaagcttataataaacttaaccaatgttggacaactacccagggaaaaatatttcagtgtaacaaatatgtgaaagtctttcataaatattcaaattcaaatagatataagataattcatactgggaagaaaccatataaatgtgaagaatgtggcaaagcttttaagcaatcctcacaccttactagacataaagcaattcatactggagagaaaccctacaaatgcgaagaatgtggcaaagcttttaaccatttctcagcccttagaaaacatcagataattcatactggaaagaaaccctacaaatgtgaagaatgtggcaaagcttttagccagtcctcaacccttagaaaacatgagataattcatactgaagagaaaccctacaaatatgaagaatgcggcaaagcttttagcaatttgtcagcccttagaaaacatgagataattcatactggacagaaaccctacaaatgtgaagaatgtggtaaagcttttaagtggtcctcaaaacttactgtacataaggtaattcatactgcagagaaaccctgcaaatgtgaagaatgtggcaaagcttttaagcgtttctcagcccttagaaaacataagataattcatactggaaagcaaccctacaaatgtgaagaatgcagcaaagcttttagcaatttttcagcccttagaaaacatgagataattcatactggagagaaaccctacaaatgtgaagaatgtggtaaagcttttaagtggtcctcaaaacttactgtacataaggtaattcatatggaagagaaaccttgcaaatgtgaagaatgtggcaaagcttttaagcatttctcagcccttagaaaacataagataattcatactggaaagaaaccctacaaatgtgaagaatgtggcaaagcttttaacaattcctcaacccttatgaaacataagataattcatactgggaagaaaccatacaaatgtgaagaatgtggcaaagcttttaagcaatcttcacatcttactagacataaagcaattcatactggggagaaaccctacaaatgtgaagaatgtggcaaagcttttaaccacttctcagcccttagaaaacatcagataattcatactggaaagaaaccctacaaatgtgaagaatgtggcaaagcttttagccagtcctcaacccttagaaaacatgagataattcatactggagagaaaccctacaaatgtgaagaatgtggtaaagcttttaagtggtcctcacaccttactagacataaagtaattcatactgaagagaaaccctacaaatgtgaagaatgtggcaaggcttttaaccatttctcagcccttaggaaacataagataattcatactggaaagaaaccctacaaatgtgaagaatgtggcaaagcttttagccagtcctcaactcttagaaaacatgagataattcatactggagagaaaccctacaaatgtgaagaatgtggtaaagcttttaagtggtcctcaaaacttactgtacataaggtaattcatactgcagagaaaccctgcaaatgtgaagaatgtggcaaagcttttaagcatttctcagcccttagaaaacataagataattcatactggaaagaaaccctataaatgtgaagaatgtggcaaagcttttaacaattcctcaacccttagaaaacatgagataattcatactggagagaaatcctacaaatgtgaagaatgtgcccttagaaaacatgagataattcatactggaaagaaaccctacaaatgtgaagaatgtggcaaagcttttaacaattcctcaacccttaggaaacataagataatttatactgggaagaaaccatacaaatgtgaagaatgtggcaaagcttttaagcagtcctcacaccttactagacataaagcagttcatactggggagaagccctacaaatgtggagaatgtggaaaagcttttaacaattcctcaacccttaagaaacataagctaattcatactagggagaaatcgtacaaatgtgaagaatgtggcaaagcttttagcaatttctcagcccttaggaaacataagataattcatactggggagaaaccatacaaatgtgaagaatgtgaatgtggcaaagcttttaacaattcctcaacccttatgaaacataagataattcatactggggagaaaccgtacaaatgtgaagaatgtggcaaaggttttaacaatttctcgacccttatgaaacataagataattcatactggggagaaaccgtacaaatgtgaagaatgtggcaaagcttttaagcaatcctcacaccttactaaacataaatcaattcatactggagagaaaccctacaaatgtgaagaacgtggcaaagcttttagccatttctcacgccttactaaacataggataattcatactggaaagaaaccctacaaatgtgaagagtgtggagagaaaccctacaaatgtgaagaatgtggcaaagcctttaaccagtcctcacaccttactcaacataaaacaattcatactggagggaaaacctacaaatgtgaagaatgtggcaaagcttttaaccatctttcagcccttactaaacataagataattcatactggggagaagccctaa

SEQ ID NO: 204093 - DNA, 7817 bp, Homo sapiens
  Payload ID: 20254
  Gene Name: zinc finger protein 99
  Uniprot ID: A8MXY4
  ENST ID: ENST00000596209
  CDS Start-End: 92-2686
ctgctctgtgtccttagcctctgtggccctgtgacctgtaggtatttggagatccacagctaggacgccaggaccccctggaagcttagaaatgggatcgttgacattttgggatgtgaccatagaattcgctctggaggagtggcaatgcctggacatggctcagcagaatttatataggaatgttatgttagagaactacagaaacctggtcttcctgggtatcgctgtctctaagctagacttgataacttgtctgaagcaagggaaagagccttggaatatgaagagacatgagatggtaactaaacccccagttattagttctcattttacacaagacttttggccagatcagagcataaaagattctttccaagaaataatattgagaacatatgcaagatgtggacataagaatttacgattaagaaaagattgtgaaagtgtcaatgagggtaagatgcacgaagaagcttataataaacttaaccaatgttggacaactacccagggaaaaatatttcagtgtaacaaatatgtgaaagtctttcataaatattcaaattcaaatagatataagattagacacactaaaaagaaaactttcaaatgtatgaaatgtagcaaatcatttttcatgctttcacacttaattcaacataagagaattcatactagagagaatatctacaaatgtgaagaacgtggcaaagcctttaaatggttctcaacccttattaaacataagataattcatactgaagacaaaccctacaaatataagaaatgtggcaaagcttttaacatctcttcaatgttcactaaatgtaagataattcatactggaaagaaaccctgcaaatgtgaagaatgtggcaaagtttttaacaattcctcaacccttatgaaacataagataattcatactgggaagaaaccatataaatgtgaagaatgtggcaaagcttttaagcaatcctcacaccttactagacataaagcaattcatactggagagaaaccctacaaatgcgaagaatgtggcaaagcttttaaccatttctcagcccttagaaaacatcagataattcatactggaaagaaaccctacaaatgtgaagaatgtggcaaagcttttagccagtcctcaacccttagaaaacatgagataattcatactgaagagaaaccctacaaatatgaagaatgcggcaaagcttttagcaatttgtcagcccttagaaaacatgagataattcatactggacagaaaccctacaaatgtgaagaatgtggtaaagcttttaagtggtcctcaaaacttactgtacataaggtaattcatactgcagagaaaccctgcaaatgtgaagaatgtggcaaagcttttaagcgtttctcagcccttagaaaacataagataattcatactggaaagcaaccctacaaatgtgaagaatgcagcaaagcttttagcaatttttcagcccttagaaaacatgagataattcatactggagagaaaccctacaaatgtgaagaatgtggtaaagcttttaagtggtcctcaaaacttactgtacataaggtaattcatatggaagagaaaccttgcaaatgtgaagaatgtggcaaagcttttaagcatttctcagcccttagaaaacataagataattcatactggaaagaaaccctacaaatgtgaagaatgtggcaaagcttttaacaattcctcaacccttatgaaacataagataattcatactgggaagaaaccatacaaatgtgaagaatgtggcaaagcttttaagcaatcttcacatcttactagacataaagcaattcatactggggagaaaccctacaaatgtgaagaatgtggcaaagcttttaaccacttctcagcccttagaaaacatcagataattcatactggaaagaaaccctacaaatgtgaagaatgtggcaaagcttttagccagtcctcaacccttagaaaacatgagataattcatactggagagaaaccctacaaatgtgaagaatgtggtaaagcttttaagtggtcctcacaccttactagacataaagtaattcatactgaagagaaaccctacaaatgtgaagaatgtggcaaggcttttaaccatttctcagcccttaggaaacataagataattcatactggaaagaaaccctacaaatgtgaagaatgtggcaaagcttttagccagtcctcaactcttagaaaacatgagataattcatactggagagaaaccctacaaatgtgaagaatgtggtaaagcttttaagtggtcctcaaaacttactgtacataaggtaattcatactgcagagaaaccctgcaaatgtgaagaatgtggcaaagcttttaagcatttctcagcccttagaaaacataagataattcatactggaaagaaaccctataaatgtgaagaatgtggcaaagcttttaacaattcctcaacccttagaaaacatgagataattcatactggagagaaatcctacaaatgtgaagaatgtggtaaagcttttcagtggtcctcaaaacttactttacataaggtaattcatatggagagaaaccctgcaaatgtgaagaatgtggcaaagcttttaaacatttctcagcccttagaaaacatgagataattcatactggaaagaaaccctacaaatgtgaagaatgtggcaaagcttttaacaattcctcaacccttaggaaacataagataatttatactgggaagaaaccatacaaatgtgaagaatgtggcaaagcttttaagcagtcctcacaccttactagacataaagcagttcatactggggagaagccctacaaatgtggagaatgtggaaaagcttttaacaattcctcaacccttaagaaacataagctaattcatactagggagaaatcgtacaaatgtgaagaatgtggcaaagcttttagcaatttctcagcccttaggaaacataagataattcatactggggagaaaccatacaaatgtgaagaatgtggtaaagcttttaagtggtctcaaaacttatggaacataaggtaattcatactgtagagaaaccctacaaatgtgaagaatgtggcaaagcttttaagcatttctcagcccttagaaaacatgagataattatactggaaagaaaccctacaaatgtgaagaatgtggcaaagcttttaacaattcctcaacccttatgaaacataagataattcatactggggagaaaccgtacaaatgtgaagaatgtggcaaaggttttaacaatttctcgacccttatgaaacataagataattcatactggggagaaaccgtacaaatgtgaagaatgtggcaaagcttttaagcaatcctcacaccttactaaacataaatcaattcatactggagagaaaccctacaaatgtgaagaacgtggcaaagcttttagccatttctcacgccttactaaacataggataattcatactggaaagaaaccctacaaatgtgaagagtgtggtaaagcatttagtcctcaaaccttactaaacataagataattcattctggagagaaaccctacaaatgtgaagaatgtggcaaagcctttaaccagtcctcacaccttactcaacataaaacaattcatactggagggaaaacctacaaatgtgaagaatgtggcaaagcttttaaccatctttcagcccttactaaacataagataattcatactggggagaagccctaaaaatgtgaagaatgtgtcaaagctttcaaccattttacaaaccttaatacacataagataatttatactagagacagaccctccatatgtgaagaatgtggcaaagcttttaaccagtcctcaagccttaataggcagaaaacaattcatgctggagagaaaccccacaaatgtaaagaatgtggcaaagcctttaaccagtcctcacaccttaaatacacataaaataattgatactggaggaaaaccctacaaatataataaaggtgacaaagcttttaaccattgctcagctgttactcaaaatgagagaattcctaaagaagataaactccacaaatgtgaataatatggcaaagcttttaactggtcctcaaatcttactgaatgtaagataattcatactgaagataaacccttcaaatgtgaggaatgtggcaaagcttttaatcagtcctcaaatcttactgaacataagataattcatagtagagacaaacactgcaaatatgaagaatgggcaaagcttttaaccagtcctcaaactttactcaacataaaataatttatcttggagaggaacactacaaatttaaagaatttggcaaaacttttaactgcttctcaaaacttactgaacataagataattcatactggagagatactttacaaatgtgaagaatgtggcaaagcttctaacgggttctcagatcttactgaatataagataaattagagagaaacccgcctcatgtgaagagtgtggcaaaacttttaactggtcctcaaaccttactgaacataagataattcatactgaagagaaaccctacaaatatgaaaactgtggcaaagcttttaactggttttcagaccttactcaacagaaaatagttgatactgaagacaaactctagaaatgtgaagaatgtggcaatgcttttaatcagttaaactttattagacataagaaaattcgtactggagaaaaaccctacaaatgtgaagaaagtggcaatgcttttagccagtcctcaactcttgctaaacaacataattcaatgggagagaaaccctacaaatgtgaataatgccataagcattcttcaatttttttttttttttttttgaaacagagtttcgccctagttgcccaggctctggagtgcagtggcacaatctcggctcactgcaacctccgcctcctgggttttcaagcgattctcctgcctcagcctcccgagtagcagggactataggcatgtgccaccacgcccacctaattttgtatttttagtagagacggggtttctccatgttggtcaagctggtctcgaactcccgacctctggtgatctgcccgcctcggcctcccaaagtgctgggattaaaggcgtgagccaccgtgcccagcctaattcttcaattcttaataaacaatttatactgaagagaaaccctacaaacgtgaagaatgttgcaaagcttttaacgtcctcaaaccttactgaacataagataattcataatggaaactagccctacaaatatgaagaatgtggcaaacactgtaaccatttctcacatcttaccacacattaagataattcatactgaagagaaacccgacaaatgtgaagaatgtaacaaagtctttaactggtcttcaactcatactaaatataagagaattcatacagaagataaattttataaatatgaagaatgtgacaaaagctttaaaaacatttcaacccttattacacataagataatttatgttgtagagaaattctacaaatgtgaagaatgtggcaaagttttttttttttttttgaaatggagtctcactctgtcgcccaaattggagtgcaatggtgcaatctcagttcattgcaacctccgcctcctgggttcaagcgattctctggcctcaacctcccaagcagctgggattgcaggcgcctgccaccacgcccagctaatttttgtatttttagtagagacggggtttcaccattttgaccaggctggttttgaactcctgacctcaagtgatccacccgccttggcctcccaaagtgccccaaagtgctgggattacaagcatgagccattgagcccggtcgaatgtggcaaagtttttaataagttatcaaatcatactggagagaagctctacaaacctaaaagacatgacagtgctcttgagaacaccttaaacttttctaaacataaaagaaatcatagtgtcaagaagccctagatgtgagtcatgtcacaaagcctttaaatggttgtcacacttgagtataagctaatttatcctagagaaaactatgaagaatgtggcaaaatatttaaccaatactcacaccttatcgcataggaaagcatttatacttgaaaaaaaatgtacacctatgaagaatgtggaaaagccattaatatctgctcacatcttaacatcacagagtttatacttaaaacaaatattaaaaatgcaattactgtgagaatatcttttagaaaatataaaccttagaatggtgaagagtatttcttttgatgacaaacattacaaatataaagacggttgtagtactatatttgtatcacagatcttattgtgcatattttgtgctagagaaaaaccctaaagttgctcaaactttgttcaatatcagggaatgtataatagagaaaaaaacctgcaaatgtaataaatttggaaaaaagtttataaactacagcttagaaaacagagtaagttttttttgtagatgcagtaaatatgaaaaatattcaatccaaaattaactctgtaaatgtcagagaattcacagtagaaatgataaggcactggcacttcagactacactaaatcagagtgttgagtaaaaaaaataatttcaatctaaaatttagataagttatttgcatataacttaaaaaagaggaggtgattttttggagaattataattacatttgaagtatactttttgtatacttcaaatatcaaaaaaattaacatcacaatattgaaaaaaattacagactctgaaaagcaaataaggatgtaattcaactctcaagttacttcatgctcttcattcctactttatttacatgtgaaagcatgcgatcaattgttgctgcatcagagatatgaaagattcttttttattagatgggcattatttatgacctttttcataaaagagaaaggatattaaaatataaaatgcatgataaaaatctaaatggagaggctttttgtggttaacttaaaatattgagtgatgtatgaggtaggtgttctgaggaatatatttttgtgcattatagtgagaaaaacattttaaaattttagttaaaattaaaattaaattagtgatgtattatattagttgtgcttttatgtaatgtagtacattcataaatttttagattatatgtaaacttaattttttaaacattttttgacatgttaagtctgttgtacattcaatgaagtgttattatgccactcgctttaacctatcccaccttactcaagggtgtaggtaagagatggcaacagtttactatttggtaagagtggaataacatctctagtaatctctttttttcagtggctttaacctgcaaataaattaaagaatattgttctcgtaggttacatttttatacttttaatcttatttaaacttctttttttttttgccttgacaaatttaaacttatttttcttaacttttatgggtacatagtgtgtagatatatttctgccatatatagcatattttgataccagcataaaatatgtaataatcacgtcagggtaaatgagggattcttcaccttcaacatttattccttgaattacaagcaatccaaatctacacttttagtcactttgaaatataaaactaaattgttatctttattatagcgtcatttttgtggtcataataaaaatcatataggaatgtaaataaaatctatacatatctgg

SEQ ID NO: 204094 - DNA, 2510 bp, Homo sapiens
  Payload ID: 20255
  Gene Name: zinc finger protein interacting with K protein 1
  ENST ID: ENST00000307468
  CDS Start-End: 98-187
gggttctaagggtcggcggcggcggggttgacggctttgcctaggtccctccgcccgtagctgtcgggtcccggccccgctctgcccacagactccgatggctgcggccgcgctgagggccccgactcaggttgtggccatggaacagaggatgaagagacaccttctgaccagaatgtttctgtaggagtgtcacagtcaaaggcaggttcatccacacagaagactcaatcctgtgagatgtgtgtcccagtcctgaaagatattttgcatctagctgatctccctgggcagaaaccatacttggttggagaatgtacaaaccatcaccagcaccagaagcatcacagtgcaaagaaatccttgaagagggacatggacagagcctcatatgtgaagtgctgcctattctgtatgtcattgaagccctttcgcaaatgggaggttggaaaggaccttccagccatgttgcggcttctgaggtccctggtctttcctggaggcaagaaacccggcacaattactgaatgtggggaggacattcgcagtcaaaaaagtcattacaagtcaggtgaatgtgggaaggcttccaggcacaaacacactcctgtttaccatccaagagtctacactggaaaaaagctttatgagtgtagcaaatgtgggaaagccttccgtggcaagtactcacttgttcagcaccagagagtccatactggagaaaggccttgggagtgcaatgaatgtggaaaattctttagccaaacctcccacctgaatgatcatcggagaatccacaccggagaaaggccttatgagtgcagcgaatgtggaaaattatttagacaaaactccagccttgttgaccaccagaaaatacacactggagcaaggccttatgagtgtagccagtgtgggaaatcctttagccaaaaagccacccttgttaaacaccaaagagttcacactggagaaaggccttataagtgtggtgaatgtgggaattcctttagtcaaagtgccattcttaatcaacaccgaagaattcacactggagcaaagccttatgagtgtggccagtgtgggaaatcctttagtcaaaaagctaccctcattaaacaccagagagttcacactggagaaaggccttataagtgtggtgactgtgggaaatcctttagtcaaagctccatccttattcaacaccggagaattcatactggagcaaggccttatgagtgtggccagtgtggaaagtcctttagccaaaagtctggtctcattcaacaccaagtggttcacactggagaaaggccttatgagtgcaacaaatgtgggaattcctttagccaatgctccagcctcatacatcaccaaaaatgtcataacacatagaggcctcatgaatgcagcaaatgtggaagcgccttcaactcaagatctatcatcatttagctcctgaaagtccacacttaagtagagccttagacctacagggaaagtgctgtctctgtagtattgtagcagtagagagcctttgtgagggagccatctgcctgaagttgaacctcattcttccttgtttctctggtagaaaccatctaccctctaccaccttgcacagtgggcactggtcactcctatgtgctaagacaaggcagacatctgtgtgttctcttaagtctttggaggaaatcttgagcagtctaagcctttagagaaaattcattcttttttctgactgatcacagcatacgtgtgacccagtttgggtcaggagggcccagccttggttctgctggacacttatgtgcaaggattcccttcatgtaaattcttggtctcacatgacacttggtcattcttccagcctccatgtcaccacgtggtgaatggctgcctcacattgctccagtttgtgcactaataaaagccttatatttgaatctacctgtagtcttggggttctgtttactgtgtggggtggctgggagacagacttcaactctatatgaaggaatggatggcttttgtgggcctctgcaggaaagtaagatgacagagtaattctaattctggttttggtcatacttgctttgctacctaaaatctcctaggaaaaaatgcaaggttttggttattctaatttgtggcctggatccctattctttctgtgagactagaggtcatcctgaggagaggccagctgttatgacaagcatgtgtgcttcagggaataggacaattttattccattgtttccagaggatgtcatatgatgcccagtgctgctgagaagcttttcatggggttctataaggaggcatgccctgatatcaaacattccataggccgatgtcacgcagaagacaacgcgagtcacatgtgaactgtaattggtacagaaatacctgggtatttctgtactgtgtgtactgtagcaaactagttggaatgtgcctcttataaaagtacatttacaaatcttcccgtgactgtggctttgagca

SEQ ID NO: 204095 - DNA, 4144 bp, Homo sapiens
  Payload ID: 20255
  Gene Name: zinc finger protein interacting with K protein 1
  ENST ID: ENST00000536878
  CDS Start-End: 218-1642
acttcagtggcggtcatttttgcagcgcttgggtgcatccagaccgtcagagctttgggagcgctttgtttggcgacagtcggaaggcgcgaggggaggggtcctcccgctgaacagtgggggttctaagggtcggcggcggcggggttgacggctttgcctaggtccctccgcccgtagctgtcgggtcccggccccgctctgcccacagactccgatggctgcggccgcgctgagggccccgactcagggctgtgtgacctttgaggacatcgccatttacttctcacaggacgagtggggacttcttgatgaggctcagagactcctgtaccttgaagtgatgctggagaactttgcccttgtagcctcactgggttgtggccatggaacagaggatgaagagacaccttctgaccagaatgtttctgtaggagtgtcacagtcaaaggcaggttcatccacacagaagactcaatcctgtgagatgtgtgtcccagtcctgaaagatattttgcatctagctgatctccctgggcagaaaccatacttggttggagaatgtacaaaccatcaccagcaccagaagcatcacagtgcaaagaaatccttgaagagggacatggacagagcctcatatgtgaagtgctgcctattctgtatgtcattgaagccctttcgcaaatgggaggttggaaaggaccttccagccatgttgcggcttctgaggtccctggtctttcctggaggcaagaaacccggcacaattactgaatgtggggaggacattcgcagtcaaaaaagtcattacaagtcaggtgaatgtgggaaggcttccaggcacaaacacactcctgtttaccatccaagagtctacactggaaaaaagctttatgagtgtagcaaatgtgggaaagccttccgtggcaagtactcacttgttcagcaccagagagtccatactggagaaaggccttgggagtgcaatgaatgtggaaaattctttagccaaacctcccacctgaatgatcatcggagaatccacaccggagaaaggccttatgagtgcagcgaatgtggaaaattatttagacaaaactccagccttgttgaccaccagaaaatacacactggagcaaggccttatgagtgtagccagtgtgggaaatcctttagccaaaaagccacccttgttaaacaccaaagagttcacactggagaaaggccttataagtgtggtgaatgtgggaattcctttagtcaaagtgccattcttaatcaacaccgaagaattcacactggagcaaagccttatgagtgtggccagtgtgggaaatcctttagtcaaaaagctaccctcattaaacaccagagagttcacactggagaaaggccttataagtgtggtgactgtgggaaatcctttagtcaaagctccatccttattcaacaccggagaattcatactggagcaaggccttatgagtgtggccagtgtggaaagtcctttagccaaaagtctggtctcattcaacaccaagtggttcacactggagaaaggccttatgagtgcaacaaatgtgggaattcctttagccaatgctccagcctcatacatcaccaaaaatgtcataacacatagaggcctcatgaatgcagcaaatgtggaagcgccttcaactcaagatctatcatcatttagctcctgaaagtccacacttaagtagagccttagacctacagggaaagtgctgtctctgtagtattgtagcagtagagagcctttgtgagggagccatctgcctgaagttgaacctcattcttccttgtttctctggtagaaaccatctaccctctaccaccttgcacagtgggcactggtcactcctatgtgctaagacaaggcagacatctgtgtgttctcttaagtctttggaggaaatcttgagcagtctaagcctttagagaaaattcattcttttttctgactgatcacagcatacgtgtgacccagtttgggtcaggagggcccagccttggttctgctggacacttatgtgcaaggattcccttcatgtaaattcttggtctcacatgacacttggtcattcttccagcctccatgtcaccacgtggtgaatggctgcctcacattgctccagtttgtgcactaataaaagccttatatttgaatctacctgtagtcttggggttctgtttactgtgtggggtggctgggagacagacttcaactctatatgaaggaatggatggcttttgtgggcctctgcaggaaagtaagatgacagagtaattctaattctggttttggtcatacttgctttgctacctaaaatctcctaggaaaaaatgcaaggttttggttattctaatttgtggcctggatccctattctttctgtgagactagaggtcatcctgaggagaggccagctgttatgacaagcatgtgtgcttcagggaataggacaattttattccattgtttccagaggatgtcatatgatgcccagtgctgctgagaagcttttcatggggttctataaggaggcatgccctgatatcaaacattccataggccgatgtcacgcagaagacaacgcgagtcacatgtgaactgtaattggtacagaaatacctgggtatttctgtactgtgtgtactgtagcaaactagttggaatgtgcctcttataaaagtacatttacaaatcttcccgtgactgtggctttgagcagtcataggacctagaaatctgtgtatgtccaatagctgaggttattttcagcaaaaataattaaagggttttattttttaattcttgttggttttctaggttgttcacctcaagtgcattgctgtagaggcagaaaaaggaggataaagataacagaagtcctataggccagggatgtattgatagctcttgtgatttccaccagtgttgctgttgtctcaaattgccacagccttcattgcttgccaacatttcctgcatggagggactcatggttgcccttccccaggcctgaagagagagtgcagtcaacatgagattgctaggcattctggtttctgaaagttgggtgatcagatactttattgtgaaacatgttttacaaactttcttgatgtgtaagtgacatgccatagtttacatccatttatggtgtataatttgaagagtttgtcatacaagcctgtgaaaccataatcatgatcatgaacatattcatgattcacctcttgctgttttacaatctctgcgtgtactttccaggccttcaggagtcctgtcatttactttccctacaggagaatagtttgtgttttctaggattttatgtgaattgaaacgtaaaatacttactccatttttcctgatgatgcacaattttttttttttttttgagatggagtctcagtctgtcaccaggctggagtgcagtggcatgatcttggctcactccaacctcctcctgggttccagcgattctcctgcctcagcctcctgagaagctaggactacaggcatgcactaccacgcccaactaatttttgtatttttagtagagatgtggttttaccatgtttgccaggatggtcttgatctcttgacctcgtgatccgcccgcctcagcctcccgaagtgctgggattacaggcgtaagccaccacaccagctgatgcacaattacttttaagatttatcaatattgcttatgtgaatagttcatttgtattgctgagaaatagtctgtggatatgtcacaatttggataaacagttggatgctttccagttttgggctgttgcaaataatgctactatgaacataggcatataactcttaatatgcagaaatgctttatttctcctgtgtcagtagtacagtgtacgtgaatgcgtcacttttaaagacaaggccagactataacctaactgtaccatttgcattctcatcaacagtatgtgaaccttcttatttctctacattcttgccatacttggtatggttagtctttttaattttagttgttttaatagctgtataatagcatctgtctgtgattttattgcatttttctggtattttatggtattgaacatttgaacatcttgta

SEQ ID NO: 204096 - DNA, 2860 bp, Homo sapiens
  Payload ID: 20255
  Gene Name: zinc finger protein interacting with K protein 1
  Uniprot ID: Q3SY52
  ENST ID: ENST00000599456
  CDS Start-End: 447-1745
gggttctaagggtcggcggcggcggggttgacggctttgcctaggtccctccgcccgtagctgtcgggtcccggccccgctctgcccacagactccgatggctgcggccgcgctgagggccccgactcaggtgagcgctgcctctactgggcctcaccctccatccccaaattagtgccttcttgggtcactacggtcgagatcctcatgtccagtacagtgggggctcgtgggtggggtccctatttccagaacttgggtgatggggcacggaagagggttacaggcaaagggaccagcgtttctaaactcttggagacacagtgaagaaggttcatacctggagtgccaagggctgtgtgacctttgaggacatcgccatttacttctcacaggacgagtggggacttcttgatgaggctcagagactcctgtaccttgaagtgatgctggagaactttgcccttgtagcctcactgggttgtggccatggaacagaggatgaagagacaccttctgaccagaatgtttctgtaggagtgtcacagtcaaaggcaggttcatccacacagaagactcaatcctgtgagatgtgtgtcccagtcctgaaagatattttgcatctagctgatctccctgggcagaaaccatacttggttggagaatgtacaaaccatcaccagcaccagaagcatcacagtgcaaagaaatccttgaagagggacatggacagagcctcatatgtgaagtgctgcctattctgtatgtcattgaagccctttcgcaaatgggaggttggaaaggaccttccagccatgttgcggcttctgaggtccctggtctttcctggaggcaagaaacccggcacaattactgaatgtggggaggacattcgcagtcaaaaaagtcattacaagtcaggtgaatgtgggaaggcttccaggcacaaacacactcctgtttaccatccaagagtctacactggaaaaaagctttatgagtgtagcaaatgtgggaaagccttccgtggcaagtactcacttgttcagcaccagagagtccatactggagaaaggccttgggagtgcaatgaatgtggaaaattctttagccaaacctcccacctgaatgatcatcggagaatccacaccggagaaaggccttatgagtgcagcgaatgtggaaaattatttagacaaaactccagccttgttgaccaccagaaaatacacactggagcaaggccttatgagtgtagccagtgtgggaaatcctttagccaaaaagccacccttgttaaacaccaaagagttcacactggagaaaggccttataagtgtggtgaatgtgggaattcctttagtcaaagtgccattcttaatcaacaccgaagaattcacactggagcaaagccttatgagtgtggccagtgtgggaaatcctttagtcaaaaagctaccctcattaaacaccagagagttcacactggagaaaggccttataagtgtggtgactgtgggaaatcctttagtcaaagctccatccttattcaacaccggagaattcatactggagcaaggccttatgagtgtggccagtgtggaaagtcctttagccaaaagtctggtctcattcaacaccaagtggttcacactggagaaaggccttatgagtgcaacaaatgtgggaattcctttagccaatgctccagcctcatacatcaccaaaaatgtcataacacatagaggcctcatgaatgcagcaaatgtggaagcgccttcaactcaagatctatcatcatttagctcctgaaagtccacacttaagtagagccttagacctacagggaaagtgctgtctctgtagtattgtagcagtagagagcctttgtgagggagccatctgcctgaagttgaacctcattcttccttgtttctctggtagaaaccatctaccctctaccaccttgcacagtgggcactggtcactcctatgtgctaagacaaggcagacatctgtgtgttctcttaagtctttggaggaaatcttgagcagtctaagcctttagagaaaattcattcttttttctgactgatcacagcatacgtgtgacccagtttgggtcaggagggcccagccttggttctgctggacacttatgtgcaaggattcccttcatgtaaattcttggtctcacatgacacttggtcattcttccagcctccatgtcaccacgtggtgaatggctgcctcacattgctccagtttgtgcactaataaaagccttatatttgaatctacctgtagtcttggggttctgtttactgtgtggggtggctgggagacagacttcaactctatatgaaggaatggatggcttttgtgggcctctgcaggaaagtaagatgacagagtaattctaattctggttttggtcatacttgctttgctacctaaaatctcctaggaaaaaatgcaaggttttggttattctaatttgtggcctggatccctattctttctgtgagactagaggtcatcctgaggagaggccagctgttatgacaagcatgtgtgcttcagggaataggacaattttattccattgtttccagaggatgtcatatgatgcccagtgctgctgagaagcttttcatggggttctataaggaggcatgccctgatatcaaacattccataggccgatgtcacgcagaagacaacgcgagtcacatgtgaactgtaattggtacagaaatacctgggtatttctgtactgtgtgtactgtagcaaactagttggaatgtgcctcttataaaagtacatttacaaatcttcccgtgactgtggctttgagca

SEQ ID NO: 204097 - DNA, 534 bp, Homo sapiens
  Payload ID: 20255
  Gene Name: zinc finger protein interacting with K protein 1
  ENST ID: ENST00000598689
  CDS Start-End: 213-534
agtggcggtcatttttgcagcgcttgggtgcatccagaccgtcagagctttgggagcgctttgtttggcgacagtcggaaggcgcgaggggaggggtcctcccgctgaacagtgggggttctaagggtcggcggcggcggggttgacggctttgcctaggtccctccgcccgtagctgtcgggtcccggccccgctctgcccacagactccgatggctgcggccgcgctgagggccccgactcaggacgagtggggacttcttgatgaggctcagagactcctgtaccttgaagtgatgctggagaactttgcccttgtagcctcactgggttgtggccatggaacagaggatgaagagacaccttctgaccagaatgtttctgtaggagtgtcacagtcaaaggcaggttcatccacacagaagactcaatcctgtgagatgtgtgtcccagtcctgaaagatattttgcatctagctgatctccctgggcagaaaccatacttggttggagaatgtacaaaccatcaccagc

SEQ ID NO: 204098 - DNA, 584 bp, Homo sapiens
  Payload ID: 20255
  Gene Name: zinc finger protein interacting with K protein 1
  ENST ID: ENST00000597219
  CDS Start-End: 493-584
agtggcggtcatttttgcagcgcttgggtgcatccagaccgtcagagctttgggagcgctttgtttggcgacagtcggaaggcgcgaggggaggggtcctcccgctgaacagtgggggttctaagggtcggcggcggcggggttgacggctttgcctaggtccctccgcccgtagctgtcgggtcccggccccgctctgcccacagactccgatggctgcggccgcgctgagggccccgactcaggtgagcgctgcctctactgggcctcaccctccatccccaaattagtgccttcttgggtcactacggtcgagatcctcatgtccagtacagtgggggctcgtgggtggggtccctatttccagaacttgggtgatggggcacggaagagggttacaggcaaagggaccagcgtttctaaactcttggagacacagtgaagaaggttcatacctggagtgccaaggttactgtgtctccagaaacacatatggacctcacaaagggctgtgtgacctttgaggacatcgccatttacttctcacaggacgagtggggacttcttgatgaggctcagagact

SEQ ID NO: 204099 - DNA, 720 bp, Homo sapiens
  Payload ID: 20255
  Gene Name: zinc finger protein interacting with K protein 1
  ENST ID: ENST00000600053
  CDS Start-End: 391-720
gggggcgcggcccccacgtggcctcccgggacacgtgcccacagcgcgacacctaagtcgctcctttcacagaatagccttggccccggcacggcctcgaacgccttgaccccgcaagggaggggcacgaggctcctttgctcccgcaggagcgtcgaatacgtatggaatacgcgtcggtgtggatctggcctcagcttcctgagcctgaatcaatgcttctaatcacgtgggcgctcagccgcgacgggaccacagaaatcgaccagcggcctgtttaaggagcgacaaggcccagccctctcctgcattgtggcgacgccatttccctgcgcccccagcgcggccgcttggcttttgtttgaggttactgtgtctccagaaacacatatggacctcacaaagggctgtgtgacctttgaggacatcgccatttacttctcacaggacgagtggggacttcttgatgaggctcagagactcctgtaccttgaagtgatgctggagaactttgcccttgtagcctcactgggttgtggccatggaacagaggatgaagagacaccttctgaccagaatgtttctgtaggagtgtcacagtcaaaggcaggttcatccacacagaagactcaatcctgtgagatgtgtgtcccagtcctgaaagatattttgcatctagctgatctccctgggcagaaaccatacttggttggagaatgt

SEQ ID NO: 204100 - DNA, 4181 bp, Homo sapiens
  Payload ID: 20255
  Gene Name: zinc finger protein interacting with K protein 1
  Uniprot ID: Q3SY52
  ENST ID: ENST00000597850
  CDS Start-End: 216-1679
ttcagtggcggtcatttttgcagcgcttgggtgcatccagaccgtcagagctttgggagcgctttgtttggcgacagtcggaaggcgcgaggggaggggtcctcccgctgaacagtgggggttctaagggtcggcggcggcggggttgacggctttgcctaggtccctccgcccgtagctgtcgggtcccggccccgctctgcccacagactccgatggctgcggccgcgctgagggccccgactcaggttactgtgtctccagaaacacatatggacctcacaaagggctgtgtgacctttgaggacatcgccatttacttctcacaggacgagtggggacttcttgatgaggctcagagactcctgtaccttgaagtgatgctggagaactttgcccttgtagcctcactgggttgtggccatggaacagaggatgaagagacaccttctgaccagaatgtttctgtaggagtgtcacagtcaaaggcaggttcatccacacagaagactcaatcctgtgagatgtgtgtcccagtcctgaaagatattttgcatctagctgatctccctgggcagaaaccatacttggttggagaatgtacaaaccatcaccagcaccagaagcatcacagtgcaaagaaatccttgaagagggacatggacagagcctcatatgtgaagtgctgcctattctgtatgtcattgaagccctttcgcaaatgggaggttggaaaggaccttccagccatgttgcggcttctgaggtccctggtctttcctggaggcaagaaacccggcacaattactgaatgtggggaggacattcgcagtcaaaaaagtcattacaagtcaggtgaatgtgggaaggcttccaggcacaaacacactcctgtttaccatccaagagtctacactggaaaaaagctttatgagtgtagcaaatgtgggaaagccttccgtggcaagtactcacttgttcagcaccagagagtccatactggagaaaggccttgggagtgcaatgaatgtggaaaattctttagccaaacctcccacctgaatgatcatcggagaatccacaccggagaaaggccttatgagtgcagcgaatgtggaaaattatttagacaaaactccagccttgttgaccaccagaaaatacacactggagcaaggccttatgagtgtagccagtgtgggaaatcctttagccaaaaagccacccttgttaaacaccaaagagttcacactggagaaaggccttataagtgtggtgaatgtgggaattcctttagtcaaagtgccattcttaatcaacaccgaagaattcacactggagcaaagccttatgagtgtggccagtgtgggaaatcctttagtcaaaaagctaccctcattaaacaccagagagttcacactggagaaaggccttataagtgtggtgactgtgggaaatcctttagtcaaagctccatccttattcaacaccggagaattcatactggagcaaggccttatgagtgtggccagtgtggaaagtcctttagccaaaagtctggtctcattcaacaccaagtggttcacactggagaaaggccttatgagtgcaacaaatgtgggaattcctttagccaatgctccagcctcatacatcaccaaaaatgtcataacacatagaggcctcatgaatgcagcaaatgtggaagcgccttcaactcaagatctatcatcatttagctcctgaaagtccacacttaagtagagccttagacctacagggaaagtgctgtctctgtagtattgtagcagtagagagcctttgtgagggagccatctgcctgaagttgaacctcattcttccttgtttctctggtagaaaccatctaccctctaccaccttgcacagtgggcactggtcactcctatgtgctaagacaaggcagacatctgtgtgttctcttaagtctttggaggaaatcttgagcagtctaagcctttagagaaaattcattcttttttctgactgatcacagcatacgtgtgacccagtttgggtcaggagggcccagccttggttctgctggacacttatgtgcaaggattcccttcatgtaaattcttggtctcacatgacacttggtcattcttccagcctccatgtcaccacgtggtgaatggctgcctcacattgctccagtttgtgcactaataaaagccttatatttgaatctacctgtagtcttggggttctgtttactgtgtggggtggctgggagacagacttcaactctatatgaaggaatggatggcttttgtgggcctctgcaggaaagtaagatgacagagtaattctaattctggttttggtcatacttgctttgctacctaaaatctcctaggaaaaaatgcaaggttttggttattctaatttgtggcctggatccctattctttctgtgagactagaggtcatcctgaggagaggccagctgttatgacaagcatgtgtgcttcagggaataggacaattttattccattgtttccagaggatgtcatatgatgcccagtgctgctgagaagcttttcatggggttctataaggaggcatgccctgatatcaaacattccataggccgatgtcacgcagaagacaacgcgagtcacatgtgaactgtaattggtacagaaatacctgggtatttctgtactgtgtgtactgtagcaaactagttggaatgtgcctcttataaaagtacatttacaaatcttcccgtgactgtggctttgagcagtcataggacctagaaatctgtgtatgtccaatagctgaggttattttcagcaaaaataattaaagggttttattttttaattcttgttggttttctaggttgttcacctcaagtgcattgctgtagaggcagaaaaaggaggataaagataacagaagtcctataggccagggatgtattgatagctcttgtgatttccaccagtgttgctgttgtctcaaattgccacagccttcattgcttgccaacatttcctgcatggagggactcatggttgcccttccccaggcctgaagagagagtgcagtcaacatgagattgctaggcattctggtttctgaaagttgggtgatcagatactttattgtgaaacatgttttacaaactttcttgatgtgtaagtgacatgccatagtttacatccatttatggtgtataatttgaagagtttgtcatacaagcctgtgaaaccataatcatgatcatgaacatattcatgattcacctcttgctgttttacaatctctgcgtgtactttccaggccttcaggagtcctgtcatttactttccctacaggagaatagtttgtgttttctaggattttatgtgaattgaaacgtaaaatacttactccatttttcctgatgatgcacaattttttttttttttttgagatggagtctcagtctgtcaccaggctggagtgcagtggcatgatcttggctcactccaacctcctcctgggttccagcgattctcctgcctcagcctcctgagaagctaggactacaggcatgcactaccacgcccaactaatttttgtatttttagtagagatgtggttttaccatgtttgccaggatggtcttgatctcttgacctcgtgatccgcccgcctcagcctcccgaagtgctgggattacaggcgtaagccaccacaccagctgatgcacaattacttttaagatttatcaatattgcttatgtgaatagttcatttgtattgctgagaaatagtctgtggatatgtcacaatttggataaacagttggatgctttccagttttgggctgttgcaaataatgctactatgaacataggcatataactcttaatatgcagaaatgctttatttctcctgtgtcagtagtacagtgtacgtgaatgcgtcacttttaaagacaaggccagactataacctaactgtaccatttgcattctcatcaacagtatgtgaaccttcttatttctctacattcttgccatacttggtatggttagtctttttaattttagttgttttaatagctgtataatagcatctgtctgtgattttattgcatttttctggtattttatggtattgaacatttgaacatcttgta

SEQ ID NO: 204101 - DNA, 5380 bp, Homo sapiens
  Payload ID: 20256
  Gene Name: zinc finger protein, FOG family member 1
  Uniprot ID: Q8IX07
  ENST ID: ENST00000319555
  CDS Start-End: 323-3343
cgccgctcgccgcccgcgggttccattgagaaaagccgagcggccgcggcggcggcggcgagtgcgcgggagcggaggagccggcacccgcccgtcgggcagtccgcgcgcccgcaacgcaggaccgtggcctctcgggcctccgcggcagctccagcggctccggggctgggcgcgcgggctgggggcgcgggccggggcggccgcggagaccgggggccgggggcatgagcggccccgcggccccgccgcgcccccgccgcccgccgccgcccgcccggggctagaggcggccgccgggagggcgcgcggcgccggagacatgtccaggcggaaacagagcaacccccggcagatcaagcgttccctcggagacatggaggccagagaggaggtgcagttggtgggtgccagccacatggagcaaaaggccacggcacctgaagccccgagccctcccagcgcagatgttaactcacccccaccgctgccgccccccacatccccaggaggccccaaggagctggaaggacaggaaccagaacccaggcccacggaggaagagccgggcagtccctggagcgggccagacgagctggagccggtggtgcaggatgggcagaggcgcatacgggcccgactcagcctcgccacgggcctgtcctggggcccgttccatgggagtgtccagaccagagcctcatcccccaggcaggcggagccgagcccagccctgaccctgctgctggtggacgaggcctgctggctgaggacgctgccccaggccctgactgaggccgaggccaacacagagatccacaggaaggatgacgcactctggtgcagggtcaccaagccggtgcctgcggggggactcctgagcgtgctcctcacggccgagccccacagcacccccggccaccctgtgaagaaggagccagcagagcccacgtgcccggcccctgcacacgacctccagctcctgccccagcaggccgggatggcctccatccttgccaccgcagtgatcaacaaagacgtcttcccctgcaaggactgtggcatctggtaccgcagcgagcgcaacctgcaggcgcacctgctctactactgcgccagccgccagggcaccggctccccggccgcagccgccacagacgagaagcccaaagagacctaccccaacgagcgcgtctgccccttcccccagtgccgcaagagctgccccagcgccagctccctggagatccacatgcgcagccacagcggagagcggcccttcgtgtgcctgatctgcctgtcggccttcaccaccaaggccaactgcgagcggcacctcaaggtgcacacggacacgctgagcggtgtctgccacagctgtggcttcatctccaccacaagggacatcctctacagccacttggtcaccaaccacatggtctgccagcctggctccaagggtgagatctactcgccaggggccggacacccagcaaccaagctgcccccagacagtctgggcagcttccagcagcagcacacggccctgcaaggccccctggcctccgcggacctgggcctggcgcccaccccatcgccaggactggacagaaaggccctggccgaggccaccaacggagaggccagagcggagcctctggcccagaatggaggcagcagcgagcccccggcggcccccaggagcatcaaggtggaggcggtggaggagccggaggcggcccccatcctgggccccggagagcctgggccccaggccccgtcgcggacgccgtcgccgcgcagccccgccccggccagggtcaaggccgagctgtccagccccacgccgggctccagcccggtgcccggcgagctgggcctggccggggccctgttccttccgcagtacgtgttcgggcccgacgcggcgccccccgcctcggagatcctggccaagatgtccgagctggtgcacagccggctgcagcagggcgcgggcgcgggcgccggcggcgcgcagaccgggctcttccccggggcccccaagggcgctacgtgcttcgagtgcgagatcaccttcagcaacgtcaacaactactacgtgcacaagcgcctctactgttcaggccgccgtgcgcccgaggacgcgcctgccgcgcgcaggcccaaggcgccccccggcccggcccgcgcgccccccggccagcccgccgaacccgacgcgccgcgctcgtccccgggccccggagcgcgcgaggagggggctgggggcgcggccacgcccgaggacggcgcgggcggccggggcagcgagggcagccagagcccgggtagctccgtggacgacgcggaggacgaccccagccgcacgctgtgcgaggcctgcaacatccgcttcagccgccacgagacctacaccgtgcacaagcggtactactgcgcctcgcgccacgacccgccgccgcgccgaccggccgcgcccccgggaccccctgggccggccgcgcccccggccccctctcccgccgcgcctgtgcgcacgcgcagacgccgcaagctctacgagctgcacgcggccggcgccccgccccccccgccgcccggccacgcccccgcgcccgagtcgccgcggcccggaagcggaagcggaagcggccccggcctcgcccctgcgcgctcgcccggccccgcggccgacggccccatcgacctgagcaagaagccgcggcgcccgctccccggagccccggcaccggcgctggccgactaccacgagtgcacggcctgccgcgtgagcttccacagcctcgaggcctacctggcgcacaagaagtactcgtgccccgctgcgccaccgcccggcgcgctcggcctgcccgccgccgcctgcccctactgccccccgaacggcccggtgcgcggggacctgctggagcatttccgcctggcgcacggcctgctgctcggcgcgcccctggccggcccgggggtcgaggcccggacgccggccgaccgcggcccctcgcccgctcccgcccccgccgcctccccgcagcccgggtcccgtggcccccgggacggcctcggcccggagccccaggagccgccgcccggcccgcccccgtccccggccgccgcgcccgaggccgtgccgcccccgccggcgcccccctcctactcggacaagggcgtccagactcccagcaagggcacgccggcgccgctgcccaacggcaaccaccggtactgccgtctttgcaacatcaagttcagcagcctgtccaccttcatcgcccacaagaagtattactgctcctcgcacgccgccgagcacgtgaagtgagcgcccacactacagccgcagacgctttgcacgccccgctgcgatgcggggagggggccgcccccaggccgcacggactgccgctcctgggaaccccgccacgcacaggcctcggcggagggggccgcagggggcagcgcccgcctggacccttggcacttaataaagaagttcagtttgatgagcatggtggtgggccagcctagttctctgagccagcaggcacacgcagccagtgtcacatccagccctgctgtgtacacaggccactgcggcccggagtggctgggcccctgccggagttacaccactgggtgctaagagctagaccgagcgtcaggtcggaggccacagcacacactgaaccactgcagggccagccgctctgggcctaccccaccccagccctgtccatacccccctagggagagcagcctccacactgctgaccctctccacggtctacttggccgccagacacggaagagaggggcactgacctggctggccatcccccaaccctgcatggtcctgggggtccgatgtcccccatccagtcacagaccaccagggatggcaggggtgggggcgccctggggaggatgaagccctgtggtggccaaggctgggggaagaacaggcgagtaggtggacaggagagggagaccgaggccgaagcattccctggcctcgagggggtcctgatgctcactggtgggtgcatctctccctcagagccagggctgaggacaaccgtgtggtggagtcacctgtggtggctgagtcggtgcaagggtcagggcacccccaccccccgtcttccctgccctgctgggctgtatgggccggccacactgagggagtacttggctgaccgcgttcagccacggtgtcaccgtgccgtttgcagctgggtggctgtgggcagcctccagcgtgctttctcactggagaacaaaaacactcttctattcccaacgtcactttatttttttatttttgggtctcactctcttgcccaggctggagtccctgggatactcacggctcattgcagccttgacctcgtgagctcaagtgatcttcccacctcagtttcctcagtagctggggctacaggtgtacaccaccatgcccagctagtttttgtgttttttgtagaaatggtgtctccctatgttgcccaggctgggcaaccctatattttttagagctaaggtcttgttcggttccccaggctgaagttcagtggcacgatcataagtcactgcagcctcaaactcctgagctgaaaccatcttcctgcctcagcctcccaagtagctgggactacaggcttgacccaccacacctggctaacttttaaaacatttttatagagacagggtcttcctgtgttgcccaagatggtctcaaactcctgacctccagtgctcctgcagcctcagcctcccagaacattaggatgacaggcgcgagctaccattcccagcccatttccaactctacttgaactagctgcatttttttcagctttgcccagcagccctggtgagtgcaggcaaagaaggcagcggcctcttgcctcagaagcccgaggcacttcccagccagtccagggctcgctctcctgcccgcagctcgtgggcctgggtctgcagcgctttcagtggtctctgatgtctttgtccacctgcccactagggtctggccagatggggcccgtagccaaggccaatggacagacatggcttccaccccctcccagggacctgagctccagggaaggcaagcagccttttcctcacagacaccccttctgttgaagaccaggtgatagcggggacgggaggcacggacccctcaagtctgctcatcatttgcattgttgtgcatgaatttgcgtggagggttcaggaggctctgcccccaagtcctccccaggtgcgggcgcagggtacaagatgttctaaaaaatagaaacctggtggggggttgtcactgtgtgtacatttaaaagtaaactgtttaaaggtg

SEQ ID NO: 204102 - DNA, 502 bp, Homo sapiens
  Payload ID: 20256
  Gene Name: zinc finger protein, FOG family member 1
  ENST ID: ENST00000562437
  CDS Start-End: 13-468
ggcgccggagacatgtccaggcggaaacagagcaacccccggcagatcaagcgttccctcggagacatggaggccagagaggaggtgcagttggtgggtgccagccacatggagcaaaaggccacggcacctgaagccccgagccctcccagcgcagatgttaactcacccccaccgctgccgccccccacatccccaggaggccccaaggagctggaaggacaggaaccagaacccaggcccacggaggaagagccgggcagtccctggagcgggccagacgagctggagccggtggtgcaggatgggcagaggcgcatacgggcccgactcagcctcgccacgggcctgtcctggggcccgttccatgggagtgtccagaccagagcctcatcccccaggcaggcggagccgcgaggcgctatctccgccttggcgccgagtgtccagacacaccgtacaagatgattgatttcttcaagatatgcacgcctttccgata

SEQ ID NO: 204103 - DNA, 563 bp, Homo sapiens
  Payload ID: 20256
  Gene Name: zinc finger protein, FOG family member 1
  ENST ID: ENST00000569086
  CDS Start-End: 15-491
gcggcgccggagacatgtccaggcggaaacagagcaacccccggcagatcaagcgttccctcggagacatggaggccagagaggaggtgcagttggtgggtgccagccacatggagcaaaaggccacggcacctgaagccccgagccctcccagcgcagatgttaactcacccccaccgctgccgccccccacatccccaggaggccccaaggagctggaaggacaggaaccagaacccaggcccacggaggaagagccgggcagtccctggagcgggccagacgagctggagccggtggtgcaggatgggcagaggcgcatacgggcccgactcagcctcgccacgggcctgtcctggggcccgttccatgggagtgtccagaccagagcctcatcccccaggcaggcggagccgatgagaaaactgaggctccaagatgttaagtcaattgcccaaatacccaggatcaaacagcagagggagaaatagaacccacatctgcctatccccggagaccctcgcaagctccttaatgaattaaatccttgattaacccttatc

SEQ ID NO: 204104 - DNA, 808 bp, Homo sapiens
  Payload ID: 20256
  Gene Name: zinc finger protein, FOG family member 1
  ENST ID: ENST00000563351
  CDS Start-End: 13-366
ggcgccggagacatgtccaggcggaaacagagcaacccccggcagatcaagcgttccctcggagacatggaggccagagaggaggtgcagttggtgggtgccagccacatggagcaaaaggccacggcacctgaagccccgagccctcccagcgcagacgagctggagccggtggtgcaggatgggcagaggcgcatacgggcccgactcagcctcgccacgggcctgtcctggggcccgttccatgggagtgtccagaccagagcctcatcccccaggcaggcggagccgatgagaaaactgaggctccaagatgttaagtcaattgcccaaatacccaggatcaaacagcagagggagaaatagaacccacatctgcctatccccggagaccctcgcaagctccttaatggtagggctgaggggctggcaccggcccaggagtcatccccacgggctgccctttgccctagctgcagtcacccctccctgtccgcctgcctccgcatttagtcctgctctggcctagggcacaggccatcctggggatacgggcacggggttagaaacgctcccaagtggggagataacgtctgggggcacaaggggagccaaggccagaggagccgctggggctctgtggggagcccggggaggaaggagcccccgctccactcttccctcctctgctttatctcctgcagaattaaatccttgattaacccttatctccccagcgaggcgctatctccgccttggcgccgagtgtccagacacaccgtacaagatgattgatttcttcaagata

SEQ ID NO: 204105 - DNA, 4700 bp, Homo sapiens
  Payload ID: 20257
  Gene Name: zinc finger protein, FOG family member 2
  Uniprot ID: Q8WW38
  ENST ID: ENST00000407775
  CDS Start-End: 251-3706
ctctccccctcccctcctcactgtcacactctctgtgcccccgtctctcttctctcatttgcttgctcatctccgaacgtgaatccgcggctcccggaggagcccagcgcccggagcacctggagtccggccggcggcgggccgagcctggccagcggcggcggcggcggcggcggcggcgggagccgagggagcggcagccgcgaccgcgggcaccgcgggagccccagcggcagcagccgccgccgagatgtcccggcgaaagcaaagcaaaccccggcagatcaaacggccgcttgaagatgccattgaagatgaggaagaagaatgtccatcagaggaaacagacatcatctccaaaggagactttccattggaggaaagcttttccacagaatttgggcctgaaaatctgagctgcgaagaagtggaatacttttgtaacaaaggtgatgatgaaggaatccaggagacagcagaatcagatggggacacacagtcagagaaaccggggcaacctggagttgagacagacgactgggatggaccaggagagctggaggtgtttcagaaagatggggaacgaaaaattcagagtcgacagcaacttccagtgggaacaacctgggggccgtttcctgggaagatggacttgaataataattctttgaagacaaaggctcaggtcccaatggtgctgactgctggtcccaagtggttgctggatgtgacttggcaaggagtggaagacaacaaaaacaactgcattgtgtacagcaaagggggtcagctttggtgtacaactacgaaggccatctctgagggtgaagagctaattgcctttgtggtggattttgactcaaggctacaagctgccagtcagatgactctcacagaagggatgtaccctgcacgcctgctggactcaattcagctgcttcctcagcaagctgccatggcttctattttgcccacagctattgtcaataaggatatattcccttgcaagtcctgtggcatctggtatcggagtgagcggaatctgcaggcccatttgatgtactactgcagtgggaggcaaagagaagctgctccggtgtcagaggaaaatgaagacagtgcccatcagatttccagcctgtgccccttcccacagtgcaccaagagcttttcaaatgctcgagctctagaaatgcacctgaattcacacagtggagtgaaaatggaagaattcctgccccctggtgctagtctaaaatgcaccgtctgtagctacactgctgattccgtgatcaactttcaccaacacctgttctcccatctcactcaagctgccttccgatgtaatcactgccatttcggcttccagactcagagggagttattgcagcaccaggagctccatgtccctagcggcaaacttcccagagaaagtgacatggaacactctccaagtgcaactgaagacagcttacagccagccacagacttattgaccagaagcgaacttccccagagccaaaaggccatgcagactaaagatgcgagctctgacacagagctggacaagtgtgagaaaaagactcagctctttctcacgaaccagagaccagagatacagcctacaacaaataaacaaagcttttcttacacaaaaataaagtctgagccctctagcccaagacttgcctcatctccagttcagcctaatattgggccttctttccctgtgggccctttcctatctcagttttctttcccccaagatatcaccatggtccctcaagcttcagagatcttagctaagatgtctgaactggtgcatcggcgactgaggcatggcagtagtagctaccctcccgtcatttacagccctttgatgcccaagggggctacttgttttgagtgtaacataacattcaataatttggataattatctagtgcacaaaaagcattattgcagcagccgatggcagcagatggctaagtccccagagttccctagtgtgtcagaaaagatgcctgaagctttgagtcccaacactggccaaacctccataaaccttctcaacccagctgctcattctgctgatcctgagaatccacttcttcaaacatcttgcatcaattcttccactgtcttagatttaattgggccaaatgggaagggccatgacaaggacttttccactcaaactaagaagctctccacctccagtaacaatgatgacaaaattaatggaaaacctgttgatgtgaaaaatcccagtgtccccttagtggatggggaaagtgacccaaataagactacctgtgaagcttgcaacattaccttcagccggcacgaaacatacatggtccacaaacagtattactgtgctacacgccacgaccctccactgaagaggtctgcttccaacaaagtgcctgccatgcagagaaccatgcgcacacgcaagcgcagaaagatgtatgagatgtgcctacctgagcaggaacaaaggcctccactggttcagcagagatttcttgacgtagccaacctcaataatccttgtacctccactcaagaacccacagaagggctaggagagtgctaccacccaagatgtgatatctttccaggaattgtctctaaacacttggaaacttctctgacgatcaacaagtgtgttccagtttccaaatgtgatactactcattccagtgtttcctgcctagagatggacgtgcccatagatctcagcaaaaagtgtttatctcagtctgagcggacgaccacgtctcccaaaaggctgctggactatcacgagtgcactgtgtgcaagatcagtttcaataaggtagaaaactatctggcccacaagcagaatttctgcccggttactgcacatcagcgtaatgacctgggtcaactggacggcaaagtgtttccgaatccagaaagcgaacgaaacagccctgatgtcagctacgaaagaagcataataaaatgtgagaaaaatgggaatttgaagcagccttcccccaatggaaacttattttcatcccacctagcaaccctgcaaggcttgaaggtctttagtgaagctgctcagctcattgctacaaaagaagaaaacagacatttgtttcttccacaatgcctttaccctggagcaataaagaaagcaaaaggagccgaccagctttctccatattatggaatcaagccaagtgattatatttctggttctcttgtcatccataacactgacatcgagcaaagcagaaatgcagaaaatgaatctcctaaaggccaggcttcctcaaatgggtgtgctgcgctgaagaaagattctctgccattgttgcccaaaaatcgaggaatggtaatagtgaatggtggactgaaacaagatgagagacctgctgccaacccacagcaagagaacatttcccagaatcctcagcacgaagacgaccacaaatctccctcgtggatctctgagaacccattagctgccaatgagaatgtctcaccaggaattccctcagcagaggaacagttgtctagtatagcaaaaggtgtgaatggttccagccaggctccaaccagtgggaaatattgccggctatgtgatatccagttcaacaacctttcaaactttataactcacaagaagttttattgctcatcacatgcagcagaacatgtcaaatgaactaactaaacatcagtcacctttggtatcagtgtttagtatgttgttctaaccagtccagaaaaaaaaataagctgtttgaattacatctgggcaatcaggagataattcattatggctgagttgaagacttaaggtgtaatttcattacagtccattagtaaagtgtattattggtgccattttcaaaaaaattaatttattttaccagcagtattcatagctgtggttatgttattttttatttaaaaactttatattaaagtcatttgtaatgttattgtatagttattgtgtagcacatatggtttgcactgtatagtagcttttaaagaaaatagtcacaatacagaaaagcattttagaaatagcttcaaaagcacttgtgtatcttgattttttcttatatgctgttgcagatatatgtatatgctaaaatataacttgcaaagatgttctaaatacacatgctataagttcgccttaagatttcaattcttggataatcaggctctgtttgcactttatattttagcagatacagtctcttagtcactaggctttgcatttgtatgtagctgtatgtttccgtccattttcttaatcctgaacctgtatgttaaatgaagatggcaatttttttcttgtatagtacttgtattttctttcgctgatgcagctctgtctcaatttttaaacctttgctgttaaatgcaatactttataaagaatgaacaaaattactggaagcagtattgtaagtaatgaggtagtattaatcagttttatcttttgaaaggcacagtctaaatcgaaaccctaaactcaatgctgcaagtatgaatttaattcatatataagatctatttaaatataagagtagcaatactgcacctggtgatcacaaagataatgttctacttctgatagaaataatttctcaacaaatgttgttactatgcatgtatatggatggaataaaattccagattgt

SEQ ID NO: 204106 - DNA, 594 bp, Homo sapiens
  Payload ID: 20257
  Gene Name: zinc finger protein, FOG family member 2
  ENST ID: ENST00000520027
  CDS Start-End: 517-594
agtgctaatcaaagtgtggtcagtgcacggaccaaagctatcaacatgacttcgaagctggttagcaaagcagaatggtgggatttgcctcagacccactgacacagaatctctgtgtgtggatcctaggatgctgtggagtaagtaacaggttccccagggccgcttgaagatgccattgaagatgaggaagaagaatgtccatcagaggaaacagacatcatctccaaaggagactttccattggaggaaagcttttccacagaatttgggcctgaaaatctgagctgcgaagaagtggaatacttttgtaacaaaggtgatgatgaaggaatccaggagacagcagaatcagatggggacacacagtcagagaaaccggggcaacctggagttgagacagacgactgggatggaccaggagagctggaggtgtttcagaaagatggggaacgaaaaattcagagtcgacagcaacttccagtgggaacaacctgggggccgtttcctgggaagatggacttgaataataattctttgaagacaaaggctcaggtcccaatggtgctgactgctggtcccaagtggttgctg

SEQ ID NO: 204107 - DNA, 3300 bp, Homo sapiens
  Payload ID: 20257
  Gene Name: zinc finger protein, FOG family member 2
  ENST ID: ENST00000517361
  CDS Start-End: 182-3241
agattcttagaagacccttcagagtctgaagtaaagaaagttttgaacctgttttttcattctactgtagggcttctgaaaacaaggagagctggaggtgtttcagaaagatggggaacgaaaaattcagagtcgacagcaacttccagtgggaacaacctgggggccgtttcctgggaagatggacttgaataataattctttgaagacaaaggctcaggtcccaatggtgctgactgctggtcccaagtggttgctggatgtgacttggcaaggagtggaagacaacaaaaacaactgcattgtgtacagcaaagggggtcagctttggtgtacaactacgaaggccatctctgagggtgaagagctaattgcctttgtggtggattttgactcaaggctacaagctgccagtcagatgactctcacagaagggatgtaccctgcacgcctgctggactcaattcagctgcttcctcagcaagctgccatggcttctattttgcccacagctattgtcaataaggatatattcccttgcaagtcctgtggcatctggtatcggagtgagcggaatctgcaggcccatttgatgtactactgcagtgggaggcaaagagaagctgctccggtgtcagaggaaaatgaagacagtgcccatcagatttccagcctgtgccccttcccacagtgcaccaagagcttttcaaatgctcgagctctagaaatgcacctgaattcacacagtggagtgaaaatggaagaattcctgccccctggtgctagtctaaaatgcaccgtctgtagctacactgctgattccgtgatcaactttcaccaacacctgttctcccatctcactcaagctgccttccgatgtaatcactgccatttcggcttccagactcagagggagttattgcagcaccaggagctccatgtccctagcggcaaacttcccagagaaagtgacatggaacactctccaagtgcaactgaagacagcttacagccagccacagacttattgaccagaagcgaacttccccagagccaaaaggccatgcagactaaagatgcgagctctgacacagagctggacaagtgtgagaaaaagactcagctctttctcacgaaccagagaccagagatacagcctacaacaaataaacaaagcttttcttacacaaaaataaagtctgagccctctagcccaagacttgcctcatctccagttcagcctaatattgggccttctttccctgtgggccctttcctatctcagttttctttcccccaagatatcaccatggtccctcaagcttcagagatcttagctaagatgtctgaactggtgcatcggcgactgaggcatggcagtagtagctaccctcccgtcatttacagccctttgatgcccaagggggctacttgttttgagtgtaacataacattcaataatttggataattatctagtgcacaaaaagcattattgcagcagccgatggcagcagatggctaagtccccagagttccctagtgtgtcagaaaagatgcctgaagctttgagtcccaacactggccaaacctccataaaccttctcaacccagctgctcattctgctgatcctgagaatccacttcttcaaacatcttgcatcaattcttccactgtcttagatttaattgggccaaatgggaagggccatgacaaggacttttccactcaaactaagaagctctccacctccagtaacaatgatgacaaaattaatggaaaacctgttgatgtgaaaaatcccagtgtccccttagtggatggggaaagtgacccaaataagactacctgtgaagcttgcaacattaccttcagccggcacgaaacatacatggtccacaaacagtattactgtgctacacgccacgaccctccactgaagaggtctgcttccaacaaagtgcctgccatgcagagaaccatgcgcacacgcaagcgcagaaagatgtatgagatgtgcctacctgagcaggaacaaaggcctccactggttcagcagagatttcttgacgtagccaacctcaataatccttgtacctccactcaagaacccacagaagggctaggagagtgctaccacccaagatgtgatatctttccaggaattgtctctaaacacttggaaacttctctgacgatcaacaagtgtgttccagtttccaaatgtgatactactcattccagtgtttcctgcctagagatggacgtgcccatagatctcagcaaaaagtgtttatctcagtctgagcggacgaccacgtctcccaaaaggctgctggactatcacgagtgcactgtgtgcaagatcagtttcaataaggtagaaaactatctggcccacaagcagaatttctgcccggttactgcacatcagcgtaatgacctgggtcaactggacggcaaagtgtttccgaatccagaaagcgaacgaaacagccctgatgtcagctacgaaagaagcataataaaatgtgagaaaaatgggaatttgaagcagccttcccccaatggaaacttattttcatcccacctagcaaccctgcaaggcttgaaggtctttagtgaagctgctcagctcattgctacaaaagaagaaaacagacatttgtttcttccacaatgcctttaccctggagcaataaagaaagcaaaaggagccgaccagctttctccatattatggaatcaagccaagtgattatatttctggttctcttgtcatccataacactgacatcgagcaaagcagaaatgcagaaaatgaatctcctaaaggccaggcttcctcaaatgggtgtgctgcgctgaagaaagattctctgccattgttgcccaaaaatcgaggaatggtaatagtgaatggtggactgaaacaagatgagagacctgctgccaacccacagcaagagaacatttcccagaatcctcagcacgaagacgaccacaaatctccctcgtggatctctgagaacccattagctgccaatgagaatgtctcaccaggaattccctcagcagaggaacagttgtctagtatagcaaaaggtgtgaatggttccagccaggctccaaccagtgggaaatattgccggctatgtgatatccagttcaacaacctttcaaactttataactcacaagaagttttattgctcatcacatgcagcagaacatgtcaaatgaactaactaaacatcagtcacctttggtatcagtgtttagtatgttgttctaaccagtcc

SEQ ID NO: 204108 - DNA, 3960 bp, Homo sapiens
  Payload ID: 20257
  Gene Name: zinc finger protein, FOG family member 2
  ENST ID: ENST00000520492
  CDS Start-End: 569-3628
gtaaaagttcgcgcctctgcggcgggcggccgtgcgtctctgccctgcgggcgcgggctggtggctggcaggtcgtgtcctgggacttcgggcgggtccggctcacgccgccaggacgctcagccgagcggggattcgggtggtgtctggccctggtggcgcgcggagtcctccctgggaggggccgccagtcacttcccagcgcggaagctggccgcttgaagatgccattgaagatgaggaagaagaatgtccatcagaggaaacagacatcatctccaaaggagactttccattggaggaaagcttttccacagaatttgggcctgaaaatctgagctgcgaagaagtggaatacttttgtaacaaaggtgatgatgaaggaatccaggagacagcagaatcagatggggacacacagtcagagaaaccggggcaacctggagttgagacagacgactgggatggaccaggagagctggaggtgtttcagaaagatggggaacgaaaaattcagagtcgacagcaacttccagtgggaacaacctgggggccgtttcctgggaagatggacttgaataataattctttgaagacaaaggctcaggtcccaatggtgctgactgctggtcccaagtggttgctggatgtgacttggcaaggagtggaagacaacaaaaacaactgcattgtgtacagcaaagggggtcagctttggtgtacaactacgaaggccatctctgagggtgaagagctaattgcctttgtggtggattttgactcaaggctacaagctgccagtcagatgactctcacagaagggatgtaccctgcacgcctgctggactcaattcagctgcttcctcagcaagctgccatggcttctattttgcccacagctattgtcaataaggatatattcccttgcaagtcctgtggcatctggtatcggagtgagcggaatctgcaggcccatttgatgtactactgcagtgggaggcaaagagaagctgctccggtgtcagaggaaaatgaagacagtgcccatcagatttccagcctgtgccccttcccacagtgcaccaagagcttttcaaatgctcgagctctagaaatgcacctgaattcacacagtggagtgaaaatggaagaattcctgccccctggtgctagtctaaaatgcaccgtctgtagctacactgctgattccgtgatcaactttcaccaacacctgttctcccatctcactcaagctgccttccgatgtaatcactgccatttcggcttccagactcagagggagttattgcagcaccaggagctccatgtccctagcggcaaacttcccagagaaagtgacatggaacactctccaagtgcaactgaagacagcttacagccagccacagacttattgaccagaagcgaacttccccagagccaaaaggccatgcagactaaagatgcgagctctgacacagagctggacaagtgtgagaaaaagactcagctctttctcacgaaccagagaccagagatacagcctacaacaaataaacaaagcttttcttacacaaaaataaagtctgagccctctagcccaagacttgcctcatctccagttcagcctaatattgggccttctttccctgtgggccctttcctatctcagttttctttcccccaagatatcaccatggtccctcaagcttcagagatcttagctaagatgtctgaactggtgcatcggcgactgaggcatggcagtagtagctaccctcccgtcatttacagccctttgatgcccaagggggctacttgttttgagtgtaacataacattcaataatttggataattatctagtgcacaaaaagcattattgcagcagccgatggcagcagatggctaagtccccagagttccctagtgtgtcagaaaagatgcctgaagctttgagtcccaacactggccaaacctccataaaccttctcaacccagctgctcattctgctgatcctgagaatccacttcttcaaacatcttgcatcaattcttccactgtcttagatttaattgggccaaatgggaagggccatgacaaggacttttccactcaaactaagaagctctccacctccagtaacaatgatgacaaaattaatggaaaacctgttgatgtgaaaaatcccagtgtccccttagtggatggggaaagtgacccaaataagactacctgtgaagcttgcaacattaccttcagccggcacgaaacatacatggtccacaaacagtattactgtgctacacgccacgaccctccactgaagaggtctgcttccaacaaagtgcctgccatgcagagaaccatgcgcacacgcaagcgcagaaagatgtatgagatgtgcctacctgagcaggaacaaaggcctccactggttcagcagagatttcttgacgtagccaacctcaataatccttgtacctccactcaagaacccacagaagggctaggagagtgctaccacccaagatgtgatatctttccaggaattgtctctaaacacttggaaacttctctgacgatcaacaagtgtgttccagtttccaaatgtgatactactcattccagtgtttcctgcctagagatggacgtgcccatagatctcagcaaaaagtgtttatctcagtctgagcggacgaccacgtctcccaaaaggctgctggactatcacgagtgcactgtgtgcaagatcagtttcaataaggtagaaaactatctggcccacaagcagaatttctgcccggttactgcacatcagcgtaatgacctgggtcaactggacggcaaagtgtttccgaatccagaaagcgaacgaaacagccctgatgtcagctacgaaagaagcataataaaatgtgagaaaaatgggaatttgaagcagccttcccccaatggaaacttattttcatcccacctagcaaccctgcaaggcttgaaggtctttagtgaagctgctcagctcattgctacaaaagaagaaaacagacatttgtttcttccacaatgcctttaccctggagcaataaagaaagcaaaaggagccgaccagctttctccatattatggaatcaagccaagtgattatatttctggttctcttgtcatccataacactgacatcgagcaaagcagaaatgcagaaaatgaatctcctaaaggccaggcttcctcaaatgggtgtgctgcgctgaagaaagattctctgccattgttgcccaaaaatcgaggaatggtaatagtgaatggtggactgaaacaagatgagagacctgctgccaacccacagcaagagaacatttcccagaatcctcagcacgaagacgaccacaaatctccctcgtggatctctgagaacccattagctgccaatgagaatgtctcaccaggaattccctcagcagaggaacagttgtctagtatagcaaaaggtgtgaatggttccagccaggctccaaccagtgggaaatattgccggctatgtgatatccagttcaacaacctttcaaactttataactcacaagaagttttattgctcatcacatgcagcagaacatgtcaaatgaactaactaaacatcagtcacctttggtatcagtgtttagtatgttgttctaaccagtccagaaaaaaaaataagctgtttgaattacatctgggcaatcaggagataattcattatggctgagttgaagacttaaggtgtaatttcattacagtccattagtaaagtgtattattggtgccattttcaaaaaaattaatttattttaccagcagtattcatagctgtggttatgttattttttatttaaaaactttatattaaagtcatttgtaatgttattgtatagttattgtgtagcacatatggtttgcactgtatagtagcttttaa

SEQ ID NO: 204109 - DNA, 2996 bp, Homo sapiens
  Payload ID: 20258
  Gene Name: zinc finger protein, X-linked
  Uniprot ID: P17010
  ENST ID: ENST00000304543
  CDS Start-End: 255-2672
gtccggttcttgctatattgccccaggctggtctcgaactcctgggctcaagccgttctcccgcctcccactgcccgcctgtcactgccgtctgttccctgagctgtgctttacgctgggaaagacatagaagaactattaagaagatagaattgttttgctgcgcagtacagcaacagtggatgttcaagattaagattagagtcaagttgtgtgattaagacaggagctgtgactgatgagaattaaaggccatggatgaagatgggcttgaattacaacaagagccaaactcattttttgatgcaacaggagctgatggtacacacatggatggtgatcaaattgttgtggaagtacaagaaactgtttttgtttcagatgttgtggattcagacataactgtgcataactttgttcctgatgacccagattcagttgtaatccaagatgttattgaggacgttgttatagaagatgttcagtgcccagatatcatggaagaagcagatgtgtctgaaacggtcatcattcctgagcaagtgctggactcagatgtaactgaagaagtttctttagcacattgcacagtcccagatgatgttttagcttctgacattacttcagcctcaatgtctatgccagaacacgtcttgacgggtgattctatacatgtgtctgacgttggacatgttggacatgttggacatgttgaacatgtggttcatgatagtgtagtggaagcagaaattgtcactgatcctctgactaccgacgtagtttcagaagaagtattggtagcagactgtgcctctgaagcagtcatagatgccaatgggatccctgtggaccagcaggatgatgacaaaggcaactgtgaggactaccttatgatttccttggatgatgctggcaaaatagaacacgatggttcttctggaatgaccatggacacagagtcggaaattgatccttgtaaagtggatggcacttgccctgaggtcatcaaggtgtacatttttaaagctgaccctggagaagatgacttaggtggaactgtagacattgtggagagtgagcctgagaatgatcatggagttgaactgcttgatcagaacagcagtattcgtgttcccagggaaaagatggtttatatgactgtcaatgactctcagccagaagatgaagatttaaatgttgctgaaatcgctgacgaagtttatatggaagtgatcgtaggagaggaggatgctgcagcagcagcggcagccgccgccgtgcacgagcagcaaatggatgacaatgaaatcaaaaccttcatgccgattgcatgggcagcagcttatggtaataattctgatggaattgaaaaccggaatggcactgcaagtgccctcttgcacatagatgagtctgctggcctcggcagactggctaaacaaaaaccaaagaaaaggagaagacctgattccaggcagtaccaaacagcaataattattggccctgatggacatcctttgactgtctatccttgcatgatttgtgggaagaagtttaagtcgagaggttttttgaaaaggcacatgaaaaaccatcccgaacaccttgccaagaagaaataccgctgtactgactgtgattacactaccaacaagaagataagtttacacaaccacctggagagccacaagctgaccagcaaggcagagaaggccattgaatgcgatgagtgtgggaagcatttctctcatgcaggggctttgtttactcacaaaatggtgcataaggaaaaaggagccaacaaaatgcacaagtgtaaattctgtgaatacgagacagctgaacaagggttattgaatcgccacctcttggcagtccacagcaagaactttcctcatatttgtgtggagtgtggtaagggttttcgtcacccgtcagagctcaaaaagcacatgagaatccatactggggagaagccgtaccaatgccagtactgcgaatataggtctgcagactcttctaacttgaaaacgcatgtcaaaactaagcatagtaaagagatgccattcaagtgtgacatttgtcttctgactttctcggataccaaagaggtgcagcaacatgctcttatccaccaagaaagcaaaacacaccagtgtttgcattgcgaccacaagagttcgaactcaagtgatttgaaacgacacataatttcagttcacacgaaagactacccccataagtgtgacatgtgtgataaaggctttcacaggccttcagaactcaagaaacacgtggctgcccacaagggcaaaaaaatgcaccagtgtagacattgtgactttaagattgcagatccatttgttctaagtcgccatattctctcagttcacacaaaggatcttccatttaggtgcaagagatgtagaaagggatttaggcaacagagtgagcttaaaaagcatatgaagacacacagtggcaggaaagtgtatcagtgtgagtactgtgagtatagcactacagatgcctcaggctttaaacggcacgttatttccattcacacgaaagactatcctcaccggtgtgagtactgcaagaaaggcttccgaagaccttcagaaaagaaccagcacataatgcgacatcataaagaagttggcctgccctaacaatacttctacagaacgtttgtagagatattggccttgaagcagaaaattcattttaaagccaatcagtctcattcacatacaatactgtatattgatttatgctgtgtacaaatagaattattacttctagttgacttttttttaaatatacattttgctcagtagtgtgttctgaattctattcagtttgtttaataaatagggaaaactggcaacatgctagttacttttaataaagtaatccctgattctataccgaagttttatatcttagaattttatatttatttaaatatttaccttgcttaccttgatggtact

SEQ ID NO: 204110 - DNA, 2906 bp, Homo sapiens
  Payload ID: 20258
  Gene Name: zinc finger protein, X-linked
  ENST ID: ENST00000338565
  CDS Start-End: 29-2296
gagctgtgactgatgagaattaaaggccatggatgaagatgggcttgaattacaacaagagccaaactcattttttgatgcaacaggagctgatggtacacacatggatggtgatcaaattgttgtggaagtacaagaaactgtttttgtttcagatgttgtggattcagacataactgtgcataactttgttcctgatgacccagattcagttgtaatccaagatgttattgaggacgttgttatagaagatgttcagtgcccagatatcatggaagaagcagatgtgtctgaaacggtcatcattcctgagcaagtgctggactcagatgtaactgaagaagtttctttagcacattgcacagtcccagatgatgttttagcttctgacattacttcagcctcaatgtctatgccagaacacgtcttgacgggtgattctatacatgtgtctgacgttggacatgttggacatgttggacatgttgaacatgtggttcatgatagtgtagtggaagcagaaattgtcactgatcctctgactaccgacgtagtttcagaagaagtattggtagcagactgtgcctctgaagcagtcatagatgccaatgggatccctgtggaccagcaggatgatgacaaaggcaactgtgaggactaccttatgatttcctgtggaactgtagacattgtggagagtgagcctgagaatgatcatggagttgaactgcttgatcagaacagcagtattcgtgttcccagggaaaagatggtttatatgactgtcaatgactctcagccagaagatgaagatttaaatgttgctgaaatcgctgacgaagtttatatggaagtgatcgtaggagaggaggatgctgcagcagcagcggcagccgccgccgtgcacgagcagcaaatggatgacaatgaaatcaaaaccttcatgccgattgcatgggcagcagcttatggtaataattctgatggaattgaaaaccggaatggcactgcaagtgccctcttgcacatagatgagtctgctggcctcggcagactggctaaacaaaaaccaaagaaaaggagaagacctgattccaggcagtaccaaacagcaataattattggccctgatggacatcctttgactgtctatccttgcatgatttgtgggaagaagtttaagtcgagaggttttttgaaaaggcacatgaaaaaccatcccgaacaccttgccaagaagaaataccgctgtactgactgtgattacactaccaacaagaagataagtttacacaaccacctggagagccacaagctgaccagcaaggcagagaaggccattgaatgcgatgagtgtgggaagcatttctctcatgcaggggctttgtttactcacaaaatggtgcataaggaaaaaggagccaacaaaatgcacaagtgtaaattctgtgaatacgagacagctgaacaagggttattgaatcgccacctcttggcagtccacagcaagaactttcctcatatttgtgtggagtgtggtaagggttttcgtcacccgtcagagctcaaaaagcacatgagaatccatactggggagaagccgtaccaatgccagtactgcgaatataggtctgcagactcttctaacttgaaaacgcatgtcaaaactaagcatagtaaagagatgccattcaagtgtgacatttgtcttctgactttctcggataccaaagaggtgcagcaacatgctcttatccaccaagaaagcaaaacacaccagtgtttgcattgcgaccacaagagttcgaactcaagtgatttgaaacgacacataatttcagttcacacgaaagactacccccataagtgtgacatgtgtgataaaggctttcacaggccttcagaactcaagaaacacgtggctgcccacaagggcaaaaaaatgcaccagtgtagacattgtgactttaagattgcagatccatttgttctaagtcgccatattctctcagttcacacaaaggatcttccatttaggtgcaagagatgtagaaagggatttaggcaacagagtgagcttaaaaagcatatgaagacacacagtggcaggaaagtgtatcagtgtgagtactgtgagtatagcactacagatgcctcaggctttaaacggcacgttatttccattcacacgaaagactatcctcaccggtgtgagtactgcaagaaaggcttccgaagaccttcagaaaagaaccagcacataatgcgacatcataaagaagttggcctgccctaacaatacttctacagaacgtttgtagagatattggccttgaagcagaaaattcattttaaagccaatcagtctcattcacatacaatactgtatattgatttatgctgtgtacaaatagaattattacttctagttgacttttttttaaatatacattttgctcagtagtgtgttctgaattctattcagtttgtttaataaatagggaaaactggcaacatgctagttacttttaataaagtaatccctgattctataccgaagttttatatcttagaattttatatttatttaaatatttaccttgcttaccttgatggtactcttctaagaccattaacttaaggtaactttatattggtaactctgaaagtattcatgttgactcatttttttccccatacatttctcacaataaaattgtcagagacatctactaatataaatgggagattttacagtcaggtctaattatcataacatggaagtcatttacttgtcttgcttaatattttcagaccacttgacagtgaaagtttccatttgagctgttgcgtccctggctttgctgagtaaagagcagtggctgggttcgtgtttacttttcaaa

SEQ ID NO: 204111 - DNA, 7558 bp, Homo sapiens
  Payload ID: 20258
  Gene Name: zinc finger protein, X-linked
  Uniprot ID: P17010
  ENST ID: ENST00000379177
  CDS Start-End: 428-2845
gccggcctgcagcacccgccaccgtcgccggccgcccgcacgtccgtccggttcttgctatattgccccaggctggtctcgaactcctgggctcaagccgttctcccgcctcccactgcccgcctgtcactgccgtctgttccctgagctgtgctttacgctgggaaagacatagaagaactattaagaagatagaattgttttgctgcgcagtacagcaacagtggatgttcaagattaagattagagtcaagttgtgtgattaagacagacagtcttcctctgtcatccaggctggaatgcagtgcagtggtgcaaatttggctcactgcagcctctgccttctgtgttcaagtgattcttcttctgcctcagcctctcgagtagctgggattacaggagctgtgactgatgagaattaaaggccatggatgaagatgggcttgaattacaacaagagccaaactcattttttgatgcaacaggagctgatggtacacacatggatggtgatcaaattgttgtggaagtacaagaaactgtttttgtttcagatgttgtggattcagacataactgtgcataactttgttcctgatgacccagattcagttgtaatccaagatgttattgaggacgttgttatagaagatgttcagtgcccagatatcatggaagaagcagatgtgtctgaaacggtcatcattcctgagcaagtgctggactcagatgtaactgaagaagtttctttagcacattgcacagtcccagatgatgttttagcttctgacattacttcagcctcaatgtctatgccagaacacgtcttgacgggtgattctatacatgtgtctgacgttggacatgttggacatgttggacatgttgaacatgtggttcatgatagtgtagtggaagcagaaattgtcactgatcctctgactaccgacgtagtttcagaagaagtattggtagcagactgtgcctctgaagcagtcatagatgccaatgggatccctgtggaccagcaggatgatgacaaaggcaactgtgaggactaccttatgatttccttggatgatgctggcaaaatagaacacgatggttcttctggaatgaccatggacacagagtcggaaattgatccttgtaaagtggatggcacttgccctgaggtcatcaaggtgtacatttttaaagctgaccctggagaagatgacttaggtggaactgtagacattgtggagagtgagcctgagaatgatcatggagttgaactgcttgatcagaacagcagtattcgtgttcccagggaaaagatggtttatatgactgtcaatgactctcagccagaagatgaagatttaaatgttgctgaaatcgctgacgaagtttatatggaagtgatcgtaggagaggaggatgctgcagcagcagcggcagccgccgccgtgcacgagcagcaaatggatgacaatgaaatcaaaaccttcatgccgattgcatgggcagcagcttatggtaataattctgatggaattgaaaaccggaatggcactgcaagtgccctcttgcacatagatgagtctgctggcctcggcagactggctaaacaaaaaccaaagaaaaggagaagacctgattccaggcagtaccaaacagcaataattattggccctgatggacatcctttgactgtctatccttgcatgatttgtgggaagaagtttaagtcgagaggttttttgaaaaggcacatgaaaaaccatcccgaacaccttgccaagaagaaataccgctgtactgactgtgattacactaccaacaagaagataagtttacacaaccacctggagagccacaagctgaccagcaaggcagagaaggccattgaatgcgatgagtgtgggaagcatttctctcatgcaggggctttgtttactcacaaaatggtgcataaggaaaaaggagccaacaaaatgcacaagtgtaaattctgtgaatacgagacagctgaacaagggttattgaatcgccacctcttggcagtccacagcaagaactttcctcatatttgtgtggagtgtggtaagggttttcgtcacccgtcagagctcaaaaagcacatgagaatccatactggggagaagccgtaccaatgccagtactgcgaatataggtctgcagactcttctaacttgaaaacgcatgtcaaaactaagcatagtaaagagatgccattcaagtgtgacatttgtcttctgactttctcggataccaaagaggtgcagcaacatgctcttatccaccaagaaagcaaaacacaccagtgtttgcattgcgaccacaagagttcgaactcaagtgatttgaaacgacacataatttcagttcacacgaaagactacccccataagtgtgacatgtgtgataaaggctttcacaggccttcagaactcaagaaacacgtggctgcccacaagggcaaaaaaatgcaccagtgtagacattgtgactttaagattgcagatccatttgttctaagtcgccatattctctcagttcacacaaaggatcttccatttaggtgcaagagatgtagaaagggatttaggcaacagagtgagcttaaaaagcatatgaagacacacagtggcaggaaagtgtatcagtgtgagtactgtgagtatagcactacagatgcctcaggctttaaacggcacgttatttccattcacacgaaagactatcctcaccggtgtgagtactgcaagaaaggcttccgaagaccttcagaaaagaaccagcacataatgcgacatcataaagaagttggcctgccctaacaatacttctacagaacgtttgtagagatattggccttgaagcagaaaattcattttaaagccaatcagtctcattcacatacaatactgtatattgatttatgctgtgtacaaatagaattattacttctagttgacttttttttaaatatacattttgctcagtagtgtgttctgaattctattcagtttgtttaataaatagggaaaactggcaacatgctagttacttttaataaagtaatccctgattctataccgaagttttatatcttagaattttatatttatttaaatatttaccttgcttaccttgatggtactcttctaagaccattaacttaaggtaactttatattggtaactctgaaagtattcatgttgactcatttttttccccatacatttctcacaataaaattgtcagagacatctactaatataaatgggagattttacagtcaggtctaattatcataacatggaagtcatttacttgtcttgcttaatattttcagaccacttgacagtgaaagtttccatttgagctgttgcgtccctggctttgctgagtaaagagcagtggctgggttcgtgtttacttttcaaatatacttcttttggctttctttggattatttacatcttttgtcagcgtagcaaacttttagaaaaccttattgaaaaactgtgcttgctcatgttgtattttgattattctgtctgtgcggcttcatcttggaatggttgtgtgctacaaatgacacttactgaggactgcattttggaatctcctagaggtaactcatggcttataggatcttttgcaactttatgtatgtaaatgtaccctgaattatatatatacacatatatatcatgtacctgtgtgtattgcttattttacatatttatacacacaaccccaagtagtagttgtttaaaatctataatgaaaagtattaaatttacaataacatgaaagatccagggatgcatgagagagcattttgtaagtcatgctcttcagagagactactcaggtgaagaattagaaggaaaataaggacactagtatttttaaagagtaaagatattttcttttaaatatctttggtaattgaaacatagaggttaagatgtttctaggtagaatgttttcatacaatttcacctccatgtctttatgtttttctgaaaagcaaatgagtatccagacatgactcccacagttctctttgagaagcctgagagggaactctgtcttacctagtgagggggatggaaaagaagtgatggctctgtggaccagagaacgggtgctaattatgacttcacactcggcaagttcaggctgatctgttatttctcagttacagttagcaaactttaaaaacttaacactcaagttggctttgattaaaaggtaaagatgtgttttaagtggataaggaaagtctgaggccttatttggaacatcactaagtcttccacaggttttttgtttgtttgtttttttttgttgtttttttttcttaagacggagtcttgctctgttgcccaggctggactgcagtggtgtgatcactgcaacctctgcagctcactgcaacctctgcttcctgggttcaagcaattatctgcctcagcctctcgagtagctgggattacaggcgcccaccaccacgcccggctaattttttgtatttttaatagagatggggtttcaccatcttggccaggctggtcttgaaccctgacctcgtgatccacctgcctcggccttccatagtgctgggtttacaggcgtgagccaccgtgcccagacaccacataggtctgaatcagtgtcatacattcataaaacaaactcggttaattagaacttggttatgttaagacgaatctgggagaacagaaaacagtttttggggtcccttcagttggctattggtccgtatgcatctagcacattgtaggagatttagaaattgtcttcccacccgatagctgccttgtcacctcattatggtgctccatcccctgtgtgcttaggtttttacctttcatctttctctttgccattgatgtttgtattcaagagttatatttttagggttagaaatcaaaatatttggtgtttggcaaacctctgaagtgctagactgatttagtctagttttaaaccaagtgctttaggcaggtgtgaactccagcccaaatgccagtcaaagtcaaggcatgggttttcctagcctatcttataggaaattcctgtaccttcttggcccccataatgtgttttttttttttttttttttttaaactaacttacaattttgtgatccgtgattcattgccctgcgattcttgaaagctctgtctgtttttttgtgagaacctttaaaatctcccttaatttttattttcccagaaataatgtaaaaacacttaaatgaaagtggaaatgtattaattttaaatcctataaaattaatacagaaaatataaatgattgggtcatttaactatatttttttaaataaactgaaagataaagaacacaacacttcacacattttatatttctcttacatactccggaatcatacacagttctttttaaagcacaacattaaaacctttaaaaggtatttaagggtttggtcaagtgaatatgataaaacatacttgtctgtataaagagaaaatgaaattgtagtcactgttatgtactgacattagttacaacctagttttaattcttaaaacaattttgattagcaaagctaaaaaaaaatggatgtttcagttaaatgttttaaagaggtacagatttttacaaggacataatataagttattgttctgtagaaatatcctattaaatattgtatgtccctccctctgtacactttgtaaagaaagtaaaatacataaaaagaaaatcatatagggatgtgtgacattattgtaattgtgtacttgagaataacgtgcaaaaataaaaatcagaatattttcctgttattgaatgtttagtctatttgataccagtactaagttaatgctttttctcaaggaaaaaaaatgtacagtttttgtaaacctaataaacatcaaaagcagtggattattttcatccccccatttcttaatttctttttcacagcagtggaatgcaaagtgcttgattgctttgaattttgtgactcggatgcaaatactggtaatatttcagttctgtgaatttgcaagtaatatttcagagaagttaagaggtgattggtgagtcctttgatgagcatgtccttggaattcattttttcttttatcttcataaaggatttgttttattagcatctccaattcccctgagataaattactcatgcataaagtggtttttgagagcacttaaagttcatttcagtattaatttacagcatatttaatcagtggggactgttaccacctccacaacagaaatcatgccctcgagttaccccactgcgcccagtttagaggactagtagatgctaacatactagggaatggtcattgccacagttaaaaatcggcagttaagtaaatgtcaggagtcaaaagagatagagttgtgccatctttgattttatagacaagattctgcagttcttccaactgtatgaacaaacgtttgcctaatagttgaaacaataaattaaaattttaggtaaatgacgaagggaatgtggtgaatgtcactgtccagagccataaatcagacaaaaccatacatagcatgctgaaaaacttttgtaatggaacacccaacaaatgacacctaacctgtctgtgatccaacaagtccgataacatgctgctgtatttgtattctctgggaatctcagtattaataatttcatttcccacaaattctagcattcatgtaaggaaaaacatggctaatcaatatcttaaaggggcaatctttcagagcagtggttttcaaagtatggccggacagcattggcagcatcttaatctcctgggactttgttaaaaatgcaaattctcagccccaccctagtcctactgaattgggaaactggcgtgggacccagcagtctttgttttaacatgttctccaagtgattctgatgcctgttcaaacttgggaaacacttttagagcacttgaggaacctaaaagatgactggttcagcattttgtgtggtagataagaaagaaattatcacaaaaaatcagaaatgaacagtgagagaaaaataggaccccagacagtttataccttccatttgctgttttaaaagtgtgagcctgccaagtcaacaagtatgcctttagcgcacatgtaaatagcctgcacttcctaaatctcgtgtggcctcccatggttacattcttcaaaggtaaactgagttgagaggaagattcagcatttaaaagagaagggttgaaaaagattgtgtgtgtgtgtgtgtgtgtttaattggcccagggttacttaaataaatcataaccattttgccacattctgtaactgtttagctaaggtcaaattaagtttaccctatggattttgtttcatcttttgtttcgtgtatatactgtttgcctttttcataaaaatcttggatttgttatatattgttcctgttatttttgacatctttgctattgtaaataaattactattttgttttaagtta

SEQ ID NO: 204112 - DNA, 7513 bp, Homo sapiens
  Payload ID: 20258
  Gene Name: zinc finger protein, X-linked
  Uniprot ID: P17010
  ENST ID: ENST00000379188
  CDS Start-End: 100-2634
ggcccagtgctccagagaaaggccggcctgcagcacccgccaccgtcgccggccgcccgcacgtccgtccggagctgtgactgatgagaattaaaggccatggatgaagatgggcttgaattacaacaagagccaaactcattttttgatgcaacagacagggtctcgttctgtcacccaggctggagcacagtggcgccatctgggtccactgcaacctccgcctcccaggctcaagtgatctgctcagcttcccgagtaactggggctacaggagctgatggtacacacatggatggtgatcaaattgttgtggaagtacaagaaactgtttttgtttcagatgttgtggattcagacataactgtgcataactttgttcctgatgacccagattcagttgtaatccaagatgttattgaggacgttgttatagaagatgttcagtgcccagatatcatggaagaagcagatgtgtctgaaacggtcatcattcctgagcaagtgctggactcagatgtaactgaagaagtttctttagcacattgcacagtcccagatgatgttttagcttctgacattacttcagcctcaatgtctatgccagaacacgtcttgacgggtgattctatacatgtgtctgacgttggacatgttggacatgttggacatgttgaacatgtggttcatgatagtgtagtggaagcagaaattgtcactgatcctctgactaccgacgtagtttcagaagaagtattggtagcagactgtgcctctgaagcagtcatagatgccaatgggatccctgtggaccagcaggatgatgacaaaggcaactgtgaggactaccttatgatttccttggatgatgctggcaaaatagaacacgatggttcttctggaatgaccatggacacagagtcggaaattgatccttgtaaagtggatggcacttgccctgaggtcatcaaggtgtacatttttaaagctgaccctggagaagatgacttaggtggaactgtagacattgtggagagtgagcctgagaatgatcatggagttgaactgcttgatcagaacagcagtattcgtgttcccagggaaaagatggtttatatgactgtcaatgactctcagccagaagatgaagatttaaatgttgctgaaatcgctgacgaagtttatatggaagtgatcgtaggagaggaggatgctgcagcagcagcggcagccgccgccgtgcacgagcagcaaatggatgacaatgaaatcaaaaccttcatgccgattgcatgggcagcagcttatggtaataattctgatggaattgaaaaccggaatggcactgcaagtgccctcttgcacatagatgagtctgctggcctcggcagactggctaaacaaaaaccaaagaaaaggagaagacctgattccaggcagtaccaaacagcaataattattggccctgatggacatcctttgactgtctatccttgcatgatttgtgggaagaagtttaagtcgagaggttttttgaaaaggcacatgaaaaaccatcccgaacaccttgccaagaagaaataccgctgtactgactgtgattacactaccaacaagaagataagtttacacaaccacctggagagccacaagctgaccagcaaggcagagaaggccattgaatgcgatgagtgtgggaagcatttctctcatgcaggggctttgtttactcacaaaatggtgcataaggaaaaaggagccaacaaaatgcacaagtgtaaattctgtgaatacgagacagctgaacaagggttattgaatcgccacctcttggcagtccacagcaagaactttcctcatatttgtgtggagtgtggtaagggttttcgtcacccgtcagagctcaaaaagcacatgagaatccatactggggagaagccgtaccaatgccagtactgcgaatataggtctgcagactcttctaacttgaaaacgcatgtcaaaactaagcatagtaaagagatgccattcaagtgtgacatttgtcttctgactttctcggataccaaagaggtgcagcaacatgctcttatccaccaagaaagcaaaacacaccagtgtttgcattgcgaccacaagagttcgaactcaagtgatttgaaacgacacataatttcagttcacacgaaagactacccccataagtgtgacatgtgtgataaaggctttcacaggccttcagaactcaagaaacacgtggctgcccacaagggcaaaaaaatgcaccagtgtagacattgtgactttaagattgcagatccatttgttctaagtcgccatattctctcagttcacacaaaggatcttccatttaggtgcaagagatgtagaaagggatttaggcaacagagtgagcttaaaaagcatatgaagacacacagtggcaggaaagtgtatcagtgtgagtactgtgagtatagcactacagatgcctcaggctttaaacggcacgttatttccattcacacgaaagactatcctcaccggtgtgagtactgcaagaaaggcttccgaagaccttcagaaaagaaccagcacataatgcgacatcataaagaagttggcctgccctaacaatacttctacagaacgtttgtagagatattggccttgaagcagaaaattcattttaaagccaatcagtctcattcacatacaatactgtatattgatttatgctgtgtacaaatagaattattacttctagttgacttttttttaaatatacattttgctcagtagtgtgttctgaattctattcagtttgtttaataaatagggaaaactggcaacatgctagttacttttaataaagtaatccctgattctataccgaagttttatatcttagaattttatatttatttaaatatttaccttgcttaccttgatggtactcttctaagaccattaacttaaggtaactttatattggtaactctgaaagtattcatgttgactcatttttttccccatacatttctcacaataaaattgtcagagacatctactaatataaatgggagattttacagtcaggtctaattatcataacatggaagtcatttacttgtcttgcttaatattttcagaccacttgacagtgaaagtttccatttgagctgttgcgtccctggctttgctgagtaaagagcagtggctgggttcgtgtttacttttcaaatatacttcttttggctttctttggattatttacatcttttgtcagcgtagcaaacttttagaaaaccttattgaaaaactgtgcttgctcatgttgtattttgattattctgtctgtgcggcttcatcttggaatggttgtgtgctacaaatgacacttactgaggactgcattttggaatctcctagaggtaactcatggcttataggatcttttgcaactttatgtatgtaaatgtaccctgaattatatatatacacatatatatcatgtacctgtgtgtattgcttattttacatatttatacacacaaccccaagtagtagttgtttaaaatctataatgaaaagtattaaatttacaataacatgaaagatccagggatgcatgagagagcattttgtaagtcatgctcttcagagagactactcaggtgaagaattagaaggaaaataaggacactagtatttttaaagagtaaagatattttcttttaaatatctttggtaattgaaacatagaggttaagatgtttctaggtagaatgttttcatacaatttcacctccatgtctttatgtttttctgaaaagcaaatgagtatccagacatgactcccacagttctctttgagaagcctgagagggaactctgtcttacctagtgagggggatggaaaagaagtgatggctctgtggaccagagaacgggtgctaattatgacttcacactcggcaagttcaggctgatctgttatttctcagttacagttagcaaactttaaaaacttaacactcaagttggctttgattaaaaggtaaagatgtgttttaagtggataaggaaagtctgaggccttatttggaacatcactaagtcttccacaggttttttgtttgtttgtttttttttgttgtttttttttcttaagacggagtcttgctctgttgcccaggctggactgcagtggtgtgatcactgcaacctctgcagctcactgcaacctctgcttcctgggttcaagcaattatctgcctcagcctctcgagtagctgggattacaggcgcccaccaccacgcccggctaattttttgtatttttaatagagatggggtttcaccatcttggccaggctggtcttgaaccctgacctcgtgatccacctgcctcggccttccatagtgctgggtttacaggcgtgagccaccgtgcccagacaccacataggtctgaatcagtgtcatacattcataaaacaaactcggttaattagaacttggttatgttaagacgaatctgggagaacagaaaacagtttttggggtcccttcagttggctattggtccgtatgcatctagcacattgtaggagatttagaaattgtcttcccacccgatagctgccttgtcacctcattatggtgctccatcccctgtgtgcttaggtttttacctttcatctttctctttgccattgatgtttgtattcaagagttatatttttagggttagaaatcaaaatatttggtgtttggcaaacctctgaagtgctagactgatttagtctagttttaaaccaagtgctttaggcaggtgtgaactccagcccaaatgccagtcaaagtcaaggcatgggttttcctagcctatcttataggaaattcctgtaccttcttggcccccataatgtgttttttttttttttttttttttaaactaacttacaattttgtgatccgtgattcattgccctgcgattcttgaaagctctgtctgtttttttgtgagaacctttaaaatctcccttaatttttattttcccagaaataatgtaaaaacacttaaatgaaagtggaaatgtattaattttaaatcctataaaattaatacagaaaatataaatgattgggtcatttaactatatttttttaaataaactgaaagataaagaacacaacacttcacacattttatatttctcttacatactccggaatcatacacagttctttttaaagcacaacattaaaacctttaaaaggtatttaagggtttggtcaagtgaatatgataaaacatacttgtctgtataaagagaaaatgaaattgtagtcactgttatgtactgacattagttacaacctagttttaattcttaaaacaattttgattagcaaagctaaaaaaaaatggatgtttcagttaaatgttttaaagaggtacagatttttacaaggacataatataagttattgttctgtagaaatatcctattaaatattgtatgtccctccctctgtacactttgtaaagaaagtaaaatacataaaaagaaaatcatatagggatgtgtgacattattgtaattgtgtacttgagaataacgtgcaaaaataaaaatcagaatattttcctgttattgaatgtttagtctatttgataccagtactaagttaatgctttttctcaaggaaaaaaaatgtacagtttttgtaaacctaataaacatcaaaagcagtggattattttcatccccccatttcttaatttctttttcacagcagtggaatgcaaagtgcttgattgctttgaattttgtgactcggatgcaaatactggtaatatttcagttctgtgaatttgcaagtaatatttcagagaagttaagaggtgattggtgagtcctttgatgagcatgtccttggaattcattttttcttttatcttcataaaggatttgttttattagcatctccaattcccctgagataaattactcatgcataaagtggtttttgagagcacttaaagttcatttcagtattaatttacagcatatttaatcagtggggactgttaccacctccacaacagaaatcatgccctcgagttaccccactgcgcccagtttagaggactagtagatgctaacatactagggaatggtcattgccacagttaaaaatcggcagttaagtaaatgtcaggagtcaaaagagatagagttgtgccatctttgattttatagacaagattctgcagttcttccaactgtatgaacaaacgtttgcctaatagttgaaacaataaattaaaattttaggtaaatgacgaagggaatgtggtgaatgtcactgtccagagccataaatcagacaaaaccatacatagcatgctgaaaaacttttgtaatggaacacccaacaaatgacacctaacctgtctgtgatccaacaagtccgataacatgctgctgtatttgtattctctgggaatctcagtattaataatttcatttcccacaaattctagcattcatgtaaggaaaaacatggctaatcaatatcttaaaggggcaatctttcagagcagtggttttcaaagtatggccggacagcattggcagcatcttaatctcctgggactttgttaaaaatgcaaattctcagccccaccctagtcctactgaattgggaaactggcgtgggacccagcagtctttgttttaacatgttctccaagtgattctgatgcctgttcaaacttgggaaacacttttagagcacttgaggaacctaaaagatgactggttcagcattttgtgtggtagataagaaagaaattatcacaaaaaatcagaaatgaacagtgagagaaaaataggaccccagacagtttataccttccatttgctgttttaaaagtgtgagcctgccaagtcaacaagtatgcctttagcgcacatgtaaatagcctgcacttcctaaatctcgtgtggcctcccatggttacattcttcaaaggtaaactgagttgagaggaagattcagcatttaaaagagaagggttgaaaaagattgtgtgtgtgtgtgtgtgtgtttaattggcccagggttacttaaataaatcataaccattttgccacattctgtaactgtttagctaaggtcaaattaagtttaccctatggattttgtttcatcttttgtttcgtgtatatactgtttgcctttttcataaaaatcttggatttgttatatattgttcctgttatttttgacatctttgctattgtaaataaattactattttgttttaagttaccctagtggagtgttggctatagacaaggtatatactcgaaacgaggagacttaaatcacacagttaatgaattcccaacttgtttgaagctggaggtgattcgactcccttcagtggttcaacactaataatagcaccaaggaacatgtcactggtgcatatagg

SEQ ID NO: 204113 - DNA, 600 bp, Homo sapiens
  Payload ID: 20258
  Gene Name: zinc finger protein, X-linked
  ENST ID: ENST00000428571
  CDS Start-End: 195-600
gacggcgggcccgtgccggggagctgggccgctttttgtcagctccgagctcggcccctcctccctccctccgcccgccccaccagccggagcccggcccagtgctccagagaaaggccggcctgcagcacccgccaccgtcgccggccgcccgcacgtccgtccggagctgtgactgatgagaattaaaggccatggatgaagatgggcttgaattacaacaagagccaaactcattttttgatgcaacaggagctgatggtacacacatggatggtgatcaaattgttgtggaagtacaagaaactgtttttgtttcagatgttgtggattcagacataactgtgcataactttgttcctgatgacccagattcagttgtaatccaagatgttattgaggacgttgttatagaagatgttcagtgcccagatatcatggaagaagcagatgtgtctgaaacggtcatcattcctgagcaagtgctggactcagatgtaactgaagaagtttctttagcacattgcacagtcccagatgatgttttagcttctgacattacttcagcctcaatgtctatgccagaacacgtcttgacgg

SEQ ID NO: 204114 - DNA, 300 bp, Homo sapiens
  Payload ID: 20258
  Gene Name: zinc finger protein, X-linked
  ENST ID: ENST00000419690
  CDS Start-End: 206-300
agtgctccagagaaaggccggcctgcagcacccgccaccgtcgccggccgcccgcacgtccgtccgctgggaaagacatagaagaactattaagaagatagaattgttttgctgcgcagtacagcaacagtggatgttcaagattaagattagagtcaagttgtgtgattaagacaggagctgtgactgatgagaattaaaggccatggatgaagatgggcttgaattacaacaagagccaaactcattttttgatgcaacaggagctgatggtacacacatggatggtgatcaaattgt

SEQ ID NO: 204115 - DNA, 6801 bp, Homo sapiens
  Payload ID: 20258
  Gene Name: zinc finger protein, X-linked
  Uniprot ID: P17010
  ENST ID: ENST00000539115
  CDS Start-End: 192-1922
cggggagctgggccgctttttgtcagctccgagctcggcccctcctccctccctccgcccgccccaccagccggagcccggcccagtgctccagagaaaggccggcctgcagcacccgccaccgtcgccggccgcccgcacgtccgtccgtggatgatgctggcaaaatagaacacgatggttcttctggaatgaccatggacacagagtcggaaattgatccttgtaaagtggatggcacttgccctgaggtcatcaaggtgtacatttttaaagctgaccctggagaagatgacttaggtggaactgtagacattgtggagagtgagcctgagaatgatcatggagttgaactgcttgatcagaacagcagtattcgtgttcccagggaaaagatggtttatatgactgtcaatgactctcagccagaagatgaagatttaaatgttgctgaaatcgctgacgaagtttatatggaagtgatcgtaggagaggaggatgctgcagcagcagcggcagccgccgccgtgcacgagcagcaaatggatgacaatgaaatcaaaaccttcatgccgattgcatgggcagcagcttatggtaataattctgatggaattgaaaaccggaatggcactgcaagtgccctcttgcacatagatgagtctgctggcctcggcagactggctaaacaaaaaccaaagaaaaggagaagacctgattccaggcagtaccaaacagcaataattattggccctgatggacatcctttgactgtctatccttgcatgatttgtgggaagaagtttaagtcgagaggttttttgaaaaggcacatgaaaaaccatcccgaacaccttgccaagaagaaataccgctgtactgactgtgattacactaccaacaagaagataagtttacacaaccacctggagagccacaagctgaccagcaaggcagagaaggccattgaatgcgatgagtgtgggaagcatttctctcatgcaggggctttgtttactcacaaaatggtgcataaggaaaaaggagccaacaaaatgcacaagtgtaaattctgtgaatacgagacagctgaacaagggttattgaatcgccacctcttggcagtccacagcaagaactttcctcatatttgtgtggagtgtggtaagggttttcgtcacccgtcagagctcaaaaagcacatgagaatccatactggggagaagccgtaccaatgccagtactgcgaatataggtctgcagactcttctaacttgaaaacgcatgtcaaaactaagcatagtaaagagatgccattcaagtgtgacatttgtcttctgactttctcggataccaaagaggtgcagcaacatgctcttatccaccaagaaagcaaaacacaccagtgtttgcattgcgaccacaagagttcgaactcaagtgatttgaaacgacacataatttcagttcacacgaaagactacccccataagtgtgacatgtgtgataaaggctttcacaggccttcagaactcaagaaacacgtggctgcccacaagggcaaaaaaatgcaccagtgtagacattgtgactttaagattgcagatccatttgttctaagtcgccatattctctcagttcacacaaaggatcttccatttaggtgcaagagatgtagaaagggatttaggcaacagagtgagcttaaaaagcatatgaagacacacagtggcaggaaagtgtatcagtgtgagtactgtgagtatagcactacagatgcctcaggctttaaacggcacgttatttccattcacacgaaagactatcctcaccggtgtgagtactgcaagaaaggcttccgaagaccttcagaaaagaaccagcacataatgcgacatcataaagaagttggcctgccctaacaatacttctacagaacgtttgtagagatattggccttgaagcagaaaattcattttaaagccaatcagtctcattcacatacaatactgtatattgatttatgctgtgtacaaatagaattattacttctagttgacttttttttaaatatacattttgctcagtagtgtgttctgaattctattcagtttgtttaataaatagggaaaactggcaacatgctagttacttttaataaagtaatccctgattctataccgaagttttatatcttagaattttatatttatttaaatatttaccttgcttaccttgatggtactcttctaagaccattaacttaaggtaactttatattggtaactctgaaagtattcatgttgactcatttttttccccatacatttctcacaataaaattgtcagagacatctactaatataaatgggagattttacagtcaggtctaattatcataacatggaagtcatttacttgtcttgcttaatattttcagaccacttgacagtgaaagtttccatttgagctgttgcgtccctggctttgctgagtaaagagcagtggctgggttcgtgtttacttttcaaatatacttcttttggctttctttggattatttacatcttttgtcagcgtagcaaacttttagaaaaccttattgaaaaactgtgcttgctcatgttgtattttgattattctgtctgtgcggcttcatcttggaatggttgtgtgctacaaatgacacttactgaggactgcattttggaatctcctagaggtaactcatggcttataggatcttttgcaactttatgtatgtaaatgtaccctgaattatatatatacacatatatatcatgtacctgtgtgtattgcttattttacatatttatacacacaaccccaagtagtagttgtttaaaatctataatgaaaagtattaaatttacaataacatgaaagatccagggatgcatgagagagcattttgtaagtcatgctcttcagagagactactcaggtgaagaattagaaggaaaataaggacactagtatttttaaagagtaaagatattttcttttaaatatctttggtaattgaaacatagaggttaagatgtttctaggtagaatgttttcatacaatttcacctccatgtctttatgtttttctgaaaagcaaatgagtatccagacatgactcccacagttctctttgagaagcctgagagggaactctgtcttacctagtgagggggatggaaaagaagtgatggctctgtggaccagagaacgggtgctaattatgacttcacactcggcaagttcaggctgatctgttatttctcagttacagttagcaaactttaaaaacttaacactcaagttggctttgattaaaaggtaaagatgtgttttaagtggataaggaaagtctgaggccttatttggaacatcactaagtcttccacaggttttttgtttgtttgtttttttttgttgtttttttttcttaagacggagtcttgctctgttgcccaggctggactgcagtggtgtgatcactgcaacctctgcagctcactgcaacctctgcttcctgggttcaagcaattatctgcctcagcctctcgagtagctgggattacaggcgcccaccaccacgcccggctaattttttgtatttttaatagagatggggtttcaccatcttggccaggctggtcttgaaccctgacctcgtgatccacctgcctcggccttccatagtgctgggtttacaggcgtgagccaccgtgcccagacaccacataggtctgaatcagtgtcatacattcataaaacaaactcggttaattagaacttggttatgttaagacgaatctgggagaacagaaaacagtttttggggtcccttcagttggctattggtccgtatgcatctagcacattgtaggagatttagaaattgtcttcccacccgatagctgccttgtcacctcattatggtgctccatcccctgtgtgcttaggtttttacctttcatctttctctttgccattgatgtttgtattcaagagttatatttttagggttagaaatcaaaatatttggtgtttggcaaacctctgaagtgctagactgatttagtctagttttaaaccaagtgctttaggcaggtgtgaactccagcccaaatgccagtcaaagtcaaggcatgggttttcctagcctatcttataggaaattcctgtaccttcttggcccccataatgtgttttttttttttttttttttttaaactaacttacaattttgtgatccgtgattcattgccctgcgattcttgaaagctctgtctgtttttttgtgagaacctttaaaatctcccttaatttttattttcccagaaataatgtaaaaacacttaaatgaaagtggaaatgtattaattttaaatcctataaaattaatacagaaaatataaatgattgggtcatttaactatatttttttaaataaactgaaagataaagaacacaacacttcacacattttatatttctcttacatactccggaatcatacacagttctttttaaagcacaacattaaaacctttaaaaggtatttaagggtttggtcaagtgaatatgataaaacatacttgtctgtataaagagaaaatgaaattgtagtcactgttatgtactgacattagttacaacctagttttaattcttaaaacaattttgattagcaaagctaaaaaaaaatggatgtttcagttaaatgttttaaagaggtacagatttttacaaggacataatataagttattgttctgtagaaatatcctattaaatattgtatgtccctccctctgtacactttgtaaagaaagtaaaatacataaaaagaaaatcatatagggatgtgtgacattattgtaattgtgtacttgagaataacgtgcaaaaataaaaatcagaatattttcctgttattgaatgtttagtctatttgataccagtactaagttaatgctttttctcaaggaaaaaaaatgtacagtttttgtaaacctaataaacatcaaaagcagtggattattttcatccccccatttcttaatttctttttcacagcagtggaatgcaaagtgcttgattgctttgaattttgtgactcggatgcaaatactggtaatatttcagttctgtgaatttgcaagtaatatttcagagaagttaagaggtgattggtgagtcctttgatgagcatgtccttggaattcattttttcttttatcttcataaaggatttgttttattagcatctccaattcccctgagataaattactcatgcataaagtggtttttgagagcacttaaagttcatttcagtattaatttacagcatatttaatcagtggggactgttaccacctccacaacagaaatcatgccctcgagttaccccactgcgcccagtttagaggactagtagatgctaacatactagggaatggtcattgccacagttaaaaatcggcagttaagtaaatgtcaggagtcaaaagagatagagttgtgccatctttgattttatagacaagattctgcagttcttccaactgtatgaacaaacgtttgcctaatagttgaaacaataaattaaaattttaggtaaatgacgaagggaatgtggtgaatgtcactgtccagagccataaatcagacaaaaccatacatagcatgctgaaaaacttttgtaatggaacacccaacaaatgacacctaacctgtctgtgatccaacaagtccgataacatgctgctgtatttgtattctctgggaatctcagtattaataatttcatttcccacaaattctagcattcatgtaaggaaaaacatggctaatcaatatcttaaaggggcaatctttcagagcagtggttttcaaagtatggccggacagcattggcagcatcttaatctcctgggactttgttaaaaatgcaaattctcagccccaccctagtcctactgaattgggaaactggcgtgggacccagcagtctttgttttaacatgttctccaagtgattctgatgcctgttcaaacttgggaaacacttttagagcacttgaggaacctaaaagatgactggttcagcattttgtgtggtagataagaaagaaattatcacaaaaaatcagaaatgaacagtgagagaaaaataggaccccagacagtttataccttccatttgctgttttaaaagtgtgagcctgccaagtcaacaagtatgcctttagcgcacatgtaaatagcctgcacttcctaaatctcgtgtggcctcccatggttacattcttcaaaggtaaactgagttgagaggaagattcagcatttaaaagagaagggttgaaaaagattgtgtgtgtgtgtgtgtgtgtttaattggcccagggttacttaaataaatcataaccattttgccacattctgtaactgtttagctaaggtcaaattaagtttaccctatggattttgtttcatcttttgtttcgtgtatatactgtttgcctttttcataaaaatcttggatttgttatatattgttcctgttatttttgacatctttgctattgtaaataaattactattttgttttaagttaccctagtggagtgttggctatagacaaggtatatactcgaaacgaggagacttaaatcacacagttaatgaattcccaacttgtttgaagctggaggtgattcgactcccttcagtggttcaacactaataatagcaccaaggaacatgtcactggtgcatatagg

SEQ ID NO: 204116 - DNA, 5239 bp, Homo sapiens
  Payload ID: 20259
  Gene Name: zinc finger protein, Y-linked
  Uniprot ID: P08048
  ENST ID: ENST00000155093
  CDS Start-End: 322-2727
gcctagtgcgcgcgcagtaacctgtttgtggcctggtcggcgtcccgtagggcgccctcccgcgctaggccggccggcgtggcgctcggcgccgaacaggccccgaggaggccgcagttaggcctagtgattatccagttgccctgagcggctgcggaggtgcgctccataagcgggcagggtgggaaaagttcgcccgtttgtccggaaggcagttgatggacctggggtcgacaccactgcggacgcagggcacggcacgggggcgagaaggcgaaggctgcaggcgtgaggagctgtgactaatgagaattaaaggccatggatgaagatgaatttgaattgcagccacaagagccaaactcattttttgatggaataggagctgatgctacacacatggatggtgatcagattgttgtggaaatacaagaagcagtttttgtttctaatattgtggattctgacataactgtgcataactttgttcctgatgacccagactcagttgtaatccaagatgttgttgaagatgttgtcatagaggaggatgttcagtgctcagatatcttagaagaggcagatgtatctgaaaatgtcatcattcctgagcaagtgctggactcagatgtaactgaagaagtttctttaccacactgcacagtcccagatgatgttttagcttctgacattacttcaacctcaatgtctatgccagaacatgttttaacgagtgaatccatgcatgtgtgtgacattggacatgttgaacatatggtgcatgatagtgtagtggaagcagaaatcattactgatcctctgacgagtgacatagtttcagaagaagtattggtagcagactgtgcccctgaagcagtcatagatgccagcgggatctcagtggaccagcaagataatgacaaagccagctgtgaggactacctaatgatttcgttggatgatgctggcaaaatagaacatgatggttccactggagtgaccatcgatgcagaatcagaaatggatccttgtaaagtggatagcacttgtcctgaagtcatcaaggtgtacatttttaaagctgaccctggagaagatgacttaggtggaactgtagacattgtggagagtgaacctgaaaatgatcatggagttgaactacttgatcagaacagcagtattcgtgttcccagggaaaagatggtttatatgactgtcaatgactctcaacaagaagatgaagatttaaatgttgctgaaattgctgatgaagtttatatggaagtgatcgtaggagaggaggatgctgctgttgcagcagcagcagctgctgtgcatgagcagcaaattgatgaggatgaaatgaaaaccttcgtaccaattgcatgggcagcagcttatggtaataattctgatggaattgaaaaccggaatggcactgcaagtgccctcttgcacatagatgagtctgctggccttggcagactggctaaacagaaaccaaagaaaaagagaagacctgattccaggcagtaccaaacagcaataattattggccctgatggtcatcctttgactgtctatccttgcatgatttgtgggaagaagtttaagtcgaggggttttttgaaaagacacatgaaaaaccatcctgaacaccttgccaagaagaagtaccactgtactgactgtgattacactaccaataagaagataagtttacataaccacctggagagccacaagctgaccagcaaggcagagaaggccattgaatgtgatgagtgtgggaagcatttttctcatgcaggggctttgtttactcacaaaatggtgcataaggaaaaaggggccaacaaaatgcacaagtgtaaattctgtgaatatgagacagctgaacaggggttattgaatcgccacctcttggcagtccacagcaagaactttcctcatatttgtgtggagtgtggtaaaggtttccgacacccgtcggaactgagaaagcacatgcgaatccataccggcgagaagccataccaatgccagtactgtgaatataggtctgcagactcttctaacttgaaaacacatataaaaacaaagcatagtaaagagatgccattcaagtgtgacatttgtcttctgactttctcagataccaaagaagtgcagcaacatactcttgtccaccaagaaagcaaaacacatcagtgtttgcattgcgaccacaagagttcaaactcaagtgatttgaaacgacatgtaatttcagttcatacgaaagactatcctcataagtgtgagatgtgcgagaaaggctttcacaggccttcagaacttaagaaacatgtggctgtccacaaaggtaaaaaaatgcaccaatgtagacattgtgactttaagattgcagacccatttgttctaagtcgccatattctctcagttcacacaaaggatcttccatttaggtgtaagagatgtagaaagggatttaggcaacaaaatgagcttaaaaagcatatgaagacacacagtggcaggaaagtatatcagtgtgagtactgtgagtatagcactacagatgcctcaggctttaaacggcacgttatttccattcatacaaaagactatcctcatcggtgtgagtactgcaagaaaggcttccgaagaccttcagaaaagaaccagcacataatgagacaccataaagaagttggtctgccctaacagtgtgtctacaagcttgtaaagatgttggccttgaagcagaaaattcattttttaaagccagtcttgttcacatccattactatacattgaattatgctgtgtaaaaatagaattattgcttctagtccacttttctttacattttattcaatacgctgtcctgaatcctattcagtttctttaatagatgaggaaaaatagcaacaagcaagttgcttataataaaataatttgtgattctatactgaattttcagtcataaaagctttactatttatttacatatttattcatgttcatggtactcttctaagacaaaatcagattgataactatgaaagtaacatttttgacccatttcctcctacacaagtgtttcacattggagacatctgctaatataaatgggaggttttactgtcaagtccaattagcaaaacgtggtaataatttttttgtcagtattttcagattacatgataaaattttacatttgagcttctagcattgattaatataggatattgaccacgtttatgtttaaatttcattttgttcagcagacaaaatgtacttcccttaactttcattaatagtgtttacatcttttgtcagcacagcaaacttttagaaagtaatagttttacttatttttatcttctgttttctctttgtactgctttgtcttgcattgtgttccaacacatgagacttactgctcactgaattttggagtcttttagaggtaaattgtggactcaggattttttgaaacttggtgtgtaactctaaatcttgtatatgcatctttgttgcttattacatatttacacacacaaccacaaattttaaacttatgatgaaaatttacaataacctgaaagatccagagatgtatgagagcattttgtaacttgttattcagttactaaatttgaggtgaataattaaaaagaaaaggacattaggagagtgaaaatcttctcttcaaataatctttgatagataaaaatggaaggtaagatgtttctagatagaatgttttcatacaatttcagcttcatatcataaatttttctggaaagctatttcagacatagatttcatagtatttttctgagaatcctgtgaaggaacgctgtctctttgcaaagtaaggaggactaagggaaaatgatggtaccatgtaacagaatgagagctaattccaaattagcaacttcatcctgctttctattttacattgagtaaagttttaaaaagacaacagtcaagttgattttgattagaagataaaagtacataatgaaaatccatggccttatttggaatatatatcactttccaaattttattatttatttgagagttaataagttaatgttattaagcagttaataatttatatgtatggatataatataaaatgaattcatataattaaaaagaatttggttaataagaatttggagaatggaaaatacatttttaggttccttaatttggctgttggtacctgtgtatttggaatattttaggggattcgaattttttttaacccacattacagctaccttctagctttagtatggtagtgcttcattcaacttttgctgtcaggtttttattttcacctttttctgtgccaccaattcaaaagttataggattaggaaatataaatttatatttggtgattggcagcctctgaaatgttagattaatttgatctagttctaaagtgctttagtcatatatgaatttaaacctagtaccatccaaaaccatgtaatggattttaagaatctgttaggccttcttagcctttatacatgtccctacctgatttttactgtccttcatgatcctgttcttgaaaacttcagtttgtatttgagaatcctttaaatctccttccaatttgttttctccctgaagtaatataaaaggaagtatttaagtgaaagtttaagagttttaaaacattctttaaaattaatacagatagttagctatttatcttttaaaaataaactaaggtaaaaaacgtgacactttacatatttcatatttttcatatagtctggaggtatacacagttgttttgtttttaaccacggtattgaaacctttaaaaggtaattaagcatttggtcaagtaaatatagaacatttgtataaagaaagaaatgaaattgtgcttaatgttatatactgttattatttgcaggctggttttaattcttaatttgattagcaaagctaaaaaagtggatgttgaagttgaaagttttaaagaggtacaaaatcttacaaggacataaattattatttggttgaaaaatagcctattagatattgtatgtcccttcctctgtacaaattgtaaaatacttaaaataactatgaagaattcatataggaagtgtgatactattgtaaatgtgtatttgagaatatgcaaaaataaaaataatattttactgttaataaatgtttacttgtatatg

SEQ ID NO: 204117 - DNA, 5113 bp, Homo sapiens
  Payload ID: 20259
  Gene Name: zinc finger protein, Y-linked
  Uniprot ID: P08048
  ENST ID: ENST00000383052
  CDS Start-End: 195-2600
gacggcgggcccgtgccggggagctgggccgctttttgtcagctccgaactcggcccctcctccctccctccgcccgccctaccagccggagcccggcccagtgctccagagaaaggccgtcctgcagcacccgccgctgtcgccgaccgcccgcacatccgtcgggagctgtgactaatgagaattaaaggccatggatgaagatgaatttgaattgcagccacaagagccaaactcattttttgatggaataggagctgatgctacacacatggatggtgatcagattgttgtggaaatacaagaagcagtttttgtttctaatattgtggattctgacataactgtgcataactttgttcctgatgacccagactcagttgtaatccaagatgttgttgaagatgttgtcatagaggaggatgttcagtgctcagatatcttagaagaggcagatgtatctgaaaatgtcatcattcctgagcaagtgctggactcagatgtaactgaagaagtttctttaccacactgcacagtcccagatgatgttttagcttctgacattacttcaacctcaatgtctatgccagaacatgttttaacgagtgaatccatgcatgtgtgtgacattggacatgttgaacatatggtgcatgatagtgtagtggaagcagaaatcattactgatcctctgacgagtgacatagtttcagaagaagtattggtagcagactgtgcccctgaagcagtcatagatgccagcgggatctcagtggaccagcaagataatgacaaagccagctgtgaggactacctaatgatttcgttggatgatgctggcaaaatagaacatgatggttccactggagtgaccatcgatgcagaatcagaaatggatccttgtaaagtggatagcacttgtcctgaagtcatcaaggtgtacatttttaaagctgaccctggagaagatgacttaggtggaactgtagacattgtggagagtgaacctgaaaatgatcatggagttgaactacttgatcagaacagcagtattcgtgttcccagggaaaagatggtttatatgactgtcaatgactctcaacaagaagatgaagatttaaatgttgctgaaattgctgatgaagtttatatggaagtgatcgtaggagaggaggatgctgctgttgcagcagcagcagctgctgtgcatgagcagcaaattgatgaggatgaaatgaaaaccttcgtaccaattgcatgggcagcagcttatggtaataattctgatggaattgaaaaccggaatggcactgcaagtgccctcttgcacatagatgagtctgctggccttggcagactggctaaacagaaaccaaagaaaaagagaagacctgattccaggcagtaccaaacagcaataattattggccctgatggtcatcctttgactgtctatccttgcatgatttgtgggaagaagtttaagtcgaggggttttttgaaaagacacatgaaaaaccatcctgaacaccttgccaagaagaagtaccactgtactgactgtgattacactaccaataagaagataagtttacataaccacctggagagccacaagctgaccagcaaggcagagaaggccattgaatgtgatgagtgtgggaagcatttttctcatgcaggggctttgtttactcacaaaatggtgcataaggaaaaaggggccaacaaaatgcacaagtgtaaattctgtgaatatgagacagctgaacaggggttattgaatcgccacctcttggcagtccacagcaagaactttcctcatatttgtgtggagtgtggtaaaggtttccgacacccgtcggaactgagaaagcacatgcgaatccataccggcgagaagccataccaatgccagtactgtgaatataggtctgcagactcttctaacttgaaaacacatataaaaacaaagcatagtaaagagatgccattcaagtgtgacatttgtcttctgactttctcagataccaaagaagtgcagcaacatactcttgtccaccaagaaagcaaaacacatcagtgtttgcattgcgaccacaagagttcaaactcaagtgatttgaaacgacatgtaatttcagttcatacgaaagactatcctcataagtgtgagatgtgcgagaaaggctttcacaggccttcagaacttaagaaacatgtggctgtccacaaaggtaaaaaaatgcaccaatgtagacattgtgactttaagattgcagacccatttgttctaagtcgccatattctctcagttcacacaaaggatcttccatttaggtgtaagagatgtagaaagggatttaggcaacaaaatgagcttaaaaagcatatgaagacacacagtggcaggaaagtatatcagtgtgagtactgtgagtatagcactacagatgcctcaggctttaaacggcacgttatttccattcatacaaaagactatcctcatcggtgtgagtactgcaagaaaggcttccgaagaccttcagaaaagaaccagcacataatgagacaccataaagaagttggtctgccctaacagtgtgtctacaagcttgtaaagatgttggccttgaagcagaaaattcattttttaaagccagtcttgttcacatccattactatacattgaattatgctgtgtaaaaatagaattattgcttctagtccacttttctttacattttattcaatacgctgtcctgaatcctattcagtttctttaatagatgaggaaaaatagcaacaagcaagttgcttataataaaataatttgtgattctatactgaattttcagtcataaaagctttactatttatttacatatttattcatgttcatggtactcttctaagacaaaatcagattgataactatgaaagtaacatttttgacccatttcctcctacacaagtgtttcacattggagacatctgctaatataaatgggaggttttactgtcaagtccaattagcaaaacgtggtaataatttttttgtcagtattttcagattacatgataaaattttacatttgagcttctagcattgattaatataggatattgaccacgtttatgtttaaatttcattttgttcagcagacaaaatgtacttcccttaactttcattaatagtgtttacatcttttgtcagcacagcaaacttttagaaagtaatagttttacttatttttatcttctgttttctctttgtactgctttgtcttgcattgtgttccaacacatgagacttactgctcactgaattttggagtcttttagaggtaaattgtggactcaggattttttgaaacttggtgtgtaactctaaatcttgtatatgcatctttgttgcttattacatatttacacacacaaccacaaattttaaacttatgatgaaaatttacaataacctgaaagatccagagatgtatgagagcattttgtaacttgttattcagttactaaatttgaggtgaataattaaaaagaaaaggacattaggagagtgaaaatcttctcttcaaataatctttgatagataaaaatggaaggtaagatgtttctagatagaatgttttcatacaatttcagcttcatatcataaatttttctggaaagctatttcagacatagatttcatagtatttttctgagaatcctgtgaaggaacgctgtctctttgcaaagtaaggaggactaagggaaaatgatggtaccatgtaacagaatgagagctaattccaaattagcaacttcatcctgctttctattttacattgagtaaagttttaaaaagacaacagtcaagttgattttgattagaagataaaagtacataatgaaaatccatggccttatttggaatatatatcactttccaaattttattatttatttgagagttaataagttaatgttattaagcagttaataatttatatgtatggatataatataaaatgaattcatataattaaaaagaatttggttaataagaatttggagaatggaaaatacatttttaggttccttaatttggctgttggtacctgtgtatttggaatattttaggggattcgaattttttttaacccacattacagctaccttctagctttagtatggtagtgcttcattcaacttttgctgtcaggtttttattttcacctttttctgtgccaccaattcaaaagttataggattaggaaatataaatttatatttggtgattggcagcctctgaaatgttagattaatttgatctagttctaaagtgctttagtcatatatgaatttaaacctagtaccatccaaaaccatgtaatggattttaagaatctgttaggccttcttagcctttatacatgtccctacctgatttttactgtccttcatgatcctgttcttgaaaacttcagtttgtatttgagaatcctttaaatctccttccaatttgttttctccctgaagtaatataaaaggaagtatttaagtgaaagtttaagagttttaaaacattctttaaaattaatacagatagttagctatttatcttttaaaaataaactaaggtaaaaaacgtgacactttacatatttcatatttttcatatagtctggaggtatacacagttgttttgtttttaaccacggtattgaaacctttaaaaggtaattaagcatttggtcaagtaaatatagaacatttgtataaagaaagaaatgaaattgtgcttaatgttatatactgttattatttgcaggctggttttaattcttaatttgattagcaaagctaaaaaagtggatgttgaagttgaaagttttaaagaggtacaaaatcttacaaggacataaattattatttggttgaaaaatagcctattagatattgtatgtcccttcctctgtacaaattgtaaaatacttaaaataactatgaagaattcatataggaagtgtgatactattgtaaatgtgtatttgagaatatgcaaaaataaaaataatattttactgttaataaatgtttacttgtatatga

SEQ ID NO: 204118 - DNA, 567 bp, Homo sapiens
  Payload ID: 20259
  Gene Name: zinc finger protein, Y-linked
  ENST ID: ENST00000443793
  CDS Start-End: 294-567
tggcctggtcggcgtcccgtagggcgccctcccgcgctaggccggccggcgtggcgctcggcgccgaacaggccccgaggaggccgcagttaggcctagtgattatccagttgccctgagcggctgcggaggtgcgctccataagcgggcagggtgggaaaagttcgcccgtttgtccggaaggcagttgatggacctggggtcgacaccactgcggacgcagggcacggcacgggggcgagaaggcgaaggctgcaggcgtgaggagctgtgactaatgagaattaaaggccatggatgaagatgaatttgaattgcagccacaagagccaaactcattttttgatggaataggagctgatgctacacacatggatggtgatcagattgttgtggaaatacaagaagcagtttttgtttctaatattgtggattctgacataactgtgcataactttgttcctgatgacccagactcagttgtaatccaagatgttgttgaagatgttgtcatagaggaggatgttcagtgctcagatatcttagaagaggcagatgtatctgaaa

SEQ ID NO: 204119 - DNA, 3464 bp, Homo sapiens
  Payload ID: 20259
  Gene Name: zinc finger protein, Y-linked
  Uniprot ID: P08048
  ENST ID: ENST00000449237
  CDS Start-End: 137-2311
gggcagggtgggaaaagttcgcccgtttgtccggaaggcagttgatggacctggggtcgacaccactgcggacgcagggcacggcacgggggcgagaaggcgaaggctgcaggcgtgaggagctgatgctacacacatggatggtgatcagattgttgtggaaatacaagaagcagtttttgtttctaatattgtggattctgacataactgtgcataactttgttcctgatgacccagactcagttgtaatccaagatgttgttgaagatgttgtcatagaggaggatgttcagtgctcagatatcttagaagaggcagatgtatctgaaaatgtcatcattcctgagcaagtgctggactcagatgtaactgaagaagtttctttaccacactgcacagtcccagatgatgttttagcttctgacattacttcaacctcaatgtctatgccagaacatgttttaacgagtgaatccatgcatgtgtgtgacattggacatgttgaacatatggtgcatgatagtgtagtggaagcagaaatcattactgatcctctgacgagtgacatagtttcagaagaagtattggtagcagactgtgcccctgaagcagtcatagatgccagcgggatctcagtggaccagcaagataatgacaaagccagctgtgaggactacctaatgatttcgttggatgatgctggcaaaatagaacatgatggttccactggagtgaccatcgatgcagaatcagaaatggatccttgtaaagtggatagcacttgtcctgaagtcatcaaggtgtacatttttaaagctgaccctggagaagatgacttaggtggaactgtagacattgtggagagtgaacctgaaaatgatcatggagttgaactacttgatcagaacagcagtattcgtgttcccagggaaaagatggtttatatgactgtcaatgactctcaacaagaagatgaagatttaagtaataattctgatggaattgaaaaccggaatggcactgcaagtgccctcttgcacatagatgagtctgctggccttggcagactggctaaacagaaaccaaagaaaaagagaagacctgattccaggcagtaccaaacagcaataattattggccctgatggtcatcctttgactgtctatccttgcatgatttgtgggaagaagtttaagtcgaggggttttttgaaaagacacatgaaaaaccatcctgaacaccttgccaagaagaagtaccactgtactgactgtgattacactaccaataagaagataagtttacataaccacctggagagccacaagctgaccagcaaggcagagaaggccattgaatgtgatgagtgtgggaagcatttttctcatgcaggggctttgtttactcacaaaatggtgcataaggaaaaaggggccaacaaaatgcacaagtgtaaattctgtgaatatgagacagctgaacaggggttattgaatcgccacctcttggcagtccacagcaagaactttcctcatatttgtgtggagtgtggtaaaggtttccgacacccgtcggaactgagaaagcacatgcgaatccataccggcgagaagccataccaatgccagtactgtgaatataggtctgcagactcttctaacttgaaaacacatataaaaacaaagcatagtaaagagatgccattcaagtgtgacatttgtcttctgactttctcagataccaaagaagtgcagcaacatactcttgtccaccaagaaagcaaaacacatcagtgtttgcattgcgaccacaagagttcaaactcaagtgatttgaaacgacatgtaatttcagttcatacgaaagactatcctcataagtgtgagatgtgcgagaaaggctttcacaggccttcagaacttaagaaacatgtggctgtccacaaaggtaaaaaaatgcaccaatgtagacattgtgactttaagattgcagacccatttgttctaagtcgccatattctctcagttcacacaaaggatcttccatttaggtgtaagagatgtagaaagggatttaggcaacaaaatgagcttaaaaagcatatgaagacacacagtggcaggaaagtatatcagtgtgagtactgtgagtatagcactacagatgcctcaggctttaaacggcacgttatttccattcatacaaaagactatcctcatcggtgtgagtactgcaagaaaggcttccgaagaccttcagaaaagaaccagcacataatgagacaccataaagaagttggtctgccctaacagtgtgtctacaagcttgtaaagatgttggccttgaagcagaaaattcattttttaaagccagtcttgttcacatccattactatacattgaattatgctgtgtaaaaatagaattattgcttctagtccacttttctttacattttattcaatacgctgtcctgaatcctattcagtttctttaatagatgaggaaaaatagcaacaagcaagttgcttataataaaataatttgtgattctatactgaattttcagtcataaaagctttactatttatttacatatttattcatgttcatggtactcttctaagacaaaatcagattgataactatgaaagtaacatttttgacccatttcctcctacacaagtgtttcacattggagacatctgctaatataaatgggaggttttactgtcaagtccaattagcaaaacgtggtaataatttttttgtcagtattttcagattacatgataaaattttacatttgagcttctagcattgattaatataggatattgaccacgtttatgtttaaatttcattttgttcagcagacaaaatgtacttcccttaactttcattaatagtgtttacatcttttgtcagcacagcaaacttttagaaagtaatagttttacttatttttatcttctgttttctctttgtactgctttgtcttgcattgtgttccaacacatgagacttactgctcactgaattttggagtcttttagaggtaaattgtggactcaggattttttgaaacttggtgtgtaactctaaatcttgtatatgcatctttgttgcttattacatatttacacacacaaccacaaattttaaacttatgatgaaaatttacaataacctgaaagatccagagatgtatgagagcattttgtaacttgttattcagttactaaatttgaggtgaataattaaaaagaaaaggacattaggagagtgaaaatcttctcttcaaataatctttgatagataaaaatggaaggtaagatgtttctagatagaatgttttcatacaatttcagcttcatatcataaatttttctggaaagctatttcagacatagatttcatagtatttttctgagaatcctgtgaaggaacgctgtctctttgc

SEQ ID NO: 204120 - DNA, 2273 bp, Homo sapiens
  Payload ID: 20259
  Gene Name: zinc finger protein, Y-linked
  Uniprot ID: P08048
  ENST ID: ENST00000625061
  CDS Start-End: 87-1919
agagaaaggccgtcctgcagcacccgccgctgtcgccgaccgcccgcacatccgtcgggagctgtgactaatgagaattaaaggccatggatgaagatgaatttgaattgcagccacaagagccaaactcattttttgatggaatagtggatgatgctggcaaaatagaacatgatggttccactggagtgaccatcgatgcagaatcagaaatggatccttgtaaagtggatagcacttgtcctgaagtcatcaaggtgtacatttttaaagctgaccctggagaagatgacttaggtggaactgtagacattgtggagagtgaacctgaaaatgatcatggagttgaactacttgatcagaacagcagtattcgtgttcccagggaaaagatggtttatatgactgtcaatgactctcaacaagaagatgaagatttaaatgttgctgaaattgctgatgaagtttatatggaagtgatcgtaggagaggaggatgctgctgttgcagcagcagcagctgctgtgcatgagcagcaaattgatgaggatgaaatgaaaaccttcgtaccaattgcatgggcagcagcttatggtaataattctgatggaattgaaaaccggaatggcactgcaagtgccctcttgcacatagatgagtctgctggccttggcagactggctaaacagaaaccaaagaaaaagagaagacctgattccaggcagtaccaaacagcaataattattggccctgatggtcatcctttgactgtctatccttgcatgatttgtgggaagaagtttaagtcgaggggttttttgaaaagacacatgaaaaaccatcctgaacaccttgccaagaagaagtaccactgtactgactgtgattacactaccaataagaagataagtttacataaccacctggagagccacaagctgaccagcaaggcagagaaggccattgaatgtgatgagtgtgggaagcatttttctcatgcaggggctttgtttactcacaaaatggtgcataaggaaaaaggggccaacaaaatgcacaagtgtaaattctgtgaatatgagacagctgaacaggggttattgaatcgccacctcttggcagtccacagcaagaactttcctcatatttgtgtggagtgtggtaaaggtttccgacacccgtcggaactgagaaagcacatgcgaatccataccggcgagaagccataccaatgccagtactgtgaatataggtctgcagactcttctaacttgaaaacacatataaaaacaaagcatagtaaagagatgccattcaagtgtgacatttgtcttctgactttctcagataccaaagaagtgcagcaacatactcttgtccaccaagaaagcaaaacacatcagtgtttgcattgcgaccacaagagttcaaactcaagtgatttgaaacgacatgtaatttcagttcatacgaaagactatcctcataagtgtgagatgtgcgagaaaggctttcacaggccttcagaacttaagaaacatgtggctgtccacaaaggtaaaaaaatgcaccaatgtagacattgtgactttaagattgcagacccatttgttctaagtcgccatattctctcagttcacacaaaggatcttccatttaggtgtaagagatgtagaaagggatttaggcaacaaaatgagcttaaaaagcatatgaagacacacagtggcaggaaagtatatcagtgtgagtactgtgagtatagcactacagatgcctcaggctttaaacggcacgttatttccattcatacaaaagactatcctcatcggtgtgagtactgcaagaaaggcttccgaagaccttcagaaaagaaccagcacataatgagacaccataaagaagttggtctgccctaacagtgtgtctacaagcttgtaaagatgttggccttgaagcagaaaattcattttttaaagccagtcttgttcacatccattactatacattgaattatgctgtgtaaaaatagaattattgcttctagtccacttttctttacattttattcaatacgctgtcctgaatcctattcagtttctttaatagatgaggaaaaatagcaacaagcaagttgcttataataaaataatttgtgattctatactgaattttcagtcataaaagctttactatttatttacatatttattcatgttcatggtactcttctaagacaaaatcagattgataactatgaaagtaacattttt

SEQ ID NO: 204121 - DNA, 1371 bp, Homo sapiens
  Payload ID: 20260
  Gene Name: zinc finger protein-like 1
  Uniprot ID: O95159
  ENST ID: ENST00000294258
  CDS Start-End: 153-1085
cggagggataatcggggcggccggggctgaagggagaggcgcaggagccctggggagagtggtccctgcccttccgcgcctcgagccatcgctaccgcccttcggaaccagtgcagcggccgatcagtaaacacagagactggggatcgatcatggggctttgtaagtgccccaagagaaaggtgaccaacctgttctgcttcgaacatcgggtcaacgtctgcgagcactgcctggtagccaatcacgccaagtgcatcgtccagtcctacctgcaatggctccaagatagcgactacaaccccaattgccgcctgtgcaacatacccctggccagccgagagacgacccgccttgtctgctatgatctctttcactgggcctgcctcaatgaacgtgctgcccagctaccccgaaacacggcacctgccggctatcagtgccccagctgcaatggccccatcttccccccaaccaacctggctggccccgtggcctccgcactgagagagaagctggccacagtcaactgggcccgggcaggactgggcctccctctgatcgatgaggtggtgagcccagagcccgagcccctcaacacgtctgacttctctgactggtctagttttaatgccagcagtacccctggaccagaggaggtagacagcgcctctgctgccccagccttctacagccaggccccccggcccccagcttccccaggccggcccgagcagcacacagtgatccacatgggcaatcctgagcccttgactcacgcccctaggaaggtgtatgatacgcgggatgatgaccggacaccaggcctccatggagactgtgacgatgacaagtaccgacgtcggccggccttgggttggctggcccggctgctaaggagccgggctgggtctcggaagcggccgctgaccctgctccagcgggcggggctgctgctactcttgggactgctgggcttcctggccctccttgccctcatgtctcgcctaggccgggccgcagctgacagcgatcccaacctggacccactcatgaaccctcacatccgcgtgggcccctcctgagcccccttgcttgtggctaggccagcctaggatgtgggttctgtggaggagaggcggggtaatggggaggctgagggcacctcttcactgcccctctccctcaagcctaagacactaagaccccagacccaaagccaagtccaccagagtggctgcaggccaggcctggagtccccgtgggtcaagcatttgtcttgacttgctttcctcccgggtctccagcctccgacccctcgccccatgaaggagctggcaggtggaaataaacaacaactttattaaaaca

SEQ ID NO: 204122 - DNA, 718 bp, Homo sapiens
  Payload ID: 20260
  Gene Name: zinc finger protein-like 1
  ENST ID: ENST00000453524
  CDS Start-End: 153-482
cggagggataatcggggcggccggggctgaagggagaggcgcaggagccctggggagagtggtccctgcccttccgcgcctcgagccatcgctaccgcccttcggaaccagtgcagcggccgatcagtaaacacagagactggggatcgatcatggggctttgtaagtgccccaagagaaaggtgaccaacctgttctgcttcgaacatcgggtcaacgtctgcgagcactgcctggtagccaatcacgccaagtgcatcgtccagtcctacctgcaatggctccaagatagcgactacaaccccaattgccgcctgtgcaacatacccctggccagccgagagacgacccgccttgtctgctatggtgaggccttggcacctcggggggatcaggccagcctcaggggccagcttggtgactggtttccaggccctcctcaagcagcaggacaatctctttcactgggcctgcctcaatgaacgtgctgcccagctaccccgaaacacggcacctgccggctatcagtgccccagctgcaatggccccatcttccccccaaccaacctggctggccccgtggcctccgcactgagagagaagctggccacagtcaactgggcccgggcaggactgggcctccctctgatcgatgaggtggtgagcccagagcccgagcccctcaacacgtctgacttctctgactggtctagtttta

SEQ ID NO: 204123 - DNA, 158 bp, Homo sapiens
  Payload ID: 20260
  Gene Name: zinc finger protein-like 1
  ENST ID: ENST00000530488
  CDS Start-End: 1-158
cgactacaaccccaattgccgcctgtgcaacatacccctggccagccgagagacgacccgccttgtctgctatgattccttcctccagatcgatgaggtggtgagcccagagcccgagcccctcaacacgtctgacttctctgactggtctagtttta

SEQ ID NO: 204124 - DNA, 576 bp, Homo sapiens
  Payload ID: 20260
  Gene Name: zinc finger protein-like 1
  ENST ID: ENST00000526945
  CDS Start-End: 59-576
ccgcccttcggaaccagtgcagcggccgatcagtaaacacagagactggggatcgatcatggggctttgtaagtgccccaagagaaaggtgaccaacctgttctgcttcgaacatcgggtcaacgtctgcgagcactgcctgtgcatcgtccagtcctacctgcaatggctccaagatagcgactacaaccccaattgccgcctgtgcaacatacccctggccagccgagagacgacccgccttgtctgctatgatctctttcactgggcctgcctcaatgaacgtgctgcccagctaccccgaaacacggcacctgccggctatcagtgccccagctgcaatggccccatcttccccccaaccaacctggctggccccgtggcctccgcactgagagagaagctggccacagtcaactgggcccgggcaggactgggcctccctctgatcgatgaggtggtgagcccagagcccgagcccctcaacacgtctgacttctctgactggtctagttttaatgccagcagtacccctggaccagaggaggtagacagcgcctctgctgccccagcctt

SEQ ID NO: 204125 - DNA, 384 bp, Homo sapiens
  Payload ID: 20260
  Gene Name: zinc finger protein-like 1
  ENST ID: ENST00000526791
  CDS Start-End: 80-277
agagtggtccctgcccttccgcgcctcgagccatcgctaccgcccttcggaaccagtgcagcggccgatcagatcgatcatggggctttgtaagtgccccaagagaaaggtgaccaacctgttctgcttcgaacatcgggtcaacgtctgcgagcactgcctggtagccaatcacgccaaggtggggccttcaggggagcgactgagcagggcactgggtgggcaaggcggtattggcttcctccaaatccatgaggggccccgcgctagaatgtaagccccacaagggcaaggacttgatttattttgttcactgatatatcccccgttcccaagagagagtctggtgcacagtatgtgctcaataaatatttattgattaaa

SEQ ID NO: 204126 - DNA, 478 bp, Homo sapiens
  Payload ID: 20260
  Gene Name: zinc finger protein-like 1
  ENST ID: ENST00000525509
  CDS Start-End: 165-362
gagacgtggcagcggagggataatcggggcggccggggctgaagggagaggcgcaggagccctggggagagtggtccctgcccttccgcgcctcgagccatcgctaccgcccttcggaaccagtgcagcggccgatcagtaaacacagagactggggatcgatcatggggctttgtaagtgccccaagagaaaggtgaccaacctgttctgcttcgaacatcgggtcaacgtctgcgagcactgcctggtagccaatcacgccaaggtggggccttcaggggagcgactgagcagggcactgggtgggcaaggcggtattggcttcctccaaatccatgaggggccccgcgctagaatgtaagccccacaagggcaaggacttgatttattttgttcactgatatatcccccgttcccaagagagagtctggtgcacagtatgtgctcaataaatatttattgattaaacaaacgaaa

SEQ ID NO: 204127 - DNA, 692 bp, Homo sapiens
  Payload ID: 20260
  Gene Name: zinc finger protein-like 1
  ENST ID: ENST00000526334
  CDS Start-End: 128-692
ataatcggggcggccggggctgaagggagaggcgcaggagccctggggagagtggtccctgcccttccgcgcctcgagccatcgctaccgcccttcggaaccagtgcagcggccgatcagatcgatcatggggctttgtaagtgccccaagagaaaggtgaccaacctgttctgcttcgaacatcgggtcaacgtctgcgagcactgcctggtagccaatcacgccaagtgcatcgtccagtcctacctgcaatggctccaagatagcgactacaaccccaattgccgcctgtgcaacatacccctggccagccgagagacgacccgccttgtctgctatgatctctttcactgggcctgcctcaatgaacgtgctgcccagctaccccgaaacacggcacctgccggctatcagtgccccagctgcaatggccccatcttccccccaaccaacctggctggccccgtggcctccgcactgagagagaagctggccacagtcaactgggcccgggcaggactgggcctccctctgatcgatgaggtggtgagcccagagcccgagcccctcaacacgtctgacttctctgactggtctagttttaatgccagcagtacccctggaccagaggaggtagacagcgcctctgctgccccagccttctacagccaggccccccggcccccagctt

SEQ ID NO: 204128 - DNA, 413 bp, Homo sapiens
  Payload ID: 20260
  Gene Name: zinc finger protein-like 1
  ENST ID: ENST00000530744
  CDS Start-End: 1-32
ttccaggccctcctcaagcagcaggacagtgagtcccccgagtctcagagcccagattctagtcctgttaaagttccttacctgctgtgtaagttcagatcgatgaggtggtgagcccagagcccgagcccctcaacacgtctgacttctctgactggtctagttttaatgccagcagtacccctggaccagaggaggtagacagcgcctctgctgccccagccttctacagccaggccccccggcccccagcttccccaggccggcccgagcagcacacagtgatccacatgggcaatcctgagcccttgactcacgcccctaggaaggtgtatgatacgcgggatgatgaccggacaccaggcctccatggagactgtgacgatgacaagtaccgacgtcggccggccttg

SEQ ID NO: 204129 - DNA, 518 bp, Homo sapiens
  Payload ID: 20260
  Gene Name: zinc finger protein-like 1
  ENST ID: ENST00000531761
  CDS Start-End: 158-400
ggcagcggagggataatcggggcggccggggctgaagggagaggcgcaggagccctggggagagtggtccctgcccttccgcgcctcgagccatcgctaccgcccttcggaaccagtgcagcggccgatcagtaaacacagagactggggatcgatcatggggctttgtaagtgccccaagagaaaggtgaccaacctgttctgcttcgaacatcgggtcaacgtctgcgagcactgcctggtagccaatcacgccaagatctctttcactgggcctgcctcaatgaacgtgctgcccagctaccccgaaacacggcacctgccggctatcagtgccccagctgcaatggccccatcttccccccaaccaacctggctggccccgtggcctccgcactgagagagaagctggccacagtcaactgggcccgggcaggactgggcctccctctgatcgatgaggtggtgagcccagagcccgagcccctcaacacgtctgacttctctgactggtctag

SEQ ID NO: 204130 - DNA, 802 bp, Homo sapiens
  Payload ID: 20260
  Gene Name: zinc finger protein-like 1
  ENST ID: ENST00000532200
  CDS Start-End: 181-802
gggatttatgcagggggtgtttctccgcataaggagggacagtgggcaggaatctgagatcggggcgaatatgagaggtgtctgggggagttaagagtggaaactgggctggtgagagcgtagtggtggccaccagaacctgacttcctaccaactcatgcccctttcccaggatcgatcatggggctttgtaagtgccccaagagaaaggtgaccaacctgttctgcttcgaacatcgggtcaacgtctgcgagcactgcctggtagccaatcacgccaagtgcatcgtccagtcctacctgcaatggctccaagatagcgactacaaccccaattgccgcctgtgcaacatacccctggccagccgagagacgacccgccttgtctgctatgatctctttcactgggcctgcctcaatgaacgtgctgcccagctaccccgaaacacggcacctgccggctatcagtgccccagctgcaatggccccatcttccccccaaccaacctggctggccccgtggcctccgcactgagagagaagctggccacagtcaactgggcccgggcaggactgggcctccctctgatcgatgaggtggtgagcccagagcccgagcccctcaacacgtctgacttctctgactggtctagttttaatgccagcagtacccctggaccagaggaggtagacagcgcctctgctgccccagccttctacagccaggccccccggcccccagcttccccaggccggcccgagcagcacacagtgatccacatgggcaatcctgagcccttga

SEQ ID NO: 204131 - DNA, 4738 bp, Homo sapiens
  Payload ID: 20261
  Gene Name: zinc finger RNA binding protein
  Uniprot ID: Q96KR1
  ENST ID: ENST00000265069
  CDS Start-End: 104-3328
agtgcggtcggaggcggcggtctgttctccgctgaggaggagcggggcagaggagggaggcagcgggtgagagttcagagttcagcagcagcagcccgagcccatgattcccatatgccctgtagtttctttcacctatgtgcccagccggctgggggaagatgccaaaatggcgaccggcaactactttggattcacccacagcggggcggcggcggcggcggctgcggcccaatatagccagcagccagcttcgggtgtagcctattctcatccaactacagttgctagctacactgtccatcaggctccagtagctgctcacacagttactgctgcctatgcaccagcagccgccacagttgcagttgccaggcctgctccagtagctgttgcagctgctgcaacagctgctgcttatggaggctaccccactgcacacacagcaactgactatggttatactcagaggcaacaagaagcaccaccaccaccacccccagctactacacaaaactaccaggattcatactcatatgtaaggtccacagctcctgctgtagcttatgatagtaagcaatactaccaacaaccaacagcaactgctgctgctgtagctgccgctgcccaacctcagccttctgttgctgaaacttactatcagacagcccccaaagcaggttacagccaaggtgcaactcagtatactcaagcccagcaaactcgacaagtgacagccataaaaccagccacaccaagtccagctaccactactttctccatctatcctgtatcctccaccgtacagccagtagcagctgcggctactgtggtgccatcctatactcagagtgctacttacagtaccacagcagttacatattctggtacgtcttattcaggttatgaagcagcagtgtattcagctgcatcttcctactatcaacagcagcagcagcaacagaagcaggcagcagcagcagctgctgctgctgctgcaacagctgcctggacagggaccacctttactaaaaaagcaccattccaaaataaacaactgaaaccaaaacagcctcccaaaccaccacagattcactattgtgatgtttgtaagatcagctgtgctggaccacagacttataaagaacatttagaaggacagaaacataaaaaaaaagaagctgcattgaaagcctcacaaaataccagcagcagcaacagttctactcgtgggactcaaaatcagctacgttgtgagctctgcgatgtgtcttgtacaggagcagatgcgtatgctgcccacattcgtggtgctaagcatcagaaagtggttaagttacacacaaaacttggtaaacccattccatcaacagaaccaaatgttgttagccaagctacttcttcaacagctgtatctgcttcaaagccgactgcctctccttcaagcattgcagcaaacaattgtactgtgaatacgtcatcagttgcaacgtcttcaatgaagggtcttacgactacaggaaactcgtctcttaatagcacatctaacactaaagtatcagcagtgcctacaaatatggctgccaagaaaacatctacccccaaaataaattttgttggtggtaataagctgcagtcaacaggaaataaagcagaagacataaaaggaaccgaatgtgttaaaagtactcctgtcacttctgctgtgcagattcctgaagtaaagcaagacacagtgtcagaaccagtcacacctgcatctcttgctgctttacagagtgatgtgcagccagtgggccatgattatgtggaagaggtacgaaatgatgaaggaaaagtaattcggttccattgtaaattatgcgagtgcagctttaatgatcccaatgctaaggagatgcacttaaaagggcgaagacacagacttcaatataaaaaaaaagtaaatccagatttgcaagtagaagtaaagcctagtattcgagcaagaaagattcaagaagagaaaatgaggaagcaaatgcagaaggaggagtactggcgaagacgagaagaagaggagcgttggagaatggaaatgagacgttatgaagaggacatgtactggaggagaatggaggaagaacaacatcattgggatgatcgccgccgaatgccagatggaggttatcctcatggtcctccaggcccattaggccttctgggagtccgaccaggcatgcctcctcagcctcaggggcctgcacccttacgtcgtcctgactcatctgatgaccgttatgtaatgacaaaacatgccaccatttatccaactgaagaggagttacaggcagttcagaaaattgtttctattactgaacgtgctttaaaactcgtttcagacagtttgtctgaacatgagaagaacaagaacaaagagggagatgataagaaagagggaggtaaagacagagctttgaaaggagttttgcgagtgggagtattggcaaaaggattacttctccgaggagatagaaatgtcaaccttgttttgctgtgctcagagaaaccttcaaagacattattaagccgtattgcagaaaacctacccaaacagcttgctgttataagccctgagaagtatgacataaaatgtgctgtatctgaagcggcaataattttgaattcatgtgtggaacccaaaatgcaagtcactatcacactgacatctccaattattcgagaagagaacatgagggaaggagatgtaacctcgggtatggtgaaagacccaccggacgtcttggacaggcaaaaatgccttgacgctctggctgctctacgccacgctaagtggttccaggctagagctaatggtctgcagtcctgtgtgattatcatacgcattcttcgagacctctgtcagcgagttccaacttggtctgattttccaagctgggctatggagttactagtagagaaagcaatcagcagtgcttctagccctcagagccctggggatgcactgagaagagtttttgaatgcatttcttcagggattattcttaaaggtagtcctggacttctggatccttgtgaaaaggatccctttgataccttggcaacaatgactgaccagcagcgtgaagacatcacatccagtgcacagtttgcattgagactccttgcattccgccagatacacaaagttctaggcatggatccattaccgcaaatgagccaacgttttaacatccacaacaacaggaaacgaagaagagatagtgatggagttgatggatttgaagctgaggggaaaaaagacaaaaaagattatgataacttttaaaaagtgtctgtaaatcttcagtgttaaaaaaacagatgcccatttgttggctgtttttcattcataataatgtctacattgaaaaatttatcaagaatttaaaggatttcatggaagaaccaagtttttctatgatattaaaaaatgtacagtgttaggtattatttgaatggaaagacacccaaaaaaaaaaatgtgctccgactagggggaaaacagtagttccgattttttcccattatttttattttattttctggttgccctagcttccccccctatttttgtgtcttttattaactagtgcattgtcttattaaatcttcactgtatttaatgcaggatgtgtgcttcagttgctctgtgtattttgatattttaatttagaggttttgtttgctttttgacactagttgtaagttactttgttatagatggtatcctttaccccttcttaatattttacagcagtacgtttttttgtaacgtgagactgcagagtttgtttttctatatgtgaaggattacaacacaaaaagttatcctgccattcgagtgctcagaactgaatgtttctgcagatcttgtggcatttgtctctagtgtgatatataaaggtgtaattaagacagagttctgttaatctaatcaagtttgctgttagttgtgcattagcagtataaaagctaatatatactatatggtcttgcaacagttttaaagcctctgcataattgataataaaaatgcatgacattcttgtttttaatagacttttaaaatcataattttaggtttaacacgtagatctttgtacagttgactttttgacatagcaaggccaaaaataactttctgaatatttttttcttgtgtataagtggaaagggcatttttcacatataagtgggctaaccaatattttcaaaagaacttcatcattgtacaactaacaacagtaactagcccttaattatggtgacagttccttattggtgtgtgtgagattactctagcaactattacagtataacacagatgatcttctccacacaccccatcacccagataatttacagttctgttaacagtgaggttgataaagtattactgataaaaaattatctaaggaaaaaaacagaaaattatttggtgtggccatcttacctgcttatgtctcctacacaaagctaaatattctagcagtgatgtaatgaaaaattacatcttactgttgatatatgtatgctctggtacacagatgtcattttgttgtcacagcactacagtgaaatacacaaaaaatgaaattcatataatgacttaaatgtattatatgttagaattgacaacataaactacttttgctttgaaatgatgtatgcttcagtaaaatcatattcaaattta

SEQ ID NO: 204132 - DNA, 1140 bp, Homo sapiens
  Payload ID: 20261
  Gene Name: zinc finger RNA binding protein
  ENST ID: ENST00000507465
  CDS Start-End: 1-547
gggagtccgaccaggcatgcctcctcagcctcaggggcctgcacccttacgtcgtcctgactcatctgatgaccgttatgtaatgacaaaacatgccaccatttatccaactgaagaggagttacaggcagttcagaaaattgtttctattactgaacgtgctttaaaactcgtttcagacagtttgtctgaacatgagaagaacaagaacaaagagggagatgataagaaagagggaggtaaagacagagctttgaaaggagttttgcgagtgggagtattggcaaaaggattacttctccgaggagatagaaatgtcaaccttgttttgctgtgctcagagaaaccttcaaagacattattaagccgtattgcagaaaacctacccaaacagcttgctgttataagccctgagaagtatgacataaaatgtgctgtatctgaagcggcaataattttgaattcatgtgtggaacccaaaatgcaagtcactatcacactgacatctccaattattcgagaagagaacatgagggaaggaggctagagctaatggtctgcagtcctgtgtgattatcatacgcattcttcgagacctctgtcagcgagttccaacttggtctgattttccaagctgggctatggagttactagtagagaaagcaatcagcagtgcttctagccctcagagccctggggatgcactgagaagagtttttgaatgcatttcttcagggattattcttaaaggtagtcctggacttctggatccttgtgaaaaggatccctttgataccttggcaacaatgactgaccagcagcgtgaagacatcacatccagtgcacagtttgcattgagactccttgcattccgccagatacacaaagttctaggcatggatccattaccgcaaatgagccaacgttttaacatccacaacaacaggaaacgaagaagagatagtgatggagttgatggatttgaagctgaggggaaaaaagacaaaaaagattatgataacttttaaaaagtgtctgtaaatcttcagtgttaaaaaaacagatgcccatttgttggctgtttttcattcataataatgtctacattgaaaaatttatcaagaatttaaaggatttcat

SEQ ID NO: 204133 - DNA, 4756 bp, Homo sapiens
  Payload ID: 20262
  Gene Name: zinc finger RNA binding protein 2
  Uniprot ID: Q9UPR6
  ENST ID: ENST00000262961
  CDS Start-End: 12-2831
aagacgccaagatggcgacgagtcagtatttcgacttcgcgcagggcggcggcccgcagtacagcgcccagcctccgacccttcccctgcccactgtgggggccagctatactgcacaacccactcctgggatggaccctgccgtgaacccggcctttcccccagctgccccggcagggtacggtggataccagccccactccggccaggacttcgcctacggcagccgaccccaggagcccgtccccacggccaccaccatggctacctaccaggacagttacagctacggacagtcagcagctgccaggagctatgaggacaggccgtacttccagtctgctgccctccagtctgggcgcatgacagccgcagactccggccagccagggacccaagaagcctgcgggcagcccagcccccatggcagtcacagccacgctcagcccccacagcaggcgcccatagtggagtccggacagccagcgagcaccttgtcctcgggatacacctaccccacggcgacaggcgtccagcccgagtcgtcagcttccatcgtgacctcctaccccccgccctcctacaaccccacctgcaccgcctacacggcaccaagctacccgaactatgacgcgtcggtgtactccgctgccagccctttctatcctccagcgcagcccccgcctcccccgggacccccgcagcagctgcccccgccgcccgcgcctgcaggctcaggaagcagccccagggccgactcgaagccaccgcttcccagcaagctgccgagacccaaggcggggcccaggcagctccagcttcactactgcgacatctgcaagatcagctgcgctggcccccagacctaccgggaacatctgggagggcagaagcacagaaagaaggaggcggcccagaagacaggcgtgcagcccaacgggagcccgcgcggggtgcaggcgcagctgcattgcgacctgtgcgccgtgtcctgcaccggggcggacgcctacgcggcccacatccggggatccaagcaccagaaggtcttcaagctgcacgccaaactggggaagcccattcccaccctcgagcctgcactggccacagagagcccccccggggcagaggccaagcccacgtcccccactggccccagcgtgtgtgcctcgagcaggccagcgctggccaagagacccgtggcctcgaaggccttatgcgaggggcctcctgagccacaggcagcaggctgcagaccccagtgggggaaaccagcccaacctaaattagagggtcccggagcacctacccaaggaggctcaaaggaagctcccgcgggctgctctgatgcgcagccggtgggcccggaatatgtggaggaggtgttcagcgacgaagggcgagtgcttcgcttccactgcaagctgtgcgagtgcagtttcaacgaccttaacgcgaaggacctgcacgtgagggggcggcggcaccggctgcagtaccggaagaaagtgaacccggaccttcccattgccacggagcccagcagccgggctcggaaggtcctggaggagcgcatgaggaagcagcggcacctggcggaggagcggctggagcagctgcggcgctggcacgcggagaggaggcggctggaggaggagccaccccaggacgtgccgccccacgcgccgcccgactgggcccagcctctgctcatgggcaggccggagtcacccgccagcgccccactccagcccgggcggcggccggcgtccagcgacgaccggcacgtcatgtgcaagcacgccaccatctaccccacggagcaggagctcctggccgtgcagagggccgtgtcccacgcagagcgggccctcaagctggtgtccgacacactggccgaggaggaccggggccgccgagaggaagagggtgacaagcgcagcagcgttgccccccagactcgggtcctgaaaggcgtcatgcgagtaggcatcctggcgaaaggcctcctcctgcgtggggacaggaacgtgcgcctcgctctgctctgctccgagaagcccacgcacagcctgctgcggaggatcgcccagcagctgccccggcagctccagatggtgaccgaggatgagtatgaggtctcctccgaccctgaagccaacattgtcatctcctcctgtgaggagcccaggatgcaggtcaccatatctgtcacctcacctctgatgcgggaggacccctccacagacccaggtgtggaggagcctcaggctgatgcaggtgatgtcctgagccccaagaagtgcctcgagtccctggccgccctccgtcatgccaggtggtttcaggctcgagccagcggcctgcagccatgcgtgatcgtcatcagggtcctgagggacctctgccggcgtgtgcccacctggggggccctgccagcctgggccatggagctgctggtggagaaggctgtgagcagtgcggctgggcccctgggccccggggatgcagtcaggcgagtcctggagtgcgtggccacagggacgctcctgacagacgggcccgggctccaggatccctgcgagagagaccagacagatgccctcgagcccatgaccctccaagagcgggaagacgtgaccgccagcgcccagcacgccctgcgaatgctggccttccggcagacccacaaggtcctgggcatggatctcctgccgcccagacaccggctgggggcccgcttccggaagaggcaacggggacctggcgagggagaggagggcgcaggggagaagaagcggggccggcggggcggagaggggctcgtgtgagccgcctacctcccccacctgcgggcctttgcatccctgcactcctggacgtgtgcgcgccgaccaatggctgcttcatccccgacgttggacaatggtcatttccttttgagtaacgctctgtaggtttcctttaaaacacctgtgcttcagaccgggcactgtggctcatgcctttaatcccagcactttgggaggctgagttgcttgagcctgagagttcaaggccagcccagacaacagagtgagacccccatctctccaaaatatttttaaaaatcagcttggcatggttggtggccaggcgcggtgattcacgcctgtaatcccagcactttgagaggccgaggtgggcagatcgcctgaggtcaggagttcgagaccggcctggtcaacatggtgaaaccctgtctctagtaaaaaacacaacaattagcctggcgtggtggtgtgcacctgtagtcccagctacttgggaggctgagtccggagccttgaggccaggagggcagtgagctgtgattgcaccgtgacactccagcctgggcaacagaagaagactttgtcacttaaaagaaatgttttttaacatttgtgcttaaattgttacagaaatgacaccatccagccctgggagtggcaccccttcctcgagggccccatcccccacagccaggggggccagcagtacagcaagcagattctaaactcgggggcatcttgctggctctaaactcacctcgtggtacaggaaggggttttaaaatacttcctctgggctgcgcatggtggctcacacctataatcccagcactttgggaggccaagcttggtggatcgcttgagcccagcggtttaagatcagtctgggcaatatggtgacaccccatctctacaaaaaattagccagttgtggtggcccaagcctgtagtcccagctactcgggaggctgaggccgtaggatcccttgagcccaggagttcgaggctgcagcgagccgagattgcgctactgaactccagcctgggttacagagcgagaccctgtctcaaagaaacaaacaaacaaacaaacaaacaaacaaaactttctttggatgcggctgcggcatggatttgaaatcacgtgggcaggccctgttctggggccccaccacatgtgcaggacaagcccaggggagctcccagccggcatccccacgcccccagcccagcctgctccaaacagaccccccacccacctccacagccaggatgtcagcagggcctgagccaggctcgtcccctgtggggagagccacagggccaggtggacacgccgacgggcgatgaggatcctggctgggcctcccccgggaacagctgtgctggacagtcagacccggagcccagaggcacccccacccaccccccgccccgagccctgtaccactgagtgcctttcacagagaaaacccactctgccatgtgtcactgaggcctggatttgagcttccgtccttccttcctccctctctccctgatgtaggccttggctggccctgaggcagggggtccccaatccccccttgtggtagcagggcccgggacccgtgcctgggggacccggggaggggccgccgtcttgtggatgctggccatggtgggcaggcgcctcctggcactgatggatgtgggggcacccccttctgagtccccaccccaacctgttcaaaccttccgcttggtcagtttttttttctttggccagctgcccagtggcattgaatgagaaaagtccacctttgggcagatgtgatctccagccagtggctcagttttgtttctctgtgtttgaaggacagcctgcatgtggctctgtctgaatgtctttgtagagctacctggaaattgggaggcagggggaataaaggaaatcatttgtc

SEQ ID NO: 204134 - DNA, 870 bp, Homo sapiens
  Payload ID: 20262
  Gene Name: zinc finger RNA binding protein 2
  Uniprot ID: Q9UPR6
  ENST ID: ENST00000439086
  CDS Start-End: 16-228
ggggaagacgccaagatggcgacgagtcagtatttcgacttcgcgcagggcggcggcccgcagtacagtccagaagtggagaccactcccccggcccttgcatctgggcttccttgtgccctgccttggacagttggctgcagtggaagtgacgctgtgactgccctgtgcccaagcttaagaggccttgcctgcatctgctccatcttatgggaccctgcctggtgaaggacccaaggctggcctgctggaggaggagatataaggagaagagtcacagtgccccatccaacaggtagctgccctccaggggcagagaagcccagccatggtcaggagagccacccagctgaggcccacctccaccaggattgccacccagctgaaccccacctcagccaggagagccacccagctgagccccatctggccaggagagccatccagctgagccccacctctgccaggattgccacccagctgagccccgccttggccaggagagccacccagctgagccccgcctgggccagaagagccacccagctgagccccgccttggccagaagagccacccagctgagcaccgccttggccagaagaggcacccagctgagccccgcctggccaggagagctgcccagctgatccccgcctgcagaatcacaagtgaaataaatgattgttgctttgagtcagaggtcagcggaccttttctgtaaaaagccacatagtaaatatctttggctttgtgagccacaccatgtctgtcacattagtgaaccctgctattgtattgcaagatgagccgtggacaatgtgtcatccagtgggcttggctgtgtgccaataaaactttatttttttgga

SEQ ID NO: 204135 - DNA, 1377 bp, Homo sapiens
  Payload ID: 20262
  Gene Name: zinc finger RNA binding protein 2
  Uniprot ID: Q9UPR6
  ENST ID: ENST00000438164
  CDS Start-End: 12-1112
aagacgccaagatggcgacgagtcagtatttcgacttcgcgcagggcggcggcccgcagtacagcgcccagcctccgacccttcccctgcccactgtgggggccagctatactgcacaacccactcctgggatggaccctgccgtgaacccggcctttcccccagctgccccggcagggtacggtggataccagccccactccggccaggacttcgcctacggcagccgaccccaggagcccgtccccacggccaccaccatggctacctaccaggacagttacagctacggacagtcagcagctgccaggagctatgaggacaggccgtacttccagtctgctgccctccagtctgggcgcatgacagccgcagactccggccagccagggacccaagaagcctgcgggcagcccagcccccatggcagtcacagccacgctcagcccccacagcaggcgcccatagtggagtccggacagccagcgagcaccttgtcctcgggatacacctaccccacggcgacaggcgtccagcccgagtcgtcagcttccatcgtgacctcctaccccccgccctcctacaaccccacctgcaccgcctacacggcaccaagctacccgaactatgacgcgtcggtgtactccgctgccagccctttctatcctccagcgcagcccccgcctcccccgggacccccgcagcagctgcccccgccgcccgcgcctgcaggctcaggaagcagccccagggccgactcgaagccaccgcttcccagcaagctgccgagacccaaggcggggcccaggcagctccagcttcactactgcgacatctgcaagatcagctgcgctggcccccagacctaccgggaacatctgggagggcagaagcacagaaagaaggaggcggcccagaagacaggcgtgcagcccaacgggagcccgcgcggggtgcaggcgcagctgcattgcgacctgtgcgccgtgtcctgcaccggggcggacgcctacgcggcccacatccggggatccaagcaccagaagggcctcctgagccacaggcagcaggctgcagaccccagtgggggaaaccagcccaacctaaattagagggtcccggagcacctacccaaggaggctcaaaggaagctcccgcgggctgctctgatgcgcagccggtgggcccggaatatgtggaggaggtgttcagcgacgaagggcgagtgcttcgcttccactgcaagctgtgcgagtgcagtttcaacgaccttaacgcgaaggacctgcacgtgagggggcggcggcaccggctgcagtaccggaagaaagtgaacccggaccttcccattgccacggagcccagcagccgggctcg

SEQ ID NO: 204136 - DNA, 1019 bp, Homo sapiens
  Payload ID: 20262
  Gene Name: zinc finger RNA binding protein 2
  ENST ID: ENST00000586578
  CDS Start-End: 1-133
ggcgacgagtcagtatttcgacttcgcgcagggcggcggcccgcagtacagcaccctcctggaggacgggactttggtctggttattccccgctgctgtgacagcgcccatgacagcagctggtccccactagcacccaggaagtatttatccaatgactcaatgaatctgccgccggatcgcccgggactgctttcactttctgtcagtccagaagtggagaccactcccccggcccttgcatctgggcttccttgtgccctgccttggacagttggctgcagtggaagtgacgctgtgactgccctgtgcccaagcttaagaggccttgcctgcatctgctccatcttatgggaccctgcctggtgaaggacccaaggctggcctgctggaggaggagatataaggagaagagtcacagtgccccatccaacaggtagctgccctccaggggcagagaagcccagccatggtcaggagagccacccagctgaggcccacctccaccaggattgccacccagctgaaccccacctcagccaggagagccacccagctgagccccatctggccaggagagccatccagctgagccccacctctgccaggattgccacccagctgagccccgccttggccaggagagccacccagctgagccccgcctgggccagaagagccacccagctgagccccgccttggccagaagagccacccagctgagcaccgccttggccagaagaggcacccagctgagccccgcctggccaggagagctgcccagctgatccccgcctgcagaatcacaagtgaaataaatgattgttgctttgagtcagaggtcagcggaccttttctgtaaaaagccacatagtaaatatctttggctttgtgagccacaccatgtctgtcacattagtgaaccctgctattgtattgcaagatgagccgtggacaatgtgtcatccagtgggcttggctgtgtgccaataaaactttatttttttggacactgaaa

SEQ ID NO: 204137 - DNA, 493 bp, Homo sapiens
  Payload ID: 20262
  Gene Name: zinc finger RNA binding protein 2
  ENST ID: ENST00000587212
  CDS Start-End: 13-147
gaagacgccaagatggcgacgagtcagtatttcgacttcgcgcagggcggcggcccgcagtacagcaccctcctggaggacgggactttggtctggttattccccgctgctgtgacagcgcccatgacagcagctggtccccactagcacccaggaagtatttatccaatgactcaatgaatctgccgccggatcgcccgggactgctttcactttctgtcagcgcccagcctccgacccttcccctgcccactgtgggggccagctatactgcacaacccactcctgggatggaccctgccgtgaacccggcctttcccccagctgccccggcagggtacggtggataccagccccactccggccaggacttcgcctacggcagccgaccccaggagcccgtccccacggccaccaccatggctacctaccaggacagttacagctacggacagtcagcagctgccaggagctatgaggacaggccgtactt

SEQ ID NO: 204138 - DNA, 364 bp, Homo sapiens
  Payload ID: 20262
  Gene Name: zinc finger RNA binding protein 2
  ENST ID: ENST00000591712
  CDS Start-End: 143-349
tgaccccgtgtctccctggactatcgcgcagcaccctcctggaggacgggactttggtctggttattccccgctgctgtgacagcgcccatgacagcagctggtccccactagcacccaggaagtatttatccaatgactcaatgaatctgccgccggatcgcccgggactgctttcactttctgtcagtccagaagtggagaccactcccccggcccttgcatctgggcttccttgtgccctgccttggacagttggctgcagtggaagtgacgctgtgactgccctgtgcccaagcttaagaggccttgcctgcatctgctccatcttatgggaccctgcctggtgaaggacccaaggctgg

SEQ ID NO: 204139 - DNA, 532 bp, Homo sapiens
  Payload ID: 20262
  Gene Name: zinc finger RNA binding protein 2
  ENST ID: ENST00000592398
  CDS Start-End: 233-439
gccaagatggcgacgagtcagtatttcgacttcgcgcagggcggcggcccgcagtacaggtgcagtgactcctgcctgtaatccagcactttggaaggccgaggtggacggatcacttgagcaccctcctggaggacgggactttggtctggttattccccgctgctgtgacagcgcccatgacagcagctggtccccactagcacccaggaagtatttatccaatgactcaatgaatctgccgccggatcgcccgggactgctttcactttctgtcagtccagaagtggagaccactcccccggcccttgcatctgggcttccttgtgccctgccttggacagttggctgcagtggaagtgacgctgtgactgccctgtgcccaagcttaagaggccttgcctgcatctgctccatcttatgggaccctgcctggtgaaggacccaaggctggcctgctggaggaggagatataaggagaagagtcacagtgccccatccaacaggtagctgccctccaggggcagagaag

SEQ ID NO: 204140 - DNA, 9418 bp, Homo sapiens
  Payload ID: 20263
  Gene Name: zinc finger with KRAB and SCAN domains 1
  Uniprot ID: P17029
  ENST ID: ENST00000324306
  CDS Start-End: 235-1926
acgcttccggcctttgtgactcattgtgtctgtgtcgaggcgtcgggagggcctaagtccgtgtgcggtgcccttcggccggcctgagccccagagtcagctcccctttctcgcccagcgcccccaggccgctcccggggctcacggaatagtaaagaaacacatcataaaacctcccaggacataaaggtgagcacagaccctgtttggatcaagtcagttcctggagcctgaatgatgactgctgaatcacgggaagccacgggtctgtccccacaggctgcacaggagaaggatggtatcgtaatagtgaaggtggaagaggaagatgaggaagaccacatgtgggggcaggattccaccctacaggacacgcctcctccagacccagagatattccgccaacgcttcaggcgcttctgttaccagaacacttttgggccccgagaggctctcagtcggctgaaggaactttgtcatcagtggctgcggccagaaataaacaccaaggaacagatcctggagcttctggtgctagagcagtttctttccatcctgcccaaggagctccaggtctggctgcaggaataccgccccgatagtggagaggaggccgtgacccttctagaagacttggagcttgatttatcaggacaacaggtcccaggtcaagttcatggacctgagatgctcgcaagggggatggtgcctctggatccagttcaggagtcctcgagctttgaccttcatcacgaggccacccagtcccacttcaaacattcgtctcggaaaccccgcctcttacagtcacgagctcttcctgctgcccacattcctgcaccccctcatgagggtagtcccagagaccaggcgatggcatctgcactattcacagcggattcccaggcaatggtgaagatcgaggacatggctgtgtccctcattctggaggaatggggatgtcagaatctggctcggaggaatctcagtagggacaacaggcaggagaattatgggagcgcatttccccagggtggtgaaaacaggaatgagaacgaggagtcaacctcaaaggctgaaacctcggaagattcagcatcacgcggggagacaacaggaagatcccagaaagagtttggagagaaacgtgaccaggagggcaaaacaggagaaagacagcagaaaaaccctgaggagaaaaccaggaaagagaaaagagattcagggccagctataggaaaggacaaaaaaaccatcacaggagagagaggtccaagggagaaggggaaaggattgggaagaagcttcagtctgagctccaacttcaccacccctgaagaagttcccacgggaacaaagtctcacagatgtgatgaatgtggtaaatgcttcacgagaagttcaagccttatccgccataaaataatccacactggagaaaagccctatgaatgtagtgagtgtgggaaagccttcagtcttaactccaaccttgtcctgcatcagaggatccacacaggagagaaacctcatgaatgtaacgagtgtggcaaggccttcagccacagttccaatctcatcctccatcagcgcatccactctggagagaaaccttatgaatgtaatgagtgcgggaaggccttcagccagagctcggacctcaccaagcatcagagaattcacacgggggagaaaccctatgaatgtagtgaatgtggaaaagctttcaaccgaaactcatacctgattttgcatcggagaattcacactcgagaaaagccctacaagtgcactaagtgtggcaaggccttcacccgcagctccaccctcactctgcatcacagaatccatgccagagagagagcctctgagtacagcccagcctcccttgatgcatttggcgcgttcctgaaaagttgtgtgtaaaggaagaatttgccatcaagccatttcccccttttgtttctaaaattatttcagagatgtgtgctcctggagggaaaaagaaatacagcctcaacagattaaaaaacaaaagtcacacttaaggatccttctagtcacatcagcagtgttctgcctttatgtagtagttgggcatataatccttccacacagcccctgcagggaaaggctaatcttacggataatccacgtgagatttccacacaagagaaaagcacacgcatagtgaaatgtcagtcttttcagtaatgaggatacctttaaggcactcttggactctcggcaaccacaacataatagttgaaagatcaagattggctccacgaaagtgatacggaggttaggatgctacttgctgcaaacaagccctactttggccaacatcctgcttatttctcaaaaaagagggacagtgaaaacaaaaacgacattgggacatgctgctcaaggtagttatatatacgataagttgtatatatgatcactggtagcctaccaaagctgtagaaatctaggactgtgctaatcagtatcaaaccaaagatttctatctcttcccgaaagagagggtatgtgcaccagtctacagttccaaaggactgcaacaaatgtagatggttctgtcctcatccctgagatcagttctactgaaatggcaacaacaactccaaatacatctctcccttcttgaaatccctaaagcactatcgcactcctaaatgcatttctccacaagttagcacttgattgtatactgtcttttaatccttcattgtttcatgtatgaagtttttaatcaccccctaacccccaaaaaagattcggttgtcaagggatatatttctatccctgccagcacagtgctggacatagtgagtactgaacacctaagaggcactcattcagactgacttctacaggacttctacgtgtgtgataaaagcctgtgaatcgtgagtccctgaaatatggtagcctggcccagcttctaaagaggaccttcgtagccacaaggcatgctaaacctctagggtctgatgctgtttttgttccaaatataaacgaaaggcactagtcagccgcctgcatagactttctaaacagtgagtaaataccatggaatgtcagaaatgactttatcatcgtcatcttgaagaaaaatatgaacactgatgaaggtcattttttttttttgacatctttctgtggcaaagctcttagaattctttgcagttagctgctgaacagtatgatgatttggggattttctgaatcatttgtacttagatactggagttcagaagatgtgatttttgttgcttttcagaaaaaggaacgtggtagggagtgttttttcccacgcttttccagtaactttgcaaaagcattaattgttcactggcaattactaaatgtattttgttgctctgagaaactcagcagtgtactgagatgtggctggctgtgccatcgtcatagtgcacagtgacttttctgtttcttatcactaaagactgaggtgaggttatgaaactttcattggtcccatcgttgtgcgcagggtgcaactggctacctagaagctgatggcaggagactgtttcacacacaggagattgtgagctgtgtaagtagtcatcgccactcaagtaggacaagggtcctacccaaggctaggaccgccctgcggaaacagaaacatagactgagaacaaacctcaagactatcagtgtgacctccccataacaagagaaccccatatatagtttgagactttcccttgagaaacttatactaaaactattactcatcagtcattcactgatcagcagctaaagtccatgagaccaaatggttttatatggaaccaacgaagtgggagctaaaactgcacagtggtcattctttggcctctccttggctttatgacttaaaccaactacaacttccctatagcttctaagcagtttcatcagcattacttgggaaaacgtgttgcaagtcaaccagtcactaggatatttctacccatgcaacggaagaaaaacccattactccagaagagtatatctaagtaactaaaatggaggcagaaaatgttttaaggattttcttcaaagaataagccacagcaatggttttgtagaaaactcctgtgcttttgagcaaggacttttgccctctagaaagcaactgaggccaggtgcggtggctcacgcctgtaatcccagcactttgggaggccgaggtgagcggatcacctgaggtcaggagttttgagaccagcctggccaacatggtaaaatcccgtctctactaaaattataaaaattagccgggcatgatggtgggcacctgtaatcccagctacttgggaggctgaggcaggagaatcacttgaacccaggaggcagaggttgcagtgagccaagattgcacactgcactccagcctgggtgactagcaaaactccatctcaaaaaaaaaaaaaagaaagaaagaaactgaaaagtgaggtgtggaactccaggcaacgacccaagcacttattttttaagagggaaaggactttggtcatgtttacattggcctttggtttttttttttctttcagccacaactatatgctgatataactcagccatcacttttgagttttgtttttaaatgaaggttaaatgtgacctgtgccctcacatttaattccgtttcatggagacatcttcctgactttgttggatagctgccactagggttgcttcgatcttcagccacatgctgtccttgaagcagctatttgaagatgtgttttctgaggaaaacaggctacaactgtttattaaaaccacttgcagtgcattcgtttatcagatgctcagtgcaaagtgtaattgggtcatggtcaaaaacgcttgcaacatctaattggcgttcaagatagtcattcaaaagttcttggcccgctgaagtctgttaacagttgaaacattctacagttaaccattagcatgctagttgtcctaatggaaatttttgaagagtttttcaatatataccctacccttgccaggaagagaagtaaaatcctcaggttgtggggtatttgtttctactccagcctggcaggcaaggctaaaacctgagattatcgatctatgagacatcttgatatgtaaagcacttaatattaaaggcataaaagtgaaactgctaaatatgtatagagaggttgacgtgtgatacgtgggacagttcacatagacatcagagaatttattccagaaaggagcctcctgaatgtgatgaatacggcaaagcctttaatcacatctcagcccttagcatcggaaagcttatactgtaaataaacttgatgaatattatatgtgaggaaaactttcatgtatagcactcattgcttcagacagaaaatgaattccgtcggtatgttccaatcgtgatgaatttgagaaacattgcaagagggagctcaatcttggccgggcgccgtggctcacgcctgtaatcgcagcactttgggaggccgaggcaggcggatcacgaggtcagtagttcgagaccagcctggccaacatggtgaaaccttgtctctactaaaaatacaaaaaaaaattagctgggcacagtggcgcacgcctgtagtcccagctactcgggaggctgaggcaggagaatggcttgaacctgcgaggcggaggttgcagtgagctaagatcatgccactggcactccagccttgagtgacagagcgaggctctgtatcaaaaaaaaaagttgcgggggggtgctcaatcttaactgcagaggatctacagatgaaaaaaaatgtggggaaatgctttaaaaaaatagcaaaatgtgcaacttcttacaaaaattgttaacgttaggtacttctatatattttatatgaccataatgtccgtgtgtgttttgtaccttcagtcccttgttattgttccgtatattacctgtaagcagatactgtattttattttagcctatttgacagaacacatcactcagaaaaagtgaagtttcagagcaaacagtgaagaaatcagtgtgattgtagacaaaaagtcggttcacagaacggagcagcggggagaggaagggaaaagcttcatagtttggtgcttatcacatcaagagattggtaaatttctgaggaaagacaggctaatggggcactgaaatggaacaactcctttaaacgtgcagccttttgaatttttcctcaaaaccaagaagttgacctctgagctgtcaggtgaccactgtgtgcaaaggggatggattctcttgtcagtagacggtcttctccatgaagcgagagtaggaagtgtactggaatggccaagtgggactgcttcagctgaccaggttcttttaaaccgtagtcatgctttcccactaactcttaaatccttatgcttagaaaattgaggataaggctgggcacagtggctcaggcctgtaatcccagcactttgggagaccaaggcgggtggatcacaaggtcaggagatcgagaccatcctggctaacatggcgaaaccccgtctctactaaaaatacaaaaaaatagctgggcgtggtggcgggcgcctgtagtcccagctactcaggaggctgaggcaggaggatcacttgaacatgggaggcggaggttgcagtgagccaagatggcgccactgcactccagcctgggtgatggcgtgagactccatgtcaaaaaaaaaaaaaaggttggggggaggataggactggccaggcacggtggctcactcctgtaatctcagcactttgggaggcagaggtgggcggatcacttgaggtcaggagtttgagaccagcctggccaacgtggtgaaagcctgtctctactaaaaatacaaaaattagccgggcgtggtggtgggcgcctgtagtcccagctactcaggaggctgaggcaggagaatcacctaaatctgggaggcagaggttgcagtgagccgagattgcaccactgcactccagcctgggtaacagagactctgtctcaaaaaaagaaaaaaaaaaaagaaagaaagaaagaaaattggggataggagaacagcaaggtgggcatttcccggaattgtgtgcagatgcatccagtcgtggcattgcaagaagtctgtctgatgaagctcgggaagcattttgcaatattccctttggctgtgttcctgtgttccctgctcccacttttcttcccctggtttgtgattattaggagagaggttttgcaaagactcgttgctgtgaaagaatctttttttaatttttatcctagagtcagtcacttttattccaggtagtcatgctgatctgcttatccaaagccagctaaccaggttcatcctaccatcctcatggaagactgtgtgtatgaattggagtaacagaactgaaatacacttaaacagtgacagcagtacttcccagggtgggggccatatttctctgtgtcctactctgagcaacttctcagagatacgagggggctagggttttcccatctgggaaatggggtgaaagtctgcagattgttaaatgaaatatagaatcagagaaaaagaaaagtcagtgatataaatagatcatttcatagaaattagggtagatttttatttcaactactactggagaatttaataaaaggcattatttgaaaagtttttctaacatagatttagggtttttttttttagagtggacacactacatttaaaagcaattattttgctattcagattttttattatctgaaaatgaaattatctgttttacttttcaaagctttgtgaaacaaacttgaagttatagggaggtaagccatctccaactctgcaggtcaaacgaaagtttgggaaatacttttgacatcccacaatacagaatgtcttaacatgagaattgaatttcatgatgtgtggttccatttaatagcggacaccaccccaatctcatgttttcctgttaccctaaaacagtggaaggaaactgggtgtttggtagacttctaaatcatggtctctgacaatttgaatctgagattctcacctccatttactaaagaatcgtgacttaattcaaattgcacagtaatcagtaaagtgaatacgtttttaaaatggaattttctcccttcagcaagcactcattaaggagtgaggctgagtattttaagatagagtgagatctgtgagtgattgaaaggtgatatttaaaaacttggatttcattccagtgtcaggtttgggttttaagttcctttggtccagggaagggtccaagcagccacagttgccctaaatctccatcattaagtcttccagcaaggttaagtgcagtatggaaggagaagggggaagaggacggtaacggccccacactccaggctgagaaagagtaattaggaggcctgaggaggggccgaggaaaggctgttggggtgtgctggggttggtacccgagcgccttcccctcacctcaaccagagaagagcatccggttgctttttaaagcttttagcctgccctagcaaggacaaagcatgttagattagagatgcttctgctgatcgcaggggttcttatttgaaaacatctatgatgggggtggggtgggaggagacaggttgtggttatgcaggaaaatcttgtcctaaaaatatatgagtttgggggtaaggggtgggatagccaagcaaaatcagtaattattttaaaatgaacatatgtatttttattaacttttagttaaatacagattttacaacgaggtcagcataagcctaaatctatatagagggctaactcaggcattgtcttgtttatttgtagactggattaaaaacaacctgtcctgttttgtcagttcccagcttcttcgtttagaataaattagaccaaaagaagaaacgtgcttgtctctgtatacccgcagaatgaagttactgttgttaaaactggattttttcattttactaggttccgaagagtccagatgcttggtagatgttcaatacgtgattttttttttaattgaatgtgttcatttaaaatcctccttaacatttctagaaagacttctttcaataaataatggaatcttagaggaaaagtggttttttaaaagctagggaactcctccactaaaagtaaccattggaaacctcgaatgagggctaaagttttaatcataagagaaaaggcagcataatgaaatgtgtacacatacatagtcagtggtccattttaggaagccagtggcgtctgataaagaaatgttaagagtagtgaggttgaggaaggaaattgtggggatttgaaatattctctttatgttgtttctcttctgagtcatggtaaaacaataaattatcatctctaggtggca

SEQ ID NO: 204141 - DNA, 573 bp, Homo sapiens
  Payload ID: 20263
  Gene Name: zinc finger with KRAB and SCAN domains 1
  ENST ID: ENST00000432317
  CDS Start-End: 198-573
attgtaaccacatcagcaaagcactgttagtatatatgctgaacaaatgtggagaaatcgctgttttacataggaaaccatggtgatttgccccagaatgtgtatccaggaatagtaaagaaacacatcataaaacctcccaggacataaaggtgagcacagaccctgtttggatcaagtcagttcctggagcctgaatgatgactgctgaatcacgggaagccacgggtctgtccccacaggctgcacaggagaaggatggtatcgtaatagtgaaggtggaagaggaagatgaggaagaccacatgtgggggcaggattccaccctacaggacacgcctcctccagacccagagatattccgccaacgcttcaggcgcttctgttaccagaacacttttgggccccgagaggctctcagtcggctgaaggaactttgtcatcagtggctgcggccagaaataaacaccaaggaacagatcctggagcttctggtgctagagcagtttctttccatcctgcccaaggagctccaggtctggctgcaggaataccgccccgatagtggagagg

SEQ ID NO: 204142 - DNA, 2011 bp, Homo sapiens
  Payload ID: 20263
  Gene Name: zinc finger with KRAB and SCAN domains 1
  ENST ID: ENST00000426572
  CDS Start-End: 354-1937
actcattgtgtctgtgtcgaggcgtcgggagggcctaagtccgtgtgcggtgcccttcggccggcctgagccccagagtcagctcccctttctcgcccagcgcccccaggccgctcccggggctcacggagtctctctctgtcacccaggctggagtgcagtggcgcgttctcagctcactgcaccctccacctcccaggttcaagtgattctcctgcctcagcctcccgagtagctgagattacaggaatagtaaagaaacacatcataaaacctcccaggacataaaggctgcacaggagaaggatggtatcgtaatagtgaaggtggaagaggaagatgaggaagaccacatgtgggggcaggattccaccctacaggacacgcctcctccagacccagagatattccgccaacgcttcaggcgcttctgttaccagaacacttttgggccccgagaggctctcagtcggctgaaggaactttgtcatcagtggctgcggccagaaataaacaccaaggaacagatcctggagcttctggtgctagagcagtttctttccatcctgcccaaggagctccaggtctggctgcaggaataccgccccgatagtggagaggaggccgtgacccttctagaagacttggagcttgatttatcaggacaacaggtcccaggtcaagttcatggacctgagatgctcgcaagggggatggtgcctctggatccagttcaggagtcctcgagctttgaccttcatcacgaggccacccagtcccacttcaaacattcgtctcggaaaccccgcctcttacagtcacgagctcttcctgctgcccacattcctgcaccccctcatgagggtagtcccagagaccaggcgatggcatctgcactattcacagcggattcccaggcaatggtgaagatcgaggacatggctgtgtccctcattctggaggaatggggatgtcagaatctggctcggaggaatctcagtagggacaacaggcaggagaattatgggagcgcatttccccagggtggtgaaaacaggaatgagaacgaggagtcaacctcaaaggctgaaacctcggaagattcagcatcacgcggggagacaacaggaagatcccagaaagagtttggagagaaacgtgaccaggagggcaaaacaggagaaagacagcagaaaaaccctgaggagaaaaccaggaaagagaaaagagattcagggccagctataggaaaggacaaaaaaaccatcacaggagagagaggtccaagggagaaggggaaaggattgggaagaagcttcagtctgagctccaacttcaccacccctgaagaagttcccacgggaacaaagtctcacagatgtgatgaatgtggtaaatgcttcacgagaagttcaagccttatccgccataaaataatccacactggagaaaagccctatgaatgtagtgagtgtgggaaagccttcagtcttaactccaaccttgtcctgcatcagaggatccacacaggagagaaacctcatgaatgtaacgagtgtggcaaggccttcagccacagttccaatctcatcctccatcagcgcatccactctggagagaaaccttatgaatgtaatgagtgcgggaaggccttcagccagagctcggacctcaccaagcatcagagaattcacacgggggagaaaccctatgaatgtagtgaatgtggaaaagctttcaaccgaaactcatacctgattttgcatcggagaattcacactcgagaaaagccctacaagtgcactaagtgtggcaaggccttcacccgcagctccaccctcactctgcatcacagaatccatgccagagagagagcctctgagtacagcccagcctcccttgatgcatttggcgcgttcctgaaaagttgtgtgtaaaggaagaatttgccatcaagccatttcccccttttgtttctaaaattatttcagagatgtgtgctcctggaggg

SEQ ID NO: 204143 - DNA, 8758 bp, Homo sapiens
  Payload ID: 20263
  Gene Name: zinc finger with KRAB and SCAN domains 1
  ENST ID: ENST00000535170
  CDS Start-End: 215-1267
ggtggtgacacgcttccggcctttgtgactcattgtgtctgtgtcgaggcgtcgggagggcctaagtccgtgtgcggtgcccttcggccggcctgagccccagagtcagctcccctttctcgcccagcgcccccaggccgctcccggggctcacgctcttcctgctgcccacattcctgcaccccctcatgagggtagtcccagagaccaggcgatggcatctgcactattcacagcggattcccaggcaatggtgaagatcgaggacatggctgtgtccctcattctggaggaatggggatgtcagaatctggctcggaggaatctcagtagggacaacaggcaggagaattatgggagcgcatttccccagggtggtgaaaacaggaatgagaacgaggagtcaacctcaaaggctgaaacctcggaagattcagcatcacgcggggagacaacaggaagatcccagaaagagtttggagagaaacgtgaccaggagggcaaaacaggagaaagacagcagaaaaaccctgaggagaaaaccaggaaagagaaaagagattcagggccagctataggaaaggacaaaaaaaccatcacaggagagagaggtccaagggagaaggggaaaggattgggaagaagcttcagtctgagctccaacttcaccacccctgaagaagttcccacgggaacaaagtctcacagatgtgatgaatgtggtaaatgcttcacgagaagttcaagccttatccgccataaaataatccacactggagaaaagccctatgaatgtagtgagtgtgggaaagccttcagtcttaactccaaccttgtcctgcatcagaggatccacacaggagagaaacctcatgaatgtaacgagtgtggcaaggccttcagccacagttccaatctcatcctccatcagcgcatccactctggagagaaaccttatgaatgtaatgagtgcgggaaggccttcagccagagctcggacctcaccaagcatcagagaattcacacgggggagaaaccctatgaatgtagtgaatgtggaaaagctttcaaccgaaactcatacctgattttgcatcggagaattcacactcgagaaaagccctacaagtgcactaagtgtggcaaggccttcacccgcagctccaccctcactctgcatcacagaatccatgccagagagagagcctctgagtacagcccagcctcccttgatgcatttggcgcgttcctgaaaagttgtgtgtaaaggaagaatttgccatcaagccatttcccccttttgtttctaaaattatttcagagatgtgtgctcctggagggaaaaagaaatacagcctcaacagattaaaaaacaaaagtcacacttaaggatccttctagtcacatcagcagtgttctgcctttatgtagtagttgggcatataatccttccacacagcccctgcagggaaaggctaatcttacggataatccacgtgagatttccacacaagagaaaagcacacgcatagtgaaatgtcagtcttttcagtaatgaggatacctttaaggcactcttggactctcggcaaccacaacataatagttgaaagatcaagattggctccacgaaagtgatacggaggttaggatgctacttgctgcaaacaagccctactttggccaacatcctgcttatttctcaaaaaagagggacagtgaaaacaaaaacgacattgggacatgctgctcaaggtagttatatatacgataagttgtatatatgatcactggtagcctaccaaagctgtagaaatctaggactgtgctaatcagtatcaaaccaaagatttctatctcttcccgaaagagagggtatgtgcaccagtctacagttccaaaggactgcaacaaatgtagatggttctgtcctcatccctgagatcagttctactgaaatggcaacaacaactccaaatacatctctcccttcttgaaatccctaaagcactatcgcactcctaaatgcatttctccacaagttagcacttgattgtatactgtcttttaatccttcattgtttcatgtatgaagtttttaatcaccccctaacccccaaaaaagattcggttgtcaagggatatatttctatccctgccagcacagtgctggacatagtgagtactgaacacctaagaggcactcattcagactgacttctacaggacttctacgtgtgtgataaaagcctgtgaatcgtgagtccctgaaatatggtagcctggcccagcttctaaagaggaccttcgtagccacaaggcatgctaaacctctagggtctgatgctgtttttgttccaaatataaacgaaaggcactagtcagccgcctgcatagactttctaaacagtgagtaaataccatggaatgtcagaaatgactttatcatcgtcatcttgaagaaaaatatgaacactgatgaaggtcattttttttttttgacatctttctgtggcaaagctcttagaattctttgcagttagctgctgaacagtatgatgatttggggattttctgaatcatttgtacttagatactggagttcagaagatgtgatttttgttgcttttcagaaaaaggaacgtggtagggagtgttttttcccacgcttttccagtaactttgcaaaagcattaattgttcactggcaattactaaatgtattttgttgctctgagaaactcagcagtgtactgagatgtggctggctgtgccatcgtcatagtgcacagtgacttttctgtttcttatcactaaagactgaggtgaggttatgaaactttcattggtcccatcgttgtgcgcagggtgcaactggctacctagaagctgatggcaggagactgtttcacacacaggagattgtgagctgtgtaagtagtcatcgccactcaagtaggacaagggtcctacccaaggctaggaccgccctgcggaaacagaaacatagactgagaacaaacctcaagactatcagtgtgacctccccataacaagagaaccccatatatagtttgagactttcccttgagaaacttatactaaaactattactcatcagtcattcactgatcagcagctaaagtccatgagaccaaatggttttatatggaaccaacgaagtgggagctaaaactgcacagtggtcattctttggcctctccttggctttatgacttaaaccaactacaacttccctatagcttctaagcagtttcatcagcattacttgggaaaacgtgttgcaagtcaaccagtcactaggatatttctacccatgcaacggaagaaaaacccattactccagaagagtatatctaagtaactaaaatggaggcagaaaatgttttaaggattttcttcaaagaataagccacagcaatggttttgtagaaaactcctgtgcttttgagcaaggacttttgccctctagaaagcaactgaggccaggtgcggtggctcacgcctgtaatcccagcactttgggaggccgaggtgagcggatcacctgaggtcaggagttttgagaccagcctggccaacatggtaaaatcccgtctctactaaaattataaaaattagccgggcatgatggtgggcacctgtaatcccagctacttgggaggctgaggcaggagaatcacttgaacccaggaggcagaggttgcagtgagccaagattgcacactgcactccagcctgggtgactagcaaaactccatctcaaaaaaaaaaaaaagaaagaaagaaactgaaaagtgaggtgtggaactccaggcaacgacccaagcacttattttttaagagggaaaggactttggtcatgtttacattggcctttggtttttttttttctttcagccacaactatatgctgatataactcagccatcacttttgagttttgtttttaaatgaaggttaaatgtgacctgtgccctcacatttaattccgtttcatggagacatcttcctgactttgttggatagctgccactagggttgcttcgatcttcagccacatgctgtccttgaagcagctatttgaagatgtgttttctgaggaaaacaggctacaactgtttattaaaaccacttgcagtgcattcgtttatcagatgctcagtgcaaagtgtaattgggtcatggtcaaaaacgcttgcaacatctaattggcgttcaagatagtcattcaaaagttcttggcccgctgaagtctgttaacagttgaaacattctacagttaaccattagcatgctagttgtcctaatggaaatttttgaagagtttttcaatatataccctacccttgccaggaagagaagtaaaatcctcaggttgtggggtatttgtttctactccagcctggcaggcaaggctaaaacctgagattatcgatctatgagacatcttgatatgtaaagcacttaatattaaaggcataaaagtgaaactgctaaatatgtatagagaggttgacgtgtgatacgtgggacagttcacatagacatcagagaatttattccagaaaggagcctcctgaatgtgatgaatacggcaaagcctttaatcacatctcagcccttagcatcggaaagcttatactgtaaataaacttgatgaatattatatgtgaggaaaactttcatgtatagcactcattgcttcagacagaaaatgaattccgtcggtatgttccaatcgtgatgaatttgagaaacattgcaagagggagctcaatcttggccgggcgccgtggctcacgcctgtaatcgcagcactttgggaggccgaggcaggcggatcacgaggtcagtagttcgagaccagcctggccaacatggtgaaaccttgtctctactaaaaatacaaaaaaaaattagctgggcacagtggcgcacgcctgtagtcccagctactcgggaggctgaggcaggagaatggcttgaacctgcgaggcggaggttgcagtgagctaagatcatgccactggcactccagccttgagtgacagagcgaggctctgtatcaaaaaaaaaagttgcgggggggtgctcaatcttaactgcagaggatctacagatgaaaaaaaatgtggggaaatgctttaaaaaaatagcaaaatgtgcaacttcttacaaaaattgttaacgttaggtacttctatatattttatatgaccataatgtccgtgtgtgttttgtaccttcagtcccttgttattgttccgtatattacctgtaagcagatactgtattttattttagcctatttgacagaacacatcactcagaaaaagtgaagtttcagagcaaacagtgaagaaatcagtgtgattgtagacaaaaagtcggttcacagaacggagcagcggggagaggaagggaaaagcttcatagtttggtgcttatcacatcaagagattggtaaatttctgaggaaagacaggctaatggggcactgaaatggaacaactcctttaaacgtgcagccttttgaatttttcctcaaaaccaagaagttgacctctgagctgtcaggtgaccactgtgtgcaaaggggatggattctcttgtcagtagacggtcttctccatgaagcgagagtaggaagtgtactggaatggccaagtgggactgcttcagctgaccaggttcttttaaaccgtagtcatgctttcccactaactcttaaatccttatgcttagaaaattgaggataaggctgggcacagtggctcaggcctgtaatcccagcactttgggagaccaaggcgggtggatcacaaggtcaggagatcgagaccatcctggctaacatggcgaaaccccgtctctactaaaaatacaaaaaaatagctgggcgtggtggcgggcgcctgtagtcccagctactcaggaggctgaggcaggaggatcacttgaacatgggaggcggaggttgcagtgagccaagatggcgccactgcactccagcctgggtgatggcgtgagactccatgtcaaaaaaaaaaaaaaggttggggggaggataggactggccaggcacggtggctcactcctgtaatctcagcactttgggaggcagaggtgggcggatcacttgaggtcaggagtttgagaccagcctggccaacgtggtgaaagcctgtctctactaaaaatacaaaaattagccgggcgtggtggtgggcgcctgtagtcccagctactcaggaggctgaggcaggagaatcacctaaatctgggaggcagaggttgcagtgagccgagattgcaccactgcactccagcctgggtaacagagactctgtctcaaaaaaagaaaaaaaaaaaagaaagaaagaaagaaaattggggataggagaacagcaaggtgggcatttcccggaattgtgtgcagatgcatccagtcgtggcattgcaagaagtctgtctgatgaagctcgggaagcattttgcaatattccctttggctgtgttcctgtgttccctgctcccacttttcttcccctggtttgtgattattaggagagaggttttgcaaagactcgttgctgtgaaagaatctttttttaatttttatcctagagtcagtcacttttattccaggtagtcatgctgatctgcttatccaaagccagctaaccaggttcatcctaccatcctcatggaagactgtgtgtatgaattggagtaacagaactgaaatacacttaaacagtgacagcagtacttcccagggtgggggccatatttctctgtgtcctactctgagcaacttctcagagatacgagggggctagggttttcccatctgggaaatggggtgaaagtctgcagattgttaaatgaaatatagaatcagagaaaaagaaaagtcagtgatataaatagatcatttcatagaaattagggtagatttttatttcaactactactggagaatttaataaaaggcattatttgaaaagtttttctaacatagatttagggtttttttttttagagtggacacactacatttaaaagcaattattttgctattcagattttttattatctgaaaatgaaattatctgttttacttttcaaagctttgtgaaacaaacttgaagttatagggaggtaagccatctccaactctgcaggtcaaacgaaagtttgggaaatacttttgacatcccacaatacagaatgtcttaacatgagaattgaatttcatgatgtgtggttccatttaatagcggacaccaccccaatctcatgttttcctgttaccctaaaacagtggaaggaaactgggtgtttggtagacttctaaatcatggtctctgacaatttgaatctgagattctcacctccatttactaaagaatcgtgacttaattcaaattgcacagtaatcagtaaagtgaatacgtttttaaaatggaattttctcccttcagcaagcactcattaaggagtgaggctgagtattttaagatagagtgagatctgtgagtgattgaaaggtgatatttaaaaacttggatttcattccagtgtcaggtttgggttttaagttcctttggtccagggaagggtccaagcagccacagttgccctaaatctccatcattaagtcttccagcaaggttaagtgcagtatggaaggagaagggggaagaggacggtaacggccccacactccaggctgagaaagagtaattaggaggcctgaggaggggccgaggaaaggctgttggggtgtgctggggttggtacccgagcgccttcccctcacctcaaccagagaagagcatccggttgctttttaaagcttttagcctgccctagcaaggacaaagcatgttagattagagatgcttctgctgatcgcaggggttcttatttgaaaacatctatgatgggggtggggtgggaggagacaggttgtggttatgcaggaaaatcttgtcctaaaaatatatgagtttgggggtaaggggtgggatagccaagcaaaatcagtaattattttaaaatgaacatatgtatttttattaacttttagttaaatacagattttacaacgaggtcagcataagcctaaatctatatagagggctaactcaggcattgtcttgtttatttgtagactggattaaaaacaacctgtcctgttttgtcagttcccagcttcttcgtttagaataaattagaccaaaagaagaaacgtgcttgtctctgtatacccgcagaatgaagttactgttgttaaaactggattttttcattttactaggttccgaagagtccagatgcttggtagatgttcaatacgtgattttttttttaattgaatgtgttcatttaaaatcctccttaacatttctagaaagacttctttcaataaataatggaatcttagaggaaaagtggttttttaaaagctagggaactcctccactaaaagtaaccattggaaacctcgaatgagggctaaagttttaatcataagagaaaaggcagcataatgaaatgtgtacacatacatagtcagtggtccattttaggaagccagtggcgtctgataaagaaatgttaagagtagtgaggttgaggaaggaaattgtggggatttgaaatattctctttatgttgtttctcttctgagtcatggtaaaacaataaattatcatctctaggtggc

SEQ ID NO: 204144 - DNA, 9192 bp, Homo sapiens
  Payload ID: 20263
  Gene Name: zinc finger with KRAB and SCAN domains 1
  ENST ID: ENST00000620510
  CDS Start-End: 118-1701
ttatacttcaggaatagtaaagaaacacatcataaaacctcccaggacataaaggctgcacaggagaaggatggtatcgtaatagtgaaggtggaagaggaagatgaggaagaccacatgtgggggcaggattccaccctacaggacacgcctcctccagacccagagatattccgccaacgcttcaggcgcttctgttaccagaacacttttgggccccgagaggctctcagtcggctgaaggaactttgtcatcagtggctgcggccagaaataaacaccaaggaacagatcctggagcttctggtgctagagcagtttctttccatcctgcccaaggagctccaggtctggctgcaggaataccgccccgatagtggagaggaggccgtgacccttctagaagacttggagcttgatttatcaggacaacaggtcccaggtcaagttcatggacctgagatgctcgcaagggggatggtgcctctggatccagttcaggagtcctcgagctttgaccttcatcacgaggccacccagtcccacttcaaacattcgtctcggaaaccccgcctcttacagtcacgagctcttcctgctgcccacattcctgcaccccctcatgagggtagtcccagagaccaggcgatggcatctgcactattcacagcggattcccaggcaatggtgaagatcgaggacatggctgtgtccctcattctggaggaatggggatgtcagaatctggctcggaggaatctcagtagggacaacaggcaggagaattatgggagcgcatttccccagggtggtgaaaacaggaatgagaacgaggagtcaacctcaaaggctgaaacctcggaagattcagcatcacgcggggagacaacaggaagatcccagaaagagtttggagagaaacgtgaccaggagggcaaaacaggagaaagacagcagaaaaaccctgaggagaaaaccaggaaagagaaaagagattcagggccagctataggaaaggacaaaaaaaccatcacaggagagagaggtccaagggagaaggggaaaggattgggaagaagcttcagtctgagctccaacttcaccacccctgaagaagttcccacgggaacaaagtctcacagatgtgatgaatgtggtaaatgcttcacgagaagttcaagccttatccgccataaaataatccacactggagaaaagccctatgaatgtagtgagtgtgggaaagccttcagtcttaactccaaccttgtcctgcatcagaggatccacacaggagagaaacctcatgaatgtaacgagtgtggcaaggccttcagccacagttccaatctcatcctccatcagcgcatccactctggagagaaaccttatgaatgtaatgagtgcgggaaggccttcagccagagctcggacctcaccaagcatcagagaattcacacgggggagaaaccctatgaatgtagtgaatgtggaaaagctttcaaccgaaactcatacctgattttgcatcggagaattcacactcgagaaaagccctacaagtgcactaagtgtggcaaggccttcacccgcagctccaccctcactctgcatcacagaatccatgccagagagagagcctctgagtacagcccagcctcccttgatgcatttggcgcgttcctgaaaagttgtgtgtaaaggaagaatttgccatcaagccatttcccccttttgtttctaaaattatttcagagatgtgtgctcctggagggaaaaagaaatacagcctcaacagattaaaaaacaaaagtcacacttaaggatccttctagtcacatcagcagtgttctgcctttatgtagtagttgggcatataatccttccacacagcccctgcagggaaaggctaatcttacggataatccacgtgagatttccacacaagagaaaagcacacgcatagtgaaatgtcagtcttttcagtaatgaggatacctttaaggcactcttggactctcggcaaccacaacataatagttgaaagatcaagattggctccacgaaagtgatacggaggttaggatgctacttgctgcaaacaagccctactttggccaacatcctgcttatttctcaaaaaagagggacagtgaaaacaaaaacgacattgggacatgctgctcaaggtagttatatatacgataagttgtatatatgatcactggtagcctaccaaagctgtagaaatctaggactgtgctaatcagtatcaaaccaaagatttctatctcttcccgaaagagagggtatgtgcaccagtctacagttccaaaggactgcaacaaatgtagatggttctgtcctcatccctgagatcagttctactgaaatggcaacaacaactccaaatacatctctcccttcttgaaatccctaaagcactatcgcactcctaaatgcatttctccacaagttagcacttgattgtatactgtcttttaatccttcattgtttcatgtatgaagtttttaatcaccccctaacccccaaaaaagattcggttgtcaagggatatatttctatccctgccagcacagtgctggacatagtgagtactgaacacctaagaggcactcattcagactgacttctacaggacttctacgtgtgtgataaaagcctgtgaatcgtgagtccctgaaatatggtagcctggcccagcttctaaagaggaccttcgtagccacaaggcatgctaaacctctagggtctgatgctgtttttgttccaaatataaacgaaaggcactagtcagccgcctgcatagactttctaaacagtgagtaaataccatggaatgtcagaaatgactttatcatcgtcatcttgaagaaaaatatgaacactgatgaaggtcattttttttttttgacatctttctgtggcaaagctcttagaattctttgcagttagctgctgaacagtatgatgatttggggattttctgaatcatttgtacttagatactggagttcagaagatgtgatttttgttgcttttcagaaaaaggaacgtggtagggagtgttttttcccacgcttttccagtaactttgcaaaagcattaattgttcactggcaattactaaatgtattttgttgctctgagaaactcagcagtgtactgagatgtggctggctgtgccatcgtcatagtgcacagtgacttttctgtttcttatcactaaagactgaggtgaggttatgaaactttcattggtcccatcgttgtgcgcagggtgcaactggctacctagaagctgatggcaggagactgtttcacacacaggagattgtgagctgtgtaagtagtcatcgccactcaagtaggacaagggtcctacccaaggctaggaccgccctgcggaaacagaaacatagactgagaacaaacctcaagactatcagtgtgacctccccataacaagagaaccccatatatagtttgagactttcccttgagaaacttatactaaaactattactcatcagtcattcactgatcagcagctaaagtccatgagaccaaatggttttatatggaaccaacgaagtgggagctaaaactgcacagtggtcattctttggcctctccttggctttatgacttaaaccaactacaacttccctatagcttctaagcagtttcatcagcattacttgggaaaacgtgttgcaagtcaaccagtcactaggatatttctacccatgcaacggaagaaaaacccattactccagaagagtatatctaagtaactaaaatggaggcagaaaatgttttaaggattttcttcaaagaataagccacagcaatggttttgtagaaaactcctgtgcttttgagcaaggacttttgccctctagaaagcaactgaggccaggtgcggtggctcacgcctgtaatcccagcactttgggaggccgaggtgagcggatcacctgaggtcaggagttttgagaccagcctggccaacatggtaaaatcccgtctctactaaaattataaaaattagccgggcatgatggtgggcacctgtaatcccagctacttgggaggctgaggcaggagaatcacttgaacccaggaggcagaggttgcagtgagccaagattgcacactgcactccagcctgggtgactagcaaaactccatctcaaaaaaaaaaaaaagaaagaaagaaactgaaaagtgaggtgtggaactccaggcaacgacccaagcacttattttttaagagggaaaggactttggtcatgtttacattggcctttggtttttttttttctttcagccacaactatatgctgatataactcagccatcacttttgagttttgtttttaaatgaaggttaaatgtgacctgtgccctcacatttaattccgtttcatggagacatcttcctgactttgttggatagctgccactagggttgcttcgatcttcagccacatgctgtccttgaagcagctatttgaagatgtgttttctgaggaaaacaggctacaactgtttattaaaaccacttgcagtgcattcgtttatcagatgctcagtgcaaagtgtaattgggtcatggtcaaaaacgcttgcaacatctaattggcgttcaagatagtcattcaaaagttcttggcccgctgaagtctgttaacagttgaaacattctacagttaaccattagcatgctagttgtcctaatggaaatttttgaagagtttttcaatatataccctacccttgccaggaagagaagtaaaatcctcaggttgtggggtatttgtttctactccagcctggcaggcaaggctaaaacctgagattatcgatctatgagacatcttgatatgtaaagcacttaatattaaaggcataaaagtgaaactgctaaatatgtatagagaggttgacgtgtgatacgtgggacagttcacatagacatcagagaatttattccagaaaggagcctcctgaatgtgatgaatacggcaaagcctttaatcacatctcagcccttagcatcggaaagcttatactgtaaataaacttgatgaatattatatgtgaggaaaactttcatgtatagcactcattgcttcagacagaaaatgaattccgtcggtatgttccaatcgtgatgaatttgagaaacattgcaagagggagctcaatcttggccgggcgccgtggctcacgcctgtaatcgcagcactttgggaggccgaggcaggcggatcacgaggtcagtagttcgagaccagcctggccaacatggtgaaaccttgtctctactaaaaatacaaaaaaaaattagctgggcacagtggcgcacgcctgtagtcccagctactcgggaggctgaggcaggagaatggcttgaacctgcgaggcggaggttgcagtgagctaagatcatgccactggcactccagccttgagtgacagagcgaggctctgtatcaaaaaaaaaagttgcgggggggtgctcaatcttaactgcagaggatctacagatgaaaaaaaatgtggggaaatgctttaaaaaaatagcaaaatgtgcaacttcttacaaaaattgttaacgttaggtacttctatatattttatatgaccataatgtccgtgtgtgttttgtaccttcagtcccttgttattgttccgtatattacctgtaagcagatactgtattttattttagcctatttgacagaacacatcactcagaaaaagtgaagtttcagagcaaacagtgaagaaatcagtgtgattgtagacaaaaagtcggttcacagaacggagcagcggggagaggaagggaaaagcttcatagtttggtgcttatcacatcaagagattggtaaatttctgaggaaagacaggctaatggggcactgaaatggaacaactcctttaaacgtgcagccttttgaatttttcctcaaaaccaagaagttgacctctgagctgtcaggtgaccactgtgtgcaaaggggatggattctcttgtcagtagacggtcttctccatgaagcgagagtaggaagtgtactggaatggccaagtgggactgcttcagctgaccaggttcttttaaaccgtagtcatgctttcccactaactcttaaatccttatgcttagaaaattgaggataaggctgggcacagtggctcaggcctgtaatcccagcactttgggagaccaaggcgggtggatcacaaggtcaggagatcgagaccatcctggctaacatggcgaaaccccgtctctactaaaaatacaaaaaaatagctgggcgtggtggcgggcgcctgtagtcccagctactcaggaggctgaggcaggaggatcacttgaacatgggaggcggaggttgcagtgagccaagatggcgccactgcactccagcctgggtgatggcgtgagactccatgtcaaaaaaaaaaaaaaggttggggggaggataggactggccaggcacggtggctcactcctgtaatctcagcactttgggaggcagaggtgggcggatcacttgaggtcaggagtttgagaccagcctggccaacgtggtgaaagcctgtctctactaaaaatacaaaaattagccgggcgtggtggtgggcgcctgtagtcccagctactcaggaggctgaggcaggagaatcacctaaatctgggaggcagaggttgcagtgagccgagattgcaccactgcactccagcctgggtaacagagactctgtctcaaaaaaagaaaaaaaaaaaagaaagaaagaaagaaaattggggataggagaacagcaaggtgggcatttcccggaattgtgtgcagatgcatccagtcgtggcattgcaagaagtctgtctgatgaagctcgggaagcattttgcaatattccctttggctgtgttcctgtgttccctgctcccacttttcttcccctggtttgtgattattaggagagaggttttgcaaagactcgttgctgtgaaagaatctttttttaatttttatcctagagtcagtcacttttattccaggtagtcatgctgatctgcttatccaaagccagctaaccaggttcatcctaccatcctcatggaagactgtgtgtatgaattggagtaacagaactgaaatacacttaaacagtgacagcagtacttcccagggtgggggccatatttctctgtgtcctactctgagcaacttctcagagatacgagggggctagggttttcccatctgggaaatggggtgaaagtctgcagattgttaaatgaaatatagaatcagagaaaaagaaaagtcagtgatataaatagatcatttcatagaaattagggtagatttttatttcaactactactggagaatttaataaaaggcattatttgaaaagtttttctaacatagatttagggtttttttttttagagtggacacactacatttaaaagcaattattttgctattcagattttttattatctgaaaatgaaattatctgttttacttttcaaagctttgtgaaacaaacttgaagttatagggaggtaagccatctccaactctgcaggtcaaacgaaagtttgggaaatacttttgacatcccacaatacagaatgtcttaacatgagaattgaatttcatgatgtgtggttccatttaatagcggacaccaccccaatctcatgttttcctgttaccctaaaacagtggaaggaaactgggtgtttggtagacttctaaatcatggtctctgacaatttgaatctgagattctcacctccatttactaaagaatcgtgacttaattcaaattgcacagtaatcagtaaagtgaatacgtttttaaaatggaattttctcccttcagcaagcactcattaaggagtgaggctgagtattttaagatagagtgagatctgtgagtgattgaaaggtgatatttaaaaacttggatttcattccagtgtcaggtttgggttttaagttcctttggtccagggaagggtccaagcagccacagttgccctaaatctccatcattaagtcttccagcaaggttaagtgcagtatggaaggagaagggggaagaggacggtaacggccccacactccaggctgagaaagagtaattaggaggcctgaggaggggccgaggaaaggctgttggggtgtgctggggttggtacccgagcgccttcccctcacctcaaccagagaagagcatccggttgctttttaaagcttttagcctgccctagcaaggacaaagcatgttagattagagatgcttctgctgatcgcaggggttcttatttgaaaacatctatgatgggggtggggtgggaggagacaggttgtggttatgcaggaaaatcttgtcctaaaaatatatgagtttgggggtaaggggtgggatagccaagcaaaatcagtaattattttaaaatgaacatatgtatttttattaacttttagttaaatacagattttacaacgaggtcagcataagcctaaatctatatagagggctaactcaggcattgtcttgtttatttgtagactggattaaaaacaacctgtcctgttttgtcagttcccagcttcttcgtttagaataaattagaccaaaagaagaaacgtgcttgtctctgtatacccgcagaatgaagttactgttgttaaaactggattttttcattttactaggttccgaagagtccagatgcttggtagatgttcaatacgtgattttttttttaattgaatgtgttcatttaaaatcctccttaacatttctagaaagacttctttcaataaataatggaatcttagaggaaaagtggttttttaaaagctagggaactcctccactaaaagtaaccattggaaacctcgaatgagggctaaagttttaatcataagagaaaaggcagcataatgaaatgtgtacacatacatagtcagtggtccattttaggaagccagtggcgtctgataaagaaatgttaagagtagtgaggttgaggaaggaaattgtggggatttgaaatattctctttatgttgtttctcttctgagtcatggtaaaacaataaattatcatctctaggtggc

SEQ ID NO: 204145 - DNA, 7523 bp, Homo sapiens
  Payload ID: 20264
  Gene Name: zinc finger with KRAB and SCAN domains 2
  Uniprot ID: Q63HK3
  ENST ID: ENST00000328086
  CDS Start-End: 805-3708
ctcccccagcccctcgcccgccaggacgcctcgcgcgggccccgcggcgctcggtggcaggcggcgcatgcgtgactgcggttcccagcgccccccgcgctctccgcgggccgagtggacgaggccgaacgcgagcagcctgccgctgccccctgcgagccctggcttcgccccgcagctcttctcccttccgggcggaacagtttttgcggcctttcctcggcggcagcggtttcctcaggacggtcggggccgtcgtgggcccgaaagagcccggcgccgctctcggaatccggcggccccagcggcacccgcggcggcctggacgtgctgcggtgacccgagcccggaacctggcgccgggcggggcctgcacatccggccccacccactcggggactcgcctctccgcgcccgacccgggagtagcggacacaccccctcccggcccggctgtccgcctccgcccagcctttcctcagcctgcttcatttttctcccagtcgtccagcctcccggtttccgactttgcactaagagggatgcactctggaaaaccacattgcgcggtcacatcttgtttggagaagaggccaggcttttgcatcttagagtatacgttcaccttttcaagggcctggcatagatttgattaatcagcctggaataccctgttcctgccgacctggccgtttttacctccgtaccttatcacactcccaggaacattaagcagggagcgcttggagtcttctttgggtccccaccttgagctagacgtgaagttgacccctgggctgcagcatggctgtcgccctcgactctcagatcgacgcgcccctggaggttgagggatgcctaataatgaaggtggaaaaggaccctgagtgggcatcagagcccattctggaaggatcggatagctctgagaccttccgcaaatgcttcaggcaattctgttatgaggatgtgactggaccccatgaagctttcagtaaactctgggaactttgctgccggtggctgaagccagaaatgcgttccaaggagcaaatacttgagctgctggtgattgagcagtttctcaccattttacccgagaagattcaggcttgggcacagaagcagtgtccgcaaagtggagaggaagcggtggccctggtagtgcatttggagaaagagactggaagactaagacagcaggtcagcagtcccgtgcaccgggagaagcactccccacttggagcagcgtgggaggtggcagacttccagccagagcaggtggagacccaacccagggcggtgtctcgggaggaacctggaagcctccactcaggacaccaggaacagctgaaccgaaagcgagaacgtcggcccttacccaagaatgctcggccttctccctgggttcctgcccttgctgatgaatggaataccctagatcaggaagtgacaaccacacggcttcctgctgggtcccaggaaccagtgaaagatgtccacgtggccagaggcttttcctacagaaagagtgtgcatcagattcctgcccaaagggacctctaccgggatttcaggaaggagaatgttgggaacgtggtctccctgggaagtgcagtgtctacatctaacaagataacccggttggaacagagaaaggagccatggactctaggtctgcattcctctaacaagagaagtatcctacgaagcaactacgtcaaggaaaagtcagttcatgctattcaggtccctgcaaggagtgcaggaaaaacatggagagagcagcagcagtggggtttagaagatgaaaagatagcaggtgtgcattggagctatgaggaaacaaagactttcctggcaattctcaaagagtctcgcttttatgaaacacttcaggcctgtccccgaaatagccaagtgtatggtgctgtggctgaatggttgcgagaatgtggcttccttagaaccccagaacagtgtcgaaccaagttcaaaagtctccagaaaagctatcgaaaggtgagaaatggccacatgctagaaccctgcgccttctttgaggacatggatgctttgttgaaccctgcagcccgtgctccgtccactgataaaccaaaggagatgatacctgtccccagactgaagagaattgccatcagtgctaaggaacacatcagcttggtggaggaggaggaagctgcagaagattctgatgatgatgaaataggcatcgaatttatccgcaagtctgaaatccatggtgcccctgtcttgtttcagaatctcagtggcgtgcactggggctatgaagaaaccaagacttttcttgatatcctccgtgagactcggttttatgaagcgcttcaagcctgtcatcggaagagcaaattgtatggggctgtagctgaacagcttcgagagtgcggcttcctccggacaccagaacagtgccgaaccaagttcaaaagccttcagaagagttaccgcaaggtgaaaaatggccacgtgctagagtcctgcgcgttctacaaggagatggatgccctgattaactctcgggcatctgctccttcccccagcaccccagaggaagtcccatcaccttcaaggcaagaaagagggggtattgaggttgaaccccaggaacctacaggctgggaacctgaagagacctcacaggaggcagtaatagaagactcttgcagtgagagaatgagcgaggaggaaattgtgcaagagccagagttccagggacctccaggtctactgcagagcccaaatgattttgaaatcggaagtagcatcaaggaggatccaacacagatagtatataaggacatggaacagcatagggcattaatagaaaagtctaaaagagttgtttcccagagtaccgaccccagcaaatatcgcaaaagggaatgcatctcaggaagacaatgggaaaatcttcaaggaattagacagggaaagccgatgtctcagcctagagatttagggaaagccgttgtgcatcagaggccttttgtggggaagagaccctacagacttctcaaatatggagaaagctttggaaggagcactcgtctgatgtgccggatgacccaccacaaggagaatccttacaagtgtggtgtctgtgggaagtgctttggtagaagcaggagcctgatcagacaccaaagaatccacacaggcgaaaaaccttttaaatgtcttgactgtggaaaaagctttaatgactcctcaaattttggtgcccaccagagaatccacacaggagagaaaccctacagatgcggagagtgtggaaaatgctttagtcagagctctagtcttattatacatcagagaacgcacaccggtgagaagccctatcagtgtggagagtgtgggaaaagtttcaccaacagttctcatttcagcgcccaccggagagttcacactggggagaatccctacaaatgtgtggactgtgaaaaaagtttcaataactgtacgagatttcgagaacatcggagaatacacactggagagaagccctatggatgtgcccagtgtggcaaacgtttcagtaagagttctgttcttaccaaacatcgggaagttcatgtgagagaaaagcctctgccacaccctccatctctgtattgccctgagaacccacataagggaaagactgatgaatttaggaaaactttttgatgatgatcttctcttcctaaatgcccccttagccattttaccctaatctcattcttggaagcaatcttttcttagctatgaagtgtaatttccaagataaacttgagaatataaataaactaaacactttcatcctgttctcacctctgcctctaacttcatcagtctgttcctcctcttctgtgtgtctcagcttctcctttaagaatgtggcgaagatacattgtccgagttcagaatgaaatacccttcagtacattgaggccactgcaactggattgctaagttcggcaacattcaagatcttccatatgggtgagagttgtcttcaaggatataaaaaatgccaaaagtttttttgttgttattacctactccgtgagatcctggatgaaacttgataacagattttcacatttagatagaactttgaggagtctgatcggaactacatcaaatccatcttggttttgaagagatccacaaaagaagagtgaagattttatagctttcctcagaagtctgttacagtgtacctttttttttttttttgtcaagaagttgatccaaatagctagggcagaatccctgtattgtcactgaaatcctgttactaatgccttgccctccatggaggtgagaagcaattgatcacccctcatccttttctgtacccgaagacttaaatcccctggctgctgcttctccagcctataagtaatcccaggtcctcctactgtttctcatagccctgcacttgcctctcagttgctctgggtgctcctgccggcctcttccgaactaccatgccctcctcagatagaataggaggcctgctcgtggtgtgtctcactaaagcaaagtaggatttcagatgcgttctagttctatcctctaacttctctggctcttatctagaacatgactggcatgttggcatatttcgtacctcccacccctgcactgcagtataatattataatagtgtttctaaaactttaaggggatagggaagaggtaatagacacctgaagcatttctaagaccagttggactcctttggcctgctgtcgatcagatagccacctcagcttagaccagcgctctcaggtctggctgttaaatctcccagtctcttttcctgaggcttctagtccctgttcaccgcatcagaaacctaactgtagtgtgccaagtaacttaacacaactctagagctcactgggtgaaaagtgggaacatttataaaaacttcaatccagaaatccagaacaccgtttttgttttcctcatttacttgttttgtctgaaaaatctctttgagaacccccggcagtaacccagtaaacactgaaggaaaagttctgatgggggatggttaattgacttttgaagttacagatgaaacccagagatttgattttccatggccagttgcttcaggatggagtcagtggcgtttattcccttagtatgtaggtgacccagggtggctttgctttggcaagggagaagtcacaagtttaatgggaagggaaccggagttagggctgtttgtgggtgattattttgctcttctctctccctttctttgtcaaatgctcttatttgaagccatctggaaatgatatttttccttttggtatgtttcaatcttttgaaacttgttcagcaaagtacctaggagggtaggcactgtagaaagaaatctaatttatggtgccagaatagggtgtggcctgttggaaggcaggtgactcaggtagacattgataaatgtttctgatttacatttgttggaaatattatgactgttcacatctcaataggttgatttttctgtgttgtccaagttatagatttctaatgctaagtacagttccatgttggtagtgtgcgtagcacagtaagatgtttgtggtgccagtgggcttgtgtttatattgtgtagatgttctggaattccagctctagagaagatgtaaattaatagaaatcaccacttaataatatgtacacaggattgatattatgtggaagcatgattcaggaaagtagatgacttattcataaatatgaagcactgttacatgtaaggccatgttctagccacagtgaatgatagaaaaaggaaggaaggggcatggtgcctgggctcaaggaactcacagtttgatagaggaagcatcacagcaaaagttggggccacttacaccatggcagttacagaaggccaggagctcagtcatgagaacatcaccttcccctgcagaagagttgcgctaagttgcccagaatcatattctgtaccttcatctctcaaccttccccagtggcaggaaagggtcaagcaagacccattccctctctagtgggacaaactgattctgtttaactctcatatgcctgggagcaagctgaggtggaatttgggttcccctatctctactcctaattgtaaatgggctgtctagacatgtgttacattaatttgatgaactttgttctgaagaaatggaaggtctcccccccattttagaccaacactacctgtctccctgcattttatttgttttcacctggtacatgtaagtcaaaatgaataatcatgttctgaccaatgtgtcttttagatcacataacattgcctttatgaagattcatagaaaaaggtttttttatctagatctcagtgccaaggaaagctctgatcctaagcgcagtatgtgtacacacacacgtctacatgtgtgtgtagatctgtatgtatgtattacaaacactgtgatttttgtaacttaagctgctttttctctctttgttctggctgctggaaagttcaacaaaacttacagcccacctcaaccaactaccccaacctatatttatttaatttcatcttatttccttgtaaattgtgtcaaatcctgtttttgaaaagcagcatagactgacaacttttcactatcatcttatcgaaggcattttggaaactggggtcgtatgtcccacctaggcttgctttgttactgccacaaatacctccagttcttaccagtgatgttattatgcattcaacctaattcattcatctggaaagaaacagttttttaaaaagggaaacctcacacgtaaatggctcagggcagcctggccttggtggaatgagcatgagactggaagctgaaagaagcaagttttaatcttgtcactaaatgagtgttgtttgacacatcatagcctctctgggcctcggctcctcatctgaagagaagttgaacttaactgctaagttgctctggctctaatgtttcatgaggctgtggagcgtgatatagatgcggaagaggttagaagaccaggctgccggcccagctgtcctgtgcctgccacatctggccataccaaatccatcgcatgcttcaggaaagggaggggatgctgtgacagcaaactcagcccaggagcttgttggggaaggagaaagggcaagtccctcgtggtccacagcaggcaccccccaagcacctcgataaccagtggcaggtaggctgaagtgaaggaagcctctgtcaggaggtctggcgcccagtgacagacaagacagctgtgagggagctggggcagccctggctaaaggaatgtctgagtaacttgtgaaactggaagcctctgcctctgaatgcattccaagacctggtgcaaatggatgtccattcattgttttgtatcagtgttcacttagatgtcttcttgaaaacttgtttgtggaataaatgtctaaaataaatggctcccactggtttctgccataa

SEQ ID NO: 204146 - DNA, 3667 bp, Homo sapiens
  Payload ID: 20264
  Gene Name: zinc finger with KRAB and SCAN domains 2
  ENST ID: ENST00000569150
  CDS Start-End: 431-1129
acatccggccccacccactcggggactcgcctctccgcgcccgacccgggagtagcggacacaccccctcccggcccggctgtccgcctccgcccagcctttcctcagcctgcttcatttttctcccagtcgtccagcctcccggtttccgactttgcactaagagggatgcactctggaaaaccacattgcgcggtcacatcttgtttggagaagaggccaggcttttgcatcttagagtatacgttcaccttttcaagggcctggcatagatttgattaatcagcctggaataccctgttcctgccgacctggccgtttttacctccgtaccttatcacactcccaggaacattaagcagggagcgcttggagtcttctttgggtccccaccttgagctagacgtgaagttgacccctgggctgcagcatggctgtcgccctcgactctcagatcgacgcgcccctggaggttgagggatgcctaataatgaaggtggaaaaggaccctgagtgggcatcagagcccattctggaaggatcggatagctctgagaccttccgcaaatgcttcaggcaattctgttatgaggatgtgactggaccccatgaagctttcagtaaactctgggaactttgctgccggtggctgaagccagaaatgcgttccaaggagcaaatacttgagctgctggtgattgagcagtttctcaccattttacccgagaagattcaggcttgggcacagaagcagtgtccgcaaagtggagaggaagcggtggccctggtagtgcatttggagaaagagactggaagactaagacagcaggtcagcagtcccgtgcaccgggagaagcactccccacttggagcagcgtgggaggtggcagacttccagccagagcaggtggagacccaacccagggcggtgtctcgggaggaacctggaagcctccactcaggacaccaggaacagctgaaccgaaagcgagaacgtcggcccttacccaagaatgctcggccttctccctgggttcctgcccttgctgatgaatggaataccctagatcaggaagtgacaaccacacggcttcctgctgggtcccagtgtcattacaggaaccagtgaaagatgtccacgtggccagaggcttttcctacagaaagagtgtgcatcagattcctgcccaaagggacctctaccgggatttcaggaaggagaatgttgggaacgtggtctccctgggaagtgcagtgtctacatctaacaagataacccggttggaacagagaaaggagccatggactctaggtctgcattcctctaacaagagaagtatcctacgaagcaactacgtcaaggaaaagtcagttcatgctattcaggtccctgcaaggagtgcaggaaaaacatggagagagcagcagcagtggggtttagaagatgaaaagatagcaggtgtgcattggagctatgaggaaacaaagactttcctggcaattctcaaagagtctcgcttttatgaaacacttcaggcctgtccccgaaatagccaagtgtatggtgctgtggctgaatggttgcgagaatgtggcttccttagaaccccagaacagtgtcgaaccaagttcaaaagtctccagaaaagctatcgaaaggtgagaaatggccacatgctagaaccctgcgccttctttgaggacatggatgctttgttgaaccctgcagcccgtgctccgtccactgataaaccaaaggagatgatacctgtccccagactgaagagaattgccatcagtgctaaggaacacatcagcttggtggaggaggaggaagctgcagaagattctgatgatgatgaaataggcatcgaatttatccgcaagtctgaaatccatggtgcccctgtcttgtttcagaatctcagtggcgtgcactggggctatgaagaaaccaagacttttcttgatatcctccgtgagactcggttttatgaagcgcttcaagcctgtcatcggaagagcaaattgtatggggctgtagctgaacagcttcgagagtgcggcttcctccggacaccagaacagtgccgaaccaagttcaaaagccttcagaagagttaccgcaaggtgaaaaatggccacgtgctagagtcctgcgcgttctacaaggagatggatgccctgattaactctcgggcatctgctccttcccccagcaccccagaggaagtcccatcaccttcaaggcaagaaagagggggtattgaggttgaaccccaggaacctacaggctgggaacctgaagagacctcacaggaggcagtaatagaagactcttgcagtgagagaatgagcgaggaggaaattgtgcaagagccagagttccagggacctccaggtctactgcagagcccaaatgattttgaaatcggaagtagcatcaaggaggatccaacacagatagtatataaggacatggaacagcatagggcattaatagaaaagtctaaaagagttgtttcccagagtaccgaccccagcaaatatcgcaaaagggaatgcatctcaggaagacaatgggaaaatcttcaaggaattagacagggaaagccgatgtctcagcctagagatttagggaaagccgttgtgcatcagaggccttttgtggggaagagaccctacagacttctcaaatatggagaaagctttggaaggagcactcgtctgatgtgccggatgacccaccacaaggagaatccttacaagtgtggtgtctgtgggaagtgctttggtagaagcaggagcctgatcagacaccaaagaatccacacaggcgaaaaaccttttaaatgtcttgactgtggaaaaagctttaatgactcctcaaattttggtgcccaccagagaatccacacaggagagaaaccctacagatgcggagagtgtggaaaatgctttagtcagagctctagtcttattatacatcagagaacgcacaccggtgagaagccctatcagtgtggagagtgtgggaaaagtttcaccaacagttctcatttcagcgcccaccggagagttcacactggggagaatccctacaaatgtgtggactgtgaaaaaagtttcaataactgtacgagatttcgagaacatcggagaatacacactggagagaagccctatggatgtgcccagtgtggcaaacgtttcagtaagagttctgttcttaccaaacatcgggaagttcatgtgagagaaaagcctctgccacaccctccatctctgtattgccctgagaacccacataagggaaagactgatgaatttaggaaaactttttgatgatgatcttctcttcctaaatgcccccttagccattttaccctaatctcattcttggaagcaatcttttcttagctatgaagtgtaatttccaagataaacttgagaatataaataaactaaacactttcatcctgttctcacctctgcctctaacttcatcagtctgttcctcctcttctgtgtgtctcagcttctcctttaagaatgtggcgaagatacattgtccgagttcagaatgaaatacccttcagtacattgaggccactgcaactggattgctaagttcggcaacattcaagatcttccatatgggtgagag

SEQ ID NO: 204147 - DNA, 4725 bp, Homo sapiens
  Payload ID: 20265
  Gene Name: zinc finger with KRAB and SCAN domains 3
  Uniprot ID: Q9BRR0
  ENST ID: ENST00000252211
  CDS Start-End: 217-1833
agtggcttctgtgccccgccctgcgggtggtttgctagtttcaagcactttgtgagtatggggtgaatcggcgtcggccttccactgtggggttaaatctcatcccgcggctctcctcctgtcggtcctgcagttcttttgtccccgggtagagggatcttctgcagaaatagcgctggaagctagagtgaggcctgagtactgccttggcctaggatggctagagaattaagtgaaagcacagccctggatgcccagtctacagaagaccagatggagcttctggtcataaaggtggaggaagaagaagccggttttcccagtagcccagatctgggttctgagggctcccgcgagcgcttccgaggcttccgctacccggaggctgcaggcccccgcgaggcgctgagtcggctccgagagctctgccgacagtggctgcagcctgagatgcacagcaaggagcagatcctggagctgctggtgctggagcagttcctgaccatcctgccggggaatctgcagagctgggtgcgggagcagcatccagagagcggggaggaggtggtggtgctattggagtatttggagaggcagctggatgagccggcgccgcaggtttcaggtgttgaccaggggcaagaactgctctgttgcaagatggcactattgacaccagccccagggtcacaaagtagccaatttcagctaatgaaggctctgctcaagcatgaatctgtgggatcccagcctttacaagatagagttctccaggtccccgtgcttgcccatggaggatgctgcagagaagataaagtggtagcttctaggcttactccagagtcccaggggttgttgaaagtggaagatgtggccctgaccctcacccctgaatggacacagcaggattcatctcaggggaatctctgtagagatgaaaagcaggagaaccatggcagcctggtctccctgggtgatgaaaaacagactaagagcagggacttgcctccagctgaggagcttccagaaaaggagcatgggaagatatcgtgccacctgagagaagacattgcccagattcctacatgtgcagaagctggtgaacaggagggcaggctacaaagaaagcagaaaaatgccacaggagggaggcggcacatctgccatgaatgtggaaagagttttgctcaaagctcaggcctgagtaaacacaggagaatccacactggtgagaaaccctacgaatgtgaagagtgtggcaaagccttcattgggagctctgcccttgtcattcatcagagagtccacactggtgagaagccatatgagtgtgaagaatgtggtaaggccttcagtcatagctcagaccttatcaagcatcagagaacccacactggggagaagccctatgagtgtgatgactgtgggaagaccttcagccagagctgcagcctccttgaacatcacagaatccacactggggagaagccgtatcagtgcagtatgtgtggcaaagcctttaggcgaagttcacatctcctgagacatcagaggatccatactggggataaaaatgttcaggaacctgagcagggagaggcctggaaaagtaggatggaaagccagttggaaaatgttgaaactcccatgtcttataaatgtaatgagtgtgaaagaagtttcactcagaatacaggcctcattgaacatcaaaaaatccacactggtgagaaaccctatcagtgtaatgcgtgtggaaaaggcttcacccgaatttcataccttgttcaacatcagagaagccatgtagggaaaaacatcctatcacagtgacccatgccatacatgccagagttggtgctcatttgtcactgatctgaagccactccccctggagtctcaactatagaaattgtgggctgggctttatttaccactacacattatcaggtgttagaaaatgtagactgggttagacaaattatcttctaagttctagaaggggtttgtaatcaaaacatatttgataggaggctacgggagagttgtctagaagaggtaagacctgaaactgtttgttctctcccactagaattaaatggatgtttagactggctacttgccctaaaccagcacttggtgatgtctactgggtggatggttgtgatttgggggctgcttctctgaccattctttttgactgtaatgaatcctccacagttggtcagattcataaagtcttatatccccctctgtgccttttctgcaggtgctaataaatgtttattgaatgtaccagtgagattaccttcatagatctgaaaatctgatgttatccaggtttctgaagaacttctcgccaaggccatttgtgcttgtgtccaattctctgacctagattgtgactcaatctagtgtgtttcttaccaagtacataggcagagcagggttactgtgattgaaagaatccattttttttttggagacgtagtcttgctctgtcgcccaggctggagtgcagtggcacaatcttggctcactgcaacctccacctcctgggttcaagcgattctcctgcctcagcctcctgagtagctgggattacaggtgtgtgccaccatgcccggctaattttttatgtttttagtagagacgggattttaccgtgttagccaggatggtctcgatctcctaacctcatgatcctcctgcctcagcctaccaaagtgctgggattacaggcatgagccaccatgcccggccaagaatccatatttctttaccagactaggaattctattctagtgcaaatgccttaaaaagcttatcactaaatcattacgaatgtgtgccatccgtggaattgcttttttttttttttttttgtaaatatgaggtctcactatgttgcccaggctggtctcgaaatcctgggcaatcctcctgcctcaccctctcaagtactggaattacaggcgtgagccaccatacccagcccaaatttcactctttaatgttttcctgttgctattctttaaggaaaaaactttcctattcagacagtgtgaaaatcagtcatcaagtcagaataaaatgatgaatattctaatgctcagtatcttagttctctcgggcctaaccaatgcctcctaaaacaatagatactatcctgccccaccctaccacccaacacacactgtatagtaaactgcatcaaaacttattcctgctaagttcatactttctccagctcaatggattcacaccaaatttttttttttttttttagacggagtcttctctgtcacccaggctggagtgcagtggcgcgatctcggctcactgcaagctccgcctcccaggttcctgccattctcctgcctcagcctcccgagtagctgggactataggcgtccgcctccacgccgggctattttttttttttattttatactttaagttctagggtacatgtgcacaacgtgcaggtttgttacatatgtatacatgtgccatgttggtgtgctgcacccattaactcgtcatttacattgggtgtatctcctaatgctttccctccccccaccccacaacaggccccagtgtgtgatgttccccttcctgtgtccaagtgttctccttattcaattcccacctatgagtgagaatatgccgtgtttgattttttgttcttggcgatagtttgctgagaatgatgagacgaggtttcactgtgttagccaggatgctctcgatctcctgacctcgtgatccacctgtctcggcctcccaaaatgctgggattacaggcgtgagccaccgcgcccggcccaagtatcacttatggtttcagaacgccattattagtgtctgactgtcttggtcttcttatacattgattcccaaatcacgtgtggtaacagcatctcaatttttcatgatgacggtttgaaccattaatttaattcctcaggctatctacttttttgttaaacatactgtgtagaccatcttttttttttcccatcatgatagtcaaaattttagtctgtgtattcaagtgagaaaatttttagtcagcattatacaagtagtatttattatgtatacattcagtggagttgtttctacaaaagtatttcggaatgactattctgctgcaaacttttgtgtaagcgcttcaccttattcctacaataaggagaagtgcactaacaaaatgaacaatgcagcaagggcttcagtcgcagctcaggtcttatcaaacaccagagaaccctcaatgggagaagccttatgagtgtgacaactgtggaaagacagttccttttttgttagtatcacttctacttattgtagaaatatgctttcattattgcatctactcacatttctcactcggtttctggcaccagcaatctcttccatatttataatatcagtcaaaaactctggaattcaaatataacaagacttttctggtcacctttgatagttaatgacttgggcattgtgatatattatctcctgctgtatgtattttgtttagtagaaattgaatcattatccacaatcctttatagaactatccaagtccctgtttttatgctagtttccaaggcttggtccttcaaggttttcagggatctaggggacacaaatctaacaaatcctaatgtatattatttgtattatagtaataaaccatatggttactttgtttga

SEQ ID NO: 204148 - DNA, 1794 bp, Homo sapiens
  Payload ID: 20265
  Gene Name: zinc finger with KRAB and SCAN domains 3
  Uniprot ID: Q9BRR0
  ENST ID: ENST00000341464
  CDS Start-End: 161-1333
agtttcaagcactttgtgagtatggggtgaatcggcgtcggccttccactgtggggttaaatctcatcccgcggctctcctcctgtcggtcctgcagttcttttgtccccgggtagaggtttcaggtgttgaccaggggcaagaactgctctgttgcaagatggcactattgacaccagccccagggtcacaaagtagccaatttcagctaatgaaggctctgctcaagcatgaatctgtgggatcccagcctttacaagatagagttctccaggtccccgtgcttgcccatggaggatgctgcagagaagataaagtggtagcttctaggcttactccagagtcccaggggttgttgaaagtggaagatgtggccctgaccctcacccctgaatggacacagcaggattcatctcaggggaatctctgtagagatgaaaagcaggagaaccatggcagcctggtctccctgggtgatgaaaaacagactaagagcagggacttgcctccagctgaggagcttccagaaaaggagcatgggaagatatcgtgccacctgagagaagacattgcccagattcctacatgtgcagaagctggtgaacaggagggcaggctacaaagaaagcagaaaaatgccacaggagggaggcggcacatctgccatgaatgtggaaagagttttgctcaaagctcaggcctgagtaaacacaggagaatccacactggtgagaaaccctacgaatgtgaagagtgtggcaaagccttcattgggagctctgcccttgtcattcatcagagagtccacactggtgagaagccatatgagtgtgaagaatgtggtaaggccttcagtcatagctcagaccttatcaagcatcagagaacccacactggggagaagccctatgagtgtgatgactgtgggaagaccttcagccagagctgcagcctccttgaacatcacagaatccacactggggagaagccgtatcagtgcagtatgtgtggcaaagcctttaggcgaagttcacatctcctgagacatcagaggatccatactggggataaaaatgttcaggaacctgagcagggagaggcctggaaaagtaggatggaaagccagttggaaaatgttgaaactcccatgtcttataaatgtaatgagtgtgaaagaagtttcactcagaatacaggcctcattgaacatcaaaaaatccacactggtgagaaaccctatcagtgtaatgcgtgtggaaaaggcttcacccgaatttcataccttgttcaacatcagagaagccatgtagggaaaaacatcctatcacagtgacccatgccatacatgccagagttggtgctcatttgtcactgatctgaagccactccccctggagtctcaactatagaaattgtgggctgggctttatttaccactacacattatcaggtgttagaaaatgtagactgggttagacaaattatcttctaagttctagaaggggtttgtaatcaaaacatatttgataggaggctacgggagagttgtctagaagaggtaagacctgaaactgtttgttctctcccactagaattaaatggatgtttagactggctacttgccctaaaccagcacttggtgatgtctactgggtggatggttgtgatttgggggctgcttctctgaccattctttttgactgtaatgaatcctccacagttggtcagattcataaagtcttatatccccctctgtgccttttctgcaggtgctaataaatgtttattgaatgt

SEQ ID NO: 204149 - DNA, 4799 bp, Homo sapiens
  Payload ID: 20265
  Gene Name: zinc finger with KRAB and SCAN domains 3
  Uniprot ID: Q9BRR0
  ENST ID: ENST00000377255
  CDS Start-End: 298-1914
agtttcaagcactttgtgagtatggggtgaatcggcgtcggccttccactgtggggttaaatctcatcccgcggctctcctcctgtcggtcctgcagttcttttgtccccgggtagagggccgttaccgagtgtccgggtcggttcttgagggtatttggagacgggatgcatgggtcacatagacaagcctcgagaatgggagccgttacatttttgcactgcctggtaacaagggatcttctgcagaaatagcgctggaagctagagtgaggcctgagtactgccttggcctaggatggctagagaattaagtgaaagcacagccctggatgcccagtctacagaagaccagatggagcttctggtcataaaggtggaggaagaagaagccggttttcccagtagcccagatctgggttctgagggctcccgcgagcgcttccgaggcttccgctacccggaggctgcaggcccccgcgaggcgctgagtcggctccgagagctctgccgacagtggctgcagcctgagatgcacagcaaggagcagatcctggagctgctggtgctggagcagttcctgaccatcctgccggggaatctgcagagctgggtgcgggagcagcatccagagagcggggaggaggtggtggtgctattggagtatttggagaggcagctggatgagccggcgccgcaggtttcaggtgttgaccaggggcaagaactgctctgttgcaagatggcactattgacaccagccccagggtcacaaagtagccaatttcagctaatgaaggctctgctcaagcatgaatctgtgggatcccagcctttacaagatagagttctccaggtccccgtgcttgcccatggaggatgctgcagagaagataaagtggtagcttctaggcttactccagagtcccaggggttgttgaaagtggaagatgtggccctgaccctcacccctgaatggacacagcaggattcatctcaggggaatctctgtagagatgaaaagcaggagaaccatggcagcctggtctccctgggtgatgaaaaacagactaagagcagggacttgcctccagctgaggagcttccagaaaaggagcatgggaagatatcgtgccacctgagagaagacattgcccagattcctacatgtgcagaagctggtgaacaggagggcaggctacaaagaaagcagaaaaatgccacaggagggaggcggcacatctgccatgaatgtggaaagagttttgctcaaagctcaggcctgagtaaacacaggagaatccacactggtgagaaaccctacgaatgtgaagagtgtggcaaagccttcattgggagctctgcccttgtcattcatcagagagtccacactggtgagaagccatatgagtgtgaagaatgtggtaaggccttcagtcatagctcagaccttatcaagcatcagagaacccacactggggagaagccctatgagtgtgatgactgtgggaagaccttcagccagagctgcagcctccttgaacatcacagaatccacactggggagaagccgtatcagtgcagtatgtgtggcaaagcctttaggcgaagttcacatctcctgagacatcagaggatccatactggggataaaaatgttcaggaacctgagcagggagaggcctggaaaagtaggatggaaagccagttggaaaatgttgaaactcccatgtcttataaatgtaatgagtgtgaaagaagtttcactcagaatacaggcctcattgaacatcaaaaaatccacactggtgagaaaccctatcagtgtaatgcgtgtggaaaaggcttcacccgaatttcataccttgttcaacatcagagaagccatgtagggaaaaacatcctatcacagtgacccatgccatacatgccagagttggtgctcatttgtcactgatctgaagccactccccctggagtctcaactatagaaattgtgggctgggctttatttaccactacacattatcaggtgttagaaaatgtagactgggttagacaaattatcttctaagttctagaaggggtttgtaatcaaaacatatttgataggaggctacgggagagttgtctagaagaggtaagacctgaaactgtttgttctctcccactagaattaaatggatgtttagactggctacttgccctaaaccagcacttggtgatgtctactgggtggatggttgtgatttgggggctgcttctctgaccattctttttgactgtaatgaatcctccacagttggtcagattcataaagtcttatatccccctctgtgccttttctgcaggtgctaataaatgtttattgaatgtaccagtgagattaccttcatagatctgaaaatctgatgttatccaggtttctgaagaacttctcgccaaggccatttgtgcttgtgtccaattctctgacctagattgtgactcaatctagtgtgtttcttaccaagtacataggcagagcagggttactgtgattgaaagaatccattttttttttggagacgtagtcttgctctgtcgcccaggctggagtgcagtggcacaatcttggctcactgcaacctccacctcctgggttcaagcgattctcctgcctcagcctcctgagtagctgggattacaggtgtgtgccaccatgcccggctaattttttatgtttttagtagagacgggattttaccgtgttagccaggatggtctcgatctcctaacctcatgatcctcctgcctcagcctaccaaagtgctgggattacaggcatgagccaccatgcccggccaagaatccatatttctttaccagactaggaattctattctagtgcaaatgccttaaaaagcttatcactaaatcattacgaatgtgtgccatccgtggaattgcttttttttttttttttttgtaaatatgaggtctcactatgttgcccaggctggtctcgaaatcctgggcaatcctcctgcctcaccctctcaagtactggaattacaggcgtgagccaccatacccagcccaaatttcactctttaatgttttcctgttgctattctttaaggaaaaaactttcctattcagacagtgtgaaaatcagtcatcaagtcagaataaaatgatgaatattctaatgctcagtatcttagttctctcgggcctaaccaatgcctcctaaaacaatagatactatcctgccccaccctaccacccaacacacactgtatagtaaactgcatcaaaacttattcctgctaagttcatactttctccagctcaatggattcacaccaaatttttttttttttttttagacggagtcttctctgtcacccaggctggagtgcagtggcgcgatctcggctcactgcaagctccgcctcccaggttcctgccattctcctgcctcagcctcccgagtagctgggactataggcgtccgcctccacgccgggctattttttttttttattttatactttaagttctagggtacatgtgcacaacgtgcaggtttgttacatatgtatacatgtgccatgttggtgtgctgcacccattaactcgtcatttacattgggtgtatctcctaatgctttccctccccccaccccacaacaggccccagtgtgtgatgttccccttcctgtgtccaagtgttctccttattcaattcccacctatgagtgagaatatgccgtgtttgattttttgttcttggcgatagtttgctgagaatgatgagacgaggtttcactgtgttagccaggatgctctcgatctcctgacctcgtgatccacctgtctcggcctcccaaaatgctgggattacaggcgtgagccaccgcgcccggcccaagtatcacttatggtttcagaacgccattattagtgtctgactgtcttggtcttcttatacattgattcccaaatcacgtgtggtaacagcatctcaatttttcatgatgacggtttgaaccattaatttaattcctcaggctatctacttttttgttaaacatactgtgtagaccatcttttttttttcccatcatgatagtcaaaattttagtctgtgtattcaagtgagaaaatttttagtcagcattatacaagtagtatttattatgtatacattcagtggagttgtttctacaaaagtatttcggaatgactattctgctgcaaacttttgtgtaagcgcttcaccttattcctacaataaggagaagtgcactaacaaaatgaacaatgcagcaagggcttcagtcgcagctcaggtcttatcaaacaccagagaaccctcaatgggagaagccttatgagtgtgacaactgtggaaagacagttccttttttgttagtatcacttctacttattgtagaaatatgctttcattattgcatctactcacatttctcactcggtttctggcaccagcaatctcttccatatttataatatcagtcaaaaactctggaattcaaatataacaagacttttctggtcacctttgatagttaatgacttgggcattgtgatatattatctcctgctgtatgtattttgtttagtagaaattgaatcattatccacaatcctttatagaactatccaagtccctgtttttatgctagtttccaaggcttggtccttcaaggttttcagggatctaggggacacaaatctaacaaatcctaatgtatattatttgtattatagtaataaaccatatggttactt

SEQ ID NO: 204150 - DNA, 2375 bp, Homo sapiens
  Payload ID: 20266
  Gene Name: zinc finger with KRAB and SCAN domains 4
  Uniprot ID: Q969J2
  ENST ID: ENST00000377294
  CDS Start-End: 245-1882
ccaaagacatcctttggtgatacttactgtgggattcagagtggggtgcagaggacgaccctgcaaaggcacggactataagagagatctgtgcagctgcgcctcagggggtgtcctgggcccctgggcatgacaggagggggaccacttgcagttctactggaaaatttaccacccttccagaatcctctgaagatatacaggtcgcaactagagtgagacccgagtactgccttgggtcagaatggctagagaaccgagaaaaaacgcagccctggacgcccagtctgcagaagaccagacggggctcctgaccgtgaaggtggagaaggaggaagcctccgccttgacggcggaggtgagagcaccctgcagccctgctcggggccccgaacgctcccgccagcgcttccgaggcttccgctacccggaggctgcgggcccccgcgaggcgttgagccggctccgagaactctgcggacaatggctgcagcctgagatgcacagcaaggagcagatcctggagctgctggtgctggagcagttcctgaccatcctgccggggaatctgcagagctgggtgcgggagcagcatccagagagcggggaggaggtggtggtgctattggagtatttggagaggcagctggatgagccggcgccgcaggttcccgttggtgaccaggggcaagaactgctctgttgcaagatggcactattgacacaaactcaagggtctcaaagtagccagtgccagccaatgaaggctctgttcaagcatgaatctctgggatcccagcccttacacgatagagttctccaggttcctgggcttgcccagggagggtgctgcagagaagatgcaatggtagcttccaggctcactccagggtcccagggtttgctgaaaatggaagatgtggccctgaccctcactcctgggtggacacagctggattcatctcaggtgaacctctacagagatgaaaagcaggagaaccatagcagcctggtctcccttggtggtgaaatacagactaagagcagggacttgcctccagtcaagaagcttccagaaaaggagcatgggaagatatgccacctgagggaagacattgcccagattcctacacatgcagaagctggtgaacaggagggcaggttacaaagaaagcagaaaaatgccatagggagtaggcgacattattgccatgaatgtggaaagagttttgctcaaagttcaggcctgactaaacacaggagaatccacactggtgagaaaccctatgaatgtgaagactgtggaaagaccttcattgggagctctgcccttgtcattcatcagagagtccacactggtgagaagccatatgagtgtgaagaatgtggtaaggtcttcagtcacagctcaaaccttatcaaacaccagagaacccacactggggagaagccctatgagtgtgatgactgtgggaagaccttcagccagagctgcagcctccttgaacatcacaaaattcatactggggagaagccataccagtgcaatatgtgtggcaaagcctttaggcggaattcacatctcctgagacatcagaggattcatggtgataaaaatgttcagaatcctgagcacggggagtcctgggaaagtcagggtaggacggaaagccagtgggaaaatactgaggctcccgtgtcttataaatgtaatgagtgtgagagaagtttcacacggaatagaagtcttattgaacatcagaaaatccacactggtgagaaaccctatcagtgtgacacatgtggaaaaggtttcactcgaacttcataccttgttcaacatcagagaagccatgtagggaaaaaaactctttcacagtgacccatggtattcatgccaacattggtgctcatttgtcactgaactgaagccaccctggagcccttaatggttacagaaattgtggaccagggctttatttaccactatacatcatcgggtattagaaaatgtagtctggctgagacgatgagttatcttctacattctagaaagtgattggaagaagtcatttgataagaggccatgggagagtggtctggaagttgtaggacctaaaatagtttgttctcacccagtgtatttaaatggccttctggacttgttaattgccctcagccagcactttaggacatctggttggatggctctgatgtggggggctgctgctctgaccattcattttgcctctaatgaatctttcacaaattggtcagatccatgaggtcttttactcttctttgtgccttgtatgataggtgctaataaacatttattaaatgtaccagtaaaatggcctttgtaccaaaaattt

SEQ ID NO: 204151 - DNA, 4178 bp, Homo sapiens
  Payload ID: 20267
  Gene Name: zinc finger with KRAB and SCAN domains 5
  Uniprot ID: Q9Y2L8
  ENST ID: ENST00000326775
  CDS Start-End: 124-2643
gttccgggaacagctggcccctgcgactcgcgggtgtgacgttgaagatgtcggccttctgagccgactgcggtggtcaagagtgtaacacagccagcctcgaagacttccctctgagttggaatgataatgaccgaatcccgagaagttatagacttagaccccccagctgagacttcccaggagcaggaagaccttttcatagtgaaggtggaagaagaagactgcacctggatgcaggagtacaacccgccaacgtttgagactttttaccagcgcttcaggcacttccagtaccatgaggcttcaggaccccgggaggctctcagccaactccgggtgctctgctgtgagtggctgaggcccgagctgcacacgaaggagcagatcctggagctgctggtgctggagcagttcctgaccatcctgcctgaagagttccagccctgggtgagggaacatcaccctgaaagtggagaagaggcggtggccgtgatagaaaatatacagcgagaacttgaggaacgcagacagcagattgttgcctgccctgatgtgcttcctcggaagatggcaacacctggagcagtgcaggagtcctgcagcccccatcccctgaccgtggacacccagcctgagcaagcgccacagaagcctcgtctcctggaggaaaatgcccttcctgttctccaagttccttcccttcccctgaaggacagccaggagctgacagcttcacttctctcaactgggtcccagaagttggtgaaaattgaagaggtggctgatgtggctgtatccttcatcctggaggaatgggggcatttggaccagtcccagaagtccctttatagggatgacaggaaggagaactatgggagtattacttccatgggttatgagtccagggacaatatggagctcatagtgaagcagatttctgatgactctgaatcacactgggtggcgccagaacacaccgaaaggagcgttcctcaggatccagactttgcagaagtcagtgaccttaaaggcatggtacaaaggtggcaggtcaaccccactgtggggaaatcaaggcagaatccttcccagaaaagggatctggatgcaatcacagacatcagccctaagcaaagcacacatggcgagagagggcacagatgcagcgattgtggcaaattcttcctccaagcctcaaactttattcagcatcggcgcatccacactggagaaaaaccgtttaagtgcggagaatgtgggaagagctacaatcagcgggtgcacctcacccagcaccagcgcgtccacacaggggagaaaccctacaaatgtcaggtgtgcggaaaggctttccgggtgagttcccacctggttcagcaccacagtgtccacagcggagagaggccctatggctgcaatgagtgtgggaagaacttcggtcgccattcgcatctgatcgaacacctaaaacgccacttcagggagaaatcccagagatgcagtgacaaaagaagtaagaacacaaaattaagtgttaagaagaaaatttcagaatattcagaagcagacatggaactatctggaaaaacccaaagaaatgtttctcaagttcaagattttggagaaggctgtgagtttcaaggcaagctggatagaaagcagggaattcccatgaaagagatactaggacaaccatcttcaaagaggatgaactacagtgaagtcccatatgtccacaaaaaatcctccactggagagagaccacataaatgtaacgagtgtgggaaaagcttcattcagagtgcacatcttattcaacatcaaagaatacacactggggagaaaccattcaggtgtgaggaatgtgggaaaagctacaaccaacgcgtgcacctaactcagcatcagcgcgtccacacaggtgagaagccctacacctgtcccttatgtgggaaagccttcagagtgaggtcccaccttgttcagcatcagagcgtgcacagtggggagagacccttcaagtgtaacgaatgtgggaaaggctttgggaggcgttcccacctggctggacatcttcgactccactcccgagagaaatcccatcagtgtcgtgaatgtggggaaatcttttttcagtacgttagcctaattgaacatcaggtgctccacatgggtcagaaaaatgaaaaaaatggcatctgtgaggaagcatatagttggaacttgacagtgattgaagacaagaagattgagttacaagagcagccttatcagtgtgatatctgtggaaaagcctttggttatagctcagacctcattcagcattacagaactcatacagcagagaagccctatcaatgtgatatatgtagagaaaatgttggccagtgttcccacaccaaacaacatcaaaaaatctactccagcacaaaatcccatcaatgtcatgaatgtggcagaggcttcactctgaagtcacatcttaatcaacatcagagaatccatactggtgagaaaccttttcaatgtaaagaatgtggaatgaatttcagctggagttgtagcctctttaaacacctgagaagccatgagaggacagatcccataaataccttaagtgtagaggggtctctgttgtagaatagctcttaattttagagaaaccttcctggagggaaaccatactcctataatgagcaaagtaacaacttcaagcatttttccagcgttaccatcaaactcacaaataggttgaaatcctttagttataactcagcctttaggaacaccggagaacccacaataatagaaatcttttcgtgttccccattgagaaatgctttagttagcatcttcatgcttggaaatctagacaagaagagaatccatggatggacatggtcgaggaattcggaaagcctgcagttgacattcagtcttcacttgaaactcaaaactgacactaggaacagcttcatgagttcagtagaagtaagctttatttgtagcttctgccttgtttgacggcgtatctattcagggaagcgcacagtaaaagaattccttagcatgatgtctgttttggtacctcagcaatgaaccttttctagaaattattattccaaccactagaataccctagtcactattcccactttgagcattaacccctttgaaaagaaatggacttaaagtatctctgttttggcaaaattcaggttcaggggctggatggtatgtgtttctgctgccttattcaatccaccacttctctgtgaaacactctaccttgtttttggtttgattctactgatgtcagggtttagccggtagaaggagtagttcagtttgtcaattcaggagaaactgtactggtcagtcacatcttacggcgaagggagagggaccttaggggagcagagaagacaggcaaagttgtggactgtttgatcttgtattacccacaggaatgagggcagctaaacccatagaaggagttggaccaaggcgaattacgagtcctggtcccagcagtatgtgtgctgacttctgggtgccccagaaatagacctctcctgtagagtggtgatatacagaatgagtttcagtttgcattgcagctgggattgaaagtaatcagtcgtgagcaggcaggcaggaggtcctgttagccctgccttccaggaaggttggggtgggagttttgagtgggaaagaggatgacatgtgtgagagagttctgagcctgtttgctagggagagtgagtgagtgctcttgggcactgctcaggccgtttctgctgacttgcctggcttacaataaatgcccaataaatatttgttgaccatatgtgttgtacactgtggtgccctgtccagtcccctctaccaagctgagacccccatccccagctgctctgagtttgggctgcaagtgctcacagctcttgttctccagaaactggagaattgccctcaggagatgagagccatctcacctcacccaggagtcacttcctctctacaccccaacacctggttcatttgattaaagcggagaaaactccagggtgctatgactgctctggcacccttggatcaggccaagctagactttttctgagccttcatccgtgctaagctctctcccttctctatcctgtttcattccctcc

SEQ ID NO: 204152 - DNA, 4344 bp, Homo sapiens
  Payload ID: 20267
  Gene Name: zinc finger with KRAB and SCAN domains 5
  Uniprot ID: Q9Y2L8
  ENST ID: ENST00000394170
  CDS Start-End: 252-2771
cttccccgccccacggaaaggggaggagcttgggctgtttgaatggctttgggatggagcaggggagagagtggctccgtttgcctccccgctttggtgatgctgtgcgagcggcttcgggggccctggagacgtccgagtcactgagggtgggctgggactcggggcccgcgtcccatctccccgccgattggtccgccccccgtgcgagtgtaacacagccagcctcgaagacttccctctgagttggaatgataatgaccgaatcccgagaagttatagacttagaccccccagctgagacttcccaggagcaggaagaccttttcatagtgaaggtggaagaagaagactgcacctggatgcaggagtacaacccgccaacgtttgagactttttaccagcgcttcaggcacttccagtaccatgaggcttcaggaccccgggaggctctcagccaactccgggtgctctgctgtgagtggctgaggcccgagctgcacacgaaggagcagatcctggagctgctggtgctggagcagttcctgaccatcctgcctgaagagttccagccctgggtgagggaacatcaccctgaaagtggagaagaggcggtggccgtgatagaaaatatacagcgagaacttgaggaacgcagacagcagattgttgcctgccctgatgtgcttcctcggaagatggcaacacctggagcagtgcaggagtcctgcagcccccatcccctgaccgtggacacccagcctgagcaagcgccacagaagcctcgtctcctggaggaaaatgcccttcctgttctccaagttccttcccttcccctgaaggacagccaggagctgacagcttcacttctctcaactgggtcccagaagttggtgaaaattgaagaggtggctgatgtggctgtatccttcatcctggaggaatgggggcatttggaccagtcccagaagtccctttatagggatgacaggaaggagaactatgggagtattacttccatgggttatgagtccagggacaatatggagctcatagtgaagcagatttctgatgactctgaatcacactgggtggcgccagaacacaccgaaaggagcgttcctcaggatccagactttgcagaagtcagtgaccttaaaggcatggtacaaaggtggcaggtcaaccccactgtggggaaatcaaggcagaatccttcccagaaaagggatctggatgcaatcacagacatcagccctaagcaaagcacacatggcgagagagggcacagatgcagcgattgtggcaaattcttcctccaagcctcaaactttattcagcatcggcgcatccacactggagaaaaaccgtttaagtgcggagaatgtgggaagagctacaatcagcgggtgcacctcacccagcaccagcgcgtccacacaggggagaaaccctacaaatgtcaggtgtgcggaaaggctttccgggtgagttcccacctggttcagcaccacagtgtccacagcggagagaggccctatggctgcaatgagtgtgggaagaacttcggtcgccattcgcatctgatcgaacacctaaaacgccacttcagggagaaatcccagagatgcagtgacaaaagaagtaagaacacaaaattaagtgttaagaagaaaatttcagaatattcagaagcagacatggaactatctggaaaaacccaaagaaatgtttctcaagttcaagattttggagaaggctgtgagtttcaaggcaagctggatagaaagcagggaattcccatgaaagagatactaggacaaccatcttcaaagaggatgaactacagtgaagtcccatatgtccacaaaaaatcctccactggagagagaccacataaatgtaacgagtgtgggaaaagcttcattcagagtgcacatcttattcaacatcaaagaatacacactggggagaaaccattcaggtgtgaggaatgtgggaaaagctacaaccaacgcgtgcacctaactcagcatcagcgcgtccacacaggtgagaagccctacacctgtcccttatgtgggaaagccttcagagtgaggtcccaccttgttcagcatcagagcgtgcacagtggggagagacccttcaagtgtaacgaatgtgggaaaggctttgggaggcgttcccacctggctggacatcttcgactccactcccgagagaaatcccatcagtgtcgtgaatgtggggaaatcttttttcagtacgttagcctaattgaacatcaggtgctccacatgggtcagaaaaatgaaaaaaatggcatctgtgaggaagcatatagttggaacttgacagtgattgaagacaagaagattgagttacaagagcagccttatcagtgtgatatctgtggaaaagcctttggttatagctcagacctcattcagcattacagaactcatacagcagagaagccctatcaatgtgatatatgtagagaaaatgttggccagtgttcccacaccaaacaacatcaaaaaatctactccagcacaaaatcccatcaatgtcatgaatgtggcagaggcttcactctgaagtcacatcttaatcaacatcagagaatccatactggtgagaaaccttttcaatgtaaagaatgtggaatgaatttcagctggagttgtagcctctttaaacacctgagaagccatgagaggacagatcccataaataccttaagtgtagaggggtctctgttgtagaatagctcttaattttagagaaaccttcctggagggaaaccatactcctataatgagcaaagtaacaacttcaagcatttttccagcgttaccatcaaactcacaaataggttgaaatcctttagttataactcagcctttaggaacaccggagaacccacaataatagaaatcttttcgtgttccccattgagaaatgctttagttagcatcttcatgcttggaaatctagacaagaagagaatccatggatggacatggtcgaggaattcggaaagcctgcagttgacattcagtcttcacttgaaactcaaaactgacactaggaacagcttcatgagttcagtagaagtaagctttatttgtagcttctgccttgtttgacggcgtatctattcagggaagcgcacagtaaaagaattccttagcatgatgtctgttttggtacctcagcaatgaaccttttctagaaattattattccaaccactagaataccctagtcactattcccactttgagcattaacccctttgaaaagaaatggacttaaagtatctctgttttggcaaaattcaggttcaggggctggatggtatgtgtttctgctgccttattcaatccaccacttctctgtgaaacactctaccttgtttttggtttgattctactgatgtcagggtttagccggtagaaggagtagttcagtttgtcaattcaggagaaactgtactggtcagtcacatcttacggcgaagggagagggaccttaggggagcagagaagacaggcaaagttgtggactgtttgatcttgtattacccacaggaatgagggcagctaaacccatagaaggagttggaccaaggcgaattacgagtcctggtcccagcagtatgtgtgctgacttctgggtgccccagaaatagacctctcctgtagagtggtgatatacagaatgagtttcagtttgcattgcagctgggattgaaagtaatcagtcgtgagcaggcaggcaggaggtcctgttagccctgccttccaggaaggttggggtgggagttttgagtgggaaagaggatgacatgtgtgagagagttctgagcctgtttgctagggagagtgagtgagtgctcttgggcactgctcaggccgtttctgctgacttgcctggcttacaataaatgcccaataaatatttgttgaccatatgtgttgtacactgtggtgccctgtccagtcccctctaccaagctgagacccccatccccagctgctctgagtttgggctgcaagtgctcacagctcttgttctccagaaactggagaattgccctcaggagatgagagccatctcacctcacccaggagtcacttcctctctacaccccaacacctggttcatttgattaaagcggagaaaactccagggtgctatgactgctctggcacccttggatcaggccaagctagactttttctgagccttcatccgtgctaagctctctcccttctctatcctgtttcattccctccctcaaaggcgtttcccaaataaatcacactgtcaatca

SEQ ID NO: 204153 - DNA, 3111 bp, Homo sapiens
  Payload ID: 20267
  Gene Name: zinc finger with KRAB and SCAN domains 5
  Uniprot ID: Q9Y2L8
  ENST ID: ENST00000451158
  CDS Start-End: 162-2681
gactcgcgggtgtgacgttgaagatgtcggccttctgagccgactgcggtggtcaagaggttgcatgctactgaaagtgtccttcagaagatattaaagagcagaaaaacaattgtttcagtgtaacacagccagcctcgaagacttccctctgagttggaatgataatgaccgaatcccgagaagttatagacttagaccccccagctgagacttcccaggagcaggaagaccttttcatagtgaaggtggaagaagaagactgcacctggatgcaggagtacaacccgccaacgtttgagactttttaccagcgcttcaggcacttccagtaccatgaggcttcaggaccccgggaggctctcagccaactccgggtgctctgctgtgagtggctgaggcccgagctgcacacgaaggagcagatcctggagctgctggtgctggagcagttcctgaccatcctgcctgaagagttccagccctgggtgagggaacatcaccctgaaagtggagaagaggcggtggccgtgatagaaaatatacagcgagaacttgaggaacgcagacagcagattgttgcctgccctgatgtgcttcctcggaagatggcaacacctggagcagtgcaggagtcctgcagcccccatcccctgaccgtggacacccagcctgagcaagcgccacagaagcctcgtctcctggaggaaaatgcccttcctgttctccaagttccttcccttcccctgaaggacagccaggagctgacagcttcacttctctcaactgggtcccagaagttggtgaaaattgaagaggtggctgatgtggctgtatccttcatcctggaggaatgggggcatttggaccagtcccagaagtccctttatagggatgacaggaaggagaactatgggagtattacttccatgggttatgagtccagggacaatatggagctcatagtgaagcagatttctgatgactctgaatcacactgggtggcgccagaacacaccgaaaggagcgttcctcaggatccagactttgcagaagtcagtgaccttaaaggcatggtacaaaggtggcaggtcaaccccactgtggggaaatcaaggcagaatccttcccagaaaagggatctggatgcaatcacagacatcagccctaagcaaagcacacatggcgagagagggcacagatgcagcgattgtggcaaattcttcctccaagcctcaaactttattcagcatcggcgcatccacactggagaaaaaccgtttaagtgcggagaatgtgggaagagctacaatcagcgggtgcacctcacccagcaccagcgcgtccacacaggggagaaaccctacaaatgtcaggtgtgcggaaaggctttccgggtgagttcccacctggttcagcaccacagtgtccacagcggagagaggccctatggctgcaatgagtgtgggaagaacttcggtcgccattcgcatctgatcgaacacctaaaacgccacttcagggagaaatcccagagatgcagtgacaaaagaagtaagaacacaaaattaagtgttaagaagaaaatttcagaatattcagaagcagacatggaactatctggaaaaacccaaagaaatgtttctcaagttcaagattttggagaaggctgtgagtttcaaggcaagctggatagaaagcagggaattcccatgaaagagatactaggacaaccatcttcaaagaggatgaactacagtgaagtcccatatgtccacaaaaaatcctccactggagagagaccacataaatgtaacgagtgtgggaaaagcttcattcagagtgcacatcttattcaacatcaaagaatacacactggggagaaaccattcaggtgtgaggaatgtgggaaaagctacaaccaacgcgtgcacctaactcagcatcagcgcgtccacacaggtgagaagccctacacctgtcccttatgtgggaaagccttcagagtgaggtcccaccttgttcagcatcagagcgtgcacagtggggagagacccttcaagtgtaacgaatgtgggaaaggctttgggaggcgttcccacctggctggacatcttcgactccactcccgagagaaatcccatcagtgtcgtgaatgtggggaaatcttttttcagtacgttagcctaattgaacatcaggtgctccacatgggtcagaaaaatgaaaaaaatggcatctgtgaggaagcatatagttggaacttgacagtgattgaagacaagaagattgagttacaagagcagccttatcagtgtgatatctgtggaaaagcctttggttatagctcagacctcattcagcattacagaactcatacagcagagaagccctatcaatgtgatatatgtagagaaaatgttggccagtgttcccacaccaaacaacatcaaaaaatctactccagcacaaaatcccatcaatgtcatgaatgtggcagaggcttcactctgaagtcacatcttaatcaacatcagagaatccatactggtgagaaaccttttcaatgtaaagaatgtggaatgaatttcagctggagttgtagcctctttaaacacctgagaagccatgagaggacagatcccataaataccttaagtgtagaggggtctctgttgtagaatagctcttaattttagagaaaccttcctggagggaaaccatactcctataatgagcaaagtaacaacttcaagcatttttccagcgttaccatcaaactcacaaataggttgaaatcctttagttataactcagcctttaggaacaccggagaacccacaataatagaaatcttttcgtgttccccattgagaaatgctttagttagcatcttcatgcttggaaatctagacaagaagagaatccatggatggacatggtcgaggaattcggaaagcctgcagttgacattcagtcttcacttgaaactcaaaactgacactaggaacagcttcatgagttcagtagaagtaagctttatttgtagcttctgccttgtttgacggcgtatctattcagggaagcgcacagtaaaagaattccttagca

SEQ ID NO: 204154 - DNA, 5626 bp, Homo sapiens
  Payload ID: 20267
  Gene Name: zinc finger with KRAB and SCAN domains 5
  ENST ID: ENST00000454175
  CDS Start-End: 792-1460
ggacttggttacttccggcgaggaagtgttggggagtgtcggcttcggtttctctccgtgggaagaaccgcatcttcccagcctcggctgcggggagcttgatgttccaggagagctcccctagagtggggccttgaggggagggggcaggggcttcgtgactggacgggggtcctgtccctaaccttgaccgggccacagtctctgtatctcggggtcaggggccattctgaggaatccaggtccagatctgtaccttataaacgctgcttctctttgggaccgatggagtctccccttggcctgtcaagctcttgtagcttagagaacaggctcagttttgaccattataatgattttcacccttattccgacttaagttcgtcttatggtagagagaaagagcggctgcgtctggactagttagtctcgtcccgttatttatatggaatgtaaagttcttcactctaaaactgtgttttaggttgggcctgatgtcagatttgtatggctctcttttacacttttaaaatgttggggttattccttattatcattttgtgggtgaagtgatggctaccttgtagtacctatttttaagtaaattactttgttgagtggtcgtctttagtatagatgacctctttgccatctgtctttgctaataatgatgcccaatacatcagtaggttgcatgctactgaaagtgtccttcagaagatattaaagagcagaaaaacaattgtttcagtgtaacacagccagcctcgaagacttccctctgagttggaatgataatgaccgaatcccgagaagttatagacttagaccccccagctgagacttcccaggagcaggaagaccttttcatagtgaaggtggaagaagaagactgcacctggatgcaggagtacaacccgccaacgtttgagactttttaccagcgcttcaggcacttccagtaccatgaggcttcaggaccccgggaggctctcagccaactccgggtgctctgctgtgagtggctgaggcccgagctgcacacgaaggagcagatcctggagctgctggtgctggagcagttcctgaccatcctgcctgaagagttccagccctgggtgagggaacatcaccctgaaagtggagaagaggcggtggccgtgatagaaaatatacagcgagaacttgaggaacgcagacagcagattgttgcctgccctgatgtgcttcctcggaagatggcaacacctggagcagtgcaggagtcctgcagcccccatcccctgaccgtggacacccagcctgagcaagcgccacagaagcctcgtctcctggaggaaaatgcccttcctgttctccaagttccttcccttcccctgaaggacagccaggagctgacagcttcacttctctcaactgggtcccaggttatgagtccagggacaatatggagctcatagtgaagcagatttctgatgactctgaatcacactgggtggcgccagaacacaccgaaaggagcgttcctcaggatccagactttgcagaagtcagtgaccttaaaggcatggtacaaaggtggcaggtcaaccccactgtggggaaatcaaggcagaatccttcccagaaaagggatctggatgcaatcacagacatcagccctaagcaaagcacacatggcgagagagggcacagatgcagcgattgtggcaaattcttcctccaagcctcaaactttattcagcatcggcgcatccacactggagaaaaaccgtttaagtgcggagaatgtgggaagagctacaatcagcgggtgcacctcacccagcaccagcgcgtccacacaggggagaaaccctacaaatgtcaggtgtgcggaaaggctttccgggtgagttcccacctggttcagcaccacagtgtccacagcggagagaggccctatggctgcaatgagtgtgggaagaacttcggtcgccattcgcatctgatcgaacacctaaaacgccacttcagggagaaatcccagagatgcagtgacaaaagaagtaagaacacaaaattaagtgttaagaagaaaatttcagaatattcagaagcagacatggaactatctggaaaaacccaaagaaatgtttctcaagttcaagattttggagaaggctgtgagtttcaaggcaagctggatagaaagcagggaattcccatgaaagagatactaggacaaccatcttcaaagaggatgaactacagtgaagtcccatatgtccacaaaaaatcctccactggagagagaccacataaatgtaacgagtgtgggaaaagcttcattcagagtgcacatcttattcaacatcaaagaatacacactggggagaaaccattcaggtgtgaggaatgtgggaaaagctacaaccaacgcgtgcacctaactcagcatcagcgcgtccacacaggtgagaagccctacacctgtcccttatgtgggaaagccttcagagtgaggtcccaccttgttcagcatcagagcgtgcacagtggggagagacccttcaagtgtaacgaatgtgggaaaggctttgggaggcgttcccacctggctggacatcttcgactccactcccgagagaaatcccatcagtgtcgtgaatgtggggaaatcttttttcagtacgttagcctaattgaacatcaggtgctccacatgggtcagaaaaatgaaaaaaatggcatctgtgaggaagcatatagttggaacttgacagtgattgaagacaagaagattgagttacaagagcagccttatcagtgtgatatctgtggaaaagcctttggttatagctcagacctcattcagcattacagaactcatacagcagagaagccctatcaatgtgatatatgtagagaaaatgttggccagtgttcccacaccaaacaacatcaaaaaatctactccagcacaaaatcccatcaatgtcatgaatgtggcagaggcttcactctgaagtcacatcttaatcaacatcagagaatccatactggtgagaaaccttttcaatgtaaagaatgtggaatgaatttcagctggagttgtagcctctttaaacacctgagaagccatgagaggacagatcccataaataccttaagtgtagaggggtctctgttgtagaatagctcttaattttagagaaaccttcctggagggaaaccatactcctataatgagcaaagtaacaacttcaagcatttttccagcgttaccatcaaactcacaaataggttgaaatcctttagttataactcagcctttaggaacaccggagaacccacaataatagaaatcttttcgtgttccccattgagaaatgctttagttagcatcttcatgcttggaaatctagacaagaagagaatccatggatggacatggtcgaggaattcggaaagcctgcagttgacattcagtcttcacttgaaactcaaaactgacactaggaacagcttcatgagttcagtagaagtaagctttatttgtagcttctgccttgtttgacggcgtatctattcagggaagcgcacagtaaaagaattccttagcatgatgtctgttttggtacctcagcaatgaaccttttctagaaattattattccaaccactagaataccctagtcactattcccactttgagcattaacccctttgaaaagaaatggacttaaagtatctctgttttggcaaaattcaggttcaggggctggatggtatgtgtttctgctgccttattcaatccaccacttctctgtgaaacactctaccttgtttttggtttgattctactgatgtcagggtttagccggtagaaggagtagttcagtttgtcaattcaggagaaactgtactggtcagtcacatcttacggcgaagggagagggaccttaggggagcagagaagacaggcaaagttgtggactgtttgatcttgtattacccacaggaatgagggcagctaaacccatagaaggagttggaccaaggcgaattacgagtcctggtcccagcagtatgtgtgctgacttctgggtgccccagaaatagacctctcctgtagagtggtgatatacagaatgagtttcagtttgcattgcagctgggattgaaagtaatcagtcgtgagcaggcaggcaggaggtcctgttagccctgccttccaggaaggttggggtgggagttttgagtgggaaagaggatgacatgtgtgagagagttctgagcctgtttgctagggagagtgagtgagtgctcttgggcactgctcaggccgtttctgctgacttgcctggcttacaataaatgcccaataaatatttgttgaccatatgtgttgtacactgtggtgccctgtccagtcccctctaccaagctgagacccccatccccagctgctctgagtttgggctgcaagtgctcacagctcttgttctccagaaactggagaattgccctcaggagatgagagccatctcacctcacccaggagtcacttcctctctacaccccaacacctggttcatttgattaaagcggagaaaactccagggtgctatgactgctctggcacccttggatcaggccaagctagactttttctgagccttcatccgtgctaagctctctcccttctctatcctgtttcattccctccctcaaaggcgtttcccaaataaatcacactgtcaatcacatggttctgaatccctgtctcaggctctgctttagagaacctgatctaagacatttggtgccacaagtggtcataggaagctgctgtgagagtggattgtggagttggtcactcgccaggagggagtgaagacccgcatcactgttaatagtcctggcatgtggtacctgtccagtcactaagtcattcacttgtggggaactgggatgagatacaggtggaaagcgatctattgacttgtagaggtttgggacaaacaggaaaataaagattatggaattgggtggctcttgctgaaagtcactgaatccttgaagagaagaaaatgacagggcaaataaccaccaatttaatgccaagtgtgtgtcagaggaccttcttggtagctttttaatttttttatagacagggtcttgctctgctgcccaggctagagtgcagtggtgcaatcacagctcactgcagccttgacctcccgggctcaagtggtctagccacctcagcctcctgaatagctgggactacaggcacatgccaccatgagtggctaatttttaaaaaacatactttagctgggcgcggtggctcatgcctataaacccagcactttgggaggctgaggcgggcagatcacgaggtcaagagatcgaaaccatcctggccaaccaacatggtgaaacccggtctctacttaaaatacaaaaattagctgggcatagtggcgcatgcctatagtcccagctactccagaggctgaggcaggagaatcgcttgaacccgggaggcagaggttgcagtgagctgagatcacgccactgcactctagcccagttgacagagcgacagtgtctaaaaaaaaaaaaaaaaaaaaaaaaaa

SEQ ID NO: 204155 - DNA, 3477 bp, Homo sapiens
  Payload ID: 20268
  Gene Name: zinc finger with KRAB and SCAN domains 7
  Uniprot ID: Q9P0L1
  ENST ID: ENST00000273320
  CDS Start-End: 430-2694
attgtttttggtctaacgggcagtagagtgtccggcttcggtgccgagtgccaccgcgagtgggccgagacgcggagggaggcgcggccggagctcgggtcgccgacgctggccaggaccgcgcttcttcccggcggcaggcggcgcggtccccgtgactctcagaagccgcccgatgtagagccgcttctttgtctcatacccctgaccattcgtgcgtggcacggagccgggtatctgcgggtacagcgatgaacagggcagacgtggccaggtgagcggcgctgctgaagcctggtttaacacgaaaggccacactaccatcacccctttctccaaccctgaaaaacagttcctgagacctgaactattgaccatcattttaatcggaccaactgcagctgtaacaagcttctctttggggtcacaatgaccactgcaggcaggggaaatttaggcctcatccccaggagcactgctttccagaagcaagaggggcgcctgactgtgaagcaggagccagcaaaccagacctgggggcagggcagcagtctccagaagaactatcctcctgtctgcgaaatcttccggctacacttcaggcaattgtgttaccacgagatgtctgggccgcaggaagcattgagccggcttcgggagctctgccgctggtggctcatgccagaggtgcacaccaaggagcagatcctggagctgctggtgcttgagcagttcctgagcatcctccctggggagctccggacctgggtgcagctgcatcaccctgagagtggtgaggaggctgtggctgtggtggaggatttccagagacacctcagtggatcagaggaggtttcagccccagcacagaaacaggaaatgcattttgaggagacaacagctctgggtacaacaaaggaatctcctcctacctcacccctcagtgggggctcagcccctggagcccacctggagcctccttatgacccagggacacaccacctccccagtggggacttcgctcaatgtacttctccagttcctacccttcctcaagtggggaactcaggagaccaagcaggggcaactgtacttcggatggtcaggccccaggatactgtggcatatgaggacctatctgtagactacactcagaagaaatggaaaagtctcacactcagtcagagagccctgcagtggaacatgatgccagaaaatcaccatagcatggcctccttggcaggtgagaacatgatgaagggttcagagttgactccaaagcaggaattttttaaaggatcagagtcatctaacaggacatcagggggactctttggggtggttcctggggcagcagagactggagatgtttgtgaagatactttcaaggagttagaaggacaaacctcagatgaagaagggagcagactagaaaatgatttcttggaaataacagatgaagataagaaaaaatccacaaaagacagatatgacaaatataaggaagttggggaacatccacctctgtcttccagtcctgttgaacatgaaggagttttaaagggacagaaatcctatcgatgtgatgaatgtggcaaagctttcaatcggagttctcaccttattggccatcagagaatccacactggagagaaaccctatgagtgtaatgagtgtgggaagaccttcaggcaaacctcccagctcattgttcatctcagaacccacacaggggaaaaaccctatgaatgcagtgagtgtggaaaggcctataggcacagctcccatctcattcaacaccagagactccataatggggagaaaccctataaatgtaatgaatgtgcaaaagcctttactcagagttcccgactcactgaccaccagagaacccatactggggagaaaccttatgaatgcaatgagtgtggagaggcattcattcgaagcaaaagtcttgctcgacatcaggtcctgcacactggtaagaaaccttacaaatgcaatgagtgtgggagagcattctgttccaatagaaatctcattgaccatcagagaatccacactggggagaagccttatgagtgtagtgaatgtggcaaagccttcagtcggagtaaatgtcttattcgacatcagagcctccatactggggaaaagccatacaaatgtagtgaatgtgggaaagccttcaatcagaactctcaactcattgagcatgagcgaattcatactggagaaaaaccttttgaatgtagcgagtgtggtaaggcatttggtctgagtaaatgtcttattcggcaccagagacttcacacgggtgaaaagccctataaatgcaatgagtgtggaaaatccttcaatcaaaactcacaccttattatacaccagagaattcacactggtgagaaaccctatgaatgtaatgagtgtgggaaggtattcagttatagctccagccttatggtacatcagagaacccatactggggaaaaaccctataaatgcaatgattgtgggaaagcttttagtgacagctcacagcttattgtacaccagagagtccacaccggagagaaaccttatgaatgtagtgaatgtgggaaagcctttagtcagcgttccacttttaatcaccaccagcgaactcacactggagagaagtcctcaggtctggcttggtcagtttcttaaggtatggttctctgagacagagagcaacgacctttgagttaagctgtctttataagcaggatgctcatagtggtttcccggagccagtagtcacggtggaccattccctacttgcttttccttggatcactaaggtgggagagtaggagtaacttattccagttcttacccattattaggaaggtaaggactacacatgtcattgaattgtaggtttcctttttttttctttacttttaaattttaacttttaaaatctatttcatttcttagttatgcatctcataatcagactccatgctttttaaagacagagataatatcttctctattctattctacttcctccatttcaccatttatacaaagtcattcaaaaaggctgattcatgccttcctgcctcttggctatggccctccccatctactctttaaactttaatctataacttttcatcagttttgttccctatctagaaaacattttcttctgtttgctaatctttgtccctcacaatttttgaaatccatctcatcactgaaatactttcttcttcaagtacttttttatttttcttcaacttctcttgatttgacctcagtgctttgaattcactggtgctacaatatgtaactgtggttaattgccttgtaaattttgcgtgtctgtatacttttataccaacttattgtaggctctttgaggtcaggtatgtatttctttcccatatagatagtattttgtacataccagttgttaaataaataatttttaaaatctca

SEQ ID NO: 204156 - DNA, 1757 bp, Homo sapiens
  Payload ID: 20268
  Gene Name: zinc finger with KRAB and SCAN domains 7
  Uniprot ID: Q9P0L1
  ENST ID: ENST00000341840
  CDS Start-End: 435-1265
cggccattgtttttggtctaacgggcagtagagtgtccggcttcggtgccgagtgccaccgcgagtgggccgagacgcggagggaggcgcggccggagctcgggtcgccgacgctggccaggaccgcgcttcttcccggcggcaggcggcgcggtccccgtgactctcagaagccgcccgatgtagagccgcttctttgtctcatacccctgaccattcgtgcgtggcacggagccgggtatctgcgggtacagcgatgaacagggcagacgtggccaggtgagcggcgctgctgaagcctggtttaacacgaaaggccacactaccatcacccctttctccaaccctgaaaaacagttcctgagacctgaactattgaccatcattttaatcggaccaactgcagctgtaacaagcttctctttggggtcacaatgaccactgcaggcaggggaaatttaggcctcatccccaggagcactgctttccagaagcaagaggggcgcctgactgtgaagcaggagccagcaaaccagacctgggggcagggcagcagtctccagaagaactatcctcctgtctgcgaaatcttccggctacacttcaggcaattgtgttaccacgagatgtctgggccgcaggaagcattgagccggcttcgggagctctgccgctggtggctcatgccagaggtgcacaccaaggagcagatcctggagctgctggtgcttgagcagttcctgagcatcctccctggggagctccggacctgggtgcagctgcatcaccctgagagtggtgaggaggctgtggctgtggtggaggatttccagagacacctcagtggatcagaggaggtttcagccccagcacagaaacaggaaatgcattttgaggagacaacagctctgggtacaacaaaggaatctcctcctacctcacccctcagtgggggctcagcccctggagcccacctggagcctccttatgacccagggacacaccacctccccagtggggacttcgctcaatgtacttctccagttcctacccttcctcaagtggggaactcaggagaccaagcaggggcaactgtacttcggatggtcaggccccaggatactgtggcatatgaggacctatctgtagactacactcagaagaaatggaaaagtctcacactcagtcagagagccctgcagtggaacatgatgccagaaaatcaccatagcatggcctccttgggctggagtacaatggcgtgatcttggctcacttcaatctccagctcccgagttcaagcgattctcctgcctcagactcctgagtagctgggattacaggcgcctgccaccatgcccagctaatttttgtaatatttagtagagacggggtttcaccatgttggccaggctggtttcgaactcctgacctcaggtgatccacccgcctcagcctcccaaagtggtgggattacaggcgtgagccaccacacccagcctattctttttaagtttcttgatgtagtggcagtagtcttgtgctcttcaggagagtgtcccgagttctacgtcccacatcaactgagggtgtgaacttgtggaggacttttgtctgaatctctttttcaatctctatacaatgtggcggagttgtgccacctacatgagccaatggagaagaaagctcctggtatactttaagtactcaacaatattaaatactgaatatttgtcaattgacgaagtacttcaaaa

SEQ ID NO: 204157 - DNA, 476 bp, Homo sapiens
  Payload ID: 20268
  Gene Name: zinc finger with KRAB and SCAN domains 7
  ENST ID: ENST00000419137
  CDS Start-End: 1-366
cctcctacctcacccctcagtgggggctcagcccctggagcccacctggagcctccttatgacccagggacacaccacctccccagtggggacttcgctcaatgtacttctccagttcctacccttcctcaagtggggaactcaggagaccaagcaggggcaactgtacttcggatggtcaggccccaggatactgtggcatatgaggacctatctgtagactacactcagaagaaatggaaaagtctcacactcagtcagagagccctgcagtggaacatgatgccagaaaatcaccatagcatggcctccttggatggtgaaactgggactgaggaggagttaattccaaagcatcattcctgaaaaatcagaatcatacatactttcaagagaattccacagagacattgcccaggaagtcaaaatttagaaggctcctctgaagggaaagagaagactagagaggacactgg

SEQ ID NO: 204158 - DNA, 2791 bp, Homo sapiens
  Payload ID: 20268
  Gene Name: zinc finger with KRAB and SCAN domains 7
  Uniprot ID: Q9P0L1
  ENST ID: ENST00000426540
  CDS Start-End: 408-2672
gcttccggctcggccattgtttttggtctaacgggcagtagagtgtccggcttcggtgccgagtgccaccgcgagtgggccgagacgcggagggaggcgcggccggagctcgggtcgccgacgctggccaggaccgcgcttcttcccggcggcaggcggcgcggtccccgtgactctcagaagccgcccgatgtagagccgcttctttgtctcatacccctgaccattcgtgcgtggcacggagccgggtatctgcgggtacagcgatgaacagggcagacgtggccaggccacactaccatcacccctttctccaaccctgaaaaacagttcctgagacctgaactattgaccatcattttaatcggaccaactgcagctgtaacaagcttctctttggggtcacaatgaccactgcaggcaggggaaatttaggcctcatccccaggagcactgctttccagaagcaagaggggcgcctgactgtgaagcaggagccagcaaaccagacctgggggcagggcagcagtctccagaagaactatcctcctgtctgcgaaatcttccggctacacttcaggcaattgtgttaccacgagatgtctgggccgcaggaagcattgagccggcttcgggagctctgccgctggtggctcatgccagaggtgcacaccaaggagcagatcctggagctgctggtgcttgagcagttcctgagcatcctccctggggagctccggacctgggtgcagctgcatcaccctgagagtggtgaggaggctgtggctgtggtggaggatttccagagacacctcagtggatcagaggaggtttcagccccagcacagaaacaggaaatgcattttgaggagacaacagctctgggtacaacaaaggaatctcctcctacctcacccctcagtgggggctcagcccctggagcccacctggagcctccttatgacccagggacacaccacctccccagtggggacttcgctcaatgtacttctccagttcctacccttcctcaagtggggaactcaggagaccaagcaggggcaactgtacttcggatggtcaggccccaggatactgtggcatatgaggacctatctgtagactacactcagaagaaatggaaaagtctcacactcagtcagagagccctgcagtggaacatgatgccagaaaatcaccatagcatggcctccttggcaggtgagaacatgatgaagggttcagagttgactccaaagcaggaattttttaaaggatcagagtcatctaacaggacatcagggggactctttggggtggttcctggggcagcagagactggagatgtttgtgaagatactttcaaggagttagaaggacaaacctcagatgaagaagggagcagactagaaaatgatttcttggaaataacagatgaagataagaaaaaatccacaaaagacagatatgacaaatataaggaagttggggaacatccacctctgtcttccagtcctgttgaacatgaaggagttttaaagggacagaaatcctatcgatgtgatgaatgtggcaaagctttcaatcggagttctcaccttattggccatcagagaatccacactggagagaaaccctatgagtgtaatgagtgtgggaagaccttcaggcaaacctcccagctcattgttcatctcagaacccacacaggggaaaaaccctatgaatgcagtgagtgtggaaaggcctataggcacagctcccatctcattcaacaccagagactccataatggggagaaaccctataaatgtaatgaatgtgcaaaagcctttactcagagttcccgactcactgaccaccagagaacccatactggggagaaaccttatgaatgcaatgagtgtggagaggcattcattcgaagcaaaagtcttgctcgacatcaggtcctgcacactggtaagaaaccttacaaatgcaatgagtgtgggagagcattctgttccaatagaaatctcattgaccatcagagaatccacactggggagaagccttatgagtgtagtgaatgtggcaaagccttcagtcggagtaaatgtcttattcgacatcagagcctccatactggggaaaagccatacaaatgtagtgaatgtgggaaagccttcaatcagaactctcaactcattgagcatgagcgaattcatactggagaaaaaccttttgaatgtagcgagtgtggtaaggcatttggtctgagtaaatgtcttattcggcaccagagacttcacacgggtgaaaagccctataaatgcaatgagtgtggaaaatccttcaatcaaaactcacaccttattatacaccagagaattcacactggtgagaaaccctatgaatgtaatgagtgtgggaaggtattcagttatagctccagccttatggtacatcagagaacccatactggggaaaaaccctataaatgcaatgattgtgggaaagcttttagtgacagctcacagcttattgtacaccagagagtccacaccggagagaaaccttatgaatgtagtgaatgtgggaaagcctttagtcagcgttccacttttaatcaccaccagcgaactcacactggagagaagtcctcaggtctggcttggtcagtttcttaaggtatggttctctgagacagagagcaacgacctttgagttaagctgtctttataagcaggatgctcatagtggtttcccggagccagtagtcacggtggaccattccctacttgctttt

SEQ ID NO: 204159 - DNA, 1502 bp, Homo sapiens
  Payload ID: 20268
  Gene Name: zinc finger with KRAB and SCAN domains 7
  ENST ID: ENST00000447279
  CDS Start-End: 66-1187
tctgcgggtacagcgatgaacagggcagacgtggccaggtttcagccccagcacagaaacaggaaatgcattttgaggagacaacagctctgggtacaacaaaggaatctcctcctacctcacccctcagtgggggctcagcccctggagcccacctggagcctccttatgacccagggacacaccacctccccagtggggacttcgctcaatgtacttctccagttcctacccttcctcaagtggggaactcaggagaccaagcaggggcaactgtacttcggatggtcaggccccaggatactgtggcatatgaggacctatctgtagactacactcagaagaaatggaaaagtctcacactcagtcagagagccctgcagtggaacatgatgccagaaaatcaccatagcatggcctccttgggtgagaacatgatgaagggttcagagttgactccaaagcaggaattttttaaaggatcagagtcatctaacaggacatcagggggactctttggggtggttcctggggcagcagagactggagatgtttgtgaagatactttcaaggagttagaaggacaaacctcagatgaagaagggagcagactagaaaatgatttcttggaaataacagatgaagataagaaaaaatccacaaaagacagatatgacaaatataaggaagttggggaacatccacctctgtcttccagtcctgttgaacatgaaggagttttaaagggacagaaatcctatcgatgtgatgaatgtggcaaagctttcaatcggagttctcaccttattggccatcagagaatccacactggagagaaaccctatgagtgtaatgagtgtgggaagaccttcaggcaaacctcccagctcattgttcatctcagaacccacacaggggaaaaaccctatgaatgcagtgagtgtggaaaggcctataggcacagctcccatctcattcaacaccagagactccataatggggagaaaccctataaatgtaatgaatgtgcaaaagcctttactcagagttcccgactcactgaccaccagagaacccatactggggagaaaccttatgaatgcaatgagtgtggagaggcattcattcgaagcaaaagtcttgctcgacatcaggtcctgcacactggctggagtacaatggcgtgatcttggctcacttcaatctccagctcccgagttcaagcgattctcctgcctcagactcctgagtagctgggattacaggcgcctgccaccatgcccagctaatttttgtaatatttagtagagacggggtttcaccatgttggccaggctggtttcgaactcctgacctcaggtgatccacccgcctcagcctcccaaagtggtgggattacaggcgtgagccaccacacccagcctattctttttaagtttcttgatgtagtggcagtagtcttgtgctcttcaggagagtgtcccgagttctacgtcccacat

SEQ ID NO: 204160 - DNA, 1294 bp, Homo sapiens
  Payload ID: 20268
  Gene Name: zinc finger with KRAB and SCAN domains 7
  ENST ID: ENST00000418719
  CDS Start-End: 372-980
agtagagtgtccggcttcggtgccgagtgccaccgcgagtgggccgagacgcggagggaggcgcggccggagctcgggtcgccgacgctggccaggaccgcgcttcttcccggcggcaggcggcgcggtccccgtgactctcagaagccgcccgatgtagagccgcttctttgtctcatacccctgaccattcgtgcgtggcacggagccgggtatctgcgggtacagcgatgaacagggcagacgtggccaggccacactaccatcacccctttctccaaccctgaaaaacagttcctgagacctgaactattgaccatcattttaatcggaccaactgcagctgtaacaagcttctctttggggtcacaatgaccactgcaggcaggggaaatttaggcctcatccccaggagcactgctttccagaagcaagaggggcgcctgactgtgaagcaggagccagcaaaccagacctgggggcagggcagcagtctccagaagaactatcctcctgtctgcgaaatcttccggctacacttcaggcaattgtgttaccacgagatgtctgggccgcaggaagcattgagccggcttcgggagctctgccgctggtggctcatgccagaggtgcacaccaaggagcagatcctggagctgctggtgcttgagcagttcctgagcatcctccctggggagctccggacctgggtgcagctgcatcaccctgagagtggtgaggaggctgtggctgtggtggaggatttccagagacacctcagtggatcagaggaggtttcagccccagcacagaaacaggaaatgcattttgaggagacaacagctctgggtacaacaaaggaatctcctcctacctcacccctcagtgggggctcagcccctggagcccacctggagcctccttatgacccagggacacaccacctccccagtggggacttcggatactgtggcatatgaggacctatctgtagactacactcagaagaaatggaaaagtctcacactcagtcagagagccctgcagtggaacatgatgccagaaaatcaccatagcatggcctccttgggtgagaacatgatgaagggttcagagttgactccaaagcaggaattttttaaaggatcagagtcatctaacaggacatcagggggactctttggggtggttcctggggcagcagagactggagatgtttgtgaagatactttcaaggagttagaaggacaaacctcagatgaagaagggagcagactagaaaatgatttcttgg

SEQ ID NO: 204161 - DNA, 1692 bp, Homo sapiens
  Payload ID: 20268
  Gene Name: zinc finger with KRAB and SCAN domains 7
  Uniprot ID: Q9P0L1
  ENST ID: ENST00000431636
  CDS Start-End: 408-1238
gcttccggctcggccattgtttttggtctaacgggcagtagagtgtccggcttcggtgccgagtgccaccgcgagtgggccgagacgcggagggaggcgcggccggagctcgggtcgccgacgctggccaggaccgcgcttcttcccggcggcaggcggcgcggtccccgtgactctcagaagccgcccgatgtagagccgcttctttgtctcatacccctgaccattcgtgcgtggcacggagccgggtatctgcgggtacagcgatgaacagggcagacgtggccaggccacactaccatcacccctttctccaaccctgaaaaacagttcctgagacctgaactattgaccatcattttaatcggaccaactgcagctgtaacaagcttctctttggggtcacaatgaccactgcaggcaggggaaatttaggcctcatccccaggagcactgctttccagaagcaagaggggcgcctgactgtgaagcaggagccagcaaaccagacctgggggcagggcagcagtctccagaagaactatcctcctgtctgcgaaatcttccggctacacttcaggcaattgtgttaccacgagatgtctgggccgcaggaagcattgagccggcttcgggagctctgccgctggtggctcatgccagaggtgcacaccaaggagcagatcctggagctgctggtgcttgagcagttcctgagcatcctccctggggagctccggacctgggtgcagctgcatcaccctgagagtggtgaggaggctgtggctgtggtggaggatttccagagacacctcagtggatcagaggaggtttcagccccagcacagaaacaggaaatgcattttgaggagacaacagctctgggtacaacaaaggaatctcctcctacctcacccctcagtgggggctcagcccctggagcccacctggagcctccttatgacccagggacacaccacctccccagtggggacttcgctcaatgtacttctccagttcctacccttcctcaagtggggaactcaggagaccaagcaggggcaactgtacttcggatggtcaggccccaggatactgtggcatatgaggacctatctgtagactacactcagaagaaatggaaaagtctcacactcagtcagagagccctgcagtggaacatgatgccagaaaatcaccatagcatggcctccttgggctggagtacaatggcgtgatcttggctcacttcaatctccagctcccgagttcaagcgattctcctgcctcagactcctgagtagctgggattacaggcgcctgccaccatgcccagctaatttttgtaatatttagtagagacggggtttcaccatgttggccaggctggtttcgaactcctgacctcaggtgatccacccgcctcagcctcccaaagtggtgggattacaggcgtgagccaccacacccagcctattctttttaagtttcttgatgtagtggcagtagtcttgtgctcttcaggagagtgtcccgagttctacgtcccacatcaactgagggtgtgaacttgtggaggacttttgtctgaatctctttttcaatctctatacaatgtggcggagttgtgccacctacatgagccaatggagaagaaagctcctggtatactttaagtactcaacaatatta

SEQ ID NO: 204162 - DNA, 1502 bp, Homo sapiens; identical to SEQ ID NO: 204159
  Payload ID: 20268
  Gene Name: zinc finger with KRAB and SCAN domains 7
  ENST ID: ENST00000627156
  CDS Start-End: 66-1187

SEQ ID NO: 204163 - DNA, 3477 bp, Homo sapiens; identical to SEQ ID NO: 204155
  Payload ID: 20268
  Gene Name: zinc finger with KRAB and SCAN domains 7
  Uniprot ID: Q9P0L1
  ENST ID: ENST00000626497
  CDS Start-End: 430-2694

SEQ ID NO: 204164 - DNA, 2791 bp, Homo sapiens; identical to SEQ ID NO: 204158
  Payload ID: 20268
  Gene Name: zinc finger with KRAB and SCAN domains 7
  Uniprot ID: Q9P0L1
  ENST ID: ENST00000629379
  CDS Start-End: 408-2672

SEQ ID NO: 204165 - DNA, 1692 bp, Homo sapiens; identical to SEQ ID NO: 204161
  Payload ID: 20268
  Gene Name: zinc finger with KRAB and SCAN domains 7
  Uniprot ID: Q9P0L1
  ENST ID: ENST00000625422
  CDS Start-End: 408-1238

SEQ ID NO: 204166 - DNA, 1757 bp, Homo sapiens; identical to SEQ ID NO: 204156
  Payload ID: 20268
  Gene Name: zinc finger with KRAB and SCAN domains 7
  Uniprot ID: Q9P0L1
  ENST ID: ENST00000629459
  CDS Start-End: 435-1265

SEQ ID NO: 204167 - DNA, 476 bp, Homo sapiens; identical to SEQ ID NO: 204157
  Payload ID: 20268
  Gene Name: zinc finger with KRAB and SCAN domains 7
  ENST ID: ENST00000627589
  CDS Start-End: 1-366

SEQ ID NO: 204168 - DNA, 1294 bp, Homo sapiens; identical to SEQ ID NO: 204160
  Payload ID: 20268
  Gene Name: zinc finger with KRAB and SCAN domains 7
  ENST ID: ENST00000627201
  CDS Start-End: 372-980

SEQ ID NO: 204169 - DNA, 7376 bp, Homo sapiens
  Payload ID: 20269
  Gene Name: zinc finger with KRAB and SCAN domains 8
  Uniprot ID: Q15776
  ENST ID: ENST00000330236
  CDS Start-End: 185-1921
gctttcatcgcctttactccccgaccttccttcgagtctgtttatccgttgcagcctcccttccccacgacggggcgcctctgcaactcacaaagtacccttagaaagaggccctcagaagagtcttctcttaagaagataaagaaggtagtggaaacgaacttcctgagcttttcaggctctaatggctgaagaatcaagaaagccttcagccccatccccaccagaccagactcctgaagaggatcttgtaatcgtcaaggtagaggaggatcatggttgggaccaggaatctagtctgcatgaaagtaaccctcttggccaagaagtgttccgcctgcgcttcaggcagttacgctaccaggagacactaggaccccgagaagctctgatccaactacgggccctttgccatcagtggctgaggccagatttgaacaccaaggaacagatcctggagctgctggtgctggagcagttcttgaccatcctacctgaggagctccagacactggttaaggaacatcagctagagaacggagaggaggtggtgaccctattagaggatttggaaaggcagattgatatactaggacgaccagtctcagctcgcgtacatggacatagggtactctgggaggaggtagtacattcagcatctgcaccagagcctccaaatactcagctccaatctgaggcaacccaacataaatctccagtgccccaagagtcacaagagagagccatgtctacttcccagagtcctactcgttcccagaaaggaagttctggagaccaggaaatgacagctacacttctcacagcagggttccagactttggagaagattgaagacatggctgtgtcccttattcgagaggagtggcttcttgatccatcacagaaggatctgtgtagagataacaggccagaaaatttcagaaacatgttctccctgggtggtgagaccaggagtgagaacagggaattagcttcaaaacaggtaatatctactggaatccagccacatggagagacagctgccaaatgcaacggggatgttatcaggggtcttgagcatgaagaagcccgagaccttctgggcagattagagaggcagcggggaaatcccacacaagagagacgacataaatgtgatgaatgtgggaaaagctttgctcagagctcaggccttgttcgccactggagaatccacactggggagaaaccctatcagtgtaatgtgtgtggtaaagccttcagttacaggtcagcccttctttcacatcaggatatccacaacaaagtaaaacgctatcactgtaaggagtgtggcaaagccttcagtcagaacacaggcctgattctgcaccagagaatccacactggggagaagccatatcagtgcaatcagtgtgggaaggctttcagtcagagtgcgggccttattctgcaccagagaatccacagtggagagagaccctatgaatgtaatgagtgtgggaaagctttcagtcatagctcacacctcattggacatcagagaatccacactggggagaagccctatgagtgtgatgagtgtgggaaaaccttcaggcggagctcacatcttattggtcatcagaggagccacactggggagaaaccctacaaatgcaatgagtgtgggagggccttcagtcagaagtcaggccttattgaacatcagagaatccacactggagaaagaccctataaatgtaaagaatgtgggaaagctttcaatgggaacactggtctcattcaacacctgagaattcacacaggggagaagccctaccaatgtaatgagtgtgggaaagcctttattcagaggtcaagtctcattcgacatcagagaatccacagtggtgaaaaatctgaatccataagcgtttaggaacaacatcagttagagtttgagcattattcagcattagggaaaccacacactggtgagaggtctttcagtgtactaaaaggcagaaaggtcatcacaactttagtgtcagaatctatagtggtggcaaagttaggatagctctttagtaatttgggcccagtgccttggtgaaggttgattagcttgactgtctttgaaagtatctgatggagctcctgatgacctaatgtatcctttagaaatttaaaatagcattagagcaagttgcttgtcatggcttgaagagcttaactttgtcttttgggtgagtagctataggtttgagagaggctggctactcctagttcctgtgcttcttcccatctcctgtgatccccctctcccatttattcccttgaaggtgcccttgtattcctaatctgatctaagaagctgctgtagagtcagaagtagcttctgtgtgaaacttatatttgtatgtagctttctaggaaaattttacagacacttaaagtatttatgcttaagtgtgcatttttttattctaatattccttctagtcagtggaaatttgtattcccatacaaactcagaatgctatatttttaacagcactccagcatttttcttcatgtatcaccttcactgactccattgagtcattgagcatctgtacatatccttcaccacccccagtcccagcacctgtgtcagtaaagaaagtggacacattagtaatggttatgggagtaatacagagaaagaggtgagtggagactcagcccagctgctcttgagcttggatagttatacattttggtgacttctgactctccttccacctccccactgtacactgtggtacagatagttggcactatcctagttatggcatcaggtaggagaaggagacgaagatgctttaggaagataaaaaccttacaaagaatgtatactcatcttttttggcccattacaatactgctttctcaggttcttaacagcctgtgcaaactccctgactagatggtctgtcactcctatcattaccttgcacccatctctttagatggcctcagcacctcactcgttattctccatctgtttcttgccattagtttatatgactttaatatccacagtggtaatctaataccttacctcacaggttttcattcttttgaactctggtgcactccatctgtaatccatgtctataatctaccaacaaagatgtactcttaaactcagtatcaccaggcactatatttcatctttgaggcttttgttataccaaggaatactatataaagtaatgagactggtttaaagtaacatgccagaacttacgcatccaatgtgggttgtcacttgttattcccaagtactattattccatactactatattcttccaaatatttggaacactcttagaattcccatttaataaaccatatgagaaaaccctctattactcttacactttagttttaccatttgagtagccacttattcaccagagttggaattgagaaattttgggctttccaaaattaacctttaaacttaaaattgattacattgagcctattcagaaaaaaaattatataggttctgatgaaagcttcataatttcaccctgtgactatcctgaaaagaaataataatcattttatgattgatgggccaaaaaaagcaatcaaagtcttacgtcatagaggaccaccttttggatcataaattctttccctataacattccttctctgcctctctatggcccactttgaccactaacaacatcagaattatctacatcaatttcattgagccattggtgaatgaagacacccatcacttgtcatgttggtttccaacagtcctttcgattatcctttattttcttatcctcccttctcttgtttcttttatttataagttaccattcctagtttctttgtacttgaaattttaagaaaccagaaacaagtaaatctggttgtatctagatctttgctctgtgtttcagttgtgccttaccctctgtaagatactgattcttcctggggccagtattaccttgtatgcaaatattacatatgatgggtgcattgtcagagggaaaatatatgtgtatgtacacatgtgtatgtacacacacacacacacctgccatacactttagaagaacgcttctcttctattccaataaaaagtccttttagcaatgcaacatattaacaaaattgggtgcattcagggtggtatggccatagaccagagcaacacattgaaatgtatacagatgtactagctaaagtctctttatgtgtcagtattaagagtaatatgtagccagattacttaaatctcagaattactaagcatgtggcataaatttggagaaaataatatgactagaaaaattagtgttatattgggtgtgagaaaagactgtgtcttgaaagaattatcaaagctgatacagcacatatacagaattagccaaatggtataagacaatagaaaaaggctgtggattctttgaggacatcactagaaatcattctttgtctcaagttcacactcttagcatagaatattattgactaggctgtatgacattttgagctcttaactgtgaatggcattcattaagctcctttatcctatagattctatctttatgttcatctgaaatgaactattcatcagtactttctcctcccatcctaagcttctcattttaggaactgacatgataaggtggttctttcataactctaatgccatccaacatagccctgggagaggcatgttaggtttcagagattttctccatggagcaaggtgcagtgctagaatatggtggttgattcccaaacagagcagttaactttactcttggttctgagtctccaaataataatagccgacgtttattgagcacttactatgtgcccaaccctgttatgcctttctcaggctcatgataaatgtattagtctgttctcatgctgctattaaagacatacctgacactgggtaatttataaaggaaagaggtttaatggactcagttccacatggctggggacgcctcacaatcatggtggaaggcaaggaggagcaaatcatgtcttatacatggatggcagcaggcaaagagagaacttgtgcaggggaactctttataaaaccgtccgatcttgtgagacttattcactatcacaagaacagcacaggaaagttctgcccccgtgattcaattacctcccacttggtcccacccacgacacgtgggaattgtgggagctacaattcaagatgagatttggatgggacacagccaaaccatatcaataggtattattttatcccccattttataaatgaggaaacggaggcttagttgagtgagctgaccaatatcacccagccagtatgtgataaaactgattctgacccacacagtttgattctagagcctgttctgactactgtgctaaggtgtgtataatgaacatggtaattctaaccagctttttaaaaatatgtagcgcttgtcatgagaggtactggggaaaagaatgtgcagtagagtgcaaatacattacaattactggaaaattggtggaaaatgctttttggggttacaattatatcatttttaagtgttgatgctttgtagtactacaaagctaaattgtgcaaacaaaacatatttaacagagtaattgggaggataaagcaataataaattcaaatatatttttctccaaactgccaaagggaaagtagaattgtggagggaaatgaaatatccatgtaccaggccaggcagatggtcagttaggatgacaatagtaagttcatctacagcataaaatgtgaaatgctttcatcctcattgcccatttccaactaccattctgtttctcctctattgttcatggtttttcaaacatatctttgatttttcaacccccctttttcattaatctgttcttaaaacttctttttactggctttcatacttagcattccagtgaaatgttcttagactcaccagtggacaaataataaggcctttttttattattatttcttgtcttttttgatctaatttatattttatattgttgaattctccctcctttggcttgtgggatcctttttctctaatatctgtctttctttttttagttgatctttccacccactcccctttctcctcttctccactgagaataatctccctgtcttttattcacttcattttctatactcctatttatccattttgattgtttatacctactatttgtattcgaatgacttcatttttcccaccctgtgggtcagtttgtgacttttggaattttccacaggtacctgtacaacttgatatttgaaaacaggattcatcaccatatatccccagcccccgttttctttttaaacaggcctcattgcgtaattcctttgccctgaaaagtgtcaccacctttatatttttaccccagccttggagttatctttttctgctctccattctccatgtccaaaaacttgctgtcagtccagtttttaatcagttttctccttgaggcttgatctcccatttctctcatcccattatagcttttcatgtagatctgaggcccaggttactgtaattcttttttttccaatttccttgctcccaggatccccatcttgtataaagtttctaaggtgctcctcctcaaactccatttttacaatatccgtattgtaaaattttcattttcagtaacacccagtagataatttttcaaagacgatcctcctcaaacacccatttttacaatatctctattgtaaaatttcattttcactaagtaacacccagtagataattcctatggagcagtggtgttccaaattctccattacctctatgcctaatattcatcagccttcattactctctagcatattcaccttgattcaacagattcaaacttcctacagccttctactgatgtcttacaagctcttgcctctgtgcctttctcatgctattctttttgcttagattgctctttggtcccagctcatgttcatcactcccttcaaagcctttcttcctttatatcttctgactgagctctccctgattgacatcacctcatgcgatgacctccctcattctgtgctgcctcagcacttatcttttgagtttgtactgtggtccatgtacttactaatatgttgctttgtaattattttctagcactctgtgttacagtttcatatttgtatttatttccaaaattaaattgtaagctccttgagggcaggaataataacttttacatttgtatctctgcacccccgagtgcctagtatagtgctgagcacatagtaggcgtttaataaatgcttgttgaagtattgtgtggatta

SEQ ID NO: 204170 - DNA, 2071 bp, Homo sapiens
  Payload ID: 20269
  Gene Name: zinc finger with KRAB and SCAN domains 8
  Uniprot ID: Q15776
  ENST ID: ENST00000457389
  CDS Start-End: 279-2015
gctttcatcgcctttactccccgaccttccttcgagtctgtttatccgttgcagcctcccttccccacgacggggcgcctctgcaactcacagttgaagagtctataaaccaacccccctcgccccgtgccacaactccaaaaactgaaaagataagcactgccttgatgatccgtatggggaactaagtacccttagaaagaggccctcagaagagtcttctcttaagaagataaagaaggtagtggaaacgaacttcctgagcttttcaggctctaatggctgaagaatcaagaaagccttcagccccatccccaccagaccagactcctgaagaggatcttgtaatcgtcaaggtagaggaggatcatggttgggaccaggaatctagtctgcatgaaagtaaccctcttggccaagaagtgttccgcctgcgcttcaggcagttacgctaccaggagacactaggaccccgagaagctctgatccaactacgggccctttgccatcagtggctgaggccagatttgaacaccaaggaacagatcctggagctgctggtgctggagcagttcttgaccatcctacctgaggagctccagacactggttaaggaacatcagctagagaacggagaggaggtggtgaccctattagaggatttggaaaggcagattgatatactaggacgaccagtctcagctcgcgtacatggacatagggtactctgggaggaggtagtacattcagcatctgcaccagagcctccaaatactcagctccaatctgaggcaacccaacataaatctccagtgccccaagagtcacaagagagagccatgtctacttcccagagtcctactcgttcccagaaaggaagttctggagaccaggaaatgacagctacacttctcacagcagggttccagactttggagaagattgaagacatggctgtgtcccttattcgagaggagtggcttcttgatccatcacagaaggatctgtgtagagataacaggccagaaaatttcagaaacatgttctccctgggtggtgagaccaggagtgagaacagggaattagcttcaaaacaggtaatatctactggaatccagccacatggagagacagctgccaaatgcaacggggatgttatcaggggtcttgagcatgaagaagcccgagaccttctgggcagattagagaggcagcggggaaatcccacacaagagagacgacataaatgtgatgaatgtgggaaaagctttgctcagagctcaggccttgttcgccactggagaatccacactggggagaaaccctatcagtgtaatgtgtgtggtaaagccttcagttacaggtcagcccttctttcacatcaggatatccacaacaaagtaaaacgctatcactgtaaggagtgtggcaaagccttcagtcagaacacaggcctgattctgcaccagagaatccacactggggagaagccatatcagtgcaatcagtgtgggaaggctttcagtcagagtgcgggccttattctgcaccagagaatccacagtggagagagaccctatgaatgtaatgagtgtgggaaagctttcagtcatagctcacacctcattggacatcagagaatccacactggggagaagccctatgagtgtgatgagtgtgggaaaaccttcaggcggagctcacatcttattggtcatcagaggagccacactggggagaaaccctacaaatgcaatgagtgtgggagggccttcagtcagaagtcaggccttattgaacatcagagaatccacactggagaaagaccctataaatgtaaagaatgtgggaaagctttcaatgggaacactggtctcattcaacacctgagaattcacacaggggagaagccctaccaatgtaatgagtgtgggaaagcctttattcagaggtcaagtctcattcgacatcagagaatccacagtggtgaaaaatctgaatccataagcgtttaggaacaacatcagttagagtttgagcattattcagcattagggaaaccacacactgg

SEQ ID NO: 204171 - DNA, 1052 bp, Homo sapiens
  Payload ID: 20269
  Gene Name: zinc finger with KRAB and SCAN domains 8
  Uniprot ID: Q15776
  ENST ID: ENST00000536028
  CDS Start-End: 240-716
ctttttgcgagggaaccttttatgaagctttcttcatagataatcgtgttgtggttgaagagtctataaaccaacccccctcgccccgtgccacaactccaaaaactgaaaagataagcactgccttgatgatccgtatggggaactaagtacccttagaaagaggccctcagaagagtcttctcttaagaagataaagaaggtagtggaaacgaacttcctgagcttttcaggctctaatggctgaagaatcaagaaagccttcagccccatccccaccagaccagactcctgaagaggatcttgtaatcgtcaaggtagaggaggatcatggttgggaccaggaatctagtctgcatgaaagtaaccctcttggccaagaagtgttccgcctgcgcttcaggcagttacgctaccaggagacactaggaccccgagaagctctgatccaactacgggccctttgccatcagtggctgaggccagatttgaacaccaaggaacagatcctggagctgctggtgctggagcagttcttgaccatcctacctgaggagctccagacactggttaaggaacatcagctagagaacggagaggaggtggtgaccctattagaggatttggaaaggcagattgatatactaggacgaccagtaagtagaaggaggtctcagctcgcgtacatggacatagggtactctgggaggaggtagtacattcagcatctgcaccagagcctccaaatactcagctccaatctgaggcaacccaacataaatctccagtgccccaagagtcacaagagagagccatgtctacttcccagagtcctactcgttcccagaaaggaagttctggagaccaggaaatgacagctacacttctcacagcagggttccagactttggagaagattgaagacatggctgtgtcccttattcgagaggagtggcttcttgatccatcacagaaggatctgtgtagagataacaggccagaaaatttcagaaacatgttctccctgggtggtgagaccaggagtgagaaca

SEQ ID NO: 204172 - DNA, 2057 bp, Homo sapiens
  Payload ID: 20269
  Gene Name: zinc finger with KRAB and SCAN domains 8
  Uniprot ID: Q15776
  ENST ID: ENST00000606198
  CDS Start-End: 213-689
gtggccggaggggcctggtccgagtacagctttcatcgcctttactccccgaccttccttcgagtctgtttatccgttgcagcctcccttccccacgacggggcgcctctgcaactcacaaagtacccttagaaagaggccctcagaagagtcttctcttaagaagataaagaaggtagtggaaacgaacttcctgagcttttcaggctctaatggctgaagaatcaagaaagccttcagccccatccccaccagaccagactcctgaagaggatcttgtaatcgtcaaggtagaggaggatcatggttgggaccaggaatctagtctgcatgaaagtaaccctcttggccaagaagtgttccgcctgcgcttcaggcagttacgctaccaggagacactaggaccccgagaagctctgatccaactacgggccctttgccatcagtggctgaggccagatttgaacaccaaggaacagatcctggagctgctggtgctggagcagttcttgaccatcctacctgaggagctccagacactggttaaggaacatcagctagagaacggagaggaggtggtgaccctattagaggatttggaaaggcagattgatatactaggacgaccagtaagtagaaggaggtctcagctcgcgtacatggacatagggtactctgggaggaggtagtacattcagcatctgcaccagagcctccaaatactcagctccaatctgaggcaacccaacataaatctccagtgccccaagagtcacaagagagagccatgtctacttcccagagtcctactcgttcccagaaaggaagttctggagaccaggaaatgacagctacacttctcacagcagggttccagactttggagaagattgaagacatggctgtgtcccttattcgagaggagtggcttcttgatccatcacagaaggatctgtgtagagataacaggccagaaaatttcagaaacatgttctccctgggtggtgagaccaggagtgagaacagggaattagcttcaaaacaggtaatatctactggaatccagccacatggagagacagctgccaaatgcaacggggatgttatcaggggtcttgagcatgaagaagcccgagaccttctgggcagattagagaggcagcggggaaatcccacacaagagagacgacataaatgtgatgaatgtgggaaaagctttgctcagagctcaggccttgttcgccactggagaatccacactggggagaaaccctatcagtgtaatgtgtgtggtaaagccttcagttacaggtcagcccttctttcacatcaggatatccacaacaaagtaaaacgctatcactgtaaggagtgtggcaaagccttcagtcagaacacaggcctgattctgcaccagagaatccacactggggagaagccatatcagtgcaatcagtgtgggaaggctttcagtcagagtgcgggccttattctgcaccagagaatccacagtggagagagaccctatgaatgtaatgagtgtgggaaagctttcagtcatagctcacacctcattggacatcagagaatccacactggggagaagccctatgagtgtgatgagtgtgggaaaaccttcaggcggagctcacatcttattggtcatcagaggagccacactggggagaaaccctacaaatgcaatgagtgtgggagggccttcagtcagaagtcaggccttattgaacatcagagaatccacactggagaaagaccctataaatgtaaagaatgtgggaaagctttcaatgggaacactggtctcattcaacacctgagaattcacacaggggagaagccctaccaatgtaatgagtgtgggaaagcctttattcagaggtcaagtctcattcgacatcagagaatccacagtggtgaaaaatctgaatccataagcgtttaggaacaacatcagttagagtttgagcattattcagcattagggaaaccacacactggtgagaggtctttcagtgtactaaaaggcagaaaggtca

SEQ ID NO: 204173 - DNA, 1225 bp, Homo sapiens
  Payload ID: 20270
  Gene Name: zinc finger with UFM1-specific peptidase domain
  ENST ID: ENST00000368573
  CDS Start-End: 245-1087
ttttccgtgggagtaaggaagtgcttttgaatgaggtactgagggccaaggtgttggaagttcctaattctttcctcggttaactgtgaaactctgcgtattgggaaggcctggcctcagtcatcaggccaggagaggtactggacgccgcgcacgcactcgtctgccagcgaggcccaaaggggaagcctagcggagctcagtgtggcagctgctggcctctgggccgctacttgtcaataccatgctttcctgtaatatttgtggtgaaacagtaacctcagaaccagacatgaaagctcacctaattgttcacatggaaagtgaaattatatgtccattttgcaagttgtcaggtgtgaattatgatgaaatgtgttttcatatcgaaacagctcattttgagcagaatacacttgaaagaaactttgagaggataaatacagtacaatatggaacttcagataacaagaaagacaacaccctacagtgtggaatggaagttaattcaagtattctttcaggttgtgcatctaatcatccaaaaaattcagctcaaaacctgactaaagatagtactttaaaacatgaaggcttctattcagagaacttaactgaatctagaaaattcctgaaaagtagggaaaaacagtccagcctgaccgaaataaaaggatctgtttatgaaacaacatacagtcctcctgaatgtccattctgtggaaaaatagaggagcacagtgaagatatggaaactcatgtgaaaacaaagcatgccaatcttttagacattccattggaagactgtgatcaaccactctatgattgtcctatgtgtgggctcatatgtacaaattaccatattcttcaggaacatgttgacttgcatttggaagaaaacagctttcagcaaggcatggatagagtccagtgttctggtgatctacaattggctcaccagcttcagcaagaagaagacagaaagaggagatctgaagaatcaagacaagaaatagaagaatttcagaagctgcaggaattattgaagcacttcataggtattatcagaatgctgccacagatgtgagacgggtgtggctttcttcagtggtggatcactttcattcatctttaggcgacaaaggttggggttgtggttacagaaatttccaaatgctactttcatcattattacaaaatgatgcttacaacgattgcttaaaag

SEQ ID NO: 204174 - DNA, 2195 bp, Homo sapiens
  Payload ID: 20270
  Gene Name: zinc finger with UFM1-specific peptidase domain
  Uniprot ID: Q96AP4
  ENST ID: ENST00000368576
  CDS Start-End: 245-1981
ttttccgtgggagtaaggaagtgcttttgaatgaggtactgagggccaaggtgttggaagttcctaattctttcctcggttaactgtgaaactctgcgtattgggaaggcctggcctcagtcatcaggccaggagaggtactggacgccgcgcacgcactcgtctgccagcgaggcccaaaggggaagcctagcggagctcagtgtggcagctgctggcctctgggccgctacttgtcaataccatgctttcctgtaatatttgtggtgaaacagtaacctcagaaccagacatgaaagctcacctaattgttcacatggaaagtgaaattatatgtccattttgcaagttgtcaggtgtgaattatgatgaaatgtgttttcatatcgaaacagctcattttgagcagaatacacttgaaagaaactttgagaggataaatacagtacaatatggaacttcagataacaagaaagacaacaccctacagtgtggaatggaagttaattcaagtattctttcaggttgtgcatctaatcatccaaaaaattcagctcaaaacctgactaaagatagtactttaaaacatgaaggcttctattcagagaacttaactgaatctagaaaattcctgaaaagtagggaaaaacagtccagcctgaccgaaataaaaggatctgtttatgaaacaacatacagtcctcctgaatgtccattctgtggaaaaatagaggagcacagtgaagatatggaaactcatgtgaaaacaaagcatgccaatcttttagacattccattggaagactgtgatcaaccactctatgattgtcctatgtgtgggctcatatgtacaaattaccatattcttcaggaacatgttgacttgcatttggaagaaaacagctttcagcaaggcatggatagagtccagtgttctggtgatctacaattggctcaccagcttcagcaagaagaagacagaaagaggagatctgaagaatcaagacaagaaatagaagaatttcagaagctgcagagacaatatggtttagataattctggaggatacaaacaacaacaactacgaaatatggagatagaagtaaataggggaagaatgcctccatctgaatttcataggagaaaagctgatatgatggaatcattagctcttggttttgacgatggaaaaacaaaaacttccggaattattgaagcacttcataggtattatcagaatgctgccacagatgtgagacgggtgtggctttcttcagtggtggatcactttcattcatctttaggcgacaaaggttggggttgtggttacagaaatttccaaatgctactttcatcattattacaaaatgatgcttacaacgattgcttaaaaggtatgttgattccttgcattccaaaaattcaatctatgattgaagatgcatggaaggaaggttttgatcctcagggggcctctcaacttaataacaggttacagggaacaaaggcctggattggagcatgtgaagtatatatactcctgacctccctaagggtaaagtgtcatattgttgattttcacaaatcaactggtcctttgggtacacaccctcgcttatttgaatggatattgaactattattcttcagagggagaagggagtccaaaggtagtgtgtacatctaaacctcctatctatcttcagcatcaaggtcacagtcgaactgttattggaattgaagagaaaaaaaaccgaacattatgcttactaatacttgatcctggatgtccttctcgagaaatgcagaaattattaaagcaagacatagaggctagcagtctcaagcaacttcggaaatctatgggaaatttaaaacataagcaataccagatattggcagtagagggtgctctttctctagaggagaaacttgccaggagacaagcttctcaagtctttacagccgagaagattccttgaagaatcaagcatttaagcatttcagtgattgagaacaatactttgttttctaaatgtagatattgaactccttaatacaattatgaatctgtgaattctcttaagtcttaacatataatttaatttctaaaatgcctgtgttaattgaattatacctatcatacttcattgtttggtaaattatttcaataaaatgtcttgtttttgcattgtg

SEQ ID NO: 204175 - DNA, 1798 bp, Homo sapiens
  Payload ID: 20271
  Gene Name: zinc finger, AN1-type domain 1
  Uniprot ID: Q8TCF1
  ENST ID: ENST00000220669
  CDS Start-End: 20-826
cccttacggcgccggagagatggcggagttggacatcgggcagcactgccaggtggagcattgccggcagcgagattttcttccatttgtgtgtgatgattgttcaggaatattttgccttgaacacagaagcagggagtctcatggttgtcctgaggtgactgtaatcaatgagagactgaagacagatcaacatacatcttacccatgctctttcaaagactgtgctgagagagaacttgtggcagttatatgtccttattgtgagaagaatttttgcctgagacaccgtcatcagtcagatcatgagtgtgaaaaactggaaatcccaaagcctcgaatggctgccactcagaaacttgttaaagacattattgattccaagacaggagaaacagcaagtaaacgatggaaaggtgccaaaaatagtgaaacagctgcaaaggttgcattgatgaaattaaagatgcatgctgatggcgataagtcattaccacagacagaaagaatttactttcaggttttcttacctaaagggagcaaagagaagagcaaaccaatgttcttttgccaccgatggagcattggaaaggccatagactttgccgcttctctagccaggcttaaaaatgacaataacaaatttacagctaagaaattaaggctgtgtcacattacttcaggagaagccttacccttggatcatactttggaaacctggattgctaaggaggattgtcctttatataatggtggaaatataatcttggaatatcttaatgatgaagaacaattctgtaaaaatgttgaatcttacttggaatagtcattcaaagattcaagtcagaaatcacagggaaaattctattacatgtttaagtccatttattttactacaaatactatttttgtaatttttaaaagttgctttttaacttatttccccttatgtcacattttaaattatgagttttctattagagttttttggttttaagtttaattgtgtacggatcctcaattattagcaaattcttatatttaattagctttcattagtttatgctgtagtgacaacaacaaagatgtatttcctggtgggggatgtcagctgttgattggctgtgacactgctttgtgtcatcttcttaccatgatcaaaggcaaaggaagggatctcttttgggacattgtgattgttttagcagagagagaaagagatgaaatacacttcggttttctcttaaaagatgcatgtatcatacgtgctttaagcaagtcatgtggccaagcctagcatcatggagccagaaagtatagccttgctgtctgtctacatcatgatgtataaattgatatatctacatgaattatagaaacttagaagtgatctttattcagtcttataatttttacatgaagaatcttaggcctaggaggagaaaatgattttctttctattacctaactagattggggcatatttctgataaagacccacctctagtgagattcatcttttttgtttgtgtgactatattccatagagaagaaagatgggatagctcaacttcattatataccaaagcaaaacacatgccaaatgatgactacattttaccaacatatttagacgagtattcttgactagtgtttactatctatacccccaaaactactactatatagacagaatggaaagtatttctatttgtcctttttttgttttctgttctaattgtcagggacatatgtagtggctataggtttacttaaaaggaataaatttggaatgctc

SEQ ID NO: 204176 - DNA, 550 bp, Homo sapiens
  Payload ID: 20271
  Gene Name: zinc finger, AN1-type domain 1
  ENST ID: ENST00000517450
  CDS Start-End: 392-550
cccttacggcgccggagagatggcggagttggacatcgggcagcactgccaggtggagcattgccggcagcgagattttcttccatttgtgtgtgatgattgttcaggaatattttggtgactgtaatcaatgagagactgaagacagatcaacatacatcttacccatgctctttcaaagactgtgctgagagagaacttgtggcagttatatgtccttattgtgagaagaatttttgcctgaggtgattgatcacttaggctgttcacactttgtatatctgtttaagtgctatacaaacacatgaactagtgtcactcttctgttgctcatagacaccgtcatcagtcagatcatgagtgtgaaaaactggaaatcccaaagcctcgaatggctgccactcagaaacttgttaaagacattattgattccaagacaggagaaacagcaagtaaacgatggaaaggtgccaaaaatagtgaaacagctgcaaaggttgcattgatgaaattaaagatgcatgctgatggcgataagtcattaccacag

SEQ ID NO: 204177 - DNA, 540 bp, Homo sapiens
  Payload ID: 20271
  Gene Name: zinc finger, AN1-type domain 1
  ENST ID: ENST00000523361
  CDS Start-End: 356-540
gattgtccccaagggaaaggctagaggcagatgggctcccgcctgtgggccagaccccagcctacctcgcttattctgcgtgccgtgcttcttggccagggcgatttctctctggattcgattttccagattttcttccatttgtgtgtgatgattgttcaggaatattttggtgactgtaatcaatgagagactgaagacagatcaacatacatcttacccatgctctttcaaagactgtgctgagagagaacttgtggcagttatatgtccttattgtgagaagaatttttgcctgagacaccgtcatcagtcagatcatgagtgtgaaaaactggaaatcccaaagcctcgaatggctgccactcagaaacttgttaaagacattattgattccaagacaggagaaacagcaagtaaacgatggaaaggtgccaaaaatagtgaaacagctgcaaaggttgcattgatgaaattaaagatgcatgctgatggcgataagtcattaccacagacagaaagaatttactttcaggtttt

SEQ ID NO: 204178 - DNA, 664 bp, Homo sapiens
  Payload ID: 20271
  Gene Name: zinc finger, AN1-type domain 1
  ENST ID: ENST00000520604
  CDS Start-End: 374-664
cagagaaaagttgaaaagaccgacaaagactgtgggaagttggcttttatccacactagggacggtcccaggaacgaggaactagtttgtgaatggctcaaagaaaagcaaaccgatgtccaggggtcttgtgcaggacctgaaagtattttcttccatttgtgtgtgatgattgttcaggaatattttggtgactgtaatcaatgagagactgaagacagatcaacatacatcttacccatgctctttcaaagactgtgctgagagagaacttgtggcagttatatgtccttattgtgagaagaatttttgcctgagacaccgtcatcagtcagatcatgagtgtgaaaaactggaaatcccaaagcctcgaatggctgccactcagaaacttgttaaagacattattgattccaagacaggagaaacagcaagtaaacgatggaaaggtgccaaaaatagtgaaacagctgcaaaggttgcattgatgaaattaaagatgcatgctgatggcgataagtcattaccacagacagaaagaatttactttcaggttttcttacctaaagggagcaaagagaagagcaaaccaatgttcttttgccaccgatggagcattggaaaggccatagactttgccgcttctctagccaggcttaaaaat

SEQ ID NO: 204179 - DNA, 772 bp, Homo sapiens
  Payload ID: 20271
  Gene Name: zinc finger, AN1-type domain 1
  Uniprot ID: Q8TCF1
  ENST ID: ENST00000521287
  CDS Start-End: 274-759
acggcgccggagagatggcggagttggacatcgggcagcactgccagattttcttccatttgtgtgtgatgattgttcaggaatattttggtgactgtaatcaatgagagactgaagacagatcaacatacatcttacccatgctctttcaaagactgtgctgagagagaacttgtggcagttatatgtccttattgtgagaagaatttttgcctgagacaccgtcatcagtcagatcatgagtgtgaaaaactggaaatcccaaagcctcgaatggctgccactcagaaacttgttaaagacattattgattccaagacaggagaaacagcaagtaaacgatggaaaggtgccaaaaatagtgaaacagctgcaaaggttgcattgatgaaattaaagatgcatgctgatggcgataagtcattaccacagacagaaagaatttactttcaggttttcttacctaaagggagcaaagagaagagcaaaccaatgttcttttgccaccgatggagcattggaaaggccatagactttgccgcttctctagccaggcttaaaaatgacaataacaaatttacagctaagaaattaaggctgtgtcacattacttcaggagaagccttacccttggatcatactttggaaacctggattgctaaggaggattgtcctttatataatggtggaaatataatcttggaatatcttaatgatgaagaacaattctgtaaaaatgttgaatcttacttggaatagtcattcaaagatt

SEQ ID NO: 204180 - DNA, 882 bp, Homo sapiens
  Payload ID: 20271
  Gene Name: zinc finger, AN1-type domain 1
  ENST ID: ENST00000520635
  CDS Start-End: 527-882
gaggccaccgctgggacgtcggctggccggcgccacccggccctctgggagttgagcgagagcagagaaaagttgaaaagaccgacaaagactgtgggaagttggcttttatccacactagggacggtcccaggaacgaggaactagtttgtgaatggctcaaagaaaagcaaaccgatgtccaggggtcttgtgcaggacctgaaagtattttcttccatttgtgtgtgatgattgttcaggaatattttggtgactgtaatcaatgagagactgaagacagatcaacatacatcttacccatgctctttcaaagactgtgctgagagagaacttgtggcagttatatgtccttattgtgagaagaatttttgcctgaggtgattgatcacttaggctgttcacactttgtatatctgtttaagtgctatacaaacacatgaactagtgtcactcttctgttgctcatagacaccgtcatcagtcagatcatgagtgtgaaaaactggaaatcccaaagcctcgaatggctgccactcagaaacttgttaaagacattattgattccaagacaggagaaacagcaagtaaacgatggaaaggtgccaaaaatagtgaaacagctgcaaaggttgcattgatgaaattaaagatgcatgctgatggcgataagtcattaccacagacagaaagaatttactttcaggttttcttacctaaagggagcaaagagaagagcaaaccaatgttcttttgccaccgatggagcattggaaaggccatagactttgccgcttctctagccaggcttaaaaatgacaataacaaatttacagctaagaaattaaggctgtgtcacattacttcaggagaagccttacc

SEQ ID NO: 204181 - DNA, 1006 bp, Homo sapiens
  Payload ID: 20271
  Gene Name: zinc finger, AN1-type domain 1
  ENST ID: ENST00000519464
  CDS Start-End: 7-504
ggagagatggcggagttggacatcgggcagcactgccaggtggagcattgccggcagcgagattttcttccatttgtgtgtgatgattgttcaggaatattttgccttgaacacagaagcagggagtctcatggttgtcctgaggtgactgtaatcaatgagagactgaagacagatcaacatacatcttacccatgctctttcaaagactgtgctgagagagaacttgtggcagttatatgtccttattgtgagaagaatttttgcctgagacaccgtcatcagtcagatcatgagtgtgaaaaactggaaatcccaaagcctcgaatggctgccactcagaaacttgttaaagacattattgattccaagacaggagaaacagcaagtaaacgatggaaaggtgccaaaaatagtgaaacagctgcaaaggttgcattgatgaaattaaagatgcatgctgatggcgataagtcattaccacagatgagtaatctggagtgaagtatttttaagagcactaacttgacagaaagaatttactttcaggttttcttacctaaagggagcaaagagaagagcaaaccaatgttcttttgccaccgatggagcattggaaaggccatagactttgccgcttctctagccaggcttaaaaatgacaataacaaatttacagctaagaaattaaggctgtgtcacattacttcaggagaagccttacccttggatcatactttggaaacctggattgctaaggaggattgtcctttatataatggtggaaatataatcttggaatatcttaatgatgaagaacaattctgtaaaaatgttgaatcttacttggaatagtcattcaaagattcaagtcagaaatcacagggaaaattctattacatgtttaagtccatttattttactacaaatactatttttgtaatttttaaaagttgctttttaacttatttccccttatgtcacattttaaattatgagttttcta

SEQ ID NO: 204182 - DNA, 567 bp, Homo sapiens
  Payload ID: 20271
  Gene Name: zinc finger, AN1-type domain 1
  ENST ID: ENST00000518419
  CDS Start-End: 439-567
attgccggcagcgaggtgatccgggagcttccagcccccatccccggccgcgggagaccagggctccgctttggctccgcggatggtggcggcgggtgaagggaggccacaaggctgggcagggcctgaggagcggggtgggagcgtttcttctggggctgcagtgagatcgattttcttccatttgtgtgtgatgattgttcaggaatattttgccttgaacacagaagcagggagtctcatggttgtcctgaggtgactgtaatcaatgagagactgaagacagatcaacatacatcttacccatgctctttcaaagactgtgctgagagagaacttgtggcagttatatgtccttattgtgagaagaatttttgcctgagacaccgtcatcagtcagatcatgagtgtgaaaaactggaaatcccaaagcctcgaatggctgccactcagaaacttgttaaagacattattgattccaagacaggagaaacagcaagtaaacgatggaaaggtgccaaaaatagtgaaacagctgcaaaggttgcattgatgaaattaaagatg

SEQ ID NO: 204183 - DNA, 784 bp, Homo sapiens
  Payload ID: 20271
  Gene Name: zinc finger, AN1-type domain 1
  ENST ID: ENST00000523431
  CDS Start-End: 291-467
gccggagagatggcggagttggacatcgggcagcactgccaggtggagcattgccggcagcgagattttcttccatttgtgtgtgatgattgttcaggaatattttggtgactgtaatcaatgagagactgaagacagatcaacatacatcttacccatgctctttcaaagactgtgctgagagagaacttgtggcagttatatgtccttattgtgagaagaatttttgcctgagacaccgtcatcagtcagatcatgagtgtgaaaaactggaaatcccaaagcctcgaatggctgccactcagaaacttgttaaagacattattgattccaagacaggagaaacagcaagtaaacgatggaaaggtgccaaaaatagtgaaacagctgcaaaggttgcattgatgaaattaaagatgcatgctgatggcgataagtcattaccacagatgagtaatctggagtgaagtatttttaagagcactaacttgacagaaagaatttactttcaggttttcttacctaaagggagcaaagagaagagcaaaccaatgttcttttgccaccgatggagcattggaaaggccatagactttgccgcttctctagccaggcttaaaaatgacaataacaaatttacagctaagaaattaaggctgtgtcacattacttcaggagaagccttacccttggatcatactttggaaacctggattgctaaggaggattgtcctttatataatggtggaaatataatcttggaatatcttaatgatgaagaaca

SEQ ID NO: 204184 - DNA, 698 bp, Homo sapiens
  Payload ID: 20271
  Gene Name: zinc finger, AN1-type domain 1
  Uniprot ID: Q8TCF1
  ENST ID: ENST00000519523
  CDS Start-End: 8-691
cggagagatggcggagttggacatcgggcagcactgccaggtggagcattgccggcagcgagattttcttccatttgtgtgtgatgattgttcaggaatattttgccttgaacacagaagcagggagtctcatggttgtcctgaggtgactgtaatcaatgagagactgaagacagatcaacatacatcttacccatgctctttcaaagactgtgctgagagagaacttgtggcagttatatgtccttattgtgagaagaatttttgcctgagacaccgtcatcagtcagatcatgagtgtgaaaaactggaaatcccaaagcctcgaatggctgccactcagaaacttgttaaagacattattgattccaagacaggagaaacagcaagtaaacgatggaaaggtgccaaaaatagtgaaacagctgcaaaggttgcattgatgaaattaaagatgcatgctgatggcgataagtcattaccacagacagaaagaatttactttcaggttttcttacctaaagggagcaaagagaagagcaaaccaatgttcttttgccaccgatggagcattggaaaggccatagactttgccgcttctctagccaggcttaaaaatgacaataacaaatttacagctaaggtaacatctcattataataatatttctatattaataaaggttttatgatgctcca

SEQ ID NO: 204185 - DNA, 885 bp, Homo sapiens
  Payload ID: 20271
  Gene Name: zinc finger, AN1-type domain 1
  ENST ID: ENST00000521895
  CDS Start-End: 261-641
gatggcggagttggacatcgggcagcactgccagattttcttccatttgtgtgtgatgattgttcaggaatattttggtgactgtaatcaatgagagactgaagacagatcaacatacatcttacccatgctctttcaaagactgtgctgagagagaacttgtggcagttatatgtccttattgtgagaagaatttttgcctgagacaccgtcatcagtcagatcatgagtgtgaaaaactggaaatcccaaagcctcgaatggctgccactcagaaacttgttaaagacattattgattccaagacaggagaaacagcaagtaaacgatggaaaggtgccaaaaatagtgaaacagctgcaaaggttgcattgatgaaattaaagatgcatgctgatggcgataagtcattaccacagacagaaagaatttactttcaggttttcttacctaaagggagcaaagagaagagcaaaccaatgttcttttgccaccgatggagcattggaaaggccatagactttgccgcttctctagccaggcttaaaaatgacaataacaaatttacagctaaggctgtgtcacattacttcaggagaagccttacccttggatcatactttggaaacctggattgctaaggaggattgtcctttatataatggtggaaatataatcttggaatatcttaatgatgaagaacaattctgtaaaaatgttgaatcttacttggaatagtcattcaaagattcaagtcagaaatcacagggaaaattctattacatgtttaagtccatttattttactacaaatactatttttgtaatttttaaaagttgctttttaacttatttccccttatgtcacattttaaattatgagttt

SEQ ID NO: 204186 - DNA, 1705 bp, Homo sapiens
  Payload ID: 20271
  Gene Name: zinc finger, AN1-type domain 1
  Uniprot ID: Q8TCF1
  ENST ID: ENST00000522520
  CDS Start-End: 290-775
ccggagagatggcggagttggacatcgggcagcactgccaggtggagcattgccggcagcgagattttcttccatttgtgtgtgatgattgttcaggaatattttggtgactgtaatcaatgagagactgaagacagatcaacatacatcttacccatgctctttcaaagactgtgctgagagagaacttgtggcagttatatgtccttattgtgagaagaatttttgcctgagacaccgtcatcagtcagatcatgagtgtgaaaaactggaaatcccaaagcctcgaatggctgccactcagaaacttgttaaagacattattgattccaagacaggagaaacagcaagtaaacgatggaaaggtgccaaaaatagtgaaacagctgcaaaggttgcattgatgaaattaaagatgcatgctgatggcgataagtcattaccacagacagaaagaatttactttcaggttttcttacctaaagggagcaaagagaagagcaaaccaatgttcttttgccaccgatggagcattggaaaggccatagactttgccgcttctctagccaggcttaaaaatgacaataacaaatttacagctaagaaattaaggctgtgtcacattacttcaggagaagccttacccttggatcatactttggaaacctggattgctaaggaggattgtcctttatataatggtggaaatataatcttggaatatcttaatgatgaagaacaattctgtaaaaatgttgaatcttacttggaatagtcattcaaagattcaagtcagaaatcacagggaaaattctattacatgtttaagtccatttattttactacaaatactatttttgtaatttttaaaagttgctttttaacttatttccccttatgtcacattttaaattatgagttttctattagagttttttggttttaagtttaattgtgtacggatcctcaattattagcaaattcttatatttaattagctttcattagtttatgctgtagtgacaacaacaaagatgtatttcctggtgggggatgtcagctgttgattggctgtgacactgctttgtgtcatcttcttaccatgatcaaaggcaaaggaagggatctcttttgggacattgtgattgttttagcagagagagaaagagatgaaatacacttcggttttctcttaaaagatgcatgtatcatacgtgctttaagcaagtcatgtggccaagcctagcatcatggagccagaaagtatagccttgctgtctgtctacatcatgatgtataaattgatatatctacatgaattatagaaacttagaagtgatctttattcagtcttataatttttacatgaagaatcttaggcctaggaggagaaaatgattttctttctattacctaactagattggggcatatttctgataaagacccacctctagtgagattcatcttttttgtttgtgtgactatattccatagagaagaaagatgggatagctcaacttcattatataccaaagcaaaacacatgccaaatgatgactacattttaccaacatatttagacgagtattcttgactagtgtttactatctatacccccaaaactactactatatagacagaatggaaagtatttctatttgtcctttttttgttttctgttctaattgtcagggacatatgta

SEQ ID NO: 204187 - DNA, 633 bp, Homo sapiens
  Payload ID: 20271
  Gene Name: zinc finger, AN1-type domain 1
  ENST ID: ENST00000517588
  CDS Start-End: 264-626
gggcagcactgccaggtggagcattgccggcagcgagattttcttccatttgtgtgtgatgattgttcaggaatattttggtgactgtaatcaatgagagactgaagacagatcaacatacatcttacccatgctctttcaaagactgtgctgagagagaacttgtggcagttatatgtccttattgtgagaagaatttttgcctgagacaccgtcatcagtcagatcatgagtgtgaaaaactggaaatcccaaagcctcgaatggctgccactcagaaacttgttaaagacattattgattccaagacaggagaaacagcaagtaaacgatggaaaggtgccaaaaatagtgaaacagctgcaaaggttgcattgatgaaattaaagatgcatgctgatggcgataagtcattaccacagacagaaagaatttactttcaggttttcttacctaaagggagcaaagagaagagcaaaccaatgttcttttgccaccgatggagcattggaaaggccatagactttgccgcttctctagccaggcttaaaaatgacaataacaaatttacagctaaggtaacatctcattataataatatttctatattaataaaggttttatgatgctcca

SEQ ID NO: 204188 - DNA, 614 bp, Homo sapiens
  Payload ID: 20271
  Gene Name: zinc finger, AN1-type domain 1
  ENST ID: ENST00000521742
  CDS Start-End: 456-614
ggctggccggcgccacccggccctctgggagttgagcgagagcagagaaaagttgaaaagaccgacaaagactgtgggaagttggcttttatccacactagggacggtcccaggaacgaggaactagtttgtgaatggctcaaagaaaagcaaaccgatgtccaggggtcttgtgcaggacctgaaagtattttcttccatttgtgtgtgatgattgttcaggaatattttgccttgaacacagaagcagggagtctcatggttgtcctgaggtgactgtaatcaatgagagactgaagacagatcaacatacatcttacccatgctctttcaaagactgtgctgagagagaacttgtggcagttatatgtccttattgtgagaagaatttttgcctgagacaccgtcatcagtcagatcatgagtgtgaaaaactggaaatcccaaagcctcgaatggctgccactcagaaacttgttaaagacattattgattccaagacaggagaaacagcaagtaaacgatggaaaggtgccaaaaatagtgaaacagctgcaaaggttgcattgatgaaattaaagatgcatgctgatggcgataagtcattaccacag

SEQ ID NO: 204189 - DNA, 784 bp, Homo sapiens
  Payload ID: 20271
  Gene Name: zinc finger, AN1-type domain 1
  ENST ID: ENST00000522032
  CDS Start-End: 1-186
gattccaagacaggagaaacagcaagtaaacgatggaaaggtgccaaaaatagtgaaacagctgcaaaggttgcattgatgaaattaaagatgcatgctgatggcgataagtcattaccacagggagcaaagagaagagcaaaccaatgttcttttgccaccgatggagcattggaaaggccatagactttgccgcttctctagccaggcttaaaaatgacaataacaaatttacagctaagaaattaaggctgtgtcacattacttcaggagaagccttacccttggatcatactttggaaacctggattgctaaggaggattgtcctttatataatggtggaaatataatcttggaatatcttaatgatgaagaacaattctgtaaaaatgttgaatcttacttggaatagtcattcaaagattcaagtcagaaatcacagggaaaattctattacatgtttaagtccatttattttactacaaatactatttttgtaatttttaaaagttgctttttaacttatttccccttatgtcacattttaaattatgagttttctattagagttttttggttttaagtttaattgtgtacggatcctcaattattagcaaattcttatatttaattagctttcattagtttatgctgtagtgacaacaacaaagatgtatttcctggtgggggatgtcagctgttgattggctgtgacactgctttgtgtcatcttcttaccatgatcaaaggcaaaggaagggatctcttttgggacattgtgat

SEQ ID NO: 204190 - DNA, 570 bp, Homo sapiens
  Payload ID: 20271
  Gene Name: zinc finger, AN1-type domain 1
  ENST ID: ENST00000520076
  CDS Start-End: 445-570
agatggcggagttggacatcgggcagcactgccaggtggagcattgccggcagcgaggtgatccgggagcttccagcccccatccccggccgcgggagaccagggctccgctttggctccgcggatggtggcggcgggtgaagggaggccacaaggctgggcagggcctgaggagcggggtgggagcgtttcttctggggctgcagtgagatcggttgattttcttccatttgtgtgtgatgattgttcaggaatattttggtgactgtaatcaatgagagactgaagacagatcaacatacatcttacccatgctctttcaaagactgtgctgagagagaacttgtggcagttatatgtccttattgtgagaagaatttttgcctgagacaccgtcatcagtcagatcatgagtgtgaaaaactggaaatcccaaagcctcgaatggctgccactcagaaacttgttaaagacattattgattccaagacaggagaaacagcaagtaaacgatggaaaggtgccaaaaatagtgaaacagctgcaaaggttgcattgatgaaattaaag

SEQ ID NO: 204191 - DNA, 1778 bp, Homo sapiens
  Payload ID: 20271
  Gene Name: zinc finger, AN1-type domain 1
  Uniprot ID: Q8TCF1
  ENST ID: ENST00000523096
  CDS Start-End: 20-805
cccttacggcgccggagagatggcggagttggacatcgggcagcactgccaggtggagcattgccggcagcgagattttcttccatttgtgtgtgatgattgttcaggaatattttgccttgaacacagaagcagggagtctcatggttgtcctgaggtgactgtaatcaatgagagactgaagacagatcaacatacatcttacccatgctctttcaaagactgtgctgagagagaacttgtggcagttatatgtccttattgtgagaagaatttttgcctgagacaccgtcatcagtcagatcatgagtgtgaaaaactggaaatcccaaagcctcgaatggctgccactcagaaacttgttaaagacattattgattccaagacaggagaaacagcaagtaaacgatggaaaggtgccaaaaatagtgaaacagctgcaaaggttgcattgatgaaattaaagatgcatgctgatggcgataagtcattaccacaggttttcttacctaaagggagcaaagagaagagcaaaccaatgttcttttgccaccgatggagcattggaaaggccatagactttgccgcttctctagccaggcttaaaaatgacaataacaaatttacagctaagaaattaaggctgtgtcacattacttcaggagaagccttacccttggatcatactttggaaacctggattgctaaggaggattgtcctttatataatggtggaaatataatcttggaatatcttaatgatgaagaacaattctgtaaaaatgttgaatcttacttggaatagtcattcaaagattcaagtcagaaatcacagggaaaattctattacatgtttaagtccatttattttactacaaatactatttttgtaatttttaaaagttgctttttaacttatttccccttatgtcacattttaaattatgagttttctattagagttttttggttttaagtttaattgtgtacggatcctcaattattagcaaattcttatatttaattagctttcattagtttatgctgtagtgacaacaacaaagatgtatttcctggtgggggatgtcagctgttgattggctgtgacactgctttgtgtcatcttcttaccatgatcaaaggcaaaggaagggatctcttttgggacattgtgattgttttagcagagagagaaagagatgaaatacacttcggttttctcttaaaagatgcatgtatcatacgtgctttaagcaagtcatgtggccaagcctagcatcatggagccagaaagtatagccttgctgtctgtctacatcatgatgtataaattgatatatctacatgaattatagaaacttagaagtgatctttattcagtcttataatttttacatgaagaatcttaggcctaggaggagaaaatgattttctttctattacctaactagattggggcatatttctgataaagacccacctctagtgagattcatcttttttgtttgtgtgactatattccatagagaagaaagatgggatagctcaacttcattatataccaaagcaaaacacatgccaaatgatgactacattttaccaacatatttagacgagtattcttgactagtgtttactatctatacccccaaaactactactatatagacagaatggaaagtatttctatttgtcctttttttgttttctgttctaattgtcagggacatatgtagtggctataggtttacttaaaaggaataaatttggaatgctca

SEQ ID NO: 204192 - DNA, 860 bp, Homo sapiens
  Payload ID: 20272
  Gene Name: zinc finger, AN1-type domain 2A
  Uniprot ID: Q8N6M9
  ENST ID: ENST00000316495
  CDS Start-End: 261-698
agatccgggggctgcggataaatccccgtaggccgcgggcagcgagatgttgcgttccggtgtgggtgtgggtgtgcctccgacggcgtctcggtgccagtgtcgaggttctttctgcttagctacccggagccgactacggaggaggacacctgagtttacgtctcttccatctgctgctcacctcagctgcctgggtccccgacgagagccaggtgacacttaactccgccatctgcgttttgagcactgttctcataatggagtttcctgatttggggaagcattgttcagaaaagacttgcaagcagctagattttcttccagtaaaatgtgatgcatgtaaacaagatttctgtaaagatcattttccatacgctgcacataagtgtccgtttgcattccagaaggatgttcacgtcccagtatgcccactctgtaatacccccatcccagtaaaaaagggccagataccagacgtggtggttggtgatcacattgacagagactgtgactctcaccctgggaagaagaaagagaagatttttacataccgttgctcaaaagagggctgcaagaagaaagagatgctgcagatggtatgtgcccaatgtcacggcaacttctgtatccagcacagacaccctttggaccacagctgcagacacgggagtcgccccaccatcaaagctgggtgagaagagactccgctgcgatggctcggagcacgcagtagcatgcgtggaagcagcttacactctagtgggaagtggagccccattgagcaccatcccacactggctgctgatcttgtttgttgagggagatgggactataataaaattgaatgctgaagttga

SEQ ID NO: 204193 - DNA, 852 bp, Homo sapiens
  Payload ID: 20272
  Gene Name: zinc finger, AN1-type domain 2A
  ENST ID: ENST00000397083
  CDS Start-End: 236-852
ccgtaggccgcgggcagcgagatgttgcgttccggtgtgggtgtgggtgtgcctccgacggcgtctcggtgccagtgtcgaggttctttctgcttagctacccggagccgactacggaggaggacacctgagtttacgtctcttccatctgctgctcacctcagctgcctgggtccccgacgagagccaggtgacacttaactccgccatctgcgttttgagcactgttctcataatggagtttcctgatttggggaagcattgttcagaaaagacttgcaagcagctagattttcttccagtaaaatgtgatgcatgtaaacaagatttctgtaaagatcattttccatacgctgcacataagtgtccgtttgcattccagaaggatgttcacgtcccagtatgcccactctgtaatacccccatcccagtaaaaaagggccagataccagacgtggtggttggtgatcacattgacagagactgtgactctcaccctgggaagaagaaagagaagtcactttgctctcttagatttttacataccgttgctcaaaagagggctgcaagaagaaagagatgctgcagatggtatgtgcccaatgtcacggcaacttctgtatccagcacagacaccctttggaccacagctgcagacacgggagtcgccccaccatcaaagctgggtgagaagagactccgctgcgatggctcggagcacgcagtagcatgcgtggaagcagcttacactctagtgggaagtggagccccattgagcaccatcccacactggctgctgatcttgtttgttgagggagatgggactataataaaattgaatgctgaagttga

SEQ ID NO: 204194 - DNA, 968 bp, Homo sapiens
  Payload ID: 20272
  Gene Name: zinc finger, AN1-type domain 2A
  ENST ID: ENST00000401903
  CDS Start-End: 261-803
agatccgggggctgcggataaatccccgtaggccgcgggcagcgagatgttgcgttccggtgtgggtgtgggtgtgcctccgacggcgtctcggtgccagtgtcgaggttctttctgcttagctacccggagccgactacggaggaggacacctgagtttacgtctcttccatctgctgctcacctcagctgcctgggtccccgacgagagccaggtgacacttaactccgccatctgcgttttgagcactgttctcataatggagtttcctgatttggggaagcattgttcagaaaagacttgcaagcagctagattttcttccagtaaaatgtgatgcatgtaaacaagatttctgtaaagatcattttccatacgctgcacataagtgtccgtttgcattccagaaggatgttcacgtcccagtatgcccactctgtaatacccccatcccagtaaaaaagggccagataccagacgtggtggttggtgatcacattgacagagactgtgactctcaccctgggaagaagaaagagaagatttttacataccgttgctcaaaagagggctgcaagaagaaagagatgctgcagatggtatgtgcccaatgtcacggcaacttctgtatccagcacagacaccctttggaccacagctgcagacacgggagtcgccccaccatcaaagctgggtgctcacccatgacagtctctgaatccaggccgttgggagatttcctcaccctggctcctggcgggctggcccagcgactcgggtactggttcacccggctcatgtgaacgcaatttcgtctgtgtggggtgctgcagctcttggttggtgaacacggaaaggttgctgtgtgtaactgcacagtgtgacgcgatgctccagtggtgcgacttcgtcaggatggatgaaggacacaggactgggaccccaagttacagaagcagctcgctcca

SEQ ID NO: 204195 - DNA, 433 bp, Homo sapiens
  Payload ID: 20272
  Gene Name: zinc finger, AN1-type domain 2A
  ENST ID: ENST00000574135
  CDS Start-End: 1-272
gtgatgcatgtaaacaagatttctgtaaagatcattttccatacgctgcacataagtgtccgtttgcattccagaaggatgttcacgtcccagtatgcccactctgtaatacccccatcccagtaaaaaagggccagataccagacgtggtggttggtgatcacattgacagagactgtgactctcaccctgggaagaagaaagagaagcacagacaccctttggaccacagctgcagacacgggagtcgccccaccatcaaagctgggtgagaagagactccgctgcgatggctcggagcacgcagtagcatgcgtggaagcagcttacactctagtgggaagtggagccccattgagcaccatcccacactggctgctgatcttgtttgttgagggagatgggactataataaaattgaatgctgaagttg

SEQ ID NO: 204196 - DNA, 1314 bp, Homo sapiens
  Payload ID: 20273
  Gene Name: zinc finger, AN1-type domain 2B
  Uniprot ID: Q8WV99
  ENST ID: ENST00000289528
  CDS Start-End: 196-969
gcgcgcgccgagggaggagcgggcgccgggggccggctggcgcgggggctccggtaacccgggctgggcgggggagaggaaggggcggggcagggagcccgccagagtgcggggtcgcggtgcggacttcgagcacgagccctaaagacgctcagcactcgtcgcttctcctagcagaccctgcccggcttggcgatggagtttccggacctcggcgctcactgttcggagccgagctgtcagcgcttggattttctgccgcttaagtgtgatgcctgctcaggcatcttctgcgcagaccatgtggcctacgcccagcatcactgtggatctgcttaccaaaaggatatccaggtacctgtgtgccctctctgtaatgtgcctgtgcctgtggccagaggggagccccctgaccgtgctgtgggagagcacattgacagagactgtcgctctgatccagcacagcaaaaacgtaagatcttcaccaataagtgtgaacgcgctggctgccggcagcgagaaatgatgaaactgacctgtgaacgctgtagccgaaacttctgcatcaagcaccggcatccactggaccatgattgctctggggaggggcacccaaccagccgggcaggacttgctgccatctccagagcacaagctgtggcttctacaagcactgtccccagcccaagtcaaaccatgccttcctgtacctctcccagcagagccacaacccgatctccgtcctggacagcccctccagtgattgctttgcagaatggcctgagtgaggatgaagctctgcagcgggccctggaaatgtccctggcagaaaccaaaccccaggttccaagttgtcaggaggaagaagacctagctttagcacaagcactgtcagccagtgaggcagaataccagcggcagcaggcccagagccgcagctcgaagccgtccaactgcagcctgtgctagggccctgggcttggggagggaggttcacctgaggaggactgtggccctcacacctctagggtacacagggagaggaggcccggagcaccctggagggcagagacaagcgggagtgatgtggaggtcgccctgggagcctctggaaggccttgctagtgctccagctgcatggaagagagcggctagcaactgttccctggttgggccctcagtggatgctggccaggccctactcttagccccttcatcatgtcatctcccttatgctggagctgccccgatgtggagtgggcaggaaggggcctggaaaaaataaaggatcttggcagttgataaaacgtacaa

SEQ ID NO: 204197 - DNA, 886 bp, Homo sapiens
  Payload ID: 20273
  Gene Name: zinc finger, AN1-type domain 2B
  ENST ID: ENST00000409217
  CDS Start-End: 174-848
gcgccgggggccggctggcgcgggggctccggtaacccgggctgggcgggggagaggaaggggcggggcagggagcccgccagagtgcggggtcgcggtgcggacttcgagcacgagccctaaagacgctcagcactcgtcgcttctcctagcagaccctgcccggcttggcgatggagtttccggacctcggcgctcactgttcggagccgagctgtcagcgcttggattttctgccgcttaagtgtgatgcctgctcaggcatcttctgcgcagaccatgtggcctacgcccagcatcactgtggatctgcttaccaaaaggatatccaggtacctgtgtgccctctctgtaatgtgcctgtgcctgtggccagaggggagccccctgaccgtgctgtgggagagcacattgacagagactgtcgctctgatccagcacagcaaaaacgtaagatcttcaccaataagtgtgaacgcgctggctgccggcagcgagaaatgatgaaactgacctgtgaacgctgtagccgaaacttctgcatcaagcaccggcatccactggaccatgattgctctggggaggggcacccaaccagccgggcaggacttgctgccatctccagagcacaagctgtggcttctacaagcactgtccccagcccaagtcaaaccatgccttcctgtacctctcccagcagagccacaacccgatctccgtcctggacagcccctccagtgattgctttgcagaatggcctgagtgaggatgaagctctgcagcgggccctggaaatgtccctggcagaaaccaaaccccaggttccaaggtaccttaccctcttgtgaaagagagcgcaagctgtgggcaagggcttggtctggag

SEQ ID NO: 204198 - DNA, 2021 bp, Homo sapiens
  Payload ID: 20273
  Gene Name: zinc finger, AN1-type domain 2B
  Uniprot ID: Q8WV99
  ENST ID: ENST00000409594
  CDS Start-End: 196-726
gcgcgcgccgagggaggagcgggcgccgggggccggctggcgcgggggctccggtaacccgggctgggcgggggagaggaaggggcggggcagggagcccgccagagtgcggggtcgcggtgcggacttcgagcacgagccctaaagacgctcagcactcgtcgcttctcctagcagaccctgcccggcttggcgatggagtttccggacctcggcgctcactgttcggagccgagctgtcagcgcttggattttctgccgcttaagtgtgatgcctgctcaggcatcttctgcgcagaccatgtggcctacgcccagcatcactgtggatctgcttaccaaaaggatatccaggtacctgtgtgccctctctgtaatgtgcctgtgcctgtggccagaggggagccccctgaccgtgctgtgggagagcacattgacagagactgtcgctctgatccagcacagcaaaaacgtaagatcttcaccaataagtgtgaacgcgctggctgccggcagcgagaaatgatgaaactgacctgtgaacgctgtagccgaaacttctgcatcaagcaccggcatccactggaccatgattgctctggggaggggcacccaaccagccgggcaggacttgctgccatctccagagcacaagctgtggcttctacaagcactgtccccagcccaagtcaaaccatgccttcctgtacctctcccagcaggtaggcctgcccgtttccctgctccccctttttccccttcacacctctgacctccacctcttcaatgtctgtcgtagagccacaacccgatctccgtcctggacagcccctccagtgattgctttgcagaatggcctggtgagttgggcagaggttggatggacagaaacaaacacacagagagtgaagtccaaggacgctggtcttctttctccctttgtagagtgaggatgaagctctgcagcgggccctggaaatgtccctggcagaaaccaaaccccaggttccaaggtaccttaccctcttgtgaaagagagcgcaagctgtgggcaagggcttggtctggaggcaggtaggtgggaccactctgacacaatgcaagataatcgctggcaacttggtctcaaaattaagatgaactatatgatctttgacaagttatttaacccatggagccttcatttcctctataaaacggggacaatactaatacccaccttgtagtgttgctatgaagattgagataatcctcagcagtgctcagcaccatgaggcccaacacacacagatcagatgttcaaatttcagatcttaccatcatccaacttaaactgtttctccctcccagttgtcaggaggaagaagacctagctttagcacaagcactgtcagccagtgaggcagaataccagcggcagcaggtatgaggctgggctgaagatatatgctgcagtggaagggaggaagaagtcagggatgggggttcttcctagtggtgcagagttttggaatggtggttatcgtctggttttcagtatgactccagcccatgctgagctctgaaatgagggctgtccctcatttccttgacgttgcactgtgtcttcccctccttcccctctctttgctctaggcccagagccgcagctcgaagccgtccaactgcagcctgtgctagggccctgggcttggggagggaggttcacctgaggaggactgtggccctcacacctctagggtacacagggagaggaggcccggagcaccctggagggcagagacaagcgggagtgatgtggaggtcgccctgggagcctctggaaggccttgctagtgctccagctgcatggaagagagcggctagcaactgttccctggttgggccctcagtggatgctggccaggccctactcttagccccttcatcatgtcatctcccttatgctggagctgccccgatgtggagtgggcaggaaggggcctggaaaaaataaaggatcttggcagttgataaaacgt

SEQ ID NO: 204199 - DNA, 1159 bp, Homo sapiens
  Payload ID: 20273
  Gene Name: zinc finger, AN1-type domain 2B
  Uniprot ID: Q8WV99
  ENST ID: ENST00000409206
  CDS Start-End: 81-611
cagcgcgccgcgcgcgccgagggaggagcgggcgccgggggccggctggcgcgggggctccgaccctgcccggcttggcgatggagtttccggacctcggcgctcactgttcggagccgagctgtcagcgcttggattttctgccgcttaagtgtgatgcctgctcaggcatcttctgcgcagaccatgtggcctacgcccagcatcactgtggatctgcttaccaaaaggatatccaggtacctgtgtgccctctctgtaatgtgcctgtgcctgtggccagaggggagccccctgaccgtgctgtgggagagcacattgacagagactgtcgctctgatccagcacagcaaaaacgtaagatcttcaccaataagtgtgaacgcgctggctgccggcagcgagaaatgatgaaactgacctgtgaacgctgtagccgaaacttctgcatcaagcaccggcatccactggaccatgattgctctggggaggggcacccaaccagccgggcaggacttgctgccatctccagagcacaagctgtggcttctacaagcactgtccccagcccaagtcaaaccatgccttcctgtacctctcccagcaggtaggcctgcccgtttccctgctccccctttttccccttcacacctctgacctccacctcttcaatgtctgtcgtagagccacaacccgatctccgtcctggacagcccctccagtgattgctttgcagaatggcctggtgagttgggcagaggttggatggacagaaacaaacacacagagagtgaagtccaaggacgctggtcttctttctccctttgtagagtgaggatgaagctctgcagcgggccctggaaatgtccctggcagaaaccaaaccccaggttccaaggtaccttaccctcttgtgaaagagagcgcaagctgtgggcaagggcttggtctggaggcaggtaggtgggaccactctgacacaatgcaagataatcgctggcaacttggtctcaaaattaagatgaactatatgatctttgacaagttatttaacccatggagccttcatttcctctataaaacggggacaatactaatacccaccttgtagtgttgctatgaagattgagataatcctcagcagtgctcagcaccatga

SEQ ID NO: 204200 - DNA, 569 bp, Homo sapiens
  Payload ID: 20273
  Gene Name: zinc finger, AN1-type domain 2B
  ENST ID: ENST00000409412
  CDS Start-End: 58-495
aggagcgggcgccgggggccggctggcgcgggggctccgaccctgcccggcttggcgatggagtttccggacctcggcgctcactgttcggagccgagctgtcagcgcttggattttctgccgcttaagtgtgatgcctgctcaggcatcttctgcgcagaccatgtggcctacgcccagcatcactgtggatctgcttaccaaaaggatatccaggtacctgtgtgccctctctgtaatgtgcctgtgcctgtggccagaggggagccccctgaccgtgctgtgggagagcacattgacagagactgtcgctctgatccagcacagcaaaaacgtaagatcttcaccaataagtgtgaacgcgctggctgccggcagcgagaaatgatgaaactgacctgtgaacgctgtagccgaaacttctgcatcaagcaccggcatccactggaccatgattgctctggggaggggcacccaaccagccgggcagggtaatggcagccaagtcctccacttgcttttgggaagcattcttttggaactgactcaagctctgttgttataaattg

SEQ ID NO: 204201 - DNA, 944 bp, Homo sapiens
  Payload ID: 20273
  Gene Name: zinc finger, AN1-type domain 2B
  Uniprot ID: Q8WV99
  ENST ID: ENST00000409336
  CDS Start-End: 59-832
gagcgggcgccgggggccggctggcgcgggggctccgcagaccctgcccggcttggcgatggagtttccggacctcggcgctcactgttcggagccgagctgtcagcgcttggattttctgccgcttaagtgtgatgcctgctcaggcatcttctgcgcagaccatgtggcctacgcccagcatcactgtggatctgcttaccaaaaggatatccaggtacctgtgtgccctctctgtaatgtgcctgtgcctgtggccagaggggagccccctgaccgtgctgtgggagagcacattgacagagactgtcgctctgatccagcacagcaaaaacgtaagatcttcaccaataagtgtgaacgcgctggctgccggcagcgagaaatgatgaaactgacctgtgaacgctgtagccgaaacttctgcatcaagcaccggcatccactggaccatgattgctctggggaggggcacccaaccagccgggcaggacttgctgccatctccagagcacaagctgtggcttctacaagcactgtccccagcccaagtcaaaccatgccttcctgtacctctcccagcagagccacaacccgatctccgtcctggacagcccctccagtgattgctttgcagaatggcctgagtgaggatgaagctctgcagcgggccctggaaatgtccctggcagaaaccaaaccccaggttccaagttgtcaggaggaagaagacctagctttagcacaagcactgtcagccagtgaggcagaataccagcggcagcaggcccagagccgcagctcgaagccgtccaactgcagcctgtgctagggccctgggcttggggagggaggttcacctgaggaggactgtggccctcacacctctagggtacacagggagaggaggcccggagcaccctggagggcagagacaagcggga

SEQ ID NO: 204202 - DNA, 1765 bp, Homo sapiens
  Payload ID: 20273
  Gene Name: zinc finger, AN1-type domain 2B
  ENST ID: ENST00000409097
  CDS Start-End: 58-735
aggagcgggcgccgggggccggctggcgcgggggctccgaccctgcccggcttggcgatggagtttccggacctcggcgctcactgttcggagccgagctgtcagcgcttggattttctgccgcttaagtgtgatgcctgctcaggcatcttctgcgcagaccatgtggcctacgcccagcatcactgtggatctgcttaccaaaaggatatccaggtacctgtgtgccctctctgtaatgtgcctgtgcctgtggccagaggggagccccctgaccgtgctgtgggagagcacattgacagagactgtcgctctgatccagcacagcaaaaacgtaagatcttcaccaataagtgtgaacgcgctggctgccggcagcgagaaatgatgaaactgacctgtgaacgctgtagccgaaacttctgcatcaagcaccggcatccactggaccatgattgctctggggaggggcacccaaccagccgggcaggacttgctgccatctccagagcacaagctgtggcttctacaagcactgtccccagcccaagtcaaaccatgccttcctgtacctctcccagcagagccacaacccgatctccgtcctggacagcccctccagtgattgctttgcagaatggcctggtgagttgggcagaggttggatggacagaaacaaacacacagagagtgaagtccaaggacgctggtcttctttctccctttgtagagtgaggatgaagctctgcagcgggccctggaaatgtccctggcagaaaccaaaccccaggttccaaggtaccttaccctcttgtgaaagagagcgcaagctgtgggcaagggcttggtctggaggcaggtaggtgggaccactctgacacaatgcaagataatcgctggcaacttggtctcaaaattaagatgaactatatgatctttgacaagttatttaacccatggagccttcatttcctctataaaacggggacaatactaatacccaccttgtagtgttgctatgaagattgagataatcctcagcagtgctcagcaccatgaggcccaacacacacagatcagatgttcaaatttcagatcttaccatcatccaacttaaactgtttctccctcccagttgtcaggaggaagaagacctagctttagcacaagcactgtcagccagtgaggcagaataccagcggcagcaggtatgaggctgggctgaagatatatgctgcagtggaagggaggaagaagtcagggatgggggttcttcctagtggtgcagagttttggaatggtggttatcgtctggttttcagtatgactccagcccatgctgagctctgaaatgagggctgtccctcatttccttgacgttgcactgtgtcttcccctccttcccctctctttgctctaggcccagagccgcagctcgaagccgtccaactgcagcctgtgctagggccctgggcttggggagggaggttcacctgaggaggactgtggccctcacacctctagggtacacagggagaggaggcccggagcaccctggagggcagagacaagcgggagtgatgtggaggtcgccctgggagcctctggaaggccttgctagtgctccagctgcatggaagagagcggctagcaactgttccctggttgggccctcagtggatgctggccaggccctactcttagccccttcatcatgtcatctcccttatgctggagctgccccgatgtggagtgggcaggaagg

SEQ ID NO: 204203 - DNA, 771 bp, Homo sapiens
  Payload ID: 20273
  Gene Name: zinc finger, AN1-type domain 2B
  ENST ID: ENST00000409319
  CDS Start-End: 114-551
gggcggggcagggagcccgccagagtgcggggtcgcggtgcggacttcgagcacgagccctaaagacgctcagcactcgtcgcttctcctagcagaccctgcccggcttggcgatggagtttccggacctcggcgctcactgttcggagccgagctgtcagcgcttggattttctgccgcttaagtgtgatgcctgctcaggcatcttctgcgcagaccatgtggcctacgcccagcatcactgtggatctgcttaccaaaaggatatccaggtacctgtgtgccctctctgtaatgtgcctgtgcctgtggccagaggggagccccctgaccgtgctgtgggagagcacattgacagagactgtcgctctgatccagcacagcaaaaacgtaagatcttcaccaataagtgtgaacgcgctggctgccggcagcgagaaatgatgaaactgacctgtgaacgctgtagccgaaacttctgcatcaagcaccggcatccactggaccatgattgctctggggaggggcacccaaccagccgggcagggtaatggcagccaagtcctccacttgcttttgggaagcattcttttggaactgactcaagctctgttgttataaattggggagcttcaaccctaccctgtcggctaggggagtcttttagcttccttttcaagtgcatgtttttccagaactcccctcctgacttcctgggtaaggctagttcttggagacatgccaaaaatctctcttccctacagacttgct

SEQ ID NO: 204204 - DNA, 1064 bp, Homo sapiens
  Payload ID: 20273
  Gene Name: zinc finger, AN1-type domain 2B
  ENST ID: ENST00000448496
  CDS Start-End: 107-397
gcagggagcccgccagagtgcggggtcgcggtgcggacttcgagcacgagccctaaagacgctcagcactcgtcgcttctcctagcagaccctgcccggcttggcgatggagtttccggacctcggcgctcactgttcggagccgagctgtcagcgcttggattttctgccgcttaagtgtgatgcctgctcaggcatcttctgcgcagaccatgtggcctacgcccagcatcactgtggatctgcttaccaaaaggatatccaggtacctgtgtgccctctctgtaatgtgcctgtgcctgtggccagaggggagccccctgaccgtgctgtgggagagcacattgacagagactgtcgctctgatccagcacagcaaaaacatcttcaccaataagtgtgaacgcgctggctgccggcagcgagaaatgatgaaactgacctgtgaacgctgtagccgaaacttctgcatcaagcaccggcatccactggaccatgattgctctggggaggggcacccaaccagccgggcaggacttgctgccatctccagagcacaagctgtggcttctacaagcactgtccccagcccaagtcaaaccatgccttcctgtacctctcccagcagagccacaacccgatctccgtcctggacagcccctccagtgattgctttgcagaatggcctggtgagttgggcagaggttggatggacagaaacaaacacacagagagtgaagtccaaggacgctggtcttctttctccctttgtagagtgaggatgaagctctgcagcgggccctggaaatgtccctggcagaaaccaaaccccaggttccaaggtaccttaccctcttgtgaaagagagcgcaagctgtgggcaagggcttggtctggaggcaggtaggtgggaccactctgacacaatgcaagataatcgctggcaacttggtctcaaaattaagatgaactatatgatctttgacaagttatttaacccatggagccttcatttcctctataaaacggggacaatactaatacccaccttgtagtgttgctat

SEQ ID NO: 204205 - DNA, 741 bp, Homo sapiens
  Payload ID: 20273
  Gene Name: zinc finger, AN1-type domain 2B
  ENST ID: ENST00000436556
  CDS Start-End: 592-741
aaagacacccccctcctacctccccaccccccaaatatcccctggaggcaaaattgccctggtggatcaccactgatctaactgatagtaccctctggttatatgggaaaactgctaaacttggaagcaggaggcatctaaaatgagcttgtgtccgcaattggtgggttcttggtctcactgacttcaagaatgaagccgcagaccctcgcggtgagtgttacagctcttaagatggcgcgtgtggagtctgtcccttctgatgttcagatgtgttcggagtttcttccttctggtgggttcgtggtctcgctggctcagaagtgaagctgccgaccttcacggaagcaaggaggctacattggggaatggtgactttggtttgtgcgggcactctttttaaatcgtgggatgagaacatcacccagtgagaaagcccctgggctggtaatcagcacagagagcttagtcaggactataacccatcagtcagaaaaatatttgcctgggaagagagatactaccgtgagagcttcattcacttttatcgtggtcgctggggtctctgagcagaccctgcccggcttggcgatggagtttccggacctcggcgctcactgttcggagccgagctgtcagcgcttggattttctgccgcttaagtgtgatgcctgctcaggcatcttctgcgcagaccatgtggcctacgcccagcatcactgtggatctgcttaccaaaag

SEQ ID NO: 204206 - DNA, 705 bp, Homo sapiens
  Payload ID: 20273
  Gene Name: zinc finger, AN1-type domain 2B
  ENST ID: ENST00000422255
  CDS Start-End: 64-705
gggaggagcgggcgccgggggccggctggcgcgggggctccgcagaccctgcccggcttggcgatggagtttccggacctcggcgctcactgttcggagccgagctgtcagcgcttggattttctgccgcttaagtgtgatgcctgctcaggcatcttctgcgcagaccatgtggcctacgcccagcatcactgtggatctgcttaccaaaaggatatccaggtacctgtgtgccctctctgtaatgtgcctgtgcctgtggccagaggggagccccctgaccgtgctgtgggagagcacattgacagagactgtcgctctgatccagcacagcaaaaacgtaagatcttcaccaataagtgtgaacgcgctggctgccggcagcgagaaatgatgaaactgacctgtgaacgctgtagccgaaacttctgcatcaagcaccggcatccactggaccatgattgctctggggaggggcacccaaccagccgggcaggacttgctgccatctccagagcacaagctgtggcttctacaagcactgtccccagcccaagtcaaaccatgccttcctgtacctctcccagcagagccacaacccgatctccgtcctggacagcccctccagtgattgctttgcagaatggcctggtgagttgggcagaggttggatggacagaaacaaacacacagagagtgaagtcc

SEQ ID NO: 204207 - DNA, 1199 bp, Homo sapiens
  Payload ID: 20273
  Gene Name: zinc finger, AN1-type domain 2B
  Uniprot ID: Q8WV99
  ENST ID: ENST00000444522
  CDS Start-End: 81-854
cagcgcgccgcgcgcgccgagggaggagcgggcgccgggggccggctggcgcgggggctccgaccctgcccggcttggcgatggagtttccggacctcggcgctcactgttcggagccgagctgtcagcgcttggattttctgccgcttaagtgtgatgcctgctcaggcatcttctgcgcagaccatgtggcctacgcccagcatcactgtggatctgcttaccaaaaggatatccaggtacctgtgtgccctctctgtaatgtgcctgtgcctgtggccagaggggagccccctgaccgtgctgtgggagagcacattgacagagactgtcgctctgatccagcacagcaaaaacgtaagatcttcaccaataagtgtgaacgcgctggctgccggcagcgagaaatgatgaaactgacctgtgaacgctgtagccgaaacttctgcatcaagcaccggcatccactggaccatgattgctctggggaggggcacccaaccagccgggcaggacttgctgccatctccagagcacaagctgtggcttctacaagcactgtccccagcccaagtcaaaccatgccttcctgtacctctcccagcagagccacaacccgatctccgtcctggacagcccctccagtgattgctttgcagaatggcctgagtgaggatgaagctctgcagcgggccctggaaatgtccctggcagaaaccaaaccccaggttccaagttgtcaggaggaagaagacctagctttagcacaagcactgtcagccagtgaggcagaataccagcggcagcaggcccagagccgcagctcgaagccgtccaactgcagcctgtgctagggccctgggcttggggagggaggttcacctgaggaggactgtggccctcacacctctagggtacacagggagaggaggcccggagcaccctggagggcagagacaagcgggagtgatgtggaggtcgccctgggagcctctggaaggccttgctagtgctccagctgcatggaagagagcggctagcaactgttccctggttgggccctcagtggatgctggccaggccctactcttagccccttcatcatgtcatctcccttatgctggagctgccccgatgtggagtgggcaggaaggggcctggaaaaaataaaggatcttggcagttgataaaacgtacaa

SEQ ID NO: 204208 - DNA, 484 bp, Homo sapiens
  Payload ID: 20273
  Gene Name: zinc finger, AN1-type domain 2B
  ENST ID: ENST00000425849
  CDS Start-End: 1-458
ctccagtgattgctttgcagaatggcctgagtgaggatgaagctctgcagcgggccctggaaatgtccctggcagaaaccaaaccccaggttccaaggcccagagccgcagctcgaagccgtccaactgcagcctgtgctagggccctgggcttggggagggaggttcacctgaggaggactgtggccctcacacctctagggtacacagggagaggaggcccggagcaccctggagggcagagacaagcgggagtgatgtggaggtcgccctgggagcctctggaaggccttgctagtgctccagctgcatggaagagagcggctagcaactgttccctggttgggccctcagtggatgctggccaggccctactcttagccccttcatcatgtcatctcccttatgctggagctgccccgatgtggagtgggcaggaaggggcctggaaaaaataaaggatcttggcagttgataaaacgta

SEQ ID NO: 204209 - DNA, 1070 bp, Homo sapiens
  Payload ID: 20273
  Gene Name: zinc finger, AN1-type domain 2B
  ENST ID: ENST00000621130
  CDS Start-End: 84-725
cagcgcgccgcgcgcgccgagggaggagcgggcgccgggggccggctggcgcgggggctccgcagaccctgcccggcttggcgatggagtttccggacctcggcgctcactgttcggagccgagctgtcagcgcttggattttctgccgcttaagtgtgatgcctgctcaggcatcttctgcgcagaccatgtggcctacgcccagcatcactgtggatctgcttaccaaaagatcttcaccaataagtgtgaacgcgctggctgccggcagcgagaaatgatgaaactgacctgtgaacgctgtagccgaaacttctgcatcaagcaccggcatccactggaccatgattgctctggggaggggcacccaaccagccgggcaggacttgctgccatctccagagcacaagctgtggcttctacaagcactgtccccagcccaagtcaaaccatgccttcctgtacctctcccagcagagccacaacccgatctccgtcctggacagcccctccagtgattgctttgcagaatggcctgagtgaggatgaagctctgcagcgggccctggaaatgtccctggcagaaaccaaaccccaggttccaagttgtcaggaggaagaagacctagctttagcacaagcactgtcagccagtgaggcagaataccagcggcagcaggcccagagccgcagctcgaagccgtccaactgcagcctgtgctagggccctgggcttggggagggaggttcacctgaggaggactgtggccctcacacctctagggtacacagggagaggaggcccggagcaccctggagggcagagacaagcgggagtgatgtggaggtcgccctgggagcctctggaaggccttgctagtgctccagctgcatggaagagagcggctagcaactgttccctggttgggccctcagtggatgctggccaggccctactcttagccccttcatcatgtcatctcccttatgctggagctgccccgatgtggagtgggcaggaaggggcctggaaaaaataaaggatcttggcagttgataaaacgtacaa

SEQ ID NO: 204210 - DNA, 3366 bp, Homo sapiens
  Payload ID: 20274
  Gene Name: zinc finger, AN1-type domain 3
  Uniprot ID: Q9H8U3
  ENST ID: ENST00000287218
  CDS Start-End: 448-1131
gttacggagacagcagggcccggggcttcagagcggccgctgcgactccggagccggcggggggctccggtccttccctgcgccaccgcacaggacatctctctggctggggagcggcggtgagacccgccgagggcgtctgtgtccctcctcccccgcggtcctcggtgcgtccgcacgcccctcctcctcggctccctccttcttctctccgcgcctctccgccccctccccgtctccgcaggccgagtggtgcggcccgcctccagctgaccggcctggaatcccggctccgagccccggactcgcgcccgcccgcgcgcccgctccttccccctccccccgccccgagccccccgacgccgccgccaccgcctcctcagagcggggcccgggcccagccgccgccaccgctgccgccgccgagctccgccgccgccgagcaccatgggagacgctgggagcgagcgcagcaaagcgcccagcctgccgcctcgctgtccctgcggcttctgggggtccagcaagactatgaatctctgttccaaatgctttgctgattttcaaaagaaacagccagacgatgattccgctccaagtacaagtaacagccaatcagatttgttttccgaagagaccaccagtgacaacaacaatacctcgataaccacgccaactcttagtcccagccagcagccgcttccgacagaactgaatgtaacttcaccgagtaaagaggagtgtgggccatgcacagacacagctcatgtctcattaatcacaccaacaaaaagatcctgtggtacagattcacagtctgagaatgaggcttcaccagtaaaacggccacgactacttgagaatacggaacggtccgaggaaaccagtcgatctaaacagaagagtcgacgtcggtgcttccagtgccaaaccaaactggagctggtgcagcaggaattgggatcgtgtcgctgcggttatgtgttctgtatgttacatcgcctccccgagcagcacgactgcacattcgaccacatgggccgtggccgggaggaagccatcatgaaaatggtgaagctggaccggaaagtggggcgctcctgccagcgcatcggggaggggtgctcctgaaggccaggcatggccaccacgtgacgctgttcttagttcactaatgttagccttatttaggacaaagtcagccagacaccttgtactgggcacgcgtcagactgcagccagtccgtttcctttctttagccagccatcctggtactgtagtttaggggttgatggtggttgaaattgatttctggctggttactaaggtgcctgctagccattgtataaaattaaaacatgaagaatattttttttttgagcatggctagtggatttaaaacaacacatacctgtcactgctggagtcaaacttataaaaagccttaagtggaaagtgttccagacggagactctgagttaatagaggagtagaagctggtgttaaagttcccacgacgcacatggctttgccagaaactctgtttaatgatcggcctttcacctcttcacttatccttagtcccagtagccaggatacctgatggccacgtgtgccttggccacgggaggctgctgagattggccacgtggctgggctgggtggtggcctcactctcccacagagctggaaatggggggtgggggacagattcttacggaaatttttttacctgacttgctatgaaaaaactcatcacacaagaagagaaacagtaacctcactttgaaaattagctccactcaagactagtccacgaacgagacccgccttttctacacaggatccaaggtcacgagaagcagccagagtgccccgcctccgccggctctggtctgccattcgccagtgcagggatctggcacggaccagatgtggcgaatggcagcacagcgcggtggctgggtctgcacactggcctctgcagccagatttctatattgggagttttttaaaaagacatttcatagccaacaagaatcagtagaagtgctgggagcagcagctggggaagctgccgcccacgggctctgccccttccagctggagccgcccgtgcctccaggggccaagaggatgatgtcgtggcctccattctcgtttctatgcagccccatagtccaaggacacccagtccacatctaccatatagcaagtttagtaagggaaggcagcatacgtcccagggacagtgggtttggatctgtctagaacagcggtttgtggctgtggcccagctccgagagtgatatttgctctggtaggtgagggcctgagggtacatttctccacctgtgccccctcatgttcacagaggatttcagcagctgcaactgcgcacgccaggtggggaagggtgggggtgggcctggttgccccatgttaggaaatcactaccagtcaggtggggctggggctgggtggacaggatcaggattcccttgaaagcccaggcagggtgagcagtcccagtggtcctagtgccgcatcagatccaggtgggtgagggcaggaggcccctgcggaggcagcgtggatctgcccacacataggctactggaatagtttaacccagcaactttcctttttataaaacaacaaatggttcaactctgtctgcaaattaacagctgaacacctgcaactgcaaatgttttttgatccgacgtactgaaataggaagtcatgctcttcccaccctccacccaccagagtggaacccgctgcaaaatccccagccttaattcttgcttcaggacccagaccggtgtcttgctctagggcaacccagggcagaggggccaggtctgcccagcgtttaccactgctgtcaagccacagcccttggccaccatacgggccatcctcagtgaggcagccccccataggcttccgccaagctctggtcccgaagaggctgtgcgagcccttcccggccctccccagggccccccgccccctcctctgcctgctgcgtggaggcagccatgggaaggagcccaggggagctggcctgggggagcgaagcccatgttcgcttcctgacttagagctggggggggtggggggtggggcttgttcccctgcagtatctgttctgtgaagtttgttaaatgtaaggaaagcttaaattcttgtatctttaaaagagaaaatcttatttaacccttttgtgttctagatttacttacacacatagcctagagctcagttttagttttaacattgtgaaaatattaaaagaatcttgtaactttattcttttttctcctgctgaaaaaaaaaattaaaccaatcgtatgaaa

SEQ ID NO: 204211 - DNA, 531 bp, Homo sapiens
  Payload ID: 20274
  Gene Name: zinc finger, AN1-type domain 3
  ENST ID: ENST00000373389
  CDS Start-End: 1-493
gtccagcaagactatgaatctctgttccaaatgctttgctgattttcaaaagaaacagccagacgatgattccgctccaagtacaagtaacagccaatcagatttgttttccgaagagaccaccagtgacaacaacaatacctcgataaccacgccaactcttagtcccagccagcagccgcttccgacagaactgaatgtaacttcaccgagtaaagaggagtgtgggccatgcacagacacagctcatgtctcattaatcacaccaacaaaaagatcctgtggtacagattcacagtctgagaatgaggcttcaccagtaaaacggccacgactacttgagaatacggaacggtccgaggaaaccagtcgatctaaacagaagagtcgacgtcggtgcttccagtgccaaaccaaactggagctggtgcagcaggaattgggatcgtgtcgctgcggtgtttctctggagagagatgtgtggcatttatagtctgatgccccctgaccacgttgccactcggacattct

SEQ ID NO: 204212 - DNA, 3001 bp, Homo sapiens
  Payload ID: 20274
  Gene Name: zinc finger, AN1-type domain 3
  ENST ID: ENST00000373391
  CDS Start-End: 149-766
ccggactcgcgcccgcccgcgcgcccgctccttccccctccccccgccccgagccccccgacgccgccgccaccgcctcctcagagcggggcccgggcccagccgccgccaccgctgccgccgccgagctccgccgccgccgagcaccatgggagacgctgggagcgagcgcagcaaagcgcccagcctgccgcctcgctgtccctgcggcttctgggggtccagcaagactatgaatctctgttccaaatgctttgctgattttcaaaagaaacagccagacgatgattccgctccaagtacaagtaacagccaatcagatttgttttccgaagagaccaccagtgacaacaacaatacctcgataaccacgccaactcttagtcccagccagcagccgcttccgacagaactgaatgtaacttcaccgagtaaagaggagtattcacagtctgagaatgaggcttcaccagtaaaacggccacgactacttgagaatacggaacggtccgaggaaaccagtcgatctaaacagaagagtcgacgtcggtgcttccagtgccaaaccaaactggagctggtgcagcaggaattgggatcgtgtcgctgcggttatgtgttctgtatgttacatcgcctccccgagcagcacgactgcacattcgaccacatgggccgtggccgggaggaagccatcatgaaaatggtgaagctggaccggaaagtggggcgctcctgccagcgcatcggggaggggtgctcctgaaggccaggcatggccaccacgtgacgctgttcttagttcactaatgttagccttatttaggacaaagtcagccagacaccttgtactgggcacgcgtcagactgcagccagtccgtttcctttctttagccagccatcctggtactgtagtttaggggttgatggtggttgaaattgatttctggctggttactaaggtgcctgctagccattgtataaaattaaaacatgaagaatattttttttttgagcatggctagtggatttaaaacaacacatacctgtcactgctggagtcaaacttataaaaagccttaagtggaaagtgttccagacggagactctgagttaatagaggagtagaagctggtgttaaagttcccacgacgcacatggctttgccagaaactctgtttaatgatcggcctttcacctcttcacttatccttagtcccagtagccaggatacctgatggccacgtgtgccttggccacgggaggctgctgagattggccacgtggctgggctgggtggtggcctcactctcccacagagctggaaatggggggtgggggacagattcttacggaaatttttttacctgacttgctatgaaaaaactcatcacacaagaagagaaacagtaacctcactttgaaaattagctccactcaagactagtccacgaacgagacccgccttttctacacaggatccaaggtcacgagaagcagccagagtgccccgcctccgccggctctggtctgccattcgccagtgcagggatctggcacggaccagatgtggcgaatggcagcacagcgcggtggctgggtctgcacactggcctctgcagccagatttctatattgggagttttttaaaaagacatttcatagccaacaagaatcagtagaagtgctgggagcagcagctggggaagctgccgcccacgggctctgccccttccagctggagccgcccgtgcctccaggggccaagaggatgatgtcgtggcctccattctcgtttctatgcagccccatagtccaaggacacccagtccacatctaccatatagcaagtttagtaagggaaggcagcatacgtcccagggacagtgggtttggatctgtctagaacagcggtttgtggctgtggcccagctccgagagtgatatttgctctggtaggtgagggcctgagggtacatttctccacctgtgccccctcatgttcacagaggatttcagcagctgcaactgcgcacgccaggtggggaagggtgggggtgggcctggttgccccatgttaggaaatcactaccagtcaggtggggctggggctgggtggacaggatcaggattcccttgaaagcccaggcagggtgagcagtcccagtggtcctagtgccgcatcagatccaggtgggtgagggcaggaggcccctgcggaggcagcgtggatctgcccacacataggctactggaatagtttaacccagcaactttcctttttataaaacaacaaatggttcaactctgtctgcaaattaacagctgaacacctgcaactgcaaatgttttttgatccgacgtactgaaataggaagtcatgctcttcccaccctccacccaccagagtggaacccgctgcaaaatccccagccttaattcttgcttcaggacccagaccggtgtcttgctctagggcaacccagggcagaggggccaggtctgcccagcgtttaccactgctgtcaagccacagcccttggccaccatacgggccatcctcagtgaggcagccccccataggcttccgccaagctctggtcccgaagaggctgtgcgagcccttcccggccctccccagggccccccgccccctcctctgcctgctgcgtggaggcagccatgggaaggagcccaggggagctggcctgggggagcgaagcccatgttcgcttcctgacttagagctggggggggtggggggtggggcttgttcccctgcagtatctgttctgtgaagtttgttaaatgtaaggaaagcttaaattcttgtatctttaaaagagaaaatcttatttaacccttttgtgttctagatttacttacacacatagcctagagctcagttttagttttaacattgtgaaaatattaaaagaatcttgtaactttattcttttttctcctgctgaaaaaaaaaattaaaccaatcgtatgaaa

SEQ ID NO: 204213 - DNA, 563 bp, Homo sapiens
  Payload ID: 20274
  Gene Name: zinc finger, AN1-type domain 3
  ENST ID: ENST00000474522
  CDS Start-End: 5-563
caccatgggagacgctgggagcgagcgcagcaaagcgcccagcctgccgcctcgctgtccctgcggcttctgggggtccagcaagactatgaatctctgttccaaatgctttgctgagacggggttttgccatgttgaccaggctggccttgaactcctgagctcaagtgatccacctgcctcagcctcccaaagtgctgggattacagattttcaaaagaaacagccagacgatgattccgctccaagtacaagtaacagccaatcagatttgttttccgaagagaccaccagtgacaacaacaatacctcgataaccacgccaactcttagtcccagccagcagccgcttccgacagaactgaatgtaacttcaccgagtaaagaggagtgtgggccatgcacagacacagctcatgtctcattaatcacaccaacaaaaagatcctgtggtacagattcacagtctgagaatgaggcttcaccagtaaaacggccacgactacttgagaatacggaacggtccgaggaaaccagtcgatctaaacagaagagtcgacgtc

SEQ ID NO: 204214 - DNA, 3241 bp, Homo sapiens
  Payload ID: 20275
  Gene Name: zinc finger, AN1-type domain 4
  Uniprot ID: Q86XD8
  ENST ID: ENST00000344646
  CDS Start-End: 217-2400
cggactgctgtcctccagattcaggccggtgggtctggggagcccggattggtcttggaggagcaacggctgcgcaggtgactcggtggcctcaagtgtgtacaaaactcaaaacatgaacaacaatatatattaccaatcttcaaacctggtttgcctagaactggaatacagttgcctgcgacatattttagaagaactagaaaagtcaaagtaatggataacagaaaagagcctccattcttcaatgatgataacatgggaccattttactacagacttcatttctgtgataccatggagctcttcattgaaacattaactggaacatgttttgagctgagagtttcaccttttgaaactgttatttctgtgaaagcaaaaattcgaagattggaaggtattcccatctgtcgacaacacttaatttggaataacatggaacttgaaaatgattattgcttgaatgattacaacatttcagaagggtgtaccttgaagctagttttggctatgcgtggcggacctataaatactagaagagttcctacagacgatccacttaggaagatggcagagtacttggattccagtcgagttgaggtctgggagaagacctcctgcagcaaacaagttacatttttggtataccaagaaggagatcaattgaatttctttcctgcagtagataggggagatggcactttaacaccgttatctgactcttcaaagaaaatagattttcatttgcatgtcctacggagaaaaggagaacatcgtatgagtggtggttctatgtataattcagatacagatgaggatgaagaaactgagccttcttcttctgggcaacagataattgaaaattcaataactatgaataagatgaagctgctgaaggctaagatgaagaacatgaatctcagcaaaaagcctaagaaagctgtcaagataaaacctcacccacctgtagctcctcgaccttctagtggttccactgcaccatctcgccaccgattgttaagggtcctccccaacattggtcaatcttgttcacctgcttttgggaatgcatatccgcccgaaatctccaggaatggaatttcaagtttggcaactcaactctctgctgagagatacatatcttctatcactggtgaatttcttaaggaagataatagctgggagaataacacactgtctcacttcagtagcaacgtcaaactacctcctcagataccccatttggagttgggaaatgaccaggagcttgctgactctgttctccatcttggatcatccctgcctaggcaaacaaaacattttttaggaaacttgccatctagtaatgggaacattgtcttaccttcagaagaatgtgtaaccgaacaatcacttctacctaaagtgggctcactggcttcatttgcagaaggaaatgctgatgaacagagcagcggcttagaaggtgcgtgcaaagtgaatctggagttgctactcactaatgctgacaaagggttgaaagctccagagcagcatctcaagcatgttgcaggagtgctgaatggggaatcagtagagacttcagttcttaactaccgggaattaagtcctcacaagaatagactcttgtcacctcttcgctgttctgcaccaatgtcgctacataattctctggtgaaaccagagagacagtccaaatgttttgagtttgggaagctacagccttcttcttctcagtcactggatgttcaaaacataactgattcttctttctctaggactacttgctttcaaggtgttaaagttgattcacttgggaaaagatctgatgttatttccaaagttgaggctcgggatatcacagaaatgactaacaaggcttccaaagagcctgttggttgtgtaaataatatcagttttcttgcctcactggccgggagcacaagcagaaatagattacagagcacacgtggggcaggcaggcttcagaactctggaactgggctgtctacaaacctccagcattttcaggaagaaaactttaggaaaagttctccccagttagaacatacaggagtttttttgtctacccatggtgttggaatgaatggaaataatgcagcagcagggaaaagcgtaggagaatgtactactcatcacctcccacctgtgaaagcccctcttcagacaaagaagaaaacaacaaatcattgttttctttgtggaaagaaaacaggactggctagtagctacgaatgcagatgtggaaacaacttctgtgcatctcatcgttatgcagaaactcatggctgtacctatgattacaagagtgcagggaggagatacttgcacgaggcaaatcctgtggttaatgcaccaaagcttccaaaaatctaactcttcctctacatcttactgttctgcccgggattcgtattataatgacagaagaaatgttgtttagactattatttttgttcgactctaaaagatttgccaaataacaaaagcatacaatgcatactgttggagaacaagaatgctactgtattttacatctttatttcttggtgaaacaaaagttttaaaagtagttttaacaactttacactggaatgatttagctttgttattgcatgtcttgtgttaagtgttttgtatatgatattgcagttttactaggcaaatcttcaaaagatgcactttaggaaacgaaatatttcctaaataaccaggcttccacattgtacagaatgagcagtcatgtaatgaatggctctactcagattgaccatatgggttttttctttttctttcttttattcttctccttctttttttttcagaggtgggatgggtggagattttttaaaaatcccacgtgtgaaagtttactggctttattagcaagttcctttttacttcaagctactttttataaaaaagaacatttttccagtgtggtttttaacagataatacatttcttccacattcagattagtattcggacatgaatccattctataaaacacatcgtgttcatgatagtgtatattttactactttttgaatgttaattttaaaatagaagatgtcccacttgccattaaatatagaagccaactttttaccttttgaaatatggctacatttaaaacaaaatctcacagctcggtttttcttatttgttgagtgctattaccaggagaaattcaaataaatattcaatttcatta

SEQ ID NO: 204215 - DNA, 3821 bp, Homo sapiens
  Payload ID: 20275
  Gene Name: zinc finger, AN1-type domain 4
  ENST ID: ENST00000374366
  CDS Start-End: 925-2886
gttgggccctgtcgacctgtaggcgggcgagcgagccagcggacaagactgcgggtgaggctgagctagcgagcggccggcagggggggcgcccgggctgcgagccgctgagcccagccgcgctgccgccgccggccgtcgtggggccggaatggcgcaaggccggagtggcgcgggcgctcggcgctgggctgccgggtagagtcctgtccccgcccctcgccttgcggcctgacgccggccgctgctgcccggggaccggagcggcgggccgcctttgcccaggacacacgctctggcgtttgttcctttgggcgtgacgccagcttcaacgggtacgcggctttcccgacgggtgctgatctccgagtcgctgttgtcacgcggactgctgtcctccagattcaggccggtgggtctggggagcccggattggtcttggaggagcaacggctgcgcaggtgactcggtggcctcaagtgtgtacaaaactcaaaacatgaacaacaatatatattaccaatcttcaaacctggtttgcctagaactggaatacagttgcctgcgacatattttagaagaactagaaaagtcaaagtaatggataacagaaaagagcctccattcttcaatgatgataacatgggaccattttactacagacttcatttctgtgataccatggagctcttcattgaaacattaactggaacatgttttgagctgagagtttcaccttttgaaactgttatttctgtgaaagcaaaaattcgaagattggaagacccaggagatcctactgaagtgagtggctggccgagtccagtgaccacatcagcacattcagtaatgactcttgaagcttttgtctgccctaaatgatttggtattcccatctgtcgacaacacttaatttggaataacatggaacttgaaaatgattattgcttgaatgattacaacatttcagaagggtgtaccttgaagctagttttggctatgcgtggcggacctataaatactagaagagttcctacagacgatccacttaggaagatggcagagtacttggattccagtcgagttgaggtctgggagaagacctcctgcagcaaacaagttacatttttggtataccaagaaggagatcaattgaatttctttcctgcagtagataggggagatggcactttaacaccgttatctgactcttcaaagaaaatagattttcatttgcatgtcctacggagaaaaggagaacatcgtatgagtggtggttctatgtataattcagatacagatgaggatgaagaaactgagccttcttcttctgggcaacagataattgaaaattcaataactatgaataagatgaagctgctgaaggctaagatgaagaacatgaatctcagcaaaaagcctaagaaagctgtcaagataaaacctcacccacctgtagctcctcgaccttctagtggttccactgcaccatctcgccaccgattgttaagggtcctccccaacattggtcaatcttgttcacctgcttttgggaatgcatatccgcccgaaatctccaggaatggaatttcaagtttggcaactcaactctctgctgagagatacatatcttctatcactggtgaatttcttaaggaagataatagctgggagaataacacactgtctcacttcagtagcaacgtcaaactacctcctcagataccccatttggagttgggaaatgaccaggagcttgctgactctgttctccatcttggatcatccctgcctaggcaaacaaaacattttttaggaaacttgccatctagtaatgggaacattgtcttaccttcagaagaatgtgtaaccgaacaatcacttctacctaaagtgggctcactggcttcatttgcagaaggaaatgctgatgaacagagcagcggcttagaaggtgcgtgcaaagtgaatctggagttgctactcactaatgctgacaaagggttgaaagctccagagcagcatctcaagcatgttgcaggagtgctgaatggggaatcagtagagacttcagttcttaactaccgggaattaagtcctcacaagaatagactcttgtcacctcttcgctgttctgcaccaatgtcgctacataattctctggtgaaaccagagagacagtccaaatgttttgagtttgggaagctacagccttcttcttctcagtcactggatgttcaaaacataactgattcttctttctctaggactacttgctttcaaggtgttaaagttgattcacttgggaaaagatctgatgttatttccaaagttgaggctcgggatatcacagaaatgactaacaaggcttccaaagagcctgttggttgtgtaaataatatcagttttcttgcctcactggccgggagcacaagcagaaatagattacagagcacacgtggggcaggcaggcttcagaactctggaactgggctgtctacaaacctccagcattttcaggaagaaaactttaggaaaagttctccccagttagaacatacaggagtttttttgtctacccatggtgttggaatgaatggaaataatgcagcagcagggaaaagcgtaggagaatgtactactcatcacctcccacctgtgaaagcccctcttcagacaaagaagaaaacaacaaatcattgttttctttgtggaaagaaaacaggactggctagtagctacgaatgcagatgtggaaacaacttctgtgcatctcatcgttatgcagaaactcatggctgtacctatgattacaagagtgcagggaggagatacttgcacgaggcaaatcctgtggttaatgcaccaaagcttccaaaaatctaactcttcctctacatcttactgttctgcccgggattcgtattataatgacagaagaaatgttgtttagactattatttttgttcgactctaaaagatttgccaaataacaaaagcatacaatgcatactgttggagaacaagaatgctactgtattttacatctttatttcttggtgaaacaaaagttttaaaagtagttttaacaactttacactggaatgatttagctttgttattgcatgtcttgtgttaagtgttttgtatatgatattgcagttttactaggcaaatcttcaaaagatgcactttaggaaacgaaatatttcctaaataaccaggcttccacattgtacagaatgagcagtcatgtaatgaatggctctactcagattgaccatatgggttttttctttttctttcttttattcttctccttctttttttttcagaggtgggatgggtggagattttttaaaaatcccacgtgtgaaagtttactggctttattagcaagttcctttttacttcaagctactttttataaaaaagaacatttttccagtgtggtttttaacagataatacatttcttccacattcagattagtattcggacatgaatccattctataaaacacatcgtgttcatgatagtgtatattttactactttttgaatgttaattttaaaatagaagatgtcccacttgccattaaatatagaagccaactttttaccttttgaaatatggctacatttaaaacaaaatctcacagctcggtttttcttatttgttgagtgctattaccaggagaaattcaaataaatattcaatttcattatgaatttcattatttatttataatagtttttcttttataaataatttttcttttataaaactatttaattaaatgagtgatttattttacgtgg

SEQ ID NO: 204216 - DNA, 2283 bp, Homo sapiens
  Payload ID: 20275
  Gene Name: zinc finger, AN1-type domain 4
  ENST ID: ENST00000374371
  CDS Start-End: 621-1295
gtgaagttgctcgccgggtcgttgggccctgtcgacctgtaggcgggcgagcgagccagcggacaagactgcgggtgaggctgagctagcgagcggccggcagggggggcgcccgggctgcgagccgctgagcccagccgcgctgccgccgccggccgtcgtggggccggaatggcgcaaggccggagtggcgcgggcgctcggcgctgggctgccgggtagagtcctgtccccgcccctcgccttgcggcctgacgccggccgctgctgcccggggaccggagcggcgggccgcctttgcccaggacacacgctctggcgtttgttcctttgggcgtgacgccagcttcaacgggtacgcggctttcccgacgggtgctgatctccgagtcgctgttgtcacgcggactgctgtcctccagattcaggccggtgggtctggggagcccggattggtcttggaggagcaacggctgcgcaggtgactcggtggcctcaagtgtgtacaaaactcaaaacatgaacaacaatatatattaccaatcttcaaacctggtttgcctagaactggaatacagttgcctgcgacatattttagaagaactagaaaagtcaaagtaatggataacagaaaagagcctccattcttcaatgatgataacatgggaccattttactacagacttcatttctgtgataccatggagctcttcattgaaacattaactggaacatgttttgagctgagagtttcaccttttgaaactgttatttctgtgaaagcaaaaattcgaagattggaaggtattcccatctgtcgacaacacttaatttggaataacatggaacttgaaaatgattattgcttgaatgattacaacatttcagaagggtgtaccttgaagctagttttggctatgcgtggcggacctataaatactagaagagttcctacagacgatccacttaggaagatggcagagtacttggattccagtcgagttgaggtctgggagaagacctcctgcagcaaacaagttacatttttggtataccaagaaggagatcaattgaatttctttcctgcagtagataggggagatggcactttaacaccgttatctgactcttcaaagaaaatagattttcatttgcatgtcctacggagaaaaggagaacatcgtatgaggagaatgtactactcatcacctcccacctgtgaaagcccctcttcagacaaagaagaaaacaacaaatcattgttttctttgtggaaagaaaacaggactggctagtagctacgaatgcagatgtggaaacaacttctgtgcatctcatcgttatgcagaaactcatggctgtacctatgattacaagagtgcagggaggagatacttgcacgaggcaaatcctgtggttaatgcaccaaagcttccaaaaatctaactcttcctctacatcttactgttctgcccgggattcgtattataatgacagaagaaatgttgtttagactattatttttgttcgactctaaaagatttgccaaataacaaaagcatacaatgcatactgttggagaacaagaatgctactgtattttacatctttatttcttggtgaaacaaaagttttaaaagtagttttaacaactttacactggaatgatttagctttgttattgcatgtcttgtgttaagtgttttgtatatgatattgcagttttactaggcaaatcttcaaaagatgcactttaggaaacgaaatatttcctaaataaccaggcttccacattgtacagaatgagcagtcatgtaatgaatggctctactcagattgaccatatgggttttttctttttctttcttttattcttctccttctttttttttcagaggtgggatgggtggagattttttaaaaatcccacgtgtgaaagtttactggctttattagcaagttcctttttacttcaagctactttttataaaaaagaacatttttccagtgtggtttttaacagataatacatttcttccacattcagattagtattcggacatgaatccattctataaaacacatcgtgttcatgatagtgtatattttactactttttgaatgttaattttaaaatagaagatgtcccacttgccattaaatatagaagccaactttttaccttttgaaatatggctacatttaaaacaaaatctcacagctcggtttttcttatttgttgagtgctattaccaggagaaattcaaataaatattcaatttc

SEQ ID NO: 204217 - DNA, 1209 bp, Homo sapiens
  Payload ID: 20275
  Gene Name: zinc finger, AN1-type domain 4
  ENST ID: ENST00000465407
  CDS Start-End: 202-837
agtgccttccgtgaagttgctcgccgggtcgttgggccctgtcgacctgtaggcgggcgagcgagccagcggacaagactgcgggtacaaaactcaaaacatgaacaacaatatatattaccaatcttcaaacctggtttgcctagaactggaatacagttgcctgcgacatattttagaagaactagaaaagtcaaagtaatggataacagaaaagagcctccattcttcaatgatgataacatgggaccattttactacagacttcatttctgtgataccatggagctcttcattgaaacattaactggaacatgttttgagctgagagtttcaccttttgaaactgttatttctgtgaaagcaaaaattcgaagattggaaggtattcccatctgtcgacaacacttaatttggaataacatggaacttgaaaatgattattgcttgaatgattacaacatttcagaagggtgtaccttgaagctagttttggctatgcgtggcggacctataaatactagaagagttcctacagacgatccacttaggaagatggcagagtacttggattccagtcgagttgaggtctgggagaagacctcctgcagcaaacaagttacatttttggtataccaagaaggagatcaattgaatttctttcctgcagtagataggggagatggcactttaacaccgttatctgactcttcaaagaaaatagattttcatttgcatgtcctacggagaaaaggagaacatcgtatgagtgagaatctcctcaggatgactaaaaatctgtacttctctcccgtgccaaatttaaaaaaattctgattcatggaaatctcatcagcctgttgtctgggttgcacaattatcagccttggctgataaaatgaaatcagacattctcatggaaatggattttgcctctttgggaatgatatgtggtggttctatgtataattcagatacagatgaggatgaagaaactgagccttcttcttctgggcaacagataattgaaaattcaataactatgaataagatgaagctgctgaaggctaagatgaagaacatgaatctcagcaaaaaggtgaagctgttggcatttgaccaggcttatctctagcttacccctgcagagcactcagcaatgaggtctgttggtcattgtgaaaaaattataaagtattattcatttca

SEQ ID NO: 204218 - DNA, 689 bp, Homo sapiens
  Payload ID: 20275
  Gene Name: zinc finger, AN1-type domain 4
  ENST ID: ENST00000495747
  CDS Start-End: 144-425
gcaggtgactcggtggcctcaagtgtgtacaaaactcaaaacatgaacaacaatatatattaccaatcttcaaacctggtttgcctagaactggaatacagttgcctgcgacatattttagaagaactagaaaagtcaaagtaatggataacagaaaagagcctccattcttcaatgatgataacatgggaccattttactacagacttcatttctgtgataccatggagctcttcattgaaacattaactggaacatgttttgagctgagagtttcaccttttgaaactgttatttctgtgaaagcaaaaattcgaagattggaagacccaggagatcctactgaagtgagtggctggccgagtccagtgaccacatcagcacattcagtaatgactcttgaagcttttgtctgccctaaatgatttggtattcccatctgtcgacaacacttaatttggaataacatggaacttgaaaatgattattgcttgaatgattacaacatttcagaagggtgtaccttgaagctagttttggctatgcgtggcggacctataaatactagaagagttcctacagacgatccacttaggaagatggcagagtacttggattccagtcgagttgaggtctgggagaagacctcctgcagcaaacaagttacatttttggtataccaagaagga

SEQ ID NO: 204219 - DNA, 5310 bp, Homo sapiens
  Payload ID: 20276
  Gene Name: zinc finger, AN1-type domain 5
  Uniprot ID: O76080
  ENST ID: ENST00000237937
  CDS Start-End: 141-782
aggccgcggatggcggcgtccgggggaggggagcccgcccgccagcccaggaagcacaaagacggaggcgtcatcctgtcgtcgtggcccgagacctggctcccggcgtccctggctcgctccacagcacgcagaaaaatatggctcaggagactaaccagaccccggggcccatgctgtgtagcacaggatgtggcttttatggaaatcctaggacaaatggaatgtgttcagtttgctacaaagaacatcttcagaggcagcaaaatagtggcagaatgagcccaatgggaacagctagtggttccaacagtcctacctcagattctgcatctgtacagagagcagacactagcttaaacaactgtgaaggtgctgctggcagcacatctgaaaaatcaagaaatgtgcctgtggctgccttgcctgtaactcagcaaatgacagaaatgagcatttcaagagaggacaaaataactaccccgaaaacagaggtgtcagagccagttgtcactcagcccagtccatcagtttctcagcccagtacttctcagagtgaagaaaaagctcctgaattgcccaaaccaaagaaaaacagatgtttcatgtgcagaaagaaagttggtcttacagggtttgactgccgatgtggaaatttgttttgtggacttcaccgttactctgacaagcacaactgtccgtatgattacaaagcagaagctgcagcaaaaatcagaaaagagaatccagttgttgtggctgaaaaaattcagagaatataaattacttcttgtgaagagactgaaactttgtttttattttaatatatcgtaggaaaacattaaagagcagatgcatggccatttttctttgatgttctccagagttttacattacacttgtctgtcttataattgatattttaggatgtttgggtgtttgttacaggcagaattggatagatacagccctacaaatgtatatgccctcccctgaaaaaaattggatgaaaatctgcacagcaaagtgaaacacacagataataggaacaaaatgtagttcccatgtgccaaacaaaataaatgaaatctctgcatgtttgcagcatatctgccttttgggaatgtaatcaaggtataatctttggctagtgttatgtgcctgtatttttttaaaatggtacaccagaaaaggactggcagtctacttctaccatagttaaacttcaccctctttaatttcacaacatattctttggaagcaggaagaaatgctcataaagaggatcagaccttctttcccgtgaaaccagtatttggcgccatatataagcctggttaaattggtcatctaaagctgtcaaataagacattctgtgaaaggtaaacatcgaaactggttataagtaaaaccatcaagccaacaacagggtcttgagataacctttgaagcttattgtactggcctgcaccagaagatgtctgcattactcattgctaaaaatgtgtagcacagaactgcactaggattaatttgtttacaagaagaaatttaaactctacgtttggttttcacatacagcagctctattgaataacatgcatctgaattttaagttgcaaaggtatctgaataatttttcatgtgcatcttttgtcgaatgttttggttcaagaaagaatgtttaaagctttttaaaagacttcagttcttaatgtaactgtacccttctgcatggaaaatcataaccaacatggctgcagtagacttcttagtggtatccagcaccacttgcagagggctgctttatcatattgtacttgggtgtaggactctagtgttcttgggtgtattgcatgggctgcattatctacagcattgtacaataacaactagaaaaggcagtatacttcactgatgcttgtctggtaataatcacttctgtgttataatggaaggttttttgtgatgtatgaaacttgtgttttttatatataaatgagtatagttagtgttgtggtaatgcctgttttcatctgtaaatagttaagtatgtacacgaggcactacttctgatttattgcaatgttcagtcctagtttttacttttattcttaaagcattcagttttgctttcaattttatgtaccttagttctgagttagacctgcagatgtgtacagatagttcatatttatgtattgcacataatcatgctattcagcattgatgctatattgtattatgtaaataataaaagccatgtacagagggaaacttcacttgttcattgggtttttaagccatagttggagtcctaaagggggaaaattagaaaatgttactttacatggctatataattttttttcctttgccatcgctgaacttgttcaagtgataatcaagagatattagaagcatttgcaggtatgatacctgataggcagtttatttttgaagaattcaataggcacctttgggattaaaacaattttaaaatttgagaaagatgaaatttgaacaattatggcctacctcgcttctccatgttgtaaaagatgatgttttatgacaattctgaagaagaaagtaggtatgacttagtttacaaaaagagttctgttttatttctgttttgggtttggctctaatacagagattcacccatggacttggtctctgtagcgtttatgccagatcataaagaacaaggggtgacaggtacatgttgactttacctggggtaaatgattaccagagtgcaactgttgcttctctgtgatggagtttggggtggaaataccctagttttatctgtcagttctttgcatgctgctacttttgcttcaagttagggaggtacatatgtatgtcaaagttcctatactgacatagggtagtatttctctgaatatgaaaagtcacaattgagttgaaaatttagaagttgaagatttagaagggcaacttaatttttcaagttaaaaatggaagtaagagtggtatagagaaggtaagatgagccctcggactccatcactctgaaggtctgagtagtagcaagagatagatttttgtttggccaggctgcagtgcaatggcgtaatcttggctcactgcaacctctgcctcctgggttcaagtgattctcctgcctctgcctcctaagtagctgggatcacaggcaccagccaccacgcccagctaatttttgtatttttaatagagacagtttctccatgttggtcaggctggtcttgaactcctgacctcaggtgagctgcccgcctcggcctcccaaagtgctgggattacaggcgtgaggcaccgcacccggccaatcagttttttttgttttttttttgtttgtttgttttacaagaaacattaaaccagatcagaacaaagatttgtcagggttgtccattgactggggagaaagggaatcagtgtgtaaggcacctgagaggactcagttctacccaaattcttgcattcaaacctgaatgcaaggccatgaagtcctttgaaatgtacagatattaagcaatttaataatataccatgtttcccttacataagcagacaaatatttacacccccatgacctgaagttttgttaggctgtgaccacatgaattcgcagtataaatgggtgagtcctttttgaaaacctcatcttcagtgtgcctgatctgtaaaactagagcctcaggtttgatcctaggtaggcttcccacaacgtggggaaaattagtttgtgagggaaagctgtttctgagcattatggcatagtgattaagatgagggaccctggaaccagcccgtgattttgggcaagttattttaggtccactttggactgcttcatctcttaaatgaagacagcaaccaccttcaggagtgtgaaggtgacaacacttaaaactgtgcctggcacattgtatttgctattgtcttaatgttctggaataatggtttccataacttgggaagaaaactttgagaacaggattggttacatcaagttgtatagtgaaaagataaagatttgttatttaaacttgcagtttaaagtcattagaatcattcttttccgtaaggctttctttgcaagagatctgcattaaataaagttgctaggaaataactaaaattggggaaataatctaataatagcaagatgttaagcatactattattgtattttgggggttggtaataacattcacatggatttatcaatacacactgagaagcaaagcctctcaagctgtcccatatcctccatttcaaaggcacacatacattttaggtaactcataatttagaaaggttatttaatcttttccacatgtaaatatttgaatatgtacaaagacttgatttgactcttgtctgtttttgttttgttttgtttgtttgagacagaggctccgtcgcccaggctggagtaaaatggcatggtctcagctcactgcaagttccgcctcccgggttcacgccattctcctggctcagcctccggagtagttgggactacaggcacccgtcaccacacctggctaatgttttttgttttttgggtttttttgtatttttagtagagagagggtttcaccgtgttagccagggtggtctcgatctcctgacctcatgatccgcccaccccggcctcccaaaatgctgggattacaggtgtgagccactgcgcctggccgactcttgtctgtttgaatgcaaagttctcaatagtggtttttgtccataagtattaacttataattttggagagtgataggtatggttgctggttgattagcaataagattatgtagccttaaactagctagaagagtttgcatgggtgaggcaacaggctgttaacaaaaagaaactggaaatacagtttcccctgtttgtttctcctgtttgtacaatctgctttaaaaacaagtgaacatgcaccatgtcagtcatggtgaatcggccaacagccagcccttgccagttgacatcacagtctaagatgggaaactggtacagatagacatgaagagagcttagcagtggttgaggtggtgactaaatatacagtcattgaataaataccgtgtagcaaatgtaaaaaaaaaaaaaaaagtacaacagaatacaaaagtgccatttaatattttatagctatttctatgcacaagtgctggttttaaatttatataaaagcaaagactgtttctgtgttttcttccagagtatttctgttacagccatagaagtaaagttaataaatgtaagactttttttgttt

SEQ ID NO: 204220 - DNA, 1073 bp, Homo sapiens
  Payload ID: 20276
  Gene Name: zinc finger, AN1-type domain 5
  Uniprot ID: O76080
  ENST ID: ENST00000343431
  CDS Start-End: 312-953
ccggggcgccgcgggccaatggcgaagccggagcaggccgcggatggcggcgtccgggggaggggagcccgcccgccagcccaggaagcacaaagacggaggcgtcatcctgtcgtcgtggcccgagacctggctcccggcgtccctggctcgctccacagcacggccctgaaaaggagcctttaaaagtcaattctactccatttggcaaagagggaactgaaatctggaaagtaaggacttgcccaaggtcactgacttagtggcagactagagacttgaactcaggtctccattcccagcagaaaaatatggctcaggagactaaccagaccccggggcccatgctgtgtagcacaggatgtggcttttatggaaatcctaggacaaatggaatgtgttcagtttgctacaaagaacatcttcagaggcagcaaaatagtggcagaatgagcccaatgggaacagctagtggttccaacagtcctacctcagattctgcatctgtacagagagcagacactagcttaaacaactgtgaaggtgctgctggcagcacatctgaaaaatcaagaaatgtgcctgtggctgccttgcctgtaactcagcaaatgacagaaatgagcatttcaagagaggacaaaataactaccccgaaaacagaggtgtcagagccagttgtcactcagcccagtccatcagtttctcagcccagtacttctcagagtgaagaaaaagctcctgaattgcccaaaccaaagaaaaacagatgtttcatgtgcagaaagaaagttggtcttacagggtttgactgccgatgtggaaatttgttttgtggacttcaccgttactctgacaagcacaactgtccgtatgattacaaagcagaagctgcagcaaaaatcagaaaagagaatccagttgttgtggctgaaaaaattcagagaatataaattacttcttgtgaagagactgaaactttgtttttattttaatatatcgtaggaaaacattaaagagcagatgcatggccatttttctttgatgttctccagagttttacattacacttg

SEQ ID NO: 204221 - DNA, 690 bp, Homo sapiens
  Payload ID: 20276
  Gene Name: zinc finger, AN1-type domain 5
  ENST ID: ENST00000376956
  CDS Start-End: 57-690
ggctccttgttgccgggccgggggcgggagtgaagggaccggggcgccgcgggccaatggcgaagccggagcaggccgcggatggcggcgtccgggggaggggagcccgcccgccagcccaggaagcacaaagacggaggcgtcatcctgtcgtcgtggcccgagacctggctcccggcgtccctggctcgctccacagcacgcagaaaaatatggctcaggagactaaccagaccccggggcccatgctgtgtagcacaggatgtggcttttatggaaatcctaggacaaatggaatgtgttcagtttgctacaaagaacatcttcagaggcagcaaaatagtggcagaatgagcccaatgggaacagctagtggttccaacagtcctacctcagattctgcatctgtacagagagcagacactagcttaaacaactgtgaaggtgctgctggcagcacatctgaaaaatcaagaaatgtgcctgtggctgccttgcctgtaactcagcaaatgacagaaatgagcatttcaagagaggacaaaataactaccccgaaaacagaggtgtcagagccagttgtcactcagcccagtccatcagtttctcagcccagtacttctcagagtgaagaaaaagctcctgaattgcccaaaccaaagaaaaacagatgtttcatgtgcagaaaga

SEQ ID NO: 204222 - DNA, 2686 bp, Homo sapiens
  Payload ID: 20276
  Gene Name: zinc finger, AN1-type domain 5
  Uniprot ID: O76080
  ENST ID: ENST00000376960
  CDS Start-End: 550-1191
acagcccgggcgccgggcggcgagtgcgttagtcggccgggacgcggagctgtgtgcatctcctacgcgggctcgctcgctcccgggagccgcgcagcttccccggcggtggcaggagcggcgaagagcgccatcagcgggcccttacggccccaggcctcgcggcgcgcggtccgctcgccctcctcgtccgcccaacctgcggcctgtggaggcgtgaggcgacgacaggcgagcgcctcgagcagcgttagccgctgcggccgccggtcctccctccacctcctcctcggccccccctcgcttccctcctcccacttcccgagctccggcgtgtcccggccacgctcgacgctgctgcaggaacaaaggaagaccccgcggcggcggcggcgccacctccgcctgctgctccgacccgctcccggcccgcggcggcggcaccagggcgcccggctcagccttcccggaggcctcggcccggcctcatcgtgccggcttcgcgcgcgaacccggctttcgcatttgggaccctgcaggcagaaaaatatggctcaggagactaaccagaccccggggcccatgctgtgtagcacaggatgtggcttttatggaaatcctaggacaaatggaatgtgttcagtttgctacaaagaacatcttcagaggcagcaaaatagtggcagaatgagcccaatgggaacagctagtggttccaacagtcctacctcagattctgcatctgtacagagagcagacactagcttaaacaactgtgaaggtgctgctggcagcacatctgaaaaatcaagaaatgtgcctgtggctgccttgcctgtaactcagcaaatgacagaaatgagcatttcaagagaggacaaaataactaccccgaaaacagaggtgtcagagccagttgtcactcagcccagtccatcagtttctcagcccagtacttctcagagtgaagaaaaagctcctgaattgcccaaaccaaagaaaaacagatgtttcatgtgcagaaagaaagttggtcttacagggtttgactgccgatgtggaaatttgttttgtggacttcaccgttactctgacaagcacaactgtccgtatgattacaaagcagaagctgcagcaaaaatcagaaaagagaatccagttgttgtggctgaaaaaattcagagaatataaattacttcttgtgaagagactgaaactttgtttttattttaatatatcgtaggaaaacattaaagagcagatgcatggccatttttctttgatgttctccagagttttacattacacttgtctgtcttataattgatattttaggatgtttgggtgtttgttacaggcagaattggatagatacagccctacaaatgtatatgccctcccctgaaaaaaattggatgaaaatctgcacagcaaagtgaaacacacagataataggaacaaaatgtagttcccatgtgccaaacaaaataaatgaaatctctgcatgtttgcagcatatctgccttttgggaatgtaatcaaggtataatctttggctagtgttatgtgcctgtatttttttaaaatggtacaccagaaaaggactggcagtctacttctaccatagttaaacttcaccctctttaatttcacaacatattctttggaagcaggaagaaatgctcataaagaggatcagaccttctttcccgtgaaaccagtatttggcgccatatataagcctggttaaattggtcatctaaagctgtcaaataagacattctgtgaaaggtaaacatcgaaactggttataagtaaaaccatcaagccaacaacagggtcttgagataacctttgaagcttattgtactggcctgcaccagaagatgtctgcattactcattgctaaaaatgtgtagcacagaactgcactaggattaatttgtttacaagaagaaatttaaactctacgtttggttttcacatacagcagctctattgaataacatgcatctgaattttaagttgcaaaggtatctgaataatttttcatgtgcatcttttgtcgaatgttttggttcaagaaagaatgtttaaagctttttaaaagacttcagttcttaatgtaactgtacccttctgcatggaaaatcataaccaacatggctgcagtagacttcttagtggtatccagcaccacttgcagagggctgctttatcatattgtacttgggtgtaggactctagtgttcttgggtgtattgcatgggctgcattatctacagcattgtacaataacaactagaaaaggcagtatacttcactgatgcttgtctggtaataatcacttctgtgttataatggaaggttttttgtgatgtatgaaacttgtgttttttatatataaatgagtatagttagtgttgtggtaatgcctgttttcatctgtaaatagttaagtatgtacacgaggcactacttctgatttattgcaatgttcagtcctagtttttacttttattcttaaagcattcagttttgctttcaattttatgtaccttagttctgagttagacctgcagatgtgtacagatagttcatatttatgtattgcacataatcatgctattcagcattgatgctatattgtattatgtaaataataaaagccatgtacagagggaaa

SEQ ID NO: 204223 - DNA, 2785 bp, Homo sapiens
  Payload ID: 20276
  Gene Name: zinc finger, AN1-type domain 5
  Uniprot ID: O76080
  ENST ID: ENST00000376962
  CDS Start-End: 649-1290
gggacgcggagctgtgtgcatctcctacgcgggctcgctcgctcccgggagccgcgcagcttccccggcggtggcaggagcggcgaagagcgccatcagcgggcccttacggccccaggcctcgcggcgcgcggtccgctcgccctcctcgtccgcccaacctgcggcctgtggaggcgtgaggcgacgacaggcgagcgcctcgagcagcgttagccgctgcggccgccggtcctccctccacctcctcctcggccccccctcgcttccctcctcccacttcccgagctccggcgtgtcccggccacgctcgacgctgctgcaggaacaaaggaagaccccgcggcggcggcggcgccacctccgcctgctgctccgacccgctcccggcccgcggcggcggcaccagggcgcccggctcagccttcccggaggcctcggcccggcctcatcgtgccggcttcgcgcgcgaacccggctttcgcatttgggaccctgcagggccctgaaaaggagcctttaaaagtcaattctactccatttggcaaagagggaactgaaatctggaaagtaaggacttgcccaaggtcactgacttagtggcagactagagacttgaactcaggtctccattcccagcagaaaaatatggctcaggagactaaccagaccccggggcccatgctgtgtagcacaggatgtggcttttatggaaatcctaggacaaatggaatgtgttcagtttgctacaaagaacatcttcagaggcagcaaaatagtggcagaatgagcccaatgggaacagctagtggttccaacagtcctacctcagattctgcatctgtacagagagcagacactagcttaaacaactgtgaaggtgctgctggcagcacatctgaaaaatcaagaaatgtgcctgtggctgccttgcctgtaactcagcaaatgacagaaatgagcatttcaagagaggacaaaataactaccccgaaaacagaggtgtcagagccagttgtcactcagcccagtccatcagtttctcagcccagtacttctcagagtgaagaaaaagctcctgaattgcccaaaccaaagaaaaacagatgtttcatgtgcagaaagaaagttggtcttacagggtttgactgccgatgtggaaatttgttttgtggacttcaccgttactctgacaagcacaactgtccgtatgattacaaagcagaagctgcagcaaaaatcagaaaagagaatccagttgttgtggctgaaaaaattcagagaatataaattacttcttgtgaagagactgaaactttgtttttattttaatatatcgtaggaaaacattaaagagcagatgcatggccatttttctttgatgttctccagagttttacattacacttgtctgtcttataattgatattttaggatgtttgggtgtttgttacaggcagaattggatagatacagccctacaaatgtatatgccctcccctgaaaaaaattggatgaaaatctgcacagcaaagtgaaacacacagataataggaacaaaatgtagttcccatgtgccaaacaaaataaatgaaatctctgcatgtttgcagcatatctgccttttgggaatgtaatcaaggtataatctttggctagtgttatgtgcctgtatttttttaaaatggtacaccagaaaaggactggcagtctacttctaccatagttaaacttcaccctctttaatttcacaacatattctttggaagcaggaagaaatgctcataaagaggatcagaccttctttcccgtgaaaccagtatttggcgccatatataagcctggttaaattggtcatctaaagctgtcaaataagacattctgtgaaaggtaaacatcgaaactggttataagtaaaaccatcaagccaacaacagggtcttgagataacctttgaagcttattgtactggcctgcaccagaagatgtctgcattactcattgctaaaaatgtgtagcacagaactgcactaggattaatttgtttacaagaagaaatttaaactctacgtttggttttcacatacagcagctctattgaataacatgcatctgaattttaagttgcaaaggtatctgaataatttttcatgtgcatcttttgtcgaatgttttggttcaagaaagaatgtttaaagctttttaaaagacttcagttcttaatgtaactgtacccttctgcatggaaaatcataaccaacatggctgcagtagacttcttagtggtatccagcaccacttgcagagggctgctttatcatattgtacttgggtgtaggactctagtgttcttgggtgtattgcatgggctgcattatctacagcattgtacaataacaactagaaaaggcagtatacttcactgatgcttgtctggtaataatcacttctgtgttataatggaaggttttttgtgatgtatgaaacttgtgttttttatatataaatgagtatagttagtgttgtggtaatgcctgttttcatctgtaaatagttaagtatgtacacgaggcactacttctgatttattgcaatgttcagtcctagtttttacttttattcttaaagcattcagttttgctttcaattttatgtaccttagttctgagttagacctgcagatgtgtacagatagttcatatttatgtattgcacataatcatgctattcagcattgatgctatattgtattatgtaaataataaaagccatgtacagagggaaa

SEQ ID NO: 204224 - DNA, 1814 bp, Homo sapiens
  Payload ID: 20277
  Gene Name: zinc finger, AN1-type domain 6
  Uniprot ID: Q6FIF0
  ENST ID: ENST00000261749
  CDS Start-End: 423-1049
aataattagcgggcgggcggggcccgcgcgtcagccgcgggagccggccaatccagtggctctcctccgcggtcgcgtcataggccgaacaaccaaacagaaaagtttaataaacagcggacggaggggccggcggtggcggagccggagcaagcaggggttcggcggcattacctgtacccattcaccggcggctaccggcggcggcgcgcagcgtgtcaggcggagagacccgccgccaggaatgaatctgaagtctgctgcagtaaaacacagaaggctttaaaatgttttcttgcataaaattcaaaacttttaagtagctgcttatgagaatagggaaggcagaaagctaatgtctgtctcaagatacaggacagctgtttgctcatcaacctcaactgtgtgtgcaactgaggaacatggctcaagaaactaatcacagccaagtgcctatgctttgttccactggctgtggattttatggaaaccctcgtacaaatggcatgtgttcagtatgctataaagaacatcttcaaagacagaatagtagtaatggtagaataagcccacctgcaacctctgtcagtagtctgtctgaatctttaccagttcaatgcacagatggcagtgtgccagaagcccagtcagcattagactctacatcttcatctatgcagcccagccctgtatcaaatcagtcacttttatcagaatctgtagcatcttctcaattggacagtacatctgtggacaaagcagtacctgaaacagaagatgtgcaggcttcagtatcagacacagcacagcagccatctgaagagcaaagcaagtctcttgaaaaaccgaaacaaaaaaagaatcgctgtttcatgtgcaggaagaaagtgggacttactgggtttgaatgccggtgtggaaatgtttactgtggtgtacaccgttactcagatgtacacaattgctcttacaattacaaagccgatgctgctgagaaaatcagaaaagaaaatccagtagttgttggtgaaaagatccaaaagatttgaactcctgctggaatacaaaattcttgagcatctgcaaactaaaaattgacttgaggttttttttttcctagtcattgggaatgtagagcagtgtatcttgcatgtcatcggaagaatagatttttgttttggttttgttttgaaaatgactctgaacatttatttccattgcaatttctgtggctgaggagacttaaactttacaagtattatccttttaagatcattttaattttagttgagtgcagagggcttttataacaaacgtgcagaaattttggagggctgtgatttttccagtattaaacatgcatgcattaatcttgcagtttattttctcattgtgtatgtatatatcgcttttctctgcagcacgatttctcttttgataatgccctttagggcacaactagttatcagtaactgaatgtatcttaatcattatggctgcttctgttttttcattaacaaaggttattcatatgttagcatatagtttctttgcacccactatttatgtctgaatcatttgtcacaagagagtgtgtgctgatgagattgtaagtttgtgtgtttaaacttttttttgagcgagggaagaaaaagctgtatgcatttcattgctgtctacaggtttctttcagattatgttcatgggtttgtgtgtatacaatatgaagaatgatctgaagtaattgtgctgtatttatgtttattcaccagtctttgattaaataaaaaggaaaaccagaatgctcccttgta

SEQ ID NO: 204225 - DNA, 621 bp, Homo sapiens
  Payload ID: 20277
  Gene Name: zinc finger, AN1-type domain 6
  ENST ID: ENST00000558724
  CDS Start-End: 98-621
gaagagagaaatttaaaattaaaaattttccatatttctatcacaaatattggtaatttgacaacatgtaatttgattgtcgtcttaataaaatttaatgttattgctaccaaatagagataaaggtgtgcaactgaggaacatggctcaagaaactaatcacagccaagtgcctatgctttgttccactggctgtggattttatggaaaccctcgtacaaatggcatgtgttcagtatgctataaagaacatcttcaaagacagaatagtagtaatggtagaataagcccacctgcaacctctgtcagtagtctgtctgaatctttaccagttcaatgcacagatggcagtgtgccagaagcccagtcagcattagactctacatcttcatctatgcagcccagccctgtatcaaatcagtcacttttatcagaatctgtagcatcttctcaattggacagtacatctgtggacaaagcagtacctgaaacagaagatgtgcaggcttcagtatcagacacagcacagcagccatctgaagagcaaagcaagtctcttgaaaaaccgaaacaaaaaaagaatcgctgtttcatgtgcaggaagaaagtgggacttactgg

SEQ ID NO: 204226 - DNA, 780 bp, Homo sapiens
  Payload ID: 20277
  Gene Name: zinc finger, AN1-type domain 6
  ENST ID: ENST00000558688
  CDS Start-End: 79-612
tacagcttcaagtgaagttaatctgaggtgaagcaaacagaaaattgtggaggttttgttggtgtgcaactgaggaacatggctcaagaaactaatcacagccaagtgcctatgctttgttccactggctgtggattttatggaaaccctcgtacaaatggcatgtgttcagtatgctataaagaacatcttcaaagacagaatagtagtaatggtagaataagcccacctgcaacctctgtcagtagtctgtctgaatctttaccagttcaatgcacagatggcagtgtgccagaagcccagtcagcattagactctacatcttcatctatgcagcccagccctgtatcaaatcagtcacttttatcagaatctgtagcatcttctcaattggacagtacatctgtggacaaagcagtacctgaaacagaagatgtgcaggcttcagtatcagacacagcacagcagccatctgaagagcaaagcaagtctcttgaaaaaccgaaacaaaaaaagaatcgctgtttcatgtgcaggaagaaagtgggacttactggtaaggacctaaatcaaatgtttaaaattaaaatgatgttttataataatgcatagcttactgttgttgacttcaattaagattgttcctgttcccttgagagttaatattggatatacttcaccttctgaattttcttaaggaaataaaaatagctttgattatacacctaaaagtgaaatgaatagcttttttaaaaaaagttttatttcagttgaatttag

SEQ ID NO: 204227 - DNA, 891 bp, Homo sapiens
  Payload ID: 20277
  Gene Name: zinc finger, AN1-type domain 6
  Uniprot ID: Q6FIF0
  ENST ID: ENST00000561060
  CDS Start-End: 215-841
ggccaatccagtggctctcctccgcggtcgcgtcataggccgaacaaccaaacagaaaagtttaataaacagcggacggaggggccggcggtggcggagccggagcaagcaggggttcggcggcattacctgtacccattcaccggcggctaccggcggcggcgcgcagcgtgtcaggcggagagacccgccgccaggtgtgcaactgaggaacatggctcaagaaactaatcacagccaagtgcctatgctttgttccactggctgtggattttatggaaaccctcgtacaaatggcatgtgttcagtatgctataaagaacatcttcaaagacagaatagtagtaatggtagaataagcccacctgcaacctctgtcagtagtctgtctgaatctttaccagttcaatgcacagatggcagtgtgccagaagcccagtcagcattagactctacatcttcatctatgcagcccagccctgtatcaaatcagtcacttttatcagaatctgtagcatcttctcaattggacagtacatctgtggacaaagcagtacctgaaacagaagatgtgcaggcttcagtatcagacacagcacagcagccatctgaagagcaaagcaagtctcttgaaaaaccgaaacaaaaaaagaatcgctgtttcatgtgcaggaagaaagtgggacttactgggtttgaatgccggtgtggaaatgtttactgtggtgtacaccgttactcagatgtacacaattgctcttacaattacaaagccgatgctgctgagaaaatcagaaaagaaaatccagtagttgttggtgaaaagatccaaaagatttgaactcctgctggaatacaaaattcttgagcatctgcaaactaaaaattgac

SEQ ID NO: 204228 - DNA, 1446 bp, Homo sapiens
  Payload ID: 20277
  Gene Name: zinc finger, AN1-type domain 6
  Uniprot ID: Q6FIF0
  ENST ID: ENST00000559835
  CDS Start-End: 88-714
gctttggagtacagcttcaagtgaagttaatctgaggtgaagcaaacagaaaattgtggaggttttgttggtgtgcaactgaggaacatggctcaagaaactaatcacagccaagtgcctatgctttgttccactggctgtggattttatggaaaccctcgtacaaatggcatgtgttcagtatgctataaagaacatcttcaaagacagaatagtagtaatggtagaataagcccacctgcaacctctgtcagtagtctgtctgaatctttaccagttcaatgcacagatggcagtgtgccagaagcccagtcagcattagactctacatcttcatctatgcagcccagccctgtatcaaatcagtcacttttatcagaatctgtagcatcttctcaattggacagtacatctgtggacaaagcagtacctgaaacagaagatgtgcaggcttcagtatcagacacagcacagcagccatctgaagagcaaagcaagtctcttgaaaaaccgaaacaaaaaaagaatcgctgtttcatgtgcaggaagaaagtgggacttactgggtttgaatgccggtgtggaaatgtttactgtggtgtacaccgttactcagatgtacacaattgctcttacaattacaaagccgatgctgctgagaaaatcagaaaagaaaatccagtagttgttggtgaaaagatccaaaagatttgaactcctgctggaatacaaaattcttgagcatctgcaaactaaaaattgacttgaggttttttttttcctagtcattgggaatgtagagcagtgtatcttgcatgtcatcggaagaatagatttttgttttggttttgttttgaaaatgactctgaacatttatttccattgcaatttctgtggctgaggagacttaaactttacaagtattatccttttaagatcattttaattttagttgagtgcagagggcttttataacaaacgtgcagaaattttggagggctgtgatttttccagtattaaacatgcatgcattaatcttgcagtttattttctcattgtgtatgtatatatcgcttttctctgcagcacgatttctcttttgataatgccctttagggcacaactagttatcagtaactgaatgtatcttaatcattatggctgcttctgttttttcattaacaaaggttattcatatgttagcatatagtttctttgcacccactatttatgtctgaatcatttgtcacaagagagtgtgtgctgatgagattgtaagtttgtgtgtttaaacttttttttgagcgagggaagaaaaagctgtatgcatttcattgctgtctacaggtttctttcagattatgttcatgggtttgtgtgtatacaatatgaagaatgatctgaagtaattgtgctgtatttatgtttattcaccagtctttgatt

SEQ ID NO: 204229 - DNA, 566 bp, Homo sapiens
  Payload ID: 20277
  Gene Name: zinc finger, AN1-type domain 6
  ENST ID: ENST00000558390
  CDS Start-End: 93-566
agcttcaagtgaagttaatctgaggtgaagcaaacagaaaattgtggaggttttgttggtggagataagtaattaacatttcgaaacaggaaatgaaaggatttatatttttaaaagctataggtgtgcaactgaggaacatggctcaagaaactaatcacagccaagtgcctatgctttgttccactggctgtggattttatggaaaccctcgtacaaatggcatgtgttcagtatgctataaagaacatcttcaaagacagaatagtagtaatggtagaataagcccacctgcaacctctgtcagtagtctgtctgaatctttaccagttcaatgcacagatggcagtgtgccagaagcccagtcagcattagactctacatcttcatctatgcagcccagccctgtatcaaatcagtcacttttatcagaatctgtagcatcttctcaattggacagtacatctgtggacaaagcagtacctgaaacagaagatgtgcaggcttcagtatcagacacagcacagcagccatctgaagagcaaagcaagtctcttgaaaaaccg

SEQ ID NO: 204230 - DNA, 741 bp, Homo sapiens
  Payload ID: 20277
  Gene Name: zinc finger, AN1-type domain 6
  ENST ID: ENST00000558997
  CDS Start-End: 263-741
cagatactttggtgttgaacatttgggatagaagagagaaatttaaaattaaaaattttccatatttctatcacaaatattggaatgaatctgaagtctgctgcagtaaaacacagaaggctttaaaatgttttcttgcataaaattcaaaacttttaagtagctgcttatgagaatagggaaggcagaaagctaatgtctgtctcaagatacaggacagctgtttgctcatcaacctcaactgtgtgtgcaactgaggaacatggctcaagaaactaatcacagccaagtgcctatgctttgttccactggctgtggattttatggaaaccctcgtacaaatggcatgtgttcagtatgctataaagaacatcttcaaagacagaatagtagtaatggtagaataagcccacctgcaacctctgtcagtagtctgtctgaatctttaccagttcaatgcacagatggcagtgtgccagaagcccagtcagcattagactctacatcttcatctatgcagcccagccctgtatcaaatcagtcacttttatcagaatctgtagcatcttctcaattggacagtacatctgtggacaaagcagtacctgaaacagaagatgtgcaggcttcagtatcagacacagcacagcagccatctgaagagcaaagcaagtctcttgaaaaaccgaaacaaaaaaagaatcgctgtttcatgtgcaggaagaaagtgggacttactgg

SEQ ID NO: 204231 - DNA, 585 bp, Homo sapiens
  Payload ID: 20277
  Gene Name: zinc finger, AN1-type domain 6
  ENST ID: ENST00000561012
  CDS Start-End: 370-585
aataaacagcggacggaggggccggcggtggcggagccggagcaagcaggggttcggcggcattacctgtacccattcaccggcggctaccggcggcggcgcgcagcgtgtcaggcggagagacccgccgccaggaatgaatctgaagtctgctgcagtaaaacacagaaggctttaaaatgttttcttgcataaaattcaaaacttttaagtagctgcttatgagaatagggaaggcagaaagctaatgtctgtctcaagatacaggacagctgtttgctcatcaacctcaactgtgtttcacatcctgggaatactgtattttcaatctgaggttggtggagtcgccggtagccacctaagataggaatgtcaatcagaagttttctagaatctatcttcagatgcaaacaatacagtggcctcttgttggagatccaaaggctcagaactcggaattactgtatgcaacaggaaacactaatctcaagcacctatgccaagttaggtgtgcaactgaggaacatggctcaagaaactaatcacagccaagtgcctatgctttgttccactggctgtggattt

SEQ ID NO: 204232 - DNA, 1602 bp, Homo sapiens
  Payload ID: 20277
  Gene Name: zinc finger, AN1-type domain 6
  Uniprot ID: Q6FIF0
  ENST ID: ENST00000559775
  CDS Start-End: 246-872
ggagtacagcttcaagtgaagttaatctgaggtgaagcaaacagaaaattgtggaggttttgttggaatgaatctgaagtctgctgcagtaaaacacagaaggctttaaaatgttttcttgcataaaattcaaaacttttaagtagctgcttatgagaatagggaaggcagaaagctaatgtctgtctcaagatacaggacagctgtttgctcatcaacctcaactgtgtgtgcaactgaggaacatggctcaagaaactaatcacagccaagtgcctatgctttgttccactggctgtggattttatggaaaccctcgtacaaatggcatgtgttcagtatgctataaagaacatcttcaaagacagaatagtagtaatggtagaataagcccacctgcaacctctgtcagtagtctgtctgaatctttaccagttcaatgcacagatggcagtgtgccagaagcccagtcagcattagactctacatcttcatctatgcagcccagccctgtatcaaatcagtcacttttatcagaatctgtagcatcttctcaattggacagtacatctgtggacaaagcagtacctgaaacagaagatgtgcaggcttcagtatcagacacagcacagcagccatctgaagagcaaagcaagtctcttgaaaaaccgaaacaaaaaaagaatcgctgtttcatgtgcaggaagaaagtgggacttactgggtttgaatgccggtgtggaaatgtttactgtggtgtacaccgttactcagatgtacacaattgctcttacaattacaaagccgatgctgctgagaaaatcagaaaagaaaatccagtagttgttggtgaaaagatccaaaagatttgaactcctgctggaatacaaaattcttgagcatctgcaaactaaaaattgacttgaggttttttttttcctagtcattgggaatgtagagcagtgtatcttgcatgtcatcggaagaatagatttttgttttggttttgttttgaaaatgactctgaacatttatttccattgcaatttctgtggctgaggagacttaaactttacaagtattatccttttaagatcattttaattttagttgagtgcagagggcttttataacaaacgtgcagaaattttggagggctgtgatttttccagtattaaacatgcatgcattaatcttgcagtttattttctcattgtgtatgtatatatcgcttttctctgcagcacgatttctcttttgataatgccctttagggcacaactagttatcagtaactgaatgtatcttaatcattatggctgcttctgttttttcattaacaaaggttattcatatgttagcatatagtttctttgcacccactatttatgtctgaatcatttgtcacaagagagtgtgtgctgatgagattgtaagtttgtgtgtttaaacttttttttgagcgagggaagaaaaagctgtatgcatttcattgctgtctacaggtttctttcagattatgttcatgggtttgtgtgtatacaatatgaagaatgatctgaagtaattgtgctgtatttatgtttattcaccagtctttga

SEQ ID NO: 204233 - DNA, 560 bp, Homo sapiens
  Payload ID: 20277
  Gene Name: zinc finger, AN1-type domain 6
  ENST ID: ENST00000560976
  CDS Start-End: 95-560
acagcttcaagtgaagttaatctgaggtgaagcaaacagaaaattgtggaggttttgttggtggagataagtaattaacatttcgaaacaggaaatgaaaggatttatatttttaaaagctataggtgtgcaactgaggaacatggctcaagaaactaatcacagccaagtgcctatgctttgttccactggctgtggattttatggaaaccctcgtacaaatggcatgtgttcagtatgctataaagaacatcttcaaagacagaatagtagtaatggtagaataagcccacctgcaacctctgtcagtagtctgtctgaatctttaccagttcaatgcacagatggcagtgtgccagaagcccagtcagcattagactctacatcttcatctatgcagcccagccctgtatcaaatcagtcacttttatcagaatctgtagcatcttctcaattggacagtacatctgtggacaaagcagtacctgaaacagaagatgtgcaggcttcagtatcagacacagcacagcagccatctgaagagcaaagcaagtctcttg

SEQ ID NO: 204234 - DNA, 909 bp, Homo sapiens
  Payload ID: 20277
  Gene Name: zinc finger, AN1-type domain 6
  Uniprot ID: Q6FIF0
  ENST ID: ENST00000558087
  CDS Start-End: 100-726
cagatactttggtgttgaacatttgggatagaagagagaaatttaaaattaaaaattttccatatttctatcacaaatattggtgtgcaactgaggaacatggctcaagaaactaatcacagccaagtgcctatgctttgttccactggctgtggattttatggaaaccctcgtacaaatggcatgtgttcagtatgctataaagaacatcttcaaagacagaatagtagtaatggtagaataagcccacctgcaacctctgtcagtagtctgtctgaatctttaccagttcaatgcacagatggcagtgtgccagaagcccagtcagcattagactctacatcttcatctatgcagcccagccctgtatcaaatcagtcacttttatcagaatctgtagcatcttctcaattggacagtacatctgtggacaaagcagtacctgaaacagaagatgtgcaggcttcagtatcagacacagcacagcagccatctgaagagcaaagcaagtctcttgaaaaaccgaaacaaaaaaagaatcgctgtttcatgtgcaggaagaaagtgggacttactgggtttgaatgccggtgtggaaatgtttactgtggtgtacaccgttactcagatgtacacaattgctcttacaattacaaagccgatgctgctgagaaaatcagaaaagaaaatccagtagttgttggtgaaaagatccaaaagatttgaactcctgctggaatacaaaattcttgagcatctgcaaactaaaaattgacttgaggttttttttttcctagtcattgggaatgtagagcagtgtatcttgcatgtcatcggaagaatagatttttgttttggttttgttttgaaaatgactctgaacatttatttccattgcaatttctgtgg

SEQ ID NO: 204235 - DNA, 1472 bp, Homo sapiens
  Payload ID: 20277
  Gene Name: zinc finger, AN1-type domain 6
  Uniprot ID: Q6FIF0
  ENST ID: ENST00000558494
  CDS Start-End: 114-740
ggagcaagcaggggttcggcggcattacctgtacccattcaccggcggctaccggcggcggcgcgcagcgtgtcaggcggagagacccgccgccaggtgtgcaactgaggaacatggctcaagaaactaatcacagccaagtgcctatgctttgttccactggctgtggattttatggaaaccctcgtacaaatggcatgtgttcagtatgctataaagaacatcttcaaagacagaatagtagtaatggtagaataagcccacctgcaacctctgtcagtagtctgtctgaatctttaccagttcaatgcacagatggcagtgtgccagaagcccagtcagcattagactctacatcttcatctatgcagcccagccctgtatcaaatcagtcacttttatcagaatctgtagcatcttctcaattggacagtacatctgtggacaaagcagtacctgaaacagaagatgtgcaggcttcagtatcagacacagcacagcagccatctgaagagcaaagcaagtctcttgaaaaaccgaaacaaaaaaagaatcgctgtttcatgtgcaggaagaaagtgggacttactgggtttgaatgccggtgtggaaatgtttactgtggtgtacaccgttactcagatgtacacaattgctcttacaattacaaagccgatgctgctgagaaaatcagaaaagaaaatccagtagttgttggtgaaaagatccaaaagatttgaactcctgctggaatacaaaattcttgagcatctgcaaactaaaaattgacttgaggttttttttttcctagtcattgggaatgtagagcagtgtatcttgcatgtcatcggaagaatagatttttgttttggttttgttttgaaaatgactctgaacatttatttccattgcaatttctgtggctgaggagacttaaactttacaagtattatccttttaagatcattttaattttagttgagtgcagagggcttttataacaaacgtgcagaaattttggagggctgtgatttttccagtattaaacatgcatgcattaatcttgcagtttattttctcattgtgtatgtatatatcgcttttctctgcagcacgatttctcttttgataatgccctttagggcacaactagttatcagtaactgaatgtatcttaatcattatggctgcttctgttttttcattaacaaaggttattcatatgttagcatatagtttctttgcacccactatttatgtctgaatcatttgtcacaagagagtgtgtgctgatgagattgtaagtttgtgtgtttaaacttttttttgagcgagggaagaaaaagctgtatgcatttcattgctgtctacaggtttctttcagattatgttcatgggtttgtgtgtatacaatatgaagaatgatctgaagtaattgtgctgtatttatgtttattcaccagtctttgatt

SEQ ID NO: 204236 - DNA, 1559 bp, Homo sapiens
  Payload ID: 20277
  Gene Name: zinc finger, AN1-type domain 6
  Uniprot ID: Q6FIF0
  ENST ID: ENST00000559157
  CDS Start-End: 237-827
cgcggtcgcgtcataggccgaacaaccaaacagaaaagtttaataaacagcggacggaggggccggcggtggcggagccggagcaagcaggggttcggcggcattacctgtacccattcaccggcggctaccggcggcggcgcgcagcgtgtcaggcggagagacccgccgccagatcaaaagacactgacttagctgcttaccagaaggggaacttgggtgtgcaactgaggaacatggctcaagaaactaatcacagccaagtgcctatgctttgttccactggctgtggattttatggaaaccctcgtacaaatggcatgtgttcagtatgctataaagaacatcttcaaagacagaatagtagtaatggtagaataagcccacctgttcaatgcacagatggcagtgtgccagaagcccagtcagcattagactctacatcttcatctatgcagcccagccctgtatcaaatcagtcacttttatcagaatctgtagcatcttctcaattggacagtacatctgtggacaaagcagtacctgaaacagaagatgtgcaggcttcagtatcagacacagcacagcagccatctgaagagcaaagcaagtctcttgaaaaaccgaaacaaaaaaagaatcgctgtttcatgtgcaggaagaaagtgggacttactgggtttgaatgccggtgtggaaatgtttactgtggtgtacaccgttactcagatgtacacaattgctcttacaattacaaagccgatgctgctgagaaaatcagaaaagaaaatccagtagttgttggtgaaaagatccaaaagatttgaactcctgctggaatacaaaattcttgagcatctgcaaactaaaaattgacttgaggttttttttttcctagtcattgggaatgtagagcagtgtatcttgcatgtcatcggaagaatagatttttgttttggttttgttttgaaaatgactctgaacatttatttccattgcaatttctgtggctgaggagacttaaactttacaagtattatccttttaagatcattttaattttagttgagtgcagagggcttttataacaaacgtgcagaaattttggagggctgtgatttttccagtattaaacatgcatgcattaatcttgcagtttattttctcattgtgtatgtatatatcgcttttctctgcagcacgatttctcttttgataatgccctttagggcacaactagttatcagtaactgaatgtatcttaatcattatggctgcttctgttttttcattaacaaaggttattcatatgttagcatatagtttctttgcacccactatttatgtctgaatcatttgtcacaagagagtgtgtgctgatgagattgtaagtttgtgtgtttaaacttttttttgagcgagggaagaaaaagctgtatgcatttcattgctgtctacaggtttctttcagattatgttcatgggtttgtgtgtatacaatatgaagaatgatctgaagtaattgtgctgtatttatgtttattcaccagtctttgatt

SEQ ID NO: 204237 - DNA, 582 bp, Homo sapiens
  Payload ID: 20277
  Gene Name: zinc finger, AN1-type domain 6
  ENST ID: ENST00000564367
  CDS Start-End: 138-582
ggaggggccggcggtggcggagccggagcaagcaggggttcggcggcattacctgtacccattcaccggcggctaccggcggcggcgcgcagcgtgtcaggcggagagacccgccgccaggtgtgcaactgaggaacatggctcaagaaactaatcacagccaagtgcctatgctttgttccactggctgtggattttatggaaaccctcgtacaaatggcatgtgttcagtatgctataaagaacatcttcaaagacagaatagtagtaatggtagaataagcccacctgcaacctctgtcagtagtctgtctgaatctttaccagttcaatgcacagatggcagtgtgccagaagcccagtcagcattagactctacatcttcatctatgcagcccagccctgtatcaaatcagtcacttttatcagaatctgtagcatcttctcaattggacagtacatctgtggacaaagcagtacctgaaacagaagatgtgcaggggtttgaatgccggtgtggaaatgtttactgtggtgtacaccgttactcagatgtacacaattgctcttacaattacaaag

SEQ ID NO: 204238 - DNA, 492 bp, Homo sapiens
  Payload ID: 20277
  Gene Name: zinc finger, AN1-type domain 6
  ENST ID: ENST00000560228
  CDS Start-End: 397-492
attcaggtttggttgctttggagtacagcttcaagtgaagttaatctgaggtgaagcaaacagaaaattgtggaggttttgttggaatgaatctgaagtctgctgcagtaaaacacagaaggctttaaaatgttttcttgcataaaattcaaaacttttaagtagctgcttatgagaatagggaaggcagaaagctaatgtctgtctcaagatacaggacagctgtttgctcatcaacctcaactgtgtttcacatcctgggaatactgtattttcaatctgaggttggtggagtcgccggtagccacctaagataggaatgtcaatcagaagttttctagaatctatcttcagatgcaaacaatacagtggcctcttggtgtgcaactgaggaacatggctcaagaaactaatcacagccaagtgcctatgctttgttccactggctgtggattttatggaaaccctcgtacaaatggcatgtgttcagta

SEQ ID NO: 204239 - DNA, 568 bp, Homo sapiens
  Payload ID: 20277
  Gene Name: zinc finger, AN1-type domain 6
  ENST ID: ENST00000560392
  CDS Start-End: 306-568
acagcttcaagtgaagttaatctgaggtgaagcaaacagaaaattgtggaggttttgttggtggagataagtaattaacatttcgaaacaggaaatgaaaggatttatatttttaaaagctataggaatgaatctgaagtctgctgcagtaaaacacagaaggctttaaaatgttttcttgcataaaattcaaaacttttaagtagctgcttatgagaatagggaaggcagaaagctaatgtctgtctcaagatacaggacagctgtttgctcatcaacctcaactgtgtgtgcaactgaggaacatggctcaagaaactaatcacagccaagtgcctatgctttgttccactggctgtggattttatggaaaccctcgtacaaatggcatgtgttcagtatgctataaagaacatcttcaaagacagaatagtagtaatggtagaataagcccacctgcaacctctgtcagtagtctgtctgaatctttaccagttcaatgcacagatggcagtgtgccagaagcccagtcagcattagactctacatcttcatctatgcagcccag

SEQ ID NO: 204240 - DNA, 558 bp, Homo sapiens
  Payload ID: 20277
  Gene Name: zinc finger, AN1-type domain 6
  ENST ID: ENST00000560470
  CDS Start-End: 498-558
taagttttagctacctaaaaaagtatgaaagaatattgtgtttgaaatctttttaacttggtttttaagtcacgtgctaactatcctacacagttgggacgctatgatttaccttcacatctcggaagttgtaaccagttgtgaggaagttaggaccttggggttacctaaagataatttatattaagttgttgggccataaaaactgggcagaattggccacgcgcggtgactcaacgcctgtaatcccagcactttgggaggccgacgcggactaatcacgaggtcaggagatcgagaccatcctggccaacatggaatgaatctgaagtctgctgcagtaaaacacagaaggctttaaaatgttttcttgcataaaattcaaaacttttaagtagctgcttatgagaatagggaaggcagaaagctaatgtctgtctcaagatacaggacagctgtttgctcatcaacctcaactgtgtgtgcaactgaggaacatggctcaagaaactaatcacagccaagtgcctatgctttgttccactggctgtggatttt

SEQ ID NO: 204241 - DNA, 583 bp, Homo sapiens
  Payload ID: 20277
  Gene Name: zinc finger, AN1-type domain 6
  ENST ID: ENST00000558272
  CDS Start-End: 391-583
agcttcaagtgaagttaatctgaggtgaagcaaacagaaaattgtggaggttttgttgatactttggtgttgaacatttgggatagaagagagaaatttaaaattaaaaattttccatatttctatcacaaatattggtaatttgacaacatgtaatttgattgtcgtcttaataaaatttaatgttattgctaccaaatagagataaaggaatgaatctgaagtctgctgcagtaaaacacagaaggctttaaaatgttttcttgcataaaattcaaaacttttaagtagctgcttatgagaatagggaaggcagaaagctaatgtctgtctcaagatacaggacagctgtttgctcatcaacctcaactgtgtgtgcaactgaggaacatggctcaagaaactaatcacagccaagtgcctatgctttgttccactggctgtggattttatggaaaccctcgtacaaatggcatgtgttcagtatgctataaagaacatcttcaaagacagaatagtagtaatggtagaataagcccacctgcaacctctgtcagtagtctgtctgaatctttaccagttc

SEQ ID NO: 204242 - DNA, 1653 bp, Homo sapiens
  Payload ID: 20277
  Gene Name: zinc finger, AN1-type domain 6
  Uniprot ID: Q6FIF0
  ENST ID: ENST00000616533
  CDS Start-End: 263-889
cagatactttggtgttgaacatttgggatagaagagagaaatttaaaattaaaaattttccatatttctatcacaaatattggaatgaatctgaagtctgctgcagtaaaacacagaaggctttaaaatgttttcttgcataaaattcaaaacttttaagtagctgcttatgagaatagggaaggcagaaagctaatgtctgtctcaagatacaggacagctgtttgctcatcaacctcaactgtgtgtgcaactgaggaacatggctcaagaaactaatcacagccaagtgcctatgctttgttccactggctgtggattttatggaaaccctcgtacaaatggcatgtgttcagtatgctataaagaacatcttcaaagacagaatagtagtaatggtagaataagcccacctgcaacctctgtcagtagtctgtctgaatctttaccagttcaatgcacagatggcagtgtgccagaagcccagtcagcattagactctacatcttcatctatgcagcccagccctgtatcaaatcagtcacttttatcagaatctgtagcatcttctcaattggacagtacatctgtggacaaagcagtacctgaaacagaagatgtgcaggcttcagtatcagacacagcacagcagccatctgaagagcaaagcaagtctcttgaaaaaccgaaacaaaaaaagaatcgctgtttcatgtgcaggaagaaagtgggacttactgggtttgaatgccggtgtggaaatgtttactgtggtgtacaccgttactcagatgtacacaattgctcttacaattacaaagccgatgctgctgagaaaatcagaaaagaaaatccagtagttgttggtgaaaagatccaaaagatttgaactcctgctggaatacaaaattcttgagcatctgcaaactaaaaattgacttgaggttttttttttcctagtcattgggaatgtagagcagtgtatcttgcatgtcatcggaagaatagatttttgttttggttttgttttgaaaatgactctgaacatttatttccattgcaatttctgtggctgaggagacttaaactttacaagtattatccttttaagatcattttaattttagttgagtgcagagggcttttataacaaacgtgcagaaattttggagggctgtgatttttccagtattaaacatgcatgcattaatcttgcagtttattttctcattgtgtatgtatatatcgcttttctctgcagcacgatttctcttttgataatgccctttagggcacaactagttatcagtaactgaatgtatcttaatcattatggctgcttctgttttttcattaacaaaggttattcatatgttagcatatagtttctttgcacccactatttatgtctgaatcatttgtcacaagagagtgtgtgctgatgagattgtaagtttgtgtgtttaaacttttttttgagcgagggaagaaaaagctgtatgcatttcattgctgtctacaggtttctttcagattatgttcatgggtttgtgtgtatacaatatgaagaatgatctgaagtaattgtgctgtatttatgtttattcaccagtctttgattaaataaaaaggaaaaccagaatgctcccttgt

SEQ ID NO: 204243 - DNA, 1729 bp, Homo sapiens
  Payload ID: 20277
  Gene Name: zinc finger, AN1-type domain 6
  Uniprot ID: Q6FIF0
  ENST ID: ENST00000613266
  CDS Start-End: 339-965
aataattagcgggcgggcggggcccgcgcgtcagccgcgggagccggccaatccagtggctctcctccgcggtcgcgtcataggccgaacaaccaaacagaaaagtttaataaacagcggacggaggggccggcggtggcggagccggagcaagcaggggttcggcggcattacctgtacccattcaccggcggctaccggcggcggcgcgcagcgtgtcaggcggagagacccgccgccagatactttggtgttgaacatttgggatagaagagagaaatttaaaattaaaaattttccatatttctatcacaaatattggtgtgcaactgaggaacatggctcaagaaactaatcacagccaagtgcctatgctttgttccactggctgtggattttatggaaaccctcgtacaaatggcatgtgttcagtatgctataaagaacatcttcaaagacagaatagtagtaatggtagaataagcccacctgcaacctctgtcagtagtctgtctgaatctttaccagttcaatgcacagatggcagtgtgccagaagcccagtcagcattagactctacatcttcatctatgcagcccagccctgtatcaaatcagtcacttttatcagaatctgtagcatcttctcaattggacagtacatctgtggacaaagcagtacctgaaacagaagatgtgcaggcttcagtatcagacacagcacagcagccatctgaagagcaaagcaagtctcttgaaaaaccgaaacaaaaaaagaatcgctgtttcatgtgcaggaagaaagtgggacttactgggtttgaatgccggtgtggaaatgtttactgtggtgtacaccgttactcagatgtacacaattgctcttacaattacaaagccgatgctgctgagaaaatcagaaaagaaaatccagtagttgttggtgaaaagatccaaaagatttgaactcctgctggaatacaaaattcttgagcatctgcaaactaaaaattgacttgaggttttttttttcctagtcattgggaatgtagagcagtgtatcttgcatgtcatcggaagaatagatttttgttttggttttgttttgaaaatgactctgaacatttatttccattgcaatttctgtggctgaggagacttaaactttacaagtattatccttttaagatcattttaattttagttgagtgcagagggcttttataacaaacgtgcagaaattttggagggctgtgatttttccagtattaaacatgcatgcattaatcttgcagtttattttctcattgtgtatgtatatatcgcttttctctgcagcacgatttctcttttgataatgccctttagggcacaactagttatcagtaactgaatgtatcttaatcattatggctgcttctgttttttcattaacaaaggttattcatatgttagcatatagtttctttgcacccactatttatgtctgaatcatttgtcacaagagagtgtgtgctgatgagattgtaagtttgtgtgtttaaacttttttttgagcgagggaagaaaaagctgtatgcatttcattgctgtctacaggtttctttcagattatgttcatgggtttgtgtgtatacaatatgaagaatgatctgaagtaattgtgctgtatttatgtttattcaccagtctttgattaaataaaaaggaaaaccagaatgctcccttgt

SEQ ID NO: 204244 - DNA, 1659 bp, Homo sapiens
  Payload ID: 20277
  Gene Name: zinc finger, AN1-type domain 6
  Uniprot ID: Q6FIF0
  ENST ID: ENST00000618205
  CDS Start-End: 269-895
agcgggttgcgagcggttggctggcgggggtcggaagggccccgggcacactggggcgcgtcagttccccgcctcctccgagtctcaggaatgaatctgaagtctgctgcagtaaaacacagaaggctttaaaatgttttcttgcataaaattcaaaacttttaagtagctgcttatgagaatagggaaggcagaaagctaatgtctgtctcaagatacaggacagctgtttgctcatcaacctcaactgtgtgtgcaactgaggaacatggctcaagaaactaatcacagccaagtgcctatgctttgttccactggctgtggattttatggaaaccctcgtacaaatggcatgtgttcagtatgctataaagaacatcttcaaagacagaatagtagtaatggtagaataagcccacctgcaacctctgtcagtagtctgtctgaatctttaccagttcaatgcacagatggcagtgtgccagaagcccagtcagcattagactctacatcttcatctatgcagcccagccctgtatcaaatcagtcacttttatcagaatctgtagcatcttctcaattggacagtacatctgtggacaaagcagtacctgaaacagaagatgtgcaggcttcagtatcagacacagcacagcagccatctgaagagcaaagcaagtctcttgaaaaaccgaaacaaaaaaagaatcgctgtttcatgtgcaggaagaaagtgggacttactgggtttgaatgccggtgtggaaatgtttactgtggtgtacaccgttactcagatgtacacaattgctcttacaattacaaagccgatgctgctgagaaaatcagaaaagaaaatccagtagttgttggtgaaaagatccaaaagatttgaactcctgctggaatacaaaattcttgagcatctgcaaactaaaaattgacttgaggttttttttttcctagtcattgggaatgtagagcagtgtatcttgcatgtcatcggaagaatagatttttgttttggttttgttttgaaaatgactctgaacatttatttccattgcaatttctgtggctgaggagacttaaactttacaagtattatccttttaagatcattttaattttagttgagtgcagagggcttttataacaaacgtgcagaaattttggagggctgtgatttttccagtattaaacatgcatgcattaatcttgcagtttattttctcattgtgtatgtatatatcgcttttctctgcagcacgatttctcttttgataatgccctttagggcacaactagttatcagtaactgaatgtatcttaatcattatggctgcttctgttttttcattaacaaaggttattcatatgttagcatatagtttctttgcacccactatttatgtctgaatcatttgtcacaagagagtgtgtgctgatgagattgtaagtttgtgtgtttaaacttttttttgagcgagggaagaaaaagctgtatgcatttcattgctgtctacaggtttctttcagattatgttcatgggtttgtgtgtatacaatatgaagaatgatctgaagtaattgtgctgtatttatgtttattcaccagtctttgattaaataaaaaggaaaaccagaatgctcccttgt

SEQ ID NO: 204245 - DNA, 3071 bp, Homo sapiens
  Payload ID: 20278
  Gene Name: zinc finger, B-box domain containing
  Uniprot ID: A8MT70
  ENST ID: ENST00000307529
  CDS Start-End: 88-2607
cctctgccataattcttttgtctttgttacttttacagaagtgtttacaaatcagaataacttttagacaatattaaggtggtaatcatgaacagaaaagattttgtagttcttccatggggaaaacctggaaattctgtaaagctaaaatatagaaatgctcaagaactgcgaatggagaaagtacagttagagtttgagaaccaagagatggagaagaaactgcaagaattccgatccacaagaaacaaagaaaaggaagatagagagtcaagcgagtattactggaaatctggaaaagtgggcaaattggtcaatcaatcatatatgatgtcacaaaataaaggaaatgttgttaagttttctgctggaaaagtgaaattaaaattgctgaaggaacagattcaagagccagtgaaaccaacagttaattataaaatggcaaattcttcagaatgtgaaaaacccaagataaatgggaaagtatgtggacagtgtgagaacaaagctgctctactggtatgccttgaatgtggagaagattattgttcaggatgctttgctaaagttcaccagaaaggggcactaaagctccacagaacaactcttttgcaggcaaaatctcaaatattattcaatgtattggatgttgcccatcagtttataaaggatgttaatccagatgaacccaaagaggagaataattctacaaaggaaaccagtaaaattcaacataaacccaaatctgtacttctccagaggagcagctctgaggtagaaattacaacgatgaaaagagcacaacgtacaaaaccaagaaagagtctgttgtgtgaagggtcattcgatgaagaagcttctgcacagtcctttcaggaagtgttaagtcaatggagaaccggaaatcatgatgacaacaagaaacagaatttacatgcagcagtaaaagactcattggaagaatgcgaagtacagactaatctgaaaatttggagagaaccacttaatattgaacttaaagaagacattctatcctatatggaaaaattatggcttaaaaaacacaggagaactccacaagagcaactttttaaaatgctaccagatacgttcccacatccacatgaaaccactggtgatgcacagtgttctcaaaatgaaaacgatgaagatagtgatggtgaggagaccaaagtacaacacacagctcttttattgccagtagaaacattaaacatagagagacctgaaccatctctaaagatagtcgaactggatgatacttatgaagaggaatttgaagaagcagaaaatattgtgccttacaaagttaaattagctgatgcagacagtcaacgaagttgtgcttttcatgattgtcagaagaatagctttccatatgaaaatggcatccatcaacatcatgttttcgataagggaaagagagacttcttaaatctttgtctgagaaacagctctacttattataaagataattcaaaagcagaaacttcaaacacagattttgacaacatcgtggatcctgatgtgtattcttctgacattgaaaaaattgaggaaagcacctcctttgaaagaaatttaaaggagaaaaatataggtttagaaagtaatcaaaagtctgatgattcctgtgtatcacttgaaagcaaggacactttgctaggtagagatttagaaaaagctcccattgaggagaaattatctcaagacatcaaagaatccttggaattgagcaatctgtataagaggccaagctttgaagaatcaaaaactacaaagtcatcactgttgttacaagaaatagcctgcagaagtaagcctataacaaaacaatatcaaggacttgagagattctttatttttgatacaaatgaaagactcaacttacttccttctcatcgtttagaatgcaacaattccagtactaggattacacttgcagaagacagagaatggattccagaccatagcttaagtgaatatgctgataatgcaattgtcttgggtgttctgcagggtgctcagagtccatcatcaagtagaaaacagcaaaagatgggtcagaaatcacagagaccttcaacagcaaattttccactttccaactctgttaaagaaagctccagttgcctttcatcctctcatcctcgatcaagaagtgcagctgctcaatcatcatctagagctgcttctgaaatttcagaaattgaatatattgatattactgaccagaatgagctttccttagatgacactactgatcaacatactttagacaatttggaaaaagaattacaagtgctgagatctcttgcagatacttcagaaaagctttacagcttaacctcagaagagttcccagatttcagcagccaatcactgaatataagtcagatttccacagatttccttaagacctcacatgtgaggggtccctgtggagttgaggaattgagctgttctggaagagataccaaaattcagtctttgctgtcactttctgagagcagtacagatgaggaggaggaagattttctcaacaagcaacatgtcatcacactaccgtggtcaaagagtacttaaagattatttgttcattactgtttccattttgtacccagagtaaagcaaacaactgagaaaagtaaccaagtgattacctatccaagtgctggagattttgattactaatgtctttgatgtttcaaggctacaaactaataaaagtaaaattataagttcaagggcttattcttccaatgatatattatatgtcaaccactaatctatattgcagattatgttagtaaaatatggtgaatttgaagaaataactgttacaactgtgtctataaaacctactatagggcagaacatgattatacttaaagaaatatttcatcgtccaattatattttaaataattatgtcatcaacaagagtgtgcatttgacagccaagtcacactagttagtatcatcaattgaacctataattacactgtttattttctggtttttaacatttatagaagttctggtatcttc

SEQ ID NO: 204246 - DNA, 2849 bp, Homo sapiens
  Payload ID: 20278
  Gene Name: zinc finger, B-box domain containing
  Uniprot ID: A8MT70
  ENST ID: ENST00000392764
  CDS Start-End: 373-2688
atccggcggtggtgacgcgagaggctggggtctccaggaccaactcctcttcatcttcgtcttcctcagcctgctcaatgtgaagcccctgatcatgattcacttccacttaataaataaagtgtttacaaatcagaataacttttagacaatattaaggtggtaatcatgaacagaaaagattttgtagttcttccatggggaaaacctggaaattctgtaaagctaaaatatagcaatgtaataattaaaacaaaagtctaagatttgaagagataatttgcttcaggattttgatggaaggcaaatgctaactttaaaaaccagatttcggagaagtacaaaagaaatagaaatgctcaagaactgcgaatggagaaagtacagttagagtttgagaaccaagagatggagaagaaactgcaagaattccgatccacaagaaacaaagaaaaggaagatagagagtcaagcgagtattactggaaatctggaaaagtgggcaaattggtcaatcaatcatatatgatgtcacaaaataaaggaaatgttgttaagttttctgctggaaaagtgaaattaaaattgctgaaggaacagattcaagagccagtgaaaccaacagttaattataaaatggcaaattcttcagaatgtgaaaaacccaagataaatgggaaagtatgtggacagtgtgagaacaaagctgctctactggtatgccttgaatgtggagaagattattgttcaggatgctttgctaaagttcaccagaaaggggcactaaagctccacagaacaactcttttgcaggcaaaatctcaaatattattcaatgtattggatgttgcccatcagtttataaaggatgttaatccagatgaacccaaagaggagaataattctacaaaggaaaccagtaaaattcaacataaacccaaatctgtacttctccagaggagcagctctgaggtagaaattacaacgatgaaaagagcacaacgtacaaaaccaagaaagagtctgttgtgtgaagggtcattcgatgaagaagcttctgcacagtcctttcaggaagtgttaagtcaatggagaaccggaaatcatgatgacaacaagaaacagaatttacatgcagcagtaaaagactcattggaagaatgcgaagtacagactaatctgaaaatttggagagaaccacttaatattgaacttaaagaagacattctatcctatatggaaaaattatggcttaaaaaacacaggagaactccacaagagcaactttttaaaatgctaccagatacgttcccacatccacatgaaaccactggtgatgcacagtgttctcaaaatgaaaacgatgaagatagtgatggtgaggagaccaaagtacaacacacagctcttttattgccagtagaaacattaaacatagagagacctgaaccatctctaaagatagtcgaactggatgatacttatgaagaggaatttgaagaagcagaaaatattgtgccttacaaagttaaattagctgatgcagacagtcaacgaagttgtgcttttcatgattgtcagaagaatagctttccatatgaaaatggcatccatcaacatcatgttttcgataagggaaagagagacttcttaaatctttgtctgagaaacagctctacttattataaagataattcaaaagcagaaacttcaaacacagattttgacaacatcgtggatcctgatgtgtattcttctgacattgaaaaaattgaggaaagcacctcctttgaaagaaatttaaaggagaaaaatataggtttagaaagtaatcaaaagtctgatgattcctgtgtatcacttgaaagcaaggacactttgctaggtagagatttagaaaaagctcccattgaggagaaattatctcaagacatcaaagaatccttggaattgagcaatctgtataagaggccaagctttgaagaatcaaaaactacaaagtcatcactgttgttacaagaaatagcctgcagaagtaagcctataacaaaacaatatcaaggacttgagagattctttatttttgatacaaatgaaagactcaacttacttccttctcatcgtttagaatgcaacaattccagtactaggattacacttgcaggtcagaaatcacagagaccttcaacagcaaattttccactttccaactctgttaaagaaagctccagttgcctttcatcctctcatcctcgatcaagaagtgcagctgctcaatcatcatctagagctgcttctgaaatttcagaaattgaatatattgatattactgaccagaatgagctttccttagatgacactactgatcaacatactttagacaatttggaaaaagaattacaagtgctgagatctcttgcagatacttcagaaaagctttacagcttaacctcagaagagttcccagatttcagcagccaatcactgaatataagtcagatttccacagatttccttaagacctcacatgtgaggggtccctgtggagttgaggaattgagctgttctggaagagataccaaaattcagtctttgctgtcactttctgagagcagtacagatgaggaggaggaagattttctcaacaagcaacatgtcatcacactaccgtggtcaaagagtacttaaagattatttgttcattactgtttccattttgtacccagagtaaagcaaacaactgagaaaagtaaccaagtgattacctatccaagtgctggagattttgattactaatgtctttgatgtttcaaggctacaaactaataaaagtaaaattataagttcaa

SEQ ID NO: 204247 - DNA, 3250 bp, Homo sapiens
  Payload ID: 20278
  Gene Name: zinc finger, B-box domain containing
  Uniprot ID: A8MT70
  ENST ID: ENST00000392766
  CDS Start-End: 342-2744
cggcagctatccgcggccatccggcggtggtgacgcgagaggctggggtctccagcctttagtctgcctgcgcgttcacatgcacccacttacttcttgaagtctactcctcacaagtaagggctatggtgcggggtgcccgattcctgagaaatctgaagatgtggaagtttattttttcttcccaaaatcagcagtagagggactcaggaccaactcctcttcatcttcgtcttcctcagcctgctcaatgtgaagcccctgatcatgattcacttccacttaataaataaagtgtttacaaatcagaataacttttagacaatattaaggtggtaatcatgaacagaaaagattttgtagttcttccatggggaaaacctggaaattctgtaaagctaaaatatagaaatgctcaagaactgcgaatggagaaagtacagttagagtttgagaaccaagagatggagaagaaactgcaagaattccgatccacaagaaacaaagaaaaggaagatagagagtcaagcgagtattactggaaatctggaaaagtgggcaaattggtcaatcaatcatatatgatgtcacaaaataaaggaaatgttgttaagttttctgctggaaaagtgaaattaaaattgctgaaggaacagattcaagagccagtgaaaccaacagttaattataaaatggcaaattcttcagaatgtgaaaaacccaagataaatgggaaagtatgtggacagtgtgagaacaaagctgctctactggtatgccttgaatgtggagaagattattgttcaggatgctttgctaaagttcaccagaaaggggcactaaagctccacagaacaactcttttgcaggcaaaatctcaaatattattcaatgtattggatgttgcccatcagtttataaaggatgttaatccagatgaacccaaagaggagaataattctacaaaggaaaccagtaaaattcaacataaacccaaatctgtacttctccagaggagcagctctgaggtagaaattacaacgatgaaaagagcacaacgtacaaaaccaagaaagagtctgttgtgtgaagggtcattcgatgaagaagcttctgcacagtcctttcaggaagtgttaagtcaatggagaaccggaaatcatgatgacaacaagaaacagaatttacatgcagcagtaaaagactcattggaagaatgcgaagtacagactaatctgaaaatttggagagaaccacttaatattgaacttaaagaagacattctatcctatatggaaaaattatggcttaaaaaacacaggagaactccacaagagcaactttttaaaatgctaccagatacgttcccacatccacatgaaaccactggtgatgcacagtgttctcaaaatgaaaacgatgaagatagtgatggtgaggagaccaaagtacaacacacagctcttttattgccagtagaaacattaaacatagagagacctgaaccatctctaaagatagtcgaactggatgatacttatgaagaggaatttgaagaagcagaaaatattgtgccttacaaagttaaattagctgatgcagacagtcaacgaagttgtgcttttcatgattgtcagaagaatagctttccatatgaaaatggcatccatcaacatcatgttttcgataagggaaagagagacttcttaaatctttgtctgagaaacagctctacttattataaagataattcaaaagcagaaacttcaaacacagattttgacaacatcgtggatcctgatgtgtattcttctgacattgaaaaaattgaggaaagcacctcctttgaaagaaatttaaaggagaaaaatataggtttagaaagtaatcaaaagtctgatgattcctgtgtatcacttgaaagcaaggacactttgctaggtagagatttagaaaaagctcccattgaggagaaattatctcaagacatcaaagaatccttggaattgagcaatctgtataagaggccaagctttgaagaatcaaaaactacaaagtcatcactgttgttacaagaaatagcctgcagaagtaagcctataacaaaacaatatcaaggacttgagagattctttatttttgatacaaatgaaagactcaacttacttccttctcatcgtttagaatgcaacaattccagtactaggattacacttgcaggtcagaaatcacagagaccttcaacagcaaattttccactttccaactctgttaaagaaagctccagttgcctttcatcctctcatcctcgatcaagaagtgcagctgctcaatcatcatctagagctgcttctgaaatttcagaaattgaatatattgatattactgaccagaatgagctttccttagatgacactactgatcaacatactttagacaatttggaaaaagaattacaagtgctgagatctcttgcagatacttcagaaaagctttacagcttaacctcagaagagttcccagatttcagcagccaatcactgaatataagtcagatttccacagatttccttaagacctcacatgtgaggggtccctgtggagttgaggaattgagctgttctggaagagataccaaaattcagtctttgctgtcactttctgagagcagtacagatgaggaggaggaagattttctcaacaagcaacatgtcatcacactaccgtggtcaaagagtacttaaagattatttgttcattactgtttccattttgtacccagagtaaagcaaacaactgagaaaagtaaccaagtgattacctatccaagtgctggagattttgattactaatgtctttgatgtttcaaggctacaaactaataaaagtaaaattataagttcaagggcttattcttccaatgatatattatatgtcaaccactaatctatattgcagattatgttagtaaaatatggtgaatttgaagaaataactgttacaactgtgtctataaaacctactatagggcagaacatgattatacttaaagaaatatttcatcgtccaattatattttaaataattatgtcatcaacaagagtgtgcatttgacagccaagtcacactagttagtatcatcaattgaacctataattacactgtttattttctggtttttaacatttatagaagttctggtatcttcaaaaatttgcaataaaagaaaaaaagaggaccaaaaataaaa

SEQ ID NO: 204248 - DNA, 3071 bp, Homo sapiens
  Payload ID: 20278
  Gene Name: zinc finger, B-box domain containing
  Uniprot ID: A8MT70
  ENST ID: ENST00000392767
  CDS Start-End: 292-2607
cctctgccataattcttttgtctttgttacttttacagaagtgtttacaaatcagaataacttttagacaatattaaggtggtaatcatgaacagaaaagattttgtagttcttccatggggaaaacctggaaattctgtaaagctaaaatatagcaatgtaataattaaaacaaaagtctaagatttgaagagataatttgcttcaggattttgatggaaggcaaatgctaactttaaaaaccagatttcggagaagtacaaaagaaatagaaatgctcaagaactgcgaatggagaaagtacagttagagtttgagaaccaagagatggagaagaaactgcaagaattccgatccacaagaaacaaagaaaaggaagatagagagtcaagcgagtattactggaaatctggaaaagtgggcaaattggtcaatcaatcatatatgatgtcacaaaataaaggaaatgttgttaagttttctgctggaaaagtgaaattaaaattgctgaaggaacagattcaagagccagtgaaaccaacagttaattataaaatggcaaattcttcagaatgtgaaaaacccaagataaatgggaaagtatgtggacagtgtgagaacaaagctgctctactggtatgccttgaatgtggagaagattattgttcaggatgctttgctaaagttcaccagaaaggggcactaaagctccacagaacaactcttttgcaggcaaaatctcaaatattattcaatgtattggatgttgcccatcagtttataaaggatgttaatccagatgaacccaaagaggagaataattctacaaaggaaaccagtaaaattcaacataaacccaaatctgtacttctccagaggagcagctctgaggtagaaattacaacgatgaaaagagcacaacgtacaaaaccaagaaagagtctgttgtgtgaagggtcattcgatgaagaagcttctgcacagtcctttcaggaagtgttaagtcaatggagaaccggaaatcatgatgacaacaagaaacagaatttacatgcagcagtaaaagactcattggaagaatgcgaagtacagactaatctgaaaatttggagagaaccacttaatattgaacttaaagaagacattctatcctatatggaaaaattatggcttaaaaaacacaggagaactccacaagagcaactttttaaaatgctaccagatacgttcccacatccacatgaaaccactggtgatgcacagtgttctcaaaatgaaaacgatgaagatagtgatggtgaggagaccaaagtacaacacacagctcttttattgccagtagaaacattaaacatagagagacctgaaccatctctaaagatagtcgaactggatgatacttatgaagaggaatttgaagaagcagaaaatattgtgccttacaaagttaaattagctgatgcagacagtcaacgaagttgtgcttttcatgattgtcagaagaatagctttccatatgaaaatggcatccatcaacatcatgttttcgataagggaaagagagacttcttaaatctttgtctgagaaacagctctacttattataaagataattcaaaagcagaaacttcaaacacagattttgacaacatcgtggatcctgatgtgtattcttctgacattgaaaaaattgaggaaagcacctcctttgaaagaaatttaaaggagaaaaatataggtttagaaagtaatcaaaagtctgatgattcctgtgtatcacttgaaagcaaggacactttgctaggtagagatttagaaaaagctcccattgaggagaaattatctcaagacatcaaagaatccttggaattgagcaatctgtataagaggccaagctttgaagaatcaaaaactacaaagtcatcactgttgttacaagaaatagcctgcagaagtaagcctataacaaaacaatatcaaggacttgagagattctttatttttgatacaaatgaaagactcaacttacttccttctcatcgtttagaatgcaacaattccagtactaggattacacttgcaggtcagaaatcacagagaccttcaacagcaaattttccactttccaactctgttaaagaaagctccagttgcctttcatcctctcatcctcgatcaagaagtgcagctgctcaatcatcatctagagctgcttctgaaatttcagaaattgaatatattgatattactgaccagaatgagctttccttagatgacactactgatcaacatactttagacaatttggaaaaagaattacaagtgctgagatctcttgcagatacttcagaaaagctttacagcttaacctcagaagagttcccagatttcagcagccaatcactgaatataagtcagatttccacagatttccttaagacctcacatgtgaggggtccctgtggagttgaggaattgagctgttctggaagagataccaaaattcagtctttgctgtcactttctgagagcagtacagatgaggaggaggaagattttctcaacaagcaacatgtcatcacactaccgtggtcaaagagtacttaaagattatttgttcattactgtttccattttgtacccagagtaaagcaaacaactgagaaaagtaaccaagtgattacctatccaagtgctggagattttgattactaatgtctttgatgtttcaaggctacaaactaataaaagtaaaattataagttcaagggcttattcttccaatgatatattatatgtcaaccactaatctatattgcagattatgttagtaaaatatggtgaatttgaagaaataactgttacaactgtgtctataaaacctactatagggcagaacatgattatacttaaagaaatatttcatcgtccaattatattttaaataattatgtcatcaacaagagtgtgcatttgacagccaagtcacactagttagtatcatcaattgaacctataattacactgtttattttctggtttttaacatttatagaagttctggtatcttc

SEQ ID NO: 204249 - DNA, 3185 bp, Homo sapiens
  Payload ID: 20278
  Gene Name: zinc finger, B-box domain containing
  Uniprot ID: A8MT70
  ENST ID: ENST00000455345
  CDS Start-End: 285-2804
tttagtctgcctgcgcgttcacatgcacccacttacttcttgaagtctactcctcacaagtaagggctatggtgcggggtgcccgattcctgagaaatctgaagatgtggaagtttattttttcttcccaaaatcagcagtagagggactcaggaccaactcctcttcatcttcgtcttcctcagcctgctcaatgtgaagcccctgatcatgattcacttccacttaataaataaagtgtttacaaatcagaataacttttagacaatattaaggtggtaatcatgaacagaaaagattttgtagttcttccatggggaaaacctggaaattctgtaaagctaaaatatagaaatgctcaagaactgcgaatggagaaagtacagttagagtttgagaaccaagagatggagaagaaactgcaagaattccgatccacaagaaacaaagaaaaggaagatagagagtcaagcgagtattactggaaatctggaaaagtgggcaaattggtcaatcaatcatatatgatgtcacaaaataaaggaaatgttgttaagttttctgctggaaaagtgaaattaaaattgctgaaggaacagattcaagagccagtgaaaccaacagttaattataaaatggcaaattcttcagaatgtgaaaaacccaagataaatgggaaagtatgtggacagtgtgagaacaaagctgctctactggtatgccttgaatgtggagaagattattgttcaggatgctttgctaaagttcaccagaaaggggcactaaagctccacagaacaactcttttgcaggcaaaatctcaaatattattcaatgtattggatgttgcccatcagtttataaaggatgttaatccagatgaacccaaagaggagaataattctacaaaggaaaccagtaaaattcaacataaacccaaatctgtacttctccagaggagcagctctgaggtagaaattacaacgatgaaaagagcacaacgtacaaaaccaagaaagagtctgttgtgtgaagggtcattcgatgaagaagcttctgcacagtcctttcaggaagtgttaagtcaatggagaaccggaaatcatgatgacaacaagaaacagaatttacatgcagcagtaaaagactcattggaagaatgcgaagtacagactaatctgaaaatttggagagaaccacttaatattgaacttaaagaagacattctatcctatatggaaaaattatggcttaaaaaacacaggagaactccacaagagcaactttttaaaatgctaccagatacgttcccacatccacatgaaaccactggtgatgcacagtgttctcaaaatgaaaacgatgaagatagtgatggtgaggagaccaaagtacaacacacagctcttttattgccagtagaaacattaaacatagagagacctgaaccatctctaaagatagtcgaactggatgatacttatgaagaggaatttgaagaagcagaaaatattgtgccttacaaagttaaattagctgatgcagacagtcaacgaagttgtgcttttcatgattgtcagaagaatagctttccatatgaaaatggcatccatcaacatcatgttttcgataagggaaagagagacttcttaaatctttgtctgagaaacagctctacttattataaagataattcaaaagcagaaacttcaaacacagattttgacaacatcgtggatcctgatgtgtattcttctgacattgaaaaaattgaggaaagcacctcctttgaaagaaatttaaaggagaaaaatataggtttagaaagtaatcaaaagtctgatgattcctgtgtatcacttgaaagcaaggacactttgctaggtagagatttagaaaaagctcccattgaggagaaattatctcaagacatcaaagaatccttggaattgagcaatctgtataagaggccaagctttgaagaatcaaaaactacaaagtcatcactgttgttacaagaaatagcctgcagaagtaagcctataacaaaacaatatcaaggacttgagagattctttatttttgatacaaatgaaagactcaacttacttccttctcatcgtttagaatgcaacaattccagtactaggattacacttgcagaagacagagaatggattccagaccatagcttaagtgaatatgctgataatgcaattgtcttgggtgttctgcagggtgctcagagtccatcatcaagtagaaaacagcaaaagatgggtcagaaatcacagagaccttcaacagcaaattttccactttccaactctgttaaagaaagctccagttgcctttcatcctctcatcctcgatcaagaagtgcagctgctcaatcatcatctagagctgcttctgaaatttcagaaattgaatatattgatattactgaccagaatgagctttccttagatgacactactgatcaacatactttagacaatttggaaaaagaattacaagtgctgagatctcttgcagatacttcagaaaagctttacagcttaacctcagaagagttcccagatttcagcagccaatcactgaatataagtcagatttccacagatttccttaagacctcacatgtgaggggtccctgtggagttgaggaattgagctgttctggaagagataccaaaattcagtctttgctgtcactttctgagagcagtacagatgaggaggaggaagattttctcaacaagcaacatgtcatcacactaccgtggtcaaagagtacttaaagattatttgttcattactgtttccattttgtacccagagtaaagcaaacaactgagaaaagtaaccaagtgattacctatccaagtgctggagattttgattactaatgtctttgatgtttcaaggctacaaactaataaaagtaaaattataagttcaagggcttattcttccaatgatatattatatgtcaaccactaatctatattgcagattatgttagtaaaatatggtgaatttgaagaaataactgttacaactgtgtctataaaacctactatagggcagaacatgattatacttaaagaaatatttcatcgtccaattatattttaaataattatgtcatcaacaagagtgtgcatttgacagccaagtca

SEQ ID NO: 204250 - DNA, 751 bp, Homo sapiens
  Payload ID: 20278
  Gene Name: zinc finger, B-box domain containing
  ENST ID: ENST00000485651
  CDS Start-End: 546-751
cggcagctatccgcggccatccggcggtggtgacgcgagaggctggggtctccagcctttagtctgcctgcgcgttcacatgcacccacttacttcttgaagtctactcctcacaagtaagggctatggtgcggggtgcccgattcctgagaaatctgaagatgtggaagtttattttttcttcccaaaatcagcagtagagggactcaggaccaactcctcttcatcttcgtcttcctcagcctgctcaatgtgaagcccctgatcatgattcacttccacttaataaataaagtgtttacaaatcagaataacttttagacaatattaaggtggtaatcatgaacagaaaagattttgtagttcttccatggggaaaacctggaaattctgtaaagctaaaatatagcaatgtaataattaaaacaaaagtctaagatttgaagagataatttgcttcaggattttgatggaaggcaaatgctaactttaaaaaccagatttcggagaagtacaaaagaaatagaaatgctcaagaactgcgaatggagaaagtacagttagagtttgagaaccaagagatggagaagaaactgcaagaattccgatccacaagaaacaaagaaaaggaagatagagagatgacaaagtttattatgtgtcttgctgcttttaatgacccagtggccaattcttttaccttcactgatttggacttagtttggacttctaaatggatcatgatactcat

SEQ ID NO: 204251 - DNA, 718 bp, Homo sapiens
  Payload ID: 20278
  Gene Name: zinc finger, B-box domain containing
  ENST ID: ENST00000494898
  CDS Start-End: 1-136
aaagaaagctccagttgcctttcatcctctcatcctcgatcaagaagtgcagctgctcaatcatcatctagagctgcttctgaaatttcagaaattgaatatattgatattactgaccagaatgagctttccttagatgacactactgatcaacatactttagacaatttggaaaaagaattacaagtgctgagatctcttgcaggatgcatccacttcttctttctaagttctatgaaaaacaaccatgttaaggagctgggagaataagacagaaaataactacattagatacttcagaaaagctttacagcttaacctcagaagagttcccagatttcagcagccaatcactgaatataagtcagatttccacagatttccttaagacctcacatgtgaggggtccctgtggagttgaggaattgagctgttctggaagagataccaaaattcagtctttgctgtcactttctgagagcagtacagatgaggaggaggaagattttctcaacaagcaacatgtcatcacactaccgtggtcaaagagtacttaaagattatttgttcattactgtttccattttgtacccagagtaaagcaaacaactgagaaaagtaaccaagtgattacctatccaagtgctggagattttgattactaatgtctttgatgtttcaaggctacaaactaataaaagtaaaattataagttcaa

SEQ ID NO: 204252 - DNA, 691 bp, Homo sapiens
  Payload ID: 20278
  Gene Name: zinc finger, B-box domain containing
  ENST ID: ENST00000492642
  CDS Start-End: 1-260
cactttccaactctgttaaagaaagctccagttgcctttcatcctctcatcctcgatcaagaagtgcagctgctcaatcatcatctagagctgcttctgaaatttcagaaattgaatatattgatattactgaccagaatgagctttccttagatgacactactgatcaacatactttagacaatttggaaaaagaattacaagtgctgagatctcttgcagggcctcagcctgaagcttggagtccagtttgggactgaaaagatacttcagaaaagctttacagcttaacctcagaagagttcccagatttcagcagccaatcactgaatataagtcagatttccacagatttccttaagacctcacatgtgaggggtccctgtggagttgaggaattgagctgttctggaagagataccaaaattcagtctttgctgtcactttctgagagcagtacagatgaggaggaggaagattttctcaacaagcaacatgtcatcacactaccgtggtcaaagagtacttaaagattatttgttcattactgtttccattttgtacccagagtaaagcaaacaactgagaaaagtaaccaagtgattacctatccaagtgctggagattttgattactaatgtctttgatgtttcaaggctacaaactaataaaagtaaaattataagttcaa

SEQ ID NO: 204253 - DNA, 633 bp, Homo sapiens
  Payload ID: 20278
  Gene Name: zinc finger, B-box domain containing
  ENST ID: ENST00000464922
  CDS Start-End: 1-149
atgagctttccttagatgacactactgatcaacatactttagacaatttggaaaaagaattacaagtgctgagatctcttgcaggatgcatccacttcttctttctaagttctatgaaaaacaaccatgttaaggagctgggagaataagacagaaaataactacattagggcctcagcctgaagcttggagtccagtttgggactgaaaagatacttcagaaaagctttacagcttaacctcagaagagttcccagatttcagcagccaatcactgaatataagtcagatttccacagatttccttaagacctcacatgtgaggggtccctgtggagttgaggaattgagctgttctggaagagataccaaaattcagtctttgctgtcactttctgagagcagtacagatgaggaggaggaagattttctcaacaagcaacatgtcatcacactaccgtggtcaaagagtacttaaagattatttgttcattactgtttccattttgtacccagagtaaagcaaacaactgagaaaagtaaccaagtgattacctatccaagtgctggagattttgattactaatgtctttgatgtttcaaggctacaaactaataaaagtaaaattataa

SEQ ID NO: 204254 - DNA, 746 bp, Homo sapiens
  Payload ID: 20278
  Gene Name: zinc finger, B-box domain containing
  ENST ID: ENST00000474464
  CDS Start-End: 256-746
agctatccgcggccatccggcggtggtgacgcgagaggctggggtctccagcctttagtctgcctgcgcgttcacatgcacccacttacttcttgaagtctactcctcacaagtaagggctatggtgcggggtgcccgattcctgagaaatctgaagatgtggaagtttattttttcttcccaaaatcagcagtagagggactcagaagtgtttacaaatcagaataacttttagacaatattaaggtggtaatcatgaacagaaaagattttgtagttcttccatggggaaaacctggaaattctgtaaagctaaaatatagaaatgctcaagaactgcgaatggagaaagtacagttagagtttgagaaccaagagatggagaagaaactgcaagaattccgatccacaagaaacaaagaaaaggaagatagagagtcaagcgagtattactggaaatctggaaaagtgggcaaattggtcaatcaatcatatatgatgtcacaaaataaaggaaatgttgttaagttttctgctggaaaagtgaaattaaaattgctgaaggaacagattcaagagccagtgaaaccaacagttaattataaaatggcaaattcttcagaatgtgaaaaacccaagataaatgggaaagtatgtggacagtgtgagaacaaagctgctctactggtatgccttgaatgtggagaagattattgttcaggatgctttgctaaagttcaccagaa

SEQ ID NO: 204255 - DNA, 2832 bp, Homo sapiens
  Payload ID: 20279
  Gene Name: zinc finger, BED-type containing 1
  Uniprot ID: O96006
  ENST ID: ENST00000381218
  CDS Start-End: 299-2383
gcgcgtgtggcctccccgcctgtcccgggtcgggctccaaccaagcagcccccgtgcagccgcccccccgcgcaccctgacacctccgggccatggccggggacccgggggctcgcacgccccgcgcccaagacatcaggcggctctgcctgccgcctgcggtcggccagtgaccgcgcgcccccgccaggccccggaggggaggagcgggcgtcccagggacctcgacccctacccaccccaggcaggtccccacgcatgagcagccgtccagcaggcaggctccggtggagaagcaatggagaataaaagcctggagagctcccagacagacctgaagctggtggcccacccccgcgccaagagcaaggtgtggaagtatttcggcttcgacaccaacgccgagggatgcatcctgcagtggaagaaaatctactgccgcatctgcatggcccagatcgcctactccggaaacacctccaacctgtcctaccacctggagaagaaccaccccgaggaattctgcgagttcgtcaagagcaacacggagcagatgcgtgaagccttcgccaccgccttctccaagctgaagcccgagtcgtcccagcagcccgggcaggacgcgctggccgtcaaggccggccacggctacgacagcaagaagcagcaggagctgacggccgccgtgctgggcctcatctgcgaggggctgtacccagcctccatcgtggacgagcccaccttcaaggtgctgctgaagacggccgacccccggtatgagctgcccagccggaagtacatctctaccaaggccatccctgagaagtacggggccgtccgggaggtgatcctgaaggagctggccgaggccacctggtgtggcatctccaccgacatgtggaggagtgagaatcagaaccgcgcctacgtcacgctggccgcccacttcctgggcctgggcgcccccaactgcctgtccatgggctcccgctgcctgaagaccttcgaggtgcccgaagagaacacggcggagaccatcacgcgagtgctctatgaggtcttcatcgagtggggcatcagcgccaaggtcttcggggccaccaccaactatggcaaggacatcgtgaaggcgtgctccctgctggacgtcgcagtgcacatgccctgcctgggccacaccttcaatgccggcatccagcaggccttccagctcccgaagctgggggcgctgctgtcgcgctgccgcaaactggtggagtacttccagcagtctgccgtggccatgtacatgctctatgagaagcagaagcagcagaacgtggcccactgcatgctggtgagcaaccgcgtctcctggtgggggagcacgctggccatgctgcagcgcctcaaggagcagcagttcgtcatcgccggggtcttggtggaggacagcaacaaccaccacctcatgctggaggccagcgagtgggccaccatcgaggggctggtggagctcctgcagcccttcaagcaggtggccgagatgctgtcggcctccaggtaccccaccatcagcatggtgaagccgctgctgcacatgctcctgaacaccacgctcaacatcaaggagaccgactccaaggagctcagcatggccaaggaggtcatcgccaaggagctttccaagacctaccaggagacgcccgagatcgacatgtttctcaacgtggccaccttcctggacccccgctacaagaggctgcccttcctctccgccttcgagcggcagcaggtggagaatcgcgtggtggaagaggccaagggcctgctggacaaggtcaaagacggcggctaccggccggctgaggacaagatcttcccggtgcccgaggagcctcccgtcaagaagctcatgcggacatccacgccgccgcccgccagcgtcatcaacaacatgctggccgagatcttctgccagacaggcggcgtggaggaccaggaagagtggcatgcccaggtggtggaggagctgagcaacttcaagtcccagaaggtgcttggcctcaacgaagaccccctcaagtggtggtcagaccgcctggccctcttccccctgctgcccaaggtgctgcagaagtactggtgcgtgacggccacgcgcgtcgcccctgagcgtctcttcggatccgccgccaacgtggtcagcgccaagaggaaccggctggctcccgcgcacgtggacgagcaggtgtttctgtatgagaacgcccggagtggggcagaggcggaacccgaggaccaggacgagggggagtggggcctggaccaggagcaggtgttctccttgggggatggcgtcagcggcggtttctttggcattagggacagcagcttcctgtagcgaggaagcgtgttgtcttacaagtcatccccgcagcagcccattggatgctttgctgtaaatacttacccggtcagcttggttttgaacctcagagaccatccactgtctttgacacctagaaggtggaaaaaggaaagagatttgagaagtgagagagggtcgggggcggtggctcctgtctataatcgcagcactttgggaggccgaggtgggcagatcagctgaggtcaggagatcgagaccagcctggccaacatggcgaaaccccgtctctactaaaaatacaaaaattagccaggactgatggcatgtgcctgtaatcccagcttctggaggctgaggccagagaatcgcttgaacctgggaggtggaggttgcagtaagctgagatcgctgcactccagcctgggcgacaagagcgagactctctcaaaaagaaaaaagaa

SEQ ID NO: 204256 - DNA, 4485 bp, Homo sapiens
  Payload ID: 20279
  Gene Name: zinc finger, BED-type containing 1
  Uniprot ID: O96006
  ENST ID: ENST00000381222
  CDS Start-End: 202-2286
cgcgggcggcgcggaagcggcggcggcgcggccggggcagccatgtcgccattgtctgcggcgcgggcggccctgcgggtctacgcggtaggcgccgcggtgatcctggcgcagctgctgcggcgctgccgcgggggcttcctggagccaggtccccacgcatgagcagccgtccagcaggcaggctccggtggagaagcaatggagaataaaagcctggagagctcccagacagacctgaagctggtggcccacccccgcgccaagagcaaggtgtggaagtatttcggcttcgacaccaacgccgagggatgcatcctgcagtggaagaaaatctactgccgcatctgcatggcccagatcgcctactccggaaacacctccaacctgtcctaccacctggagaagaaccaccccgaggaattctgcgagttcgtcaagagcaacacggagcagatgcgtgaagccttcgccaccgccttctccaagctgaagcccgagtcgtcccagcagcccgggcaggacgcgctggccgtcaaggccggccacggctacgacagcaagaagcagcaggagctgacggccgccgtgctgggcctcatctgcgaggggctgtacccagcctccatcgtggacgagcccaccttcaaggtgctgctgaagacggccgacccccggtatgagctgcccagccggaagtacatctctaccaaggccatccctgagaagtacggggccgtccgggaggtgatcctgaaggagctggccgaggccacctggtgtggcatctccaccgacatgtggaggagtgagaatcagaaccgcgcctacgtcacgctggccgcccacttcctgggcctgggcgcccccaactgcctgtccatgggctcccgctgcctgaagaccttcgaggtgcccgaagagaacacggcggagaccatcacgcgagtgctctatgaggtcttcatcgagtggggcatcagcgccaaggtcttcggggccaccaccaactatggcaaggacatcgtgaaggcgtgctccctgctggacgtcgcagtgcacatgccctgcctgggccacaccttcaatgccggcatccagcaggccttccagctcccgaagctgggggcgctgctgtcgcgctgccgcaaactggtggagtacttccagcagtctgccgtggccatgtacatgctctatgagaagcagaagcagcagaacgtggcccactgcatgctggtgagcaaccgcgtctcctggtgggggagcacgctggccatgctgcagcgcctcaaggagcagcagttcgtcatcgccggggtcttggtggaggacagcaacaaccaccacctcatgctggaggccagcgagtgggccaccatcgaggggctggtggagctcctgcagcccttcaagcaggtggccgagatgctgtcggcctccaggtaccccaccatcagcatggtgaagccgctgctgcacatgctcctgaacaccacgctcaacatcaaggagaccgactccaaggagctcagcatggccaaggaggtcatcgccaaggagctttccaagacctaccaggagacgcccgagatcgacatgtttctcaacgtggccaccttcctggacccccgctacaagaggctgcccttcctctccgccttcgagcggcagcaggtggagaatcgcgtggtggaagaggccaagggcctgctggacaaggtcaaagacggcggctaccggccggctgaggacaagatcttcccggtgcccgaggagcctcccgtcaagaagctcatgcggacatccacgccgccgcccgccagcgtcatcaacaacatgctggccgagatcttctgccagacaggcggcgtggaggaccaggaagagtggcatgcccaggtggtggaggagctgagcaacttcaagtcccagaaggtgcttggcctcaacgaagaccccctcaagtggtggtcagaccgcctggccctcttccccctgctgcccaaggtgctgcagaagtactggtgcgtgacggccacgcgcgtcgcccctgagcgtctcttcggatccgccgccaacgtggtcagcgccaagaggaaccggctggctcccgcgcacgtggacgagcaggtgtttctgtatgagaacgcccggagtggggcagaggcggaacccgaggaccaggacgagggggagtggggcctggaccaggagcaggtgttctccttgggggatggcgtcagcggcggtttctttggcattagggacagcagcttcctgtagcgaggaagcgtgttgtcttacaagtcatccccgcagcagcccattggatgctttgctgtaaatacttacccggtcagcttggttttgaacctcagagaccatccactgtctttgacacctagaaggtggaaaaaggaaagagatttgagaagtgagagagggtcgggggcggtggctcctgtctataatcgcagcactttgggaggccgaggtgggcagatcagctgaggtcaggagatcgagaccagcctggccaacatggcgaaaccccgtctctactaaaaatacaaaaattagccaggactgatggcatgtgcctgtaatcccagcttctggaggctgaggccagagaatcgcttgaacctgggaggtggaggttgcagtaagctgagatcgctgcactccagcctgggcgacaagagcgagactctctcaaaaagaaaaaagaagacacaagagaggtggctttgagtgggtttcctttcctcccctattcccggggcccggacgacttctgcttgggaactgccaacgcttctgcttgggaattgcgtgcagcagagcctagaggagctgttccttccttcacagatacttaagacctccaccatgtctgattcgagttctccctgggagggtttagaagaaacgcaggaacattctgggtggcgtcgaaggagcctttcccgatcatcatgtgtgacttctgcgaggtccagatcactgaattcatgtttacattctcgtgcaagcagggacctcttgcttctgagaaatggggaagagaccttttagccaaaatgcccttcttaaaaagagagacctttttttttaatgttcggttaaaaatgtgacagatgagtacaaaaatgcagacacttaacaaaaagcaaacagaaaaaaaagtgtggaatgtgttgtattttcgacaggttgctgccagagagcctgcttcctgctgcctgccgaaatttcactttgcggagttggtccttaaaactgggcggtggccgggcgtggtggctcacgctgaggtcaggagttcgagaccagcctggccaaccaacatggtgaaacctcgtgtctactaaaaatacaagaaactagccagatgcggtggcacccgcctgtaatcccagctactcgggaggctgaggcggaagattcgcttgagcccaggaggtggaggttgcagtgagccaagactacgccactgcactccagcctggaggccagagtgagactccgtctcaaaacaaaacaaaagtgggtggctcacgggtccggaggttatgtcttcggtgtctcagccctaaaagtccagttcccccgtgcggccagcttttccacataaggtgtttttgatttgattaccggaaaggactcttgattcttctcttttaaactgaataccataggggaaatgaattttaaaatattgcccccggaggggttttccgtggctggattcctgcgagttgctttcagtcattcagggaaacagaaagacgttttccaacatgtagaactgctttttaactggaggaaaaatacttcaggaggcttagcatattgcttggattctacgtgcagcgggttctctgcctccgtgaagacaagctgggctggggagaacggtgtctaggagggatgaccccactcagctccaggcagtgttctgccgagaccccaagaactcggggtgtcagagggcaaaggaactacctgcctttcacggctgctgacttctcagggctgcaagcagcacagaatgttatccttacgtcctgagccggtttaagtctgtggaaaaggaagcacgggagaaatccacgtaacctttgctttctttttaagggaagcggttccgccgtgaacttggaaccctcagctccgggtgttctcggcagaagggcagctggaagggacacagtggggcaggctttggggttgctccctgttctgccccgaggccggggacgcagggcagcccacgcctccgtgggctccattctgtagcattgccagcgttctcttcacgtctctaacaatccttcgcttttcctcactcacgtggaaatgtgaactgtcccggctctgtcttcatttttatttttaagccatcgttcccctcctgaacggttgccccttatttaatgctgtaaagttggactgttgttcaataaaccagagcaatgc

SEQ ID NO: 204257 - DNA, 4510 bp, Homo sapiens
  Payload ID: 20279
  Gene Name: zinc finger, BED-type containing 1
  Uniprot ID: O96006
  ENST ID: ENST00000381223
  CDS Start-End: 205-2289
cgcgggcggcgcggaagcggcggcggcgcggccggggcagccatgtcgccattgtctgcggcgcgggcggccctgcgggtctacgcggtaggcgccgcggtgatcctggcgcagctgctgcggcgctgccgcgggggcttcctggagccagcaggtccccacgcatgagcagccgtccagcaggcaggctccggtggagaagcaatggagaataaaagcctggagagctcccagacagacctgaagctggtggcccacccccgcgccaagagcaaggtgtggaagtatttcggcttcgacaccaacgccgagggatgcatcctgcagtggaagaaaatctactgccgcatctgcatggcccagatcgcctactccggaaacacctccaacctgtcctaccacctggagaagaaccaccccgaggaattctgcgagttcgtcaagagcaacacggagcagatgcgtgaagccttcgccaccgccttctccaagctgaagcccgagtcgtcccagcagcccgggcaggacgcgctggccgtcaaggccggccacggctacgacagcaagaagcagcaggagctgacggccgccgtgctgggcctcatctgcgaggggctgtacccagcctccatcgtggacgagcccaccttcaaggtgctgctgaagacggccgacccccggtatgagctgcccagccggaagtacatctctaccaaggccatccctgagaagtacggggccgtccgggaggtgatcctgaaggagctggccgaggccacctggtgtggcatctccaccgacatgtggaggagtgagaatcagaaccgcgcctacgtcacgctggccgcccacttcctgggcctgggcgcccccaactgcctgtccatgggctcccgctgcctgaagaccttcgaggtgcccgaagagaacacggcggagaccatcacgcgagtgctctatgaggtcttcatcgagtggggcatcagcgccaaggtcttcggggccaccaccaactatggcaaggacatcgtgaaggcgtgctccctgctggacgtcgcagtgcacatgccctgcctgggccacaccttcaatgccggcatccagcaggccttccagctcccgaagctgggggcgctgctgtcgcgctgccgcaaactggtggagtacttccagcagtctgccgtggccatgtacatgctctatgagaagcagaagcagcagaacgtggcccactgcatgctggtgagcaaccgcgtctcctggtgggggagcacgctggccatgctgcagcgcctcaaggagcagcagttcgtcatcgccggggtcttggtggaggacagcaacaaccaccacctcatgctggaggccagcgagtgggccaccatcgaggggctggtggagctcctgcagcccttcaagcaggtggccgagatgctgtcggcctccaggtaccccaccatcagcatggtgaagccgctgctgcacatgctcctgaacaccacgctcaacatcaaggagaccgactccaaggagctcagcatggccaaggaggtcatcgccaaggagctttccaagacctaccaggagacgcccgagatcgacatgtttctcaacgtggccaccttcctggacccccgctacaagaggctgcccttcctctccgccttcgagcggcagcaggtggagaatcgcgtggtggaagaggccaagggcctgctggacaaggtcaaagacggcggctaccggccggctgaggacaagatcttcccggtgcccgaggagcctcccgtcaagaagctcatgcggacatccacgccgccgcccgccagcgtcatcaacaacatgctggccgagatcttctgccagacaggcggcgtggaggaccaggaagagtggcatgcccaggtggtggaggagctgagcaacttcaagtcccagaaggtgcttggcctcaacgaagaccccctcaagtggtggtcagaccgcctggccctcttccccctgctgcccaaggtgctgcagaagtactggtgcgtgacggccacgcgcgtcgcccctgagcgtctcttcggatccgccgccaacgtggtcagcgccaagaggaaccggctggctcccgcgcacgtggacgagcaggtgtttctgtatgagaacgcccggagtggggcagaggcggaacccgaggaccaggacgagggggagtggggcctggaccaggagcaggtgttctccttgggggatggcgtcagcggcggtttctttggcattagggacagcagcttcctgtagcgaggaagcgtgttgtcttacaagtcatccccgcagcagcccattggatgctttgctgtaaatacttacccggtcagcttggttttgaacctcagagaccatccactgtctttgacacctagaaggtggaaaaaggaaagagatttgagaagtgagagagggtcgggggcggtggctcctgtctataatcgcagcactttgggaggccgaggtgggcagatcagctgaggtcaggagatcgagaccagcctggccaacatggcgaaaccccgtctctactaaaaatacaaaaattagccaggactgatggcatgtgcctgtaatcccagcttctggaggctgaggccagagaatcgcttgaacctgggaggtggaggttgcagtaagctgagatcgctgcactccagcctgggcgacaagagcgagactctctcaaaaagaaaaaagaagacacaagagaggtggctttgagtgggtttcctttcctcccctattcccggggcccggacgacttctgcttgggaactgccaacgcttctgcttgggaattgcgtgcagcagagcctagaggagctgttccttccttcacagatacttaagacctccaccatgtctgattcgagttctccctgggagggtttagaagaaacgcaggaacattctgggtggcgtcgaaggagcctttcccgatcatcatgtgtgacttctgcgaggtccagatcactgaattcatgtttacattctcgtgcaagcagggacctcttgcttctgagaaatggggaagagaccttttagccaaaatgcccttcttaaaaagagagacctttttttttaatgttcggttaaaaatgtgacagatgagtacaaaaatgcagacacttaacaaaaagcaaacagaaaaaaaagtgtggaatgtgttgtattttcgacaggttgctgccagagagcctgcttcctgctgcctgccgaaatttcactttgcggagttggtccttaaaactgggcggtggccgggcgtggtggctcacgctgaggtcaggagttcgagaccagcctggccaaccaacatggtgaaacctcgtgtctactaaaaatacaagaaactagccagatgcggtggcacccgcctgtaatcccagctactcgggaggctgaggcggaagattcgcttgagcccaggaggtggaggttgcagtgagccaagactacgccactgcactccagcctggaggccagagtgagactccgtctcaaaacaaaacaaaagtgggtggctcacgggtccggaggttatgtcttcggtgtctcagccctaaaagtccagttcccccgtgcggccagcttttccacataaggtgtttttgatttgattaccggaaaggactcttgattcttctcttttaaactgaataccataggggaaatgaattttaaaatattgcccccggaggggttttccgtggctggattcctgcgagttgctttcagtcattcagggaaacagaaagacgttttccaacatgtagaactgctttttaactggaggaaaaatacttcaggaggcttagcatattgcttggattctacgtgcagcgggttctctgcctccgtgaagacaagctgggctggggagaacggtgtctaggagggatgaccccactcagctccaggcagtgttctgccgagaccccaagaactcggggtgtcagagggcaaaggaactacctgcctttcacggctgctgacttctcagggctgcaagcagcacagaatgttatccttacgtcctgagccggtttaagtctgtggaaaaggaagcacgggagaaatccacgtaacctttgctttctttttaagggaagcggttccgccgtgaacttggaaccctcagctccgggtgttctcggcagaagggcagctggaagggacacagtggggcaggctttggggttgctccctgttctgccccgaggccggggacgcagggcagcccacgcctccgtgggctccattctgtagcattgccagcgttctcttcacgtctctaacaatccttcgcttttcctcactcacgtggaaatgtgaactgtcccggctctgtcttcatttttatttttaagccatcgttcccctcctgaacggttgccccttatttaatgctgtaaagttggactgttgttcaataaaccagagcaatgcattagctcctcattcatttgtc

SEQ ID NO: 204258 - DNA, 947 bp, Homo sapiens
  Payload ID: 20279
  Gene Name: zinc finger, BED-type containing 1
  ENST ID: ENST00000461691
  CDS Start-End: 133-947
ctgcgggtctacgcggtaggcgccgcggtgatcctggcgcagctgctgcggcgctgccgcgggggcttcctggagccagcaggtccccacgcatgagcagccgtccagcaggcaggctccggtggagaagcaatggagaataaaagcctggagagctcccagacagacctgaagctggtggcccacccccgcgccaagagcaaggtgtggaagtatttcggcttcgacaccaacgccgagggatgcatcctgcagtggaagaaaatctactgccgcatctgcatggcccagatcgcctactccggaaacacctccaacctgtcctaccacctggagaagaaccaccccgaggaattctgcgagttcgtcaagagcaacacggagcagatgcgtgaagccttcgccaccgccttctccaagctgaagcccgagtcgtcccagcagcccgggcaggacgcgctggccgtcaaggccggccacggctacgacagcaagaagcagcaggagctgacggccgccgtgctgggcctcatctgcgaggggctgtacccagcctccatcgtggacgagcccaccttcaaggtgctgctgaagacggccgacccccggtatgagctgcccagccggaagtacatctctaccaaggccatccctgagaagtacggggccgtccgggaggtgatcctgaaggagctggccgaggccacctggtgtggcatctccaccgacatgtggaggagtgagaatcagaaccgcgcctacgtcacgctggccgcccacttcctgggcctgggcgcccccaactgcctgtccatgggctcccgctgcctgaagaccttcgaggtgcccgaagagaacacggcggagaccatcacgcgagtgctctatgaggtcttcatcgagtggggcatcagcgccaaggtcttcggggccaccaccaactatgg

SEQ ID NO: 204259 - DNA, 2311 bp, Homo sapiens
  Payload ID: 20280
  Gene Name: zinc finger, BED-type containing 2
  Uniprot ID: Q9BTP6
  ENST ID: ENST00000317012
  CDS Start-End: 1010-1666
gcttccctagaagtgggaggaaaccagaactggaggtgccctccttctgggggtaggagtcagctaatagacatccaaggtgtgcaggagtgctttcactctgcgcaggaaagatcagagagaagtccagagccttgcctgcttgtgatcctggtggagaaggtggagtatggtgagctgcttgctaaggacagccaggcaacgctgtgtttgtgaagatgtgctccaccttctcctctgtgcatcccagctcctcctgctgaaacagctgagcttgctttttggatttcttagactcctggcctctgagagacacctctaaggacaaactgaccttgcattgggaactttattatccagatcctcataggctttgtctactctggattgcttgttgcaacagttcttaggaagcaagattgtctcctgcaccagcatctgcctgtgtttgcttttacctactttgagcaagacccagtgaggccctagctctgttggtcctgaaaagcctgaaccctgaggctgtttctcctgcctccaaaatgcaattataggaaataagaagcacagaaacagtggaaacaaccaggaggagaaacaagaaaacctaaaattttcaatattcaaaaatacctgtcgtggtggttgatgcagaaaacactgagttcatcaaagagctttgtaattgttggaccagagaacccctttgctacaggaactgatatgttttgtctttctggcctagtcaagggaggataagtaagtatctggggcatggaaggaatgcactcttgggctgttttgcttgtatctgactcacccctgactctccagtgaagcagaaaggaagaaacctcacaccacccaggtgtggccagactttggccattattgtgaatccccaagagttaccacaggcccttcccaaatatatatttaatcttgtggttcaaataagcttttggctcacatctaagcacatcataaagaacgctgtagaagaggtgacatgatgaggcgggaagacgaggaagaggagggaacaatgatgaaggcaaaaggggacttagagatgaaggaggaggaagagattagtgagacaggagaactggttggcccttttgtgagtgctatgcccactccaatgccccacaacaagggcacccggttctctgaggcatgggaatatttccacctagctcctgctcgtgctgggcaccatcccaaccagtatgccacctgccgcctgtgtggcaggcaggtgagccgtggccctggggtcaacgtgggcaccactgcactgtggaagcatctgaaaagcatgcacagagaggagctggagaagagtggccatggtcaggctgggcagcgccaggatccaaggccccacgggccccagctccccacaggcattgagggtaactggggtaggctcctggagcaggtgggcaccatggctttgtgggccagccaaagggaaaaggaggtgcttaggagggaaagggcagtggaatggcgggagagggctgtggaaaaaagggagcgagccctggaggaggtggaaagggccatcctggagatgaagtggaaggtgagggctgagaaggaggcatgccagcgggagaaagagctgcctgcagcagtacatcccttccattttgtttaaattgggcttggagaatctattctgaaaacattgactctagacttgtagaaaagagccattttagtttcaactcaaatgtaaagcaaagtagtttggtgacattttgcttttatgtgaaatagtgcacagtatgagttaatctgagcaggtctgaattgaccaaatgcttatctacgaggttcctagagctctgctgacccttggccgaaactctaaaatgtacctattaaagataaatgcttctaccaaagtaaaactctgtgagttgtttcagggcagaatgtaccagccagtcagcgttgtttaacaaaataatcagatttttgcctagcactcggttttggtggagctgacgattttgagggctgaggctggttaggtagctggaatgtgcctatgtgaccagctcacttgcagacaccctgccggaagcagagcttaatcttcctaggactgaggtcttagcacatgtactggtggagtttccagaccaccagtatgaataaaagcttgttctgtgtgacccagcaagtggaaggacaaagaactgtgagcctcagatctttggacctttccaatgcgtctctttctcctgttattgctgcaatgtattttcttgcttatattaaagttgtttcatcagta

SEQ ID NO: 204260 - DNA, 6172 bp, Homo sapiens
  Payload ID: 20281
  Gene Name: zinc finger, BED-type containing 3
  Uniprot ID: Q96IU2
  ENST ID: ENST00000255198
  CDS Start-End: 366-1070
tttcagagcgactcccctaccgctttcgggcgaaggccacacgtgacggcccccctttccccgcagacgtgtgaatgcagcgctgtgtctttaaggggcacgcgcggaggttttccgtccgggacaaaatgtcagcgaggcgcctggagggggatctaccatctcggactcccgacccgccgccggctccggccgcgtttcccgggtaaagggcactgctgatggttcttcagaactcaggaatcgtgttgcatgcattgtttctacccacctgagatggttggaaaccctgaggcaatgacagggaccccagaatccttgggaaattacccactgtctaatttaaagcgtgcgggcgccgcagaatgaggagtggcgagccggcctgcaccatggaccaggcccgcgggctggacgacgcggcggcgcggggcggtcagtgtccgggactggggccggcgccgacgccgacgcctcccggccgcctgggggcgccatactccgaggcctggggctacttccacctggcgccggggcgccccgggcatccgtcgggccactgggccacctgccgtctgtgcggggagcaggtgggccgcggcccgggcttccacgcggggacctcggcgttgtggaggcacctgaggagcgcgcaccggcgggagctggagagcagcggcgccgggagctccccacctgccgcgccctgcccgccgccgcccggccccgctgcggcccccgagggcgactgggcgcgcctgctggaacagatgggcgcgctggccgtgcgcggcagccggcgggagcgggagctggagcggcgcgagctggccgtggagcagggcgagcgcgccctggagcggaggcggagggcgctgcaggaggaagagcgcgccgcggcccaggcgcgccgggaactgcaggccgagcgggaggcgctgcaggcgcggctgcgggatgtgagccgccgtgagggcgccctgggctgggcccccgctgcgccgccgccgctcaaggacgaccccgagggtgacagggacggctgcgtcatcacaaaggtcctcctgtaggggtgtggccacttccccaccccaggacagcgcttctccgtccaatgccaatgccttcagaccccgctgggaccgaagccgtaaccgaagccaggcccgcagccgctactcactcggaagctccagctaactgtaggatcttccacaccctaaggcttcagcttgagaagcacttcgaagccagagcagaaccaaaactcacttccatggggtcaccgggggtgcctgggcggcctttcgtgggcatgcacgcaaggaattggggtggcacacgggacacccgagagctccaggagccccgtgaacccagaccacccagtgccatggccacttagggctgggaacccgaacctggtgactttgaaaggatagagcttcattccataccaaagacttatcacaccatgtgcctatacacccagcagcccaaggtggagggtgcgtggaaatgagaaagctttttacccaaaaaaaaaaaaaaaagagttcctaatgcataatctgcccaacaccaagttctgaagggtgggtgagggacgtcccctctagtttccatgactgctgtagacccgcatcatctctagccctcatcggggcagtcccagagcccgcttttttactgcccatattattcaaccaataccaggtgcactctgtctcccctcggccatccttcccttgcttcagacctaatgacaagtgtggcacatatgtccactttcaggcctcacatctgccaccttagcaagacatcacctcatccccttgtcactaggaagagggcttcttccccacatgtcgtcatagtgctcacctctgggctgaaggggaaagcatccctccgcttaaggccacatctacctgtcattttccatcccattcctctcccacgtttactgggtctttcctcctgtagtattccccctttcgctgtctcagtccctccctttcccccaggctcttcttcctcagcaatgtgcagtctccctttcttactgaaaagaaagacttaacccagaagggccaacaagtcctggctgcctatccttcctccccagtttttactccctcactctgggtcagttttcttttctttttttctttatgtgtgtatatattatatatatatatacatatatacatatatatatacatatatacatatatatatacatatatacatatatatatacatatatacatatacatatatatatatatatatatatgtatatataatactttaagttctagggtgcatgtcagttttctatgcttcaccagactatttccaagctgccacaatctcccagtgaccaaatatgatgatctatttgcagccttcattttgcttaatctctcccttgaaattgctctcttggtaggtggatcctgtttttccttcaaagaattccttttcctgttgcatactggttcccagtttttccataggcctcttttttttcttatttttttatattgaaaaattccacacatccagaaaaagttgaaaggctagcacaatgaatactcagatacatactctccacttggattgaatagttgttaacattttgccagatttactattctctccaccccatgcatgtgtacatagaatgacatttcgacccctgagtattaccacatagatttcctgagcacaaagacaccgttctacatgattacattaagatgatcatgcctaaaaatataaacagtaacttctttatagcctctaatacagagcccttaatcagtattcaacaattgtctccagaatgtttgtctttaaaaacaacgacaacaaccaggtcccatcaaggttcatacattcttttggtttcaactctagtcactttcagtctacaacaaccccaacatattttcccatgatactttttgaagcatccaggccagctgtcttagcaaatgtcctctattctggaagtgtctgattgcttccttaggcctatgtctacactccactcgtggctcatatccctgcagagttgtaatctcctctgggccagggactcctgaatatctccaggccgagtgttctccccgggcctggagaaaaccttcatgcccaatcccttgctgcatgtctccacccctccttgcacatcctgcctctatgagtggacgaggcaaatctactcaaccccacatcccacccctcacctgataactaacatttactgggcactaacaatgtatcaggcacatactacacacttaacatgcattgctttcacataccagctccatggtaacattgcgctggctttacagctaaagaaactgagctagaaaggggttaagtatcctgtacaagatcacagctggccagcaatagaggtgggatcccactgcagacagtctcccccacagatgccatgctcccactgtaccaccatgtactgcttcctgagatctctgcttccttcagtcgacccagctgacacctgtttccttcctaactccaactaattaattccagttaatggaattgactggaattagtgacattaatatttactgagcattccccatgtgtcatcagagctgtgctaaatgctttacaagaataattacctgccataaagcaaccctatgacataggtgctactatgcccattttgtagatgagacaggttcaggggagttagtatcaccttcaagtcatacagtggctaagaatctgtggtctcgctgaatgctgggcgcctgctctgctaagtctatttctacaaaacattgcactgccttcctgttgcctgccaagctcagggcccatttatcatgcatcttcccatccttgtctcccccaactgtcccttacctgagtcacaatttcgccaaagccaaagggattgtcctaagccaatgttgatttatcactcttcctgctcaaaagcccccaagatcacctatcaatcacctacttgagtgcaagctttgactctgtcacctgacattcaagtccccctctgcccccatgccagtcttatcccctcccctacatatgccctatcctgcagccaaattggactctgttcttcctgacaagacctggtattggcatctctatgcctcagtttgccttccctccactttaaaaagcctcttcagtctcgatacaaaaaacatcccacacatgttctaaaaccatgctttccttgatttctcctcatgtcaagacatttcttacttctctagtctcctagcattttgtgcctcacaaccctcaggacaggccagctagtgtatggctgtgggtttttatctcacctcccctgcctgaccctgagcccttgtggggagtatactcaccctactcctacagtgccttgcattccgtagctgctcagtacattaacccattcaatgtctttaagatttttacaagttagttttcctgtaattactaatcatttatctttaattctgagtaaaattcacaacaacaaataaaaggaaatagtagtaattttttaagctgtttagtcaataaagatttaatgcgtcagttattggactgtttggtttgaagccaatcaaccattctggtatgtaaatctacttttttattatacaagtaacacaaaatgtattgcctcagtcaaggaagaagaacagaaaaaaacaacaccccaaaatcctgtcacctctgtaaaactgctattaattaacattttaatatattttcttttgtcttttgcaatttttatattactctaagttattttcaagtattggaacttaacttcttcatatggatttataaattgggctagatgatctgaatttcctttttagaaggaaaaaaaaagacttccacaaatgttactcttctatctcaccaattgtaagaaccattaaaacataggaaaggatttagaatcttaactactccctcaaagatggctagtgcgagcctgaatgtcctgttcaggagacagagaacaattaacctgagtgctgagttaagggaagaggtttttactttctgctttatacacttctgcattgttgtaattttttacacaaagtatgaattacttttatgataaaaaaattttgtttgtagacaacattcctctccttcagcattcagcatccttagttaaaataaaatctccaacgaaagcatggatataatccccatttccagaaaatcccagaaagaaatgcagcccttgttcagtccaactccatcatttgatagattaggaaaataggttctagagagtgacttgtccactgtcaggagatggtgactgtggcgcgtcatctgactccagcctacttaatgcatttcagtctctttggccttaagggctcctgctgctcacctgaaatcattcccaaggaacccacaagagcaggttccctgggaggattcctgagaacacctacacacaagcctcagagatctgccaagacattctctttctgataaatactattaaatatttttctatcaaatagttgccaaatgacctgctccagtcaaaactcaatctgacttgtgactacaaagtaatctgaggaatcccaaaggtatataaaaatctatccatctaagtcatctctcttcaaagtagaagacctggaagactatacagttattcccaaaatgcttcaacatttctggaactcctcttttagagtggccatgagtccctagcacattctttaaaacatccttgagttggcaaatactcctctttccaggataaatttgattttttaaaagaactgccaattattcagtctggtgaatatggtagatgattaaccagattaacatttctggttaataaggtgagattataataaaacaatgataattattttagtgtggctcataaattggtcttgatagtggtatattaaggttaagtaaaggcagcatggtcaccatacagattaaagcccattttagttggtttatgatgtgaatgaattcaggtagcactgggagtcattatatgtttaaatagtattaaaggtttctttttataaaaatcttaattatgacattctctgaaatctggtttcacagtattaaaatgaggctttaaggaaaaaca

SEQ ID NO: 204261 - DNA, 542 bp, Homo sapiens
  Payload ID: 20281
  Gene Name: zinc finger, BED-type containing 3
  ENST ID: ENST00000511587
  CDS Start-End: 91-542
cgcctggagggggatctaccatctcggactcccgacccgccgccggctccggccgcgtttcccgggtaaagggcgtgcgggcgccgcagaatgaggagtggcgagccggcctgcaccatggaccaggcccgcgggctggacgacgcggcggcgcggggcggtcagtgtccgggactggggccggcgccgacgccgacgcctcccggccgcctgggggcgccatactccgaggcctggggctacttccacctggcgccggggcgccccgggcatccgtcgggccactgggccacctgccgtctgtgcggggagcaggtgggccgcggcccgggcttccacgcggggacctcggcgttgtggaggcacctgaggagcgcgcaccggcgggagctggagagcagcggcgccgggagctccccacctgccgcgccctgcccgccgccgcccggccccgctgcggcccccgagggcgactgggcgcgcctgctggaacagatgggcgcgctggccgtgcgcggcagccggcgggagcgggagctgga

SEQ ID NO: 204262 - DNA, 6893 bp, Homo sapiens
  Payload ID: 20282
  Gene Name: zinc finger, BED-type containing 4
  Uniprot ID: O75132
  ENST ID: ENST00000216268
  CDS Start-End: 478-3993
gcgcagcgtccggcggcgtcgcgggcggcgggcggcggggccgcgggaggggcgcgggggcagacaaagccgcggtaatgaatggagcgtccgcccgcgccgccgtcgtccgcagccggccgggagccgccccagaggccgggccgaggtaatgcacaagggtcacgtgtatgctctcaagatgatcaggcagatcctgtcctcaggaccagaagcacgtctctgctgcacacattgttgtctacaccatgagtgtttagtagcaggactcttggaaagcagtgatctatgctgtaagaccatgagtcacagattctttttttcagtactatttatgattagccatatttctagaaacatcctgaaagatggaattatgacgaaaaagtgaagataatctacattcgggggcacaaatgagcacttggatcagtgttttatgaacctaagatacagccggagtagttatggtcagtcatggagaataacttgaaaacttgtcccaaagaggacggtgatttcgtttctgataaaataaagtttaaaatagaagaggaagatgatgatggaattcctcctgatagtttggaaagaatggactttaaaagcgagcaggaggacatgaagcagacagacagcggtggggagcgagcgggcctcggtgggacgggttgcagctgcaagcccccggggaagtacttgtctgcagagagtgaggatgactatggcgcgctgttctcccagtacagcagcaccctatacgacgtggccatggaggccgtgacccagagcctcctttccagccggaacatgagctccaggaagaagtctccagcctggaagcatttttttatctctccccgagacagcactaaagcaatatgcatgtactgtgtgaaggagttcagcagaggcaaaaacgagaaagacttgagtaccagttgtctcatgaggcacgtgaggcgcgcacacccgaccgtgctcattcaggaaaatggcagtgtgtctgccgtgtcctcgttcccctctccctcactcctgcttccaccacagcctgcggacgcgggtgacctcagcaccatcctctcacccatcaaacttgtccagaaagtggcgtctaagatcccgtcccccgatcgaataacagaggagtctgtgtctgtagtttcttctgaagaaatctcctctgacatgtccgtttcggagaagtgcggcagagaagaagccctggtggggtcgtctccccacctccctgctctccattacgatgaacctgcagagaacttagcggagaagagccttccacttccaaagagcacctctgggtccaggagaaggtccgctgtctggaagcacttctacctgtcgccactggacaactccaaagctgtctgcattcactgcatgaacgagttcagccgggggaagaatgggaaggacctgggcacgagctgcctcatcaggcacatgtggagggcacaccgcgccatcgtgttgcaggagaacgggggcacgggcatcccgccactgtactccacccctcccactctgctgccttccttgctgccgccggagggggagctcagctctgtgtcctcgtctccagtaaagccggtcagagagtccccttcggcctcctcctcccctgacaggctgactgaggacttgcagtctcacttgaaccctggagatgggctgatggaagacgtggcggccttctcatcttccgatgacataggggaggcctcggcgtcctctcctgagaagcagcaggctgatgggctgagtcctagattgtttgaatctggcgccatcttccagcagaataaaaaggtcatgaaaagactgaagtcggaggtctggcatcacttctccctggcccccatggacagcctcaaggccgagtgtcggtactgcggctgtgccatcagccgggggaagaagggtgatgtgggcaccagctgcctgatgagacatctctaccggcgccatccagaagttgtcgggagccagaagggcttcctgggtgcaagtctggcaaactctccgtatgccactttggcctctgcagaaagttcctcttccaaattgactgacttgccaacagtggtcacaaaaaacaatcaagttatgtttcctgttaatagcaaaaagacctcgaagctgtggaatcatttttctatttgctccgcagactccacaaaagtcgtgtgcttgcactgtggccggaccatcagccgggggaagaagccgactaacttgggtaccagctgtcttctgagacatttacagcggttccatagcaacgtgctgaaaactgaggtctcggagacggctcggccctcctctccggacacccgggtgccgcggggcacagaattatcaggcgcttcctcttttgatgacaccaatgagaagttttacgattctcacccagttgccaaaaaaatcacaagtctcatagctgaaatgattgcacttgacctccagccatattcttttgtagacaacgttggctttaacaggctgcttgaatacttgaaacctcagtactccctccccgccccttcctacttctccaggacagctatcccaggtatgtatgataatgtgaagcagataattatgtcccaccttaaggaagctgagagtggtgtgatccacttcacgtctggaatatggatgagtaaccagacccgtgagtacctgaccctcacggcccactgggtttccttcgagtcgccagcccggccgcgctgtgacgaccaccactgctcggcgctgttggacgtgtcgcaggtggactgcgactacagtggcaacagcattcagaagcagctggagtgctggtgggaagcgtgggtgacctccaccggccttcaggtgggcatcaccgtcaccgacaacgccagcatcgggaagacgctgaacgagggggagcactcgagcgtgcagtgcttcagccatacggtgaacctgatcgtcagcgaggccattaagagccagcggatggtgcagaacctgctgagcctcgcccggaagatctgcgagcgggtgcaccggtcgcccaaggcgaaggagaaactggccgagctgcagagggagtacgcgctgcctcagcatcacctcatccaggacgtcccgtccaagtggagcacttccttccacatgctcgagcggctcattgagcagaaaagggccattaacgagatgtccgtcgagtgtaacttccgagagctgatcagctgcgaccagtgggaggtcatgcagtccgtgtgccgtgcgctaaagcccttcgaggctgcgagccgggagatgagcacgcagatgtccaccctcagccaggtcatccccatggtacacatcctcaacaggaaggtggagatgctcttcgaggagacgatgggcatcgacaccatgctgcgctctctgaaggaggccatggtgagccgcctgtctgccaccctccacgacccgcggtacgtcttcgccacgctgctggatcctcgctacaaggcctccctgtttacggaggaggaggcggagcagtacaaacaggatttaatcagggaactcgaactcatgaattctacctcagaggacgtggctgcctcccacaggtgtgatgctggctccccgtcgaaagactctgccgcagaggagaacctgtggtcacttgtggccaaggtgaagaagaaagacccaagagaaaagctgcctgaagccatggtgcttgcgtatctggaggaggaggtgcttgaacacagctgtgacccgctcacctactggaacctgaagaaggcgtcctggccggggctgtccgcgctggccgtcagatttttgggctgccccccaagcatcgtcccttcagaaaagctgttcaacacacccactgagaacggtagccttggccaatccaggctcatgatggaacattttgaaaaacttatctttttgaaagtgaatcttcccttaatatactttcagtattgaaactcacgacggcaccactaggccagaggcgtggctgccccagcgttagcagcctgtaccaggtctatgacccgctctgcccacggctgtgtacgacatcagaccaggcactctcagggccgctctccagctcaccacagtgtctccacgtgccttaccccttctccttcaggccaagtttcgcggggtgttttattaagacgtccactagaaatagcttgtcctgtcaactatgaaatatggtgactagattttaattcataaccgtaaagttttttaaagttttgggttagtaatttgttttactagaatgacaaagaagatgtaaaccattttattctgtaggctttttactcaattatgtacaaaccacaaatcaggtactgtattttagtgaagcattgctttaattgcaacagaatagcttttgtggctatcaaatgaaatctgtaaataggaggtggagggcaagccatcctgactgagcagtttttaaccgcaggttctaaagtgtcccgcggagtacagataatattctggaaggtaactgtttactacgacagagacgtggcatttggaaacgaaacttagatgtttcatggagcttattttgagaactttcccatttcaggtttctgcattcaggctttacatggtcagttaactcagagataccccagctgtttatcatcagctcctctgaaatgtgatccctttgtaactgtgctcatcacttcgccagtgcgttcaatgacacgctgatggcaggtggtccctgctgaaacccccacgcctccgcttcagcatctccacgctctgaagctgtctttcaaaatgtgtgcactgacccccttgtttgatcaaatttgtgtaaaatttttttagaagagatggcttattaacagggaagaagcttgttatattccagttgtaagaatagccttagtgtttagatttttttatgatagggaagatgcggccatcactgggatattttcaaatcccaaggacatcagagtgaagtgtcagttgtcagatgattttaaaagttatgtcttcagagaaaaaaagattcattttctcattttaaaccaattaaatattctgagtgagactaatcactcatttgcctacgaccttttagaaaagttgttttgttgaaatactgtacgtacgcttaatctaaatttgcattgactatgttttagtgtatttataaatggtgaactcagtttctgaaattaaacttcttatttgcaattttctagtgctggcagacactggctttttatttttaggataagaaaacaggcatattctttgtggtccattatctagagcccatacttgggcagcatttgaaatttcaccttaaccccagacagggctccagggaagtggagatgtaattcttacaacaacagttctgatcatggccatggtgatgactttccaggtctcgtgttcaagtggtgccagaatgcaggagccggtgggcagccctgaggggttgccttggccgcagcctctgtgcacgctcttcctggtgtcctcttacccggtagctgtgcgcttgttcccgtgagaacagcctgcttccagagtgcccaggagtgctggtcagggacagtgcccgtgaggctgcagaggaggtggggtccatggcccacccatctctccctcgccagcagccctggccagtgtcatcctggtgtagaaagggttgcgcacaggataggagggagccacagttcttgcttagctgtgctcacgaccagcttgcagtcctgtgtttcttaagattgtatttggaatggtaatatccttagaattttgggatattgagcttcatggattttctctccaaaacaagccagcacaactaactgtagcagaattgtatccactcattcattcaactgagatgaagtgccctcccttttccagggcctgggctagttcctggaatgcaacagagatttccgtggacacagtctctagtctcacagagcatatagtctagtccacgattggcaagctgcaaccacagacccagtccggcactctgcccatttttctaagtgaaattttcttggaatacagtcacagctgtttttttaacatggtgtcttggctactttcaggctgcgacgggagaactgaatagttgtgacagagaccacaggcccactgaaagggacaaacagggctgaaaatactcactgtttggccctttccagaatagcaagtttgctggcccttgagctagcctgcctttatggggttttttttgtttgtttttttaagctttcagcttcatgctgctgtatttttagttgaagtgttctgagtaacagtcagtgtataaaaggggattgcagaaaaaaatgagggcttgctttactcaacagaaaatatggcccttcctgaatgacactaggagagtcattttatctcatacattcccttcatttcgttggtggacatttgttgaaaccggcactcaatggtcaaaccgtctctgccctccagttgctgacagtcctgcaggaagatggacaagaggcccagtgctgacagtcacacgactctcactacttgaatgaggggactgtgggtgcaactagaaaatatgttgattcttagccattcccaccttgcctctccgttcagaaccccagctgcgagctgtttgtttccctgcctggaaatgatgttttaggcaggttccttaatttctcaggtctgtctcagataataaaaagctctttgtatgagcctcagaactgtctcttcagtgaatgaaattaccagtcattatacgaagggactttaaaaaatttgtggaaatactgaagtaaaagatgataaaaaaataaaaactttatttcttggctggg

SEQ ID NO: 204263 - DNA, 2741 bp, Homo sapiens
  Payload ID: 20283
  Gene Name: zinc finger, BED-type containing 5
  Uniprot ID: Q49AG3
  ENST ID: ENST00000432999
  CDS Start-End: 500-2581
agagtgctaaatttatcttcagaccggcgaccgcgccagccgcgaatcggatctctatggagatggcctaggcgatatccctgagctgagagcatcaccctgtccccgaatccttctttcctctctgttttgtttttcattcccctccctctctcccctccccctccagtccacgacgactggctgttgaccctgttcaggcctcggtgaaggcttttggttactccccttcccaccccatcccttaattttattcttttgaagagtgcatttcaagctgccaaggtggagagagggattacagaaaggagaacaccttatttcagcttttatttttatgtgataatctacctttaagaaaaggtgtaccatacctgagagcaccaggaagtcgcatgagagatcacctgatacatgaacgtatgatgttccatctgcgcattgatgaataggcagcatttacaaattaactgatgtgttgctgtatatcatctctttgatgattgctcctcttctttgtatcctgtcttataatttcaacacatttgcgatactcaatgtctattctaaattaaccatgttttgtaccacaaactcattgcccatggatctgttgctgaaacaaggaagtcttaaacaagaagtggaatctttctgttatcagattgtgtctgaatcaaatgatcagaaggttggaatattacaaagtgaagataagcagttgcaaccttcagtttctaaaaaatcagaaggtgagctttccagggtcaaatttatatccaattccaacaaaataacatttagtaaaaaaccaaaaagaagaaaatatgatgaaagttatttgtcttttggatttacttacttcggaaatagagatgcacctcatgctcagtgtgtattatgtaagaaaattttatcaaatagctctttagcccctagtaagcttcgaagacatttggaaactaaacatgctgcatataaagacaaagacataagctttttcaagcaacatctcgattcacctgaaaataataaacccccaacacctaaaattgtgaatacagataatgaaagtgctacagaagcatcatacaatgtaagttaccatatagcgctgagtggagaggctcatactattggagaattgcttatcaaaccttgtgcaaaagatgtagtgatgcggatgtttgatgaacaatatagtaaaaaaatagatgcagtacagctatcaaacagtactgttgcacgtcgaattaaggatctagctgctgacattgaagaagagcttgtttgtagactgaaaatttgcgatgggttttcactgcaactagatgaatcagctgatgtttcaggacttgctgtgctgcttgtgtttgttcgttataggtttaataagtctattgaggaagacctactcctgtgtgaatctttgcaaagtaatgctaccggtgaagaaatattcaactgtatcaacagttttatgcagaaacatgaaattgaatgggaaaaatgtgttgatgtttgtagtgatgcttctagggcagtggatgggaaaattgccgaagctgtcaccttaataaaatatgtggctcccgaaagcaccagtagtcactgcctattatacagacatgcactggcagttaaaataatgcctacatctctaaaaaatgtgctagaccaggcagtacaaatcatcaattatattaaagctcgaccacatcaatccagactattaaaaattttatgtgaggaaatgggtgctcagcacacagcacttcttctaaatacagaggtgaggtggctttctcgaggtaaagttcttgtaagactttttgaacttcgtcgtgaacttttggttttcatggattctgcttttcgactatctgattgtttaacaaattcatcttggctgctaagacttgcatatcttgcagatatttttactaaattaaatgaagttaatttgtcaatgcaaggaaaaaatgtgaccgtttttacagtatttgataaaatgtcgtcattgttaagaaaattggaattttgggcctcatctgtagaagaagaaaactttgattgttttcctacactcagtgattttttgactgaaattaattctacagttgataaagatatttgcagtgccattgtgcagcacctaaggggtttgcgcgctactctgttaaaatactttcctgtaacaaatgacaataatgcttgggttagaaatccatttacagttactgttaaaccagcttcattagtagcacgggactatgagagcctgattgatttaacatctgattctcaagtgaagcaaaattttagtgaactttcactaaatgatttttggagtagcctaattcaggaatacccaagcattgcaaggcgtgcagtgcgtgtacttcttccttttgctacaatgcacctgtgtgaaacggggttttcatattacgctgcaacaaaaacaaaatataggaaaagacttgatgctgcacctcatatgcgaatccgacttagcaatattacacctaatattaagcggatatgtgataaaaagacacaaaaacactgttctcattaaaattggaggagtttgcatgtctcatgataaccaaatgtaagatgaaaataaaagatgatttacttcatctctggtatttgggggatttaaataaaatgattccatttttttatactatttagattttaagaaggctaaagaatcaaacgttttaaacata

SEQ ID NO: 204264 - DNA, 2512 bp, Homo sapiens
  Payload ID: 20283
  Gene Name: zinc finger, BED-type containing 5
  Uniprot ID: Q49AG3
  ENST ID: ENST00000413761
  CDS Start-End: 431-2512
agccgcgaatcggatctctatggagatggcctaggcgatatccctgagctgagagcatcaccctgtccccgaatccttctttcctctctgttttgtttttcattcccctccctctctcccctccccctccagtccacgacgactggctgttgaccctgttcaggcctcggtgaaggcttttggttactccccttcccaccccatcccttaattttattcttttgaagagtgcatttcaagctgccaaggtggagagagggattacagaaaggagaacaccttatttcagaaaaggtgtaccatacctgagagcaccaggaagtcgcatgagagatcacctgatacatgaacgtatgatgttccatctgcgcattgatgaataggcagcatttacaaattaactgatgtgttgctgtatatcatctctttgatgattgctcctcttctttgtatcctgtcttataatttcaacacatttgcgatactcaatgtctattctaaattaaccatgttttgtaccacaaactcattgcccatggatctgttgctgaaacaaggaagtcttaaacaagaagtggaatctttctgttatcagattgtgtctgaatcaaatgatcagaaggttggaatattacaaagtgaagataagcagttgcaaccttcagtttctaaaaaatcagaaggtgagctttccagggtcaaatttatatccaattccaacaaaataacatttagtaaaaaaccaaaaagaagaaaatatgatgaaagttatttgtcttttggatttacttacttcggaaatagagatgcacctcatgctcagtgtgtattatgtaagaaaattttatcaaatagctctttagcccctagtaagcttcgaagacatttggaaactaaacatgctgcatataaagacaaagacataagctttttcaagcaacatctcgattcacctgaaaataataaacccccaacacctaaaattgtgaatacagataatgaaagtgctacagaagcatcatacaatgtaagttaccatatagcgctgagtggagaggctcatactattggagaattgcttatcaaaccttgtgcaaaagatgtagtgatgcggatgtttgatgaacaatatagtaaaaaaatagatgcagtacagctatcaaacagtactgttgcacgtcgaattaaggatctagctgctgacattgaagaagagcttgtttgtagactgaaaatttgcgatgggttttcactgcaactagatgaatcagctgatgtttcaggacttgctgtgctgcttgtgtttgttcgttataggtttaataagtctattgaggaagacctactcctgtgtgaatctttgcaaagtaatgctaccggtgaagaaatattcaactgtatcaacagttttatgcagaaacatgaaattgaatgggaaaaatgtgttgatgtttgtagtgatgcttctagggcagtggatgggaaaattgccgaagctgtcaccttaataaaatatgtggctcccgaaagcaccagtagtcactgcctattatacagacatgcactggcagttaaaataatgcctacatctctaaaaaatgtgctagaccaggcagtacaaatcatcaattatattaaagctcgaccacatcaatccagactattaaaaattttatgtgaggaaatgggtgctcagcacacagcacttcttctaaatacagaggtgaggtggctttctcgaggtaaagttcttgtaagactttttgaacttcgtcgtgaacttttggttttcatggattctgcttttcgactatctgattgtttaacaaattcatcttggctgctaagacttgcatatcttgcagatatttttactaaattaaatgaagttaatttgtcaatgcaaggaaaaaatgtgaccgtttttacagtatttgataaaatgtcgtcattgttaagaaaattggaattttgggcctcatctgtagaagaagaaaactttgattgttttcctacactcagtgattttttgactgaaattaattctacagttgataaagatatttgcagtgccattgtgcagcacctaaggggtttgcgcgctactctgttaaaatactttcctgtaacaaatgacaataatgcttgggttagaaatccatttacagttactgttaaaccagcttcattagtagcacgggactatgagagcctgattgatttaacatctgattctcaagtgaagcaaaattttagtgaactttcactaaatgatttttggagtagcctaattcaggaatacccaagcattgcaaggcgtgcagtgcgtgtacttcttccttttgctacaatgcacctgtgtgaaacggggttttcatattacgctgcaacaaaaacaaaatataggaaaagacttgatgctgcacctcatatgcgaatccgacttagcaatattacacctaatattaagcggatatgtgataaaaagacacaaaaacactgttctcattaa

SEQ ID NO: 204265 - DNA, 586 bp, Homo sapiens
  Payload ID: 20283
  Gene Name: zinc finger, BED-type containing 5
  ENST ID: ENST00000528289
  CDS Start-End: 408-586
aaatttatcttcagaccggcgaccgcgccagccgcgaatcggatctctatggagatggcctaggcgatatccctgagctgagagcatcaccctgtccccgaatccttctttcctctctgttttgtttttcattcccctccctctctcccctccccctccagtccacgacgactggctgttgaccctgttcaggcctcggtgaagagtgcatttcaagctgccaaggtggagagagggattacagaaaggagaacaccttatttcagaaaaggtgtaccatacctgagagcaccaggaagtcgcatgagagatcacctgatacatgaacgtatgatgttccatctgcgcattgatgaataggcagcatttacaaattaactgatgtgttgctgtatatcatctctttgatgattgctcctcttctttgtatcctgtcttataatttcaacacatttgcgatactcaatgtctattctaaattaaccatgttttgtaccacaaactcattgcccatggatctgttgctgaaacaaggaagtcttaaacaagaagtggaatctttctgttatcagattgtgtctgaatc

SEQ ID NO: 204266 - DNA, 1512 bp, Homo sapiens
  Payload ID: 20283
  Gene Name: zinc finger, BED-type containing 5
  ENST ID: ENST00000526020
  CDS Start-End: 1186-1512
ggacgctgcggtgccgctttccctatccagtcctgttcccgcggctccccagcctaccccgggccgaccaagaggtccggcggggtctgcgccgcatcagcgcccgctcgtcaggcctagccctccgcacagccaaggccgaccagacctctagacactccgtcgtcgggtgtggggcggagaagtaaagggcgagttttcttcctagattccagtgggaaccaagaaaaggagttggcagctgtgtaaactggacctggggtgcggcctccgggaacaaaagaggtgataaatgcacagcagccgaggttctgcgtgctcctttggggccactacgaatccccgtgaatcaccccagcccgggcagagggccagaaatgatgaaaatgcagattcatggcttccactccagccctacaagatcaccaaccgtatctggcagtacccaggaatctgcattctcgacaagcgtccgcgccgacggggctagtgaagtttgagaacaattgcttcctacccagccgctccgctatcacctaggtagcacggccgctgcggctgaggctgtgactgcggctgcggctgggccgcgcctcaaccgagcttggtcctttcctttggtcccgccccgctgctcagcgcggattggtggcgggacgcaaatctggcgctgattgggcggcggcagagtcgctcgtgaagattgtagggttcgggtgctctagagtgctaaatttatcttcagaccggcgaccgcgccagccgcgaatcggatctctatggagatggcctaggcgatatccctgagctgagagcatcaccctgtccccgaatccttctttcctctctgttttgtttttcattcccctccctctctcccctccccctccagtccacgacgactggctgttgaccctgttcaggcctcggtgaaggcttttggttactccccttcccaccccatcccttaattttattcttttgaagagtgcatttcaagctgccaaggtggagagagggattacagaaaggagaacaccttatttcaggtgtaccatacctgagagcaccaggaagtcgcatgagagatcacctgatacatgaacgtatgatgttccatctgcgcattgatgaataggcagcatttacaaattaactgatgtgttgctgtatatcatctctttgatgattgctcctcttctttgtatcctgtcttataatttcaacacatttgcgatactcaatgtctattctaaattaaccatgttttgtaccacaaactcattgcccatggatctgttgctgaaacaaggaagtcttaaacaagaagtggaatctttctgttatcagattgtgtctgaatcaaatgatcagaaggttggaatattacaaagtgaagataagcagttgcaaccttcagtttctaaaaaatcagaaggtgagctttccagggtcaaatttatatccaattccaacaaaataacatttagtaaaaaaccaaaaagaagaaaa

SEQ ID NO: 204267 - DNA, 879 bp, Homo sapiens
  Payload ID: 20283
  Gene Name: zinc finger, BED-type containing 5
  ENST ID: ENST00000534690
  CDS Start-End: 671-879
gggacgcgagagaagacctgaggcgagggtgggctgcgactggtagggagccccccagtcgtggcaatctgtgggcagcgcgcacctgtgacagggaggagctgagggatagttggccctggctgcacatccaggtgaccgtttaaaaaagcatttaggtgttggaaggagcatctgttcccacctttttggctggcctgcactcagatcctgtcctcctgaccctgagggtattgttcccagccggaaccgcccgaagataggggagaaaggattgtgatacttgtcagtttaaccggaaggagactaaagacggaagttttccccgctcttcagggagtggaaaggaaactttactctcaaaggagtccagattctttgtcctcgagaaattcggggaaacaccttcgaagaggcttttggttactccccttcccaccccatcccttaattttattcttttgaagagtgcatttcaagctgccaaggtggagagagggattacagaaaggagaacaccttatttcagaaaaggtgtaccatacctgagagcaccaggaagtcgcatgagagatcacctgatacatgaacgtatgatgttccatctgcgcattgatgaataggcagcatttacaaattaactgatgtgttgctgtatatcatctctttgatgattgctcctcttctttgtatcctgtcttataatttcaacacatttgcgatactcaatgtctattctaaattaaccatgttttgtaccacaaactcattgcccatggatctgttgctgaaacaaggaagtcttaaacaagaagtggaatctttctgttatcagattgtgtctgaatcaaatgatcagaaggttggaatattacaaag

SEQ ID NO: 204268 - DNA, 789 bp, Homo sapiens
  Payload ID: 20283
  Gene Name: zinc finger, BED-type containing 5
  ENST ID: ENST00000526852
  CDS Start-End: 512-789
aaatggccgcttcctggaactgcctaagatggcggtcgcgggctctgctgtggaccgcggcgctgctgtgcagcccagccgcggcaaaatccgttctctccatcgctgatggagatgaaatagagagatggtgttgggtgctgagacgttttcatgtggtcgttagcgcaggcggccgcccggggacgcgagagaagacctgaggcgagggtgggctgcgactggcttttggttactccccttcccaccccatcccttaattttattcttttgaagagtgcatttcaagctgccaaggtggagagagggattacagaaaggagaacaccttatttcagcttttatttttatgtgataatctacctttaagaaaaggtgtaccatacctgagagcaccaggaagtcgcatgagagatcacctgatacatgaacgtatgatgttccatctgcgcattgatgaataggcagcatttacaaattaactgatgtgttgctgtatatcatctctttgatgattgctcctcttctttgtatcctgtcttataatttcaacacatttgcgatactcaatgtctattctaaattaaccatgttttgtaccacaaactcattgcccatggatctgttgctgaaacaaggaagtcttaaacaagaagtggaatctttctgttatcagattgtgtctgaatcaaatgatcagaaggttggaatattacaaagtgaagataagcagttgcaaccttcagtttctaaaaaatcagaaggtgagctttccagggtcaaatttat

SEQ ID NO: 204269 - DNA, 4250 bp, Homo sapiens
  Payload ID: 20284
  Gene Name: zinc finger, BED-type containing 6
  Uniprot ID: P86452
  ENST ID: ENST00000550078
  CDS Start-End: 1215-4154
agcttgtctcaaactccacatacagaaagccaccgaccttattccggtatcctacacccattccccactctcattacactcccacccctggccctcagcgtcggagtcaagagcaacagggacacttccgttctccttgtaggactggtgaaaccgtaatgaagaacacccctaaactcccataatcggtgcggattcctatggggaaggcctatattgttgacatcttccaggccttggttctggaccttgagaaagaggctgtggaactagagatagcgatgctttttagggtaaatgtatgtaggtattgggggaaggggagggatcaatcgaaaaatggaagtggtttaaagttcatatttcactttttgctatctctatagcgtacaacttgtgagttacttacaggctgtaaaagcttctcaagtctaaaaatatctgaaaactaaacttgaattaactcttaatacaaacagtactttgaaaatgcagcatttaaccttgttttaaaatttttttctcaaagcatttttttccagccactcacattttaaaaggttgtattacttttagttagaactgaaagggctcaactagcatttgctgtgaccagtatgcggagtctgtgttggctttccagaattgactttttgggttgtattggcaaatcacagtcctaaatgatgaatgttgaatgatgcactatgtttttgtttaaatgagatttcctgaaaatagttaatttcagaattaagggaaattgatgtcgctatcatgaggcatcataaaaatatgtattttacaaggtgaaggcatttcaagtagatatagttcttgatgaagcaggaagaacatggatctgggatttggaagacctggcttctagctgctactaaccaactctgtgactctgggaaagggggactcagttcttacttctgtaacatgaggacactggactatttgaattcagaacttagaaaattggaagggaccttaaagccctctaagaaagagttcgggaatgttctccattgctgtcagttttcctccaaaaataacctggcttggaagttattggtccagtgggaatttgattccccatagaaactggagaaaaggtaatgcaagtagagaggaacagctgtatttctgcttgagtaataaacccactaacagattctggtacgaattgtggagacataaagagaatgagtgtatgtactctaagtgtaccagtttcttcactctctcctggcagaagatgcaacacttttagtgattctgggattctgggatgtgttcctattaattctaatacagatgaagaagatgtggtagaggaaaagatggtagcagaaggagtgaataaagaggcaaaacagcctgctaaaaagaaaagaaagaagggtttgcgaattaaggggaaaaggcgtcgaaaaaaattgattcttgccaaaaagtttagtaaggatttgggatctgggaggcctgttgcagatgcccctgctttgttagcttccaatgaccctgagcaggatgaagaaagtctttttgagagcaatatagaaaaacagatctatctacctagtactagagccaagacctccattgtgtggcacttctttcatgttgacccccagtacacctggcgggccatttgtaacctctgtgagaaaagcgtcagcaggggtaaaccaggtagccatcttggtacatctactcttcaacgacatctgcaagcaaggcattcacctcattggaccagggccaacaagtttggagttgctagtggagaggaggactttaccttggatgtgtctttatctccctcttctggaagcaatggaagctttgaatatattcctactgatccattagatgataatagaatgggcaagaagcatgataaatcagcatctgatgccctaagggcagaaagagggagatttctcatcaaaagtaacattgtcaagcatgctttaattcctggaactagagccaagacatctgccgtttggaattttttttacactgatcctcagcacatctcaagagctgtgtgtaatatatgtaaaagaagtgtgagccggggtaggccagggtcccacttagggacttcaacacttcaacgacacctgcaagccacacatcctatccattgggctgttgccaacaaagacagtggtgctgttgcaaatggattagatgaagctgagactgagagaagtgatctcttgagtgataccttgcatggagaaaagtctacaggcagccaagatttaacagctgaggaccttagtgactctgattcagatgaacctatgttagaggttgaaaacagatctgaaagtcctattcccgttgcagagcaaggcactctgatgcgtgcgcaggagagagaaacaacatgttgtggaaatccagtctcaagtcacataagtcaggcaattatccaaatgattgtggaggatatgcatccttacaactatttctcaaccccagcctttcagaggttcatgcagattgtggcccctgattataggttgccatcagagacttactttttcactaaggctgtacctcagttatatgattgtgtcagagaaaaaattttcttaactttagagaatgttcaaagccaaaagatacacctgactgttgacatatggacccatgacccatccactgactattttattgtgactgtacactgggtttctttggaaactgcgtcttttctcaataatggcaggatccccgattttagaaagtgggcagtgctttgtgttacaggtttggctaaagactgtttgataaccaatattttacaagaattaaatgaccagattggtctgtggctttctccaaatttccttatccctagcttcattgtttctgacaattcctctaatgtggtacatgcaatcaaagatggtggttttacccatgtgccatgcttcctgcattgtttaaatatggtcattcaggactttttctgcgagcacaaaagcattgagaatatgttagtggctgccaggaaaacttgtcatcattttagtcattcggtcaaggcccgtcagatactgcaagagttccaaaatgatcaccaacttccatggaagaatttgaagcaggacgaaactggccattggatttctactttttatatgttaaaatggctcttggagcattgctactcagttcaccatagtcttggtagagccagtggagttgtgctcacctcccttcagtggactctaatgacttatgtttgtgatattcttaagccatttgaggaggctacccagaaagtgagcgtgaagaccgcaggattgaatcaggtgctacccctaatccatcatctactcctttccctgcagaaactcagagaagattttcaagtcagaggtattactcaggccctcaatctggtggatagtttatctctgaaacttgaaacagataccctactaagtgccatgcttaaatccaagccctgtatcttggctactttgttagatccttgctttaaaaacagtttggaagacttttttcctcaaggtgctgatttagaaacttataagcagttccttgcagaagaggtctgtaattatatggaatcttcaccagagatctgccaaattccaacttcagaagcttcttgtccctcagttacagtgggagctgattcatttacctcatctctaaaagaaggcacctccagttcaggttctgttgatagctcagctgtagacaatgttgcccttggaagcaaaagcttcatgttcccttctgctgtagcagttgtggatgagtacttcaaagagaagtattcagagttctcaggaggtgatgaccctttaatttactggcagaggaagataagcatatggccggctttgacccaggttgccatccagtatctaagttgccccatgtgtagttggcaatctgaatgtatctttactaaaaatagccactttcatccaaaacagatcatgagcctggactttgacaatatagaacaactgatgtttctgaaaatgaacttgaaaaatgttaactacgattattctacgttggttctgagctgggatcctgagcagaatgaagttgttcaaagcagtgaaaaagaaatactgccttaatttctttttctccatttaaaatgggcaactttttgctgtgttactgtatcttaatagctgtagttgttaaatataatcattatctttataaacaca

SEQ ID NO: 204270 - DNA, 2851 bp, Homo sapiens
  Payload ID: 20285
  Gene Name: zinc finger, BED-type containing 8
  Uniprot ID: Q8IZ13
  ENST ID: ENST00000408953
  CDS Start-End: 509-2293
gtgtgggagacgcctctcccagtttgcgggcgggaagcaccctggagaacccggatggaacccgggcctggctgaggcggaggttgttgcggatgcttctctctccaggcgcaccgcagattcctgcccgggggttggacccgaggaaccgccgtctctactggttccgacggccagaggctgggccctaggctgagcggagagtgggactggagcctgaaacgggcgcctaaaagaagcccgtgcatcccataggcctgcgcctcaggcttggagacgggcgggcggagaccgcgctgagtcttttttttttttttcctagcagctggcgttcttatctcacccgggaggctgtaaaaatctccgtccttaacagtaacaccatcaggtcctatcagttaagagctgcttgttatttgcatgcattcttataattaaatctcctaacaaccctgtaagcaaaattctgtggcatctctggaatactacctgagaatttttgtgtgccatgtcgaagaaacgcaaatgggatgatgactatgttcgctactggttcacctgtacaacggaagtagatggaactcagcgtccacagtgtgtgttgtgtaactcagtattttcaaatgctgacctcagaccatcaaaactgtcagaccattttaacagacagcatggtggtgtagctgggcatgatctcaatagcctgaagcatatgccagcaccatctgatcagagtgaaaccttgaaagcatttggagttgcatctcatgaggatactttattacaagcatcgtatcaatttgcgtatttatgtgccaaggagaagaatcctcatacagtagctgaaaagttagtgaaaccttgtgcactggaaatagcacaaatagttttgggaccagatgcacaaaaaaagcttcagcaggtacccttatcagatgatgtgatccattctagaattgatgaaatgagccaggatatcttacagcaagttctagaagatatcaaagccagtcctcttaaagtgggtattcagcttgctgagacaactgacatggatgactgcagtcagctaatggcatttgtgcgctatataaaagaaagagagatcgtagaagaatttctcttctgtgaaccattgcagctatccatgaaaggaatagatgtgttcaatctcttcagagacttctttctgaagcataagatagcacttgatgtatgtggctctgtttgtactgatggtgcctcctctatgctaggagaaaattccgagtttgttgcctacgtgaaaaaagagatacctcatatcgtagttacacattgtttattgaatcctcatgcacttgtcataaagacattgcctacaaaactgagggatgctctgtttactgtggtgagggtaataaatttcatcaaagggagagctccaaatcatcgcctatttcaggctttctttgaagaaattggcatagaatatagtgtcctccttttccatactgaaatgaggtggctttcccgaggccaaatacttactcacatttttgaaatgtatgaagaaataaatcagtttcttcaccacaagagcagtaatttagttgatggctttgaaaataaagagtttaaaattcacctagcataccttgcagatttattcaaacacttaaatgaactcagtgcatctatgcagaggactgggatgaacacagtatcagctagagagaagttatctgcttttgttaggaagtttccattttggcaaaaacgaattgagaaaagaaattttaccaattttccttttcttgaagaaataattgtttcagataatgaaggcatattcattgcagctgaaataacactgcatctgcaacaattgagcaacttcttccatggatatttttccattggagatcttaatgaggcaagtaaatggatattggatccatttctttttaatatcgattttgttgatgatagttatttaatgaaaaatgatcttgctgaattacgagctagtggccaaatcctaatggaatttgagacaatgaagcttgaggatttctggtgtgcccaattcacagcatttccaaacctggcaaagacagctctagaaatccttatgccatttgcaactacatacctttgtgagttgggattttcatcacttttacatttcaaaacaaagtccagaagctgctttaatctgagtgatgatatccgtgtggctatttcaaaaaaagttcctcgtttctcggacatcattgaacaaaagctacagctacagcagaagtcactgtaagctgatatacttttttaatgaataatttcaatcttaatatcattgtaaaattaagctgtaattctgtctctttcatatttatgatatactgaattctatgtctaaaaaacttaagaactttaattttgaatgaggcatgtgaaaatatgttttgagaataaaaacacagcagaaaagattaagtactactgcctagttgctatcatgagattttcccaattctaagtatctgtttaacctgttcgtgtggtatatgaaaaagatacctaagcactagaatatccagctaaatggtgcaataggctaggaattgagccaggagaaaagagaagatatcccagaagtcaaaaaggcaaaatgaaagattgagttcgcccgtctttgttatggagaggttaatgaaatcagaagaggattatgaaatataatgggaaaaggaatgatctggcttatgtaagacttacttttaaatatactctttggagttagtctcacaatgtccattcccctagctcctgtgctatgaatatcatattaataaatagcctaatatattaa

SEQ ID NO: 204271 - DNA, 2484 bp, Homo sapiens
  Payload ID: 20285
  Gene Name: zinc finger, BED-type containing 8
  Uniprot ID: Q8IZ13
  ENST ID: ENST00000523213
  CDS Start-End: 522-2306
ccgggcctggctgaggcggaggttgttgcggatgcttctctctccaggcgcaccgcagattcctgcccgggggttggacccgaggaaccgccgtctctactggttccgacggccagaggctgggccctaggctgagcggagagtgggactggagcctgaaacgggcgcctaaaagaagcccgtgcatcccataggcctgcgcctcaggcttggagacgggcgggcggagaccgcgctgagtcttttttttttttttcctagcagctggcgttcttatctcacccgggaggctgtaaaaatctccgtccttaacagtaacaccatcaggtcctatcagttaagagctgcttgttatttgcatgcattcttataattaaatctcctaacaaccctgtaagccacattctctggcacagaactttggaaactttggggatcacttacttatcttggagatagaatgttttctaagcaaaattctgtggcatctctggaatactacctgagaatttttgtgtgccatgtcgaagaaacgcaaatgggatgatgactatgttcgctactggttcacctgtacaacggaagtagatggaactcagcgtccacagtgtgtgttgtgtaactcagtattttcaaatgctgacctcagaccatcaaaactgtcagaccattttaacagacagcatggtggtgtagctgggcatgatctcaatagcctgaagcatatgccagcaccatctgatcagagtgaaaccttgaaagcatttggagttgcatctcatgaggatactttattacaagcatcgtatcaatttgcgtatttatgtgccaaggagaagaatcctcatacagtagctgaaaagttagtgaaaccttgtgcactggaaatagcacaaatagttttgggaccagatgcacaaaaaaagcttcagcaggtacccttatcagatgatgtgatccattctagaattgatgaaatgagccaggatatcttacagcaagttctagaagatatcaaagccagtcctcttaaagtgggtattcagcttgctgagacaactgacatggatgactgcagtcagctaatggcatttgtgcgctatataaaagaaagagagatcgtagaagaatttctcttctgtgaaccattgcagctatccatgaaaggaatagatgtgttcaatctcttcagagacttctttctgaagcataagatagcacttgatgtatgtggctctgtttgtactgatggtgcctcctctatgctaggagaaaattccgagtttgttgcctacgtgaaaaaagagatacctcatatcgtagttacacattgtttattgaatcctcatgcacttgtcataaagacattgcctacaaaactgagggatgctctgtttactgtggtgagggtaataaatttcatcaaagggagagctccaaatcatcgcctatttcaggctttctttgaagaaattggcatagaatatagtgtcctccttttccatactgaaatgaggtggctttcccgaggccaaatacttactcacatttttgaaatgtatgaagaaataaatcagtttcttcaccacaagagcagtaatttagttgatggctttgaaaataaagagtttaaaattcacctagcataccttgcagatttattcaaacacttaaatgaactcagtgcatctatgcagaggactgggatgaacacagtatcagctagagagaagttatctgcttttgttaggaagtttccattttggcaaaaacgaattgagaaaagaaattttaccaattttccttttcttgaagaaataattgtttcagataatgaaggcatattcattgcagctgaaataacactgcatctgcaacaattgagcaacttcttccatggatatttttccattggagatcttaatgaggcaagtaaatggatattggatccatttctttttaatatcgattttgttgatgatagttatttaatgaaaaatgatcttgctgaattacgagctagtggccaaatcctaatggaatttgagacaatgaagcttgaggatttctggtgtgcccaattcacagcatttccaaacctggcaaagacagctctagaaatccttatgccatttgcaactacatacctttgtgagttgggattttcatcacttttacatttcaaaacaaagtccagaagctgctttaatctgagtgatgatatccgtgtggctatttcaaaaaaagttcctcgtttctcggacatcattgaacaaaagctacagctacagcagaagtcactgtaagctgatatacttttttaatgaataatttcaatcttaatatcattgtaaaattaagctgtaattctgtctctttcatatttatgatatactgaattctatgtctaaaaaacttaagaactttaattttgaatgaggcatgtgaaaatatgttttgagaataaaaacacagcagaaaaga

SEQ ID NO: 204272 - DNA, 4877 bp, Homo sapiens
  Payload ID: 20286
  Gene Name: zinc finger, BED-type containing 9
  Uniprot ID: Q6R2W3
  ENST ID: ENST00000452236
  CDS Start-End: 619-4596
gagcgtggctcaccgggcccggccggaacctacgggcacagctgcgggtgtgtctgcggaacctccacctgagctgtagagtgtttccctcgacccactagtctgggttccacagggtctgagctcctcagaggtgggagctgcggccgagggaagggtgcatgtgcgcggcgacaatcgggcctcttccccaggcagcttgtgagcccctctccctctccgccctcgcccaggctgctccgatcttcgtttccttgcctaggctcatacacccaggctttatttagggccaaagtatccgtcataacctcggttttctgtctcgcaagtatcttgccgctcaatttgtgaccctgaagctttagtgagtcgctctgtgctcactatttctggtcttttcagaggatggcttcactttcaatggaattgcccgagtaactgccctgtgttgtcacgtaaacaagtccttttaaactgagtctgtagttgtcctgtgttgagtgttttcttatatcaaaaactttcctgaccaagaacaaaaaaggagctcaagtaaaatcacccatttgcctagaccccaactggagagaacctttgcctgagctgtctaagctcgggatggaagcagtctctagggtcttcccagccttggctggccaggctccagaagaacaaggggagattatcaaagtaaaggttaaagaagaagaccacacttgggatcaggaatcagccctacgtaggaatttgtcttataccagggaactctctcgtcagcgcttcaggcagttctgctatcaggagacacctgggcccagggaggctctgagtcaactgcgggaactttgccgtcagtggctgaacccagagatacataccaaggagcagatcctggaattgttggtgctggagcagttcctgaccatcctgcctgaggagctccagtcttgggtgcgggagcataatcctgagagtggagaagaggtggtgactttgctggaagatttggagagggagcttgatgaacctagacagcaggtctcacagggcacatatgggcaggaagtttctatggaagaaatgatccctctggattctgcaaaggagtctttaggcacccagcttcagtctatggaagatagaatggaatgtgaatctccagagccacacccacttcaagataatgggtcatttttgtggttttccatgatgtctcaaagcatgggtggtgataacctcagtagcttagatactaatgaagcagaaattgaaccagaaaacatgagagaaaagttcttcagaagcttagcaaggttactggaaaacaaaagtaataatactaagatattttctaaagcaaagtactgtcagttgataaaggaagtgaaagaagctaaagctaaggcgaaaaaggaatcagttgactaccgtcgcttggctagatttgatgttatccttgtacaaggaaatgagaagctaattgaggctgtaaatggggaaacagataaaatacggtattacttacacagtgaggacttatttgacattctgcataatacacatctcagcattggacatggtggacgtactcgcatggagaaagagttacaagcgaaatacaagaacatcacaaaagaagttataatgctgtatctgaccctctgtaaaccatgccaacagaaaaattcaaaactcaagaaggttctaacatcaaaatcaattaaggaagttagttcaagatgccaagtagatcttatagacatgcagttgaatcctgatggggagtacagatttattttgcattatcaagatctctgtacaaagttaacttttttgcggtcattaaagtctaaaaggcctacggaagttgcacatgctcttttagatatatttacaattattggagcacccagtgtcctacaatctgacaatgggagggaattttcaagccaggttgtcagtgaactcagtaatatttggccagaattgaaaattgtccatgggaagtctcagacctgccaaagccagagttctgcagaacaaactgaggatatccgaaagaggattttctcctggatgcaaactaacaactcatcacactggactgaatttttgtggttcattcagatgtcccaaaatcagccctatcacagaagcatgcaacagactccatgtgaaagtgcatttagctctgaagctaaactgggcttgtcccattctcagctaactgaagaacttgttgccagcttgcatacagaaaatgaattagatcaggctgacaaagagttagaaaatactttaagagcccagtatgaagaaaacattgagactggaacagacagtagtgatattgaagagaatctttctgtcactcctaaggtggctgaaaaaagccctcctgagagcagactaagatttttatcctgtgtagtttgtgaaaaagaatgcacaggtgttaatagttgtatatcatgtgatggaaatatccatgcaatttgtggagtgccctctcaacatgggactgagggctgtggtcggcaaataacttgtagcctttgctatgaaaccagcacaatgaagaggaaacatgatgagattcaaagaagtttgcctgttaaaccttccaaaatgctaaagccatcagggacaccattttcaccagacaaagtaggagactggatggcgaaacaagcttcactggacttttttgtcaagaaaagacatgccttttctgaacacagtagtagtaataaaagaaatgttaacaatagaagttatcctgaagaagggaaaaccaaaagagttcatgctagtttcactcggaaatatgatccttcatatattgagtttggttttgtagctgtaattgatggtgaagtactaaaaccacagtgtattatttgtggagatgtactggctaatgaagcaatgaaaccatcaaaacttaagcgacatttatattcaaaacataaagaaataagttcacaaccaaaagaattctttgaaagaaagagtagtgaattgaaaagccaaccaaagcaggtgttcaacgtttctcatataaacattagtgctttgcgggcttcatataaagtagcacttccggttgccaagtctaaaacaccatacacaattgctgagacactagtgaaagactgcatcaaagaagtttgcttggaaatgttgggtgaatctgcagcaaagaaggtagctcaggtaccactttccaatgacaccatagctcgacgtattcaggaactggctaatgatatggaagatcaactcatagaacaaataaaactagcaaagtatttttcattgcaacttgatgaatgcagagatattgctaacatgataattcttttagtctatgtgaggtttgaacatgatgatgatataaaggaagagttctttttttcagcctctttgcctacaaacacaactagctcagaactgtatgaagctgtaaagaattatattgttaacaaatgtggtttggaatttaaattttgtgtaggagtatgttctgatggtgcagcttcaatgacaggaaaacattctgaagtggtaacccagattaaggaacttgcgccagaatgtaaaacaacacattgcttcattcatcgagaaagtcttgccatgaaaaaaatatcagctgaactaaatagtgtacttaatgatatagtaaaaattgtgaattatataaaatctaattcattgaattcaagattattctctttattatgtgataatatggaagctgatcataagcaactgttactgcatgctgagatacggtggttatcacggggaaaagttctgtcaagaatgtttgaaatacgaaatgaactcttagtgtttctgcaaggcaagaaacccatgtggtcccaactttttaaagatgtgaattggacagccagacttgcttatttgtctgatatcttcagtatttttaatgatcttaatgcttctatgcaagggaagaatgcaacttatttttcaatggcagataaagttgaaggacaaaaacagaagttagaagcttggaaaaacagaatttctacagattgttatgacatgtttcataatttaacaacaattatcaatgaagtaggtaatgatcttgatattgcacatctgcgaaaagttatcagtgaacatcttacaaatttgttagaatgttttgaattttattttccatcaaaagaagatccacgcataggaaatttgtggatccaaaatccatttctttcatcaaaagataacttaaatttaactgtaactctacaggataagttgttgaagctggctaccgacgaaggattgaaaatcagttttgaaaatacagcatcacttccttcattttggataaaagctaaaaatgactatcctgagcttgctgagattgctttaaaattgctgcttcttttcccctcaacatacctctgtgagaccggattctctactttaagtgttattaaaacaaaacatagaaacagtttaaatatacattatcccctgagggtagcattgtcatcaatccaacctagattagacaaattaacaagcaagaagcaagctcacttatcacattaaaagctttaaatattgatatgtaaggtattggttcaaagtatgcatataagcattgagtgtgaggaatttgctatttcactttaaactttctgtctagttacagttatggaagtatgagaagttatgagtgaaacagcaattttctatataaattgcctatatgtatattttcaattaagaatgtgtacagtttttataattctatttttcctcatatttgtcgtatttattaaaatataattttaaatctgttgattctaatattaaaacatttgatctta

SEQ ID NO: 204273 - DNA, 3000 bp, Homo sapiens
  Payload ID: 20286
  Gene Name: zinc finger, BED-type containing 9
  ENST ID: ENST00000508341
  CDS Start-End: 619-3000
gagcgtggctcaccgggcccggccggaacctacgggcacagctgcgggtgtgtctgcggaacctccacctgagctgtagagtgtttccctcgacccactagtctgggttccacagggtctgagctcctcagaggtgggagctgcggccgagggaagggtgcatgtgcgcggcgacaatcgggcctcttccccaggcagcttgtgagcccctctccctctccgccctcgcccaggctgctccgatcttcgtttccttgcctaggctcatacacccaggctttatttagggccaaagtatccgtcataacctcggttttctgtctcgcaagtatcttgccgctcaatttgtgaccctgaagctttagtgagtcgctctgtgctcactatttctggtcttttcagaggatggcttcactttcaatggaattgcccgagtaactgccctgtgttgtcacgtaaacaagtccttttaaactgagtctgtagttgtcctgtgttgagtgttttcttatatcaaaaactttcctgaccaagaacaaaaaaggagctcaagtaaaatcacccatttgactagaccccaactggagagaacctttgcctgagctgtctaagctcgggatggaagcagtctctagggtcttcccagccttggctggccaggctccagaagaacaaggggagattatcaaagtaaaggttaaagaagaagaccacacttgggatcaggaatcagccctacgtaggaatttgtcttataccagggaactctctcgtcagcgcttcaggcagttctgctatcaggagacacctgggcccagggaggctctgagtcaactgcgggaactttgccgtcagtggctgaacccagagatacataccaaggagcagatcctggaattgttggtgctggagcagttcctgaccatcctgcctgaggagctccagtcttgggtgcgggagcataatcctgagagtggagaagaggtggtgactttgctggaagatttggagagggagcttgatgaacctagacagcaggtctcacagggcacatatgggcaggaagtttctatggaagaaatgatccctctggattctgcaaaggagtctttaggcacccagcttcagtctatggaagatagaatggaatgtgaatctccagagccacacccacttcaagataatgggtcatttttgtggttttccatgatgtctcaaagcatgggtggtgataacctcagtagcttagatactaatgaagcagaaattgaaccagaaaacatgagagaaaagttcttcagaagcttagcaaggttactggaaaacaaaagtaataatactaagatattttctaaagcaaagtactgtcagttgataaaggaagtgaaagaagctaaagctaaggcgaaaaaggaatcagttgactaccgtcgcttggctagatttgatgttatccttgtacaaggaaatgagaagctaattgaggctgtaaatggggaaacagataaaatacggtattacttacacagtgaggacttatttgacattctgcataatacacatctcagcattggacatggtggacgtactcgcatggagaaagagttacaagcgaaatacaagaacatcacaaaagaagttataatgctgtatctgaccctctgtaaaccatgccaacagaaaaattcaaaactcaagaaggttctaacatcaaaatcaattaaggaagttagttcaagatgccaagtagatcttatagacatgcagttgaatcctgatggggagtacagatttattttgcattatcaagatctctgtacaaagttaacttttttacggtcattaaagtctaaaaggcctacggaagttgcacatgctcttttagatatatttacaattattggagcacccagtgtcctacaatctgacaatgggagggaattttcaagccaggttgtcagtgaactcagtaatatttggccagaattgaaaattgtccatgggaagtctcagacctgccaaagccagagttctgcagaacaaactgaggatatccgaaagaggattttctcctggatgcaaactaacaactcatcacactggactgaatttttgtggttcattcagatgtcccaaaatcagccctatcacagaagcatgcaacagactccatgtgaaagtgcatttagctctgaagctaaactgggcttgtcccattctcagctaactgaagaacttgttgccagcttgcatacagaaaatgaattagatcaggctgacaaagagttagaaaatactttaagagcccagtatgaagaaaacattgagactggaacagacagtagtgatattgaagagaatctttctgtcactcctaaggtggctgaaaaaagccctcctgagagcagactaagatttttatcctgtgtagtttgtgaaaaagaatgcacaggtgttaatagttgtatatcatgtgatggaaatatccatgcaatttgtggagtgccctctcaacatgggactgagggctgtggtcggcaaataacttgtagcctttgctatgaaaccagcacaatgaaaaggaaacatgatgagattcaaagaagtttgcctgttaaaccttccaaaatgctaaagccatcagggacaccattttcaccagacaaagtaggagattggatggcgaaacaagcttcactggacttttttgtcaagaaaagacatgccttttctgaacacagtagtagtaataaaagaaatgttaacaatagaagttatcctgaagaagggaaaaccaaaagagttcatgctagtttcactcggaaatatgatccttcatatattgagtttggttttgtagctgtaattgatggtgaagtactaaaaccacagtgtattatttgtggagatgtactggctaatgaagcaatgaaaccatcaaaacttaagcgacatttatattcaaaacataaagaaataagttcacaaccaaaagaattc

SEQ ID NO: 204274 - DNA, 3352 bp, Homo sapiens
  Payload ID: 20287
  Gene Name: zinc finger, C2HC-type containing 1A
  Uniprot ID: Q96GY0
  ENST ID: ENST00000263849
  CDS Start-End: 103-1080
ggaatgttagcgggtgggaggtgcggctgggttgctacagccagagctgggcggtggcgggcgctgctgaaggagtctcgctgagctcgaggaggtggcgcgatggagggactggaagagaatggaggtgttgtccaagttggagaattgttaccttgcaagatttgtggaagaacattctttccagtagcattaaaaaaacatggacccatttgccagaagactgcaactaaaaaacggaagacttttgattcaagcagacagagagctgaaggaactgatattccaacagtaaaacctctcaaaccgaggccagaaccaccaaagaaaccatctaattggagaaggaaacatgaagaattcattgctaccataagagcagctaaaggccttgatcaggccctcaaagagggtggcaaacttcctcctcctcctccaccttcttatgatcctgattatattcaatgtccatattgtcagaggagattcaatgaaaatgcagctgatagacatataaatttctgtaaagaacaggcagcacgtattagtaataaagggaaattttctacagataccaaaggaaaaccaacttctcggacacaggtgtataagccacccgcacttaaaaagtcaaattctcctggaactgcatcatcaggatcttcacgattaccgcagccaagtggcgctggcaaaactgttgtaggtgttccttcaggtaaagtgtcttcaagtagcagctctttgggaaacaaacttcagaccttatctccctctcataaagggatagcagcccctcatgcaggagctaatgtcaaaccccgaaattccacaccacctagtttggcaagaaatcctgccccaggtgtgcttacaaacaaaagaaaaacatatactgagagctacatagccaggccagatggggactgtgcatcttcccttaatggtggaaatattaaaggcattgaaggacattcacctggaaacttaccaaaattctgccatgagtgtgggactaaataccctgtagaatgggccaaattttgctgtgaatgtggcattcgaagaatgattctatgaatagaatctcaaaaaaaaaaaaaagccaagttcagagtttatgattattgctgcttggacagctagagcacatcctctagttagtttgtgctaaaaatactcgaaataccatttccagttaattttgaagtgtaatcttttggctatataatgtgtgtatgtttatatgtgtacatatactgtatataataaatatctgataccccagactgtgtcattcaaggaaatattcacttatctgtcagaaaataatttcaaatggaacaattaatttaggtgttacttttctgttgttgttaaagcacgttaagtacatttccacaaactctcatactctagtgcttagcccttcaagctttaggataagtataactttgagcaaaaaatttggataaacatttgtattattggtgcctatcttcagatagtatcatagtaggatagatgctgggaattttgtaattaaagagaacagttttagttaccattaggtatgttaaggtcactcctgtagagcatgtcaacaaattatttcataaatccgaaaaactaagagaaaaaaaaacccctctattagttacgtaatttaaacatcttacttgttttgtaaaagtgtaattatgcaatttccttttcaaatacacaagactaaaaatacaaatctatcttgttctatttataactgattttttttagttctgtatgtattcgttgaacatatttttttacttccaattgtttttccagatttcacttttcctctttttccataacccgtgaagatagttttaatttgctagttcattttttgctgtatttgaaaatgtaattatttaatatagaaggcacagaattccctgcaaaatcttacatgtttaaaaacatataattttttgtatctgaatttagaataaatcattttaatgcatcttaaatcacgtcacctaatcataatagttgtggtaactaatcattagtgcagagcatgcagataaaaaatatttgaatttttttttcttggaagtacatgtagttatgagtaggttaagagaatatctaattttcctactctttttttcatctttagcatttaatgttgaaacaccattcacgtcacattaaggacccactgaaaatgtattgttttaatgcataattgacttacctaattaaacatacacacaaatttaattatttttttctctttaacctgatcacgacacagctcttaatcattgtcactttcagtatatcatagtagttagtagtagattgccttgatggcagtaattctgtagtaatttctattcaatcaaacctaagagagctttgatcttactgtaaaggtacaaacaaatctcttatataattcctagcttttttttttgtttatgattctgatcaactataagacacaatgtaaagaattgtggcttataatttatctgaaatttattagcttagtttagtttgggcaggagttacaaacttaataggaattgtcattttacttacagtttatttcctgattagttgttaatttttttcccctcagttatctttattcagtcttattggtcaaaacaaagaaacaaatagtccatcaactaaaataagctgtaatgaatttagaagatgaatgcatatattagatttccatttaaatcacttctgttataaatcatataaagaactttaaacttgttttatctaatactgagcactgtttttttgtcaagtatttttttaagaccacataattctttttgtctgctcaaggaaaggatagataaataattggcacacatttgtttctcactgaattttacagtagtaaattaatgttataatgtaccacatggagatgagttggtaagaaatcatctagttccagagcccagagattataaacagtaggtgaaatagatttatgacttacgaaatatgttgtgacaatatatttaaatgcatttttatattacttgcatattctcacattgatttgtgcaatagttcagttttaaaaaaaatcttcctatgcatcatgtattttatttttatttattttcacaagtatttgacagtatggtagaataaaagatgattgtaagattaaaaatgtaaaaattgcttatgtattattctgaattgtgttaggttgaaaaagatgattgtggtgactattatttcttgtccactatttgttttttgttttttcaccaataatgtcttcatatttgaacctattcaataaagacatgaagcataaaaa

SEQ ID NO: 204275 - DNA, 601 bp, Homo sapiens
  Payload ID: 20287
  Gene Name: zinc finger, C2HC-type containing 1A
  ENST ID: ENST00000519307
  CDS Start-End: 1-592
gtataagccacccgcacttaaaaagtcaaattctcctggaactgcatcatcaggatcttcacgattaccgcagccaagtggcgctggcaaaactgttgtaggtgttccttcaggtaaagtgtcttcaagtagcagctctttgggaaacaaacttcagaccttatctccctctcataaagggatagcagcccctcatgcaggtaatatggacaagttaggccctccacttcgaacgggaagacttgtgcaaaggttgtatgacagtgatacaaaatcagacagtgccatcaaaagacatgagttattacctatttacaaagctaatgtcaaaccccgaaattccacaccacctagtttggcaagaaatcctgccccaggtgtgcttacaaacaaaagaaaaacatatactgagagctacatagccaggccagatggggactgtgcatcttcccttaatggtggaaatattaaaggcattgaaggacattcacctggaaacttaccaaaattctgccatgagtgtgggactaaataccctgtagaatgggccaaattttgctgtgaatgtggcattcgaagaatgattctatgaatagaatct

SEQ ID NO: 204276 - DNA, 1002 bp, Homo sapiens
  Payload ID: 20288
  Gene Name: zinc finger, C2HC-type containing 1B
  Uniprot ID: Q5TFG8
  ENST ID: ENST00000237275
  CDS Start-End: 105-773
ttgcaacagattagtggtcctggtttatgttcttgactagtatgatgttatctggactgggctgtaaaaatctgtgaacactgttgctctgagttaggaacagaatggctggggcagaaccatttttggcagatggcaatcaggaattgtttccctgtgaagtctgtggaagacgttttgcagcagatgttctggaaaggcatggaccaatatgtaagaaactcttcaacagaaagcgtaaacctttcagttctttgaagcaaagattacagggcactgacattcctactgtgaagaagactccacaatccaagtctccacctgtgaggaagtctaactggagacaacaacatgaagactttattaatgcaatccgatcagcaaagcagtgtatgctagccattaaagaaggccgacccctcccacctccaccccctccatccttgaacccagattatattcaacgtccatattgtatgagaaggtttaatgaaagcgcagctgagcgacatactaatttctgcaaggatcagtcttctcgccgagtctttaatccagctcagacagcagccaaattggcatccagagctcagggtagggctcagatgggtccaaaaaaagaaccaactgttaccagtgctgtgggagctttgctgcagaacagggtcctggtggccacgaatgaagtcccaaccaagtcaggattagctatggaccctgcttctggagcaaaactcagacaaggatttagtaaatcttctaaaaaagattaactcctagaagccagactgcctccctgaaacccatcagcctggatggttgcgtacccgagaatgccacctaaggggaaggaacggtagatgtgatgtctgtttttacacccttgattcttcttgaagcatcacttagaacaagtaaaacttgcttcagatttttatttactccctttgaagttttcaaaacaaaagcattaaacacatcaacctgtataatgcatgattc

SEQ ID NO: 204277 - DNA, 2249 bp, Homo sapiens
  Payload ID: 20289
  Gene Name: zinc finger, C2HC-type containing 1C
  ENST ID: ENST00000238686
  CDS Start-End: 193-1362
gagttcgcggcgaggggcggagcttggcgcgccagtgcctcggtttccaggcaccgggaataacagaagccagctgagagcgcctgcgcggctgtcggttgatggggaggtcaggtctgggaaactaggccctggggttttccctgagcaggagcggtgcccgagggcctcaggcgtcagtccaggccctgaatggctggtctccagcggttggcgtcacatctgcctgtgggcgttatgctcccacataatacaacggaagctccagggccccactcagccaagcaagactcttacgaacaaggtgactcttcccagcagtccttgaaggggcacctgaggaacaatttccagaagcagcttttgagcaacaaagagttgattctggataaagtctatactcaccccaaatggaacacccaaacaaaagcccggagctactcctatccccactgtactggaatcagccagcaagatccagaaagtgattcccagggccaaggaaatggtttgttttactcgtcaggccctcaatcctggtatcccaaagccaataaccaggactttatcccctttacaaagaaacgagttggagtggaccgggcgttcccattgaaacccatggtccacaggaagtcgtgcagtacaggtgaggctggcactgatggggaccataatgtctacccaaggccccctgagccgagagagttttcatctaggaactttggtgtgaggaaccagggcaacttttctgtggttggtactgttcttgctgccacgcaggcggagaaggccgtggcaaactttgacaggacggagtgggtgcagatccgaagactagaagctgcaggggagagcttagaggaggaaatccgaagaaagcagattctcctgaggggaaagctgaagaagacagaggaggaactcagaaggatccagacgcaaaaggaacaggccaaggaaaatgaaaacggagagctacagaaaattatactccccaggagcagagttaaaggtaataaaagcaacaccatgtacaaacctatcttctccccagaatttgagtttgaggaagaatttagtagagacaggagagaggatgaaacttggggacggtctcaacaaaattcaggtccattccagttctctgattatagaatccagaggctcaaaagggaaaggctggtagcaagcaataataaaattcgagacccagtctcagagccatcggtggagaaattctccccgccttcagaaacaccagtcggtgctttgcagggatccgccagaaattccagcctgtccatggcaccagactcctcaggttccagcggctccattgaagagccacagctgggctgaacctcctcagaagagcaactggagatagaagcatgaatcttttatccatacgttccgccaggctcgagaggtccagcaggtaactgccaaaggtggaaactgttcacacttgcctcccatcctgcctgcagaaaacccagactgcattcagtgtcctcagtgtagccaccactttgctcccaaggtggctgagcaacacattcccaagtgtaagaccatcaagaactgtcttccacctctaaggaagcattatagttgagcagacaacaatggaaacttttggatagttcagaaagctctgcttctcttcagcagtaaatgggagtagaatttgatgcaaagcagaaagaaatcaaacagctcccagatctgcctgcagagctaaaatctgtgaggagagagccactgctaagcagcaggaggcagaaggaagccccagcttcccactaaattacaaccttgggctggtatgctttatgttattgccctcagaattgatgggtgaagacactgaagagtcatgagcaggctccattaaagctcttttcttgcatgcctgacttgtggtttgtgctagttaagtgcctgcatctggttctgccttcttgtcactgcatgtatgttcagagttcctgttaactcttgcttttgtagaagctggagttattaggatgtgttggtgtcagaggggcatgatcacccagatagtaactcttataaaagataatacaattttgctataaggcattattaatggaaatctatccttggtctccctggtgcataagcctggccaaaacccaatacaagtatgtaaggttaaggcaccaatgtctcctaaaccttccctatggtgtactgtgtaataaaggaaagatctttatgta

SEQ ID NO: 204278 - DNA, 1509 bp, Homo sapiens
  Payload ID: 20289
  Gene Name: zinc finger, C2HC-type containing 1C
  Uniprot ID: Q53FD0
  ENST ID: ENST00000439583
  CDS Start-End: 129-956
agaagccagctgagagcgcctgcgcggctgtcggttgatggggaggtcaggtctgggaaactaggccctggggttttccctgagcaggagcggtgcccgagggcctcaggcgtcagtccaggccctgaatggctggtctccagcggttggcgtcacatctgcctgtgggcgttatgctcccacataatacaacggaagctccagggccccactcagccaagcaagactcttacgaacaaggtgactcttcccagcagtccttgaaggggcacctgaggaacaatttccagaagcagcttttgagcaacaaagagttgattctggataaagtctatactcaccccaaatggaacacccaaacaaaagcccggagctactcctatccccactgtactggaatcagccagcaagatccagaaagtgattcccagggccaaggaaatggtttgttttactcgtcaggccctcaatcctggtatcccaaagccaataaccaggactttatcccctttacaaagaaacgagttggagtggaccgggcgttcccattgaaacccatggtccacaggaagtcgtgcagtacaggtgaggctggcactgatggggaccataatgtctacccaaggccccctgagccgagagagttttcatctaggaactttggtgtgaggaaccagggcaacttttctgtggttggtactgttcttgctgccacgcaggcggagaaggccgtggcaaactttgacaggacggagtgggtgcagatccgaagactagaagctgcaggggagagcttagaggaggaaatccgaagaaagcagattctcctgaggggaaagctgaagaagacagaggaggaactcagaaggatccagacgcaaaaggaacaggccaaggaaaatgaaaacggagagctacagaaaattatactccccaggagcagagttaaaggctgaacctcctcagaagagcaactggagatagaagcatgaatcttttatccatacgttccgccaggctcgagaggtccagcaggtaactgccaaaggtggaaactgttcacacttgcctcccatcctgcctgcagaaaacccagactgcattcagtgtcctcagtgtagccaccactttgctcccaaggtggctgagcaacacattcccaagtgtaagaccatcaagaactgtcttccacctctaaggaagcattatagttgagcagacaacaatggaaacttttggatagttcagaaagctctgcttctcttcagcagtaaatgggagtagaatttgatgcaaagcagaaagaaatcaaacagctcccagatctgcctgcagagctaaaatctgtgaggagagagccactgctaagcagcaggaggcagaaggaagccccagcttcccactaaattacaaccttgggctggtatgctttatgttattgccctcagaattgatgggtgaagacactgaagagtcatgagcaggctccattaaagctcttttcttgca

SEQ ID NO: 204279 - DNA, 776 bp, Homo sapiens
  Payload ID: 20289
  Gene Name: zinc finger, C2HC-type containing 1C
  ENST ID: ENST00000532198
  CDS Start-End: 1-473
gagtggaccgggcgttcccattgaaacccatggtccacaggaagtcgtgcagtacaggtgaggctggcactgatggggaccataatgtctacccaaggccccctgagccgagagagttttcatctaggaactttggtgtgaggaaccagggcaacttttctgtggttggtactgttcttgctgccacgcaggcggagaaggccgtggcaaactttgacaggacggagtgggtgcagatccgaagactagaagctgcaggggagagcttagaggaggaaatccgaagaaagcagattctcctgaggggaaagctgaagaagacagaggaggaactcagaaggatccagacgcaaaaggaacaggccaaggaaaatgaaaacggagagctacagaaaattatactccccaggagcagagttaaagtgctgtgcctttggaagctgagtggttgtaccttcctgtcattcctctagagtactcaagaacaggctgaacctcctcagaagagcaactggagatagaagcatgaatcttttatccatacgttccgccaggctcgagaggtccagcaggtaactgccaaaggtggaaactgttcacacttgcctcccatcctgcctgcagaaaacccagactgcattcagtgtcctcagtgtagccaccactttgctcccaaggtggctgagcaacacattcccaagtgtaagaccatcaagaactgtcttccacctctaaggaagcattatagttgagcagacaacaatggaaacttttgg

SEQ ID NO: 204280 - DNA, 564 bp, Homo sapiens
  Payload ID: 20289
  Gene Name: zinc finger, C2HC-type containing 1C
  ENST ID: ENST00000534151
  CDS Start-End: 285-564
aaaagctttgggttggggatctgtccaggaactcggctgggcctccacaaacctagccctcatcgcatctcagtcaacaagcgcaaccctcttctcattttctcatgaggagaaaggcatagacgaagaagtacatggggatacattcaatcattcaattaaatactgactgacagctactgtgtgccaggcacctgttctaggtgaccaggcaaacatcagtgaacaaaacaggatccctgtcctgaggagcttaattctggaggcgtcagtccaggccctgaatggctggtctccagcggttggcgtcacatctgcctgtgggcgttatgctcccacataatacaacggaagctccagggccccactcagccaagcaagactcttacgaacaaggtgactcttcccagcagtccttgaaggggcacctgaggaacaatttccagaagcagcttttgagcaacaaagagttgattctggataaagtctatactcaccccaaatggaacacccaaacaaaagcccggagctactcctatccccactgtactggaatcagccagc

SEQ ID NO: 204281 - DNA, 4283 bp, Homo sapiens
  Payload ID: 20289
  Gene Name: zinc finger, C2HC-type containing 1C
  Uniprot ID: Q53FD0
  ENST ID: ENST00000524913
  CDS Start-End: 490-1860
ggacgccggcatcctgcggcggaagcacgcggaggcacagccagggcctccgccctttgccagacaagggcacaccccaaggtctgggagcgtcgttctcagaaaagtacaagttcttctttgaaggagctccagaaaagcctctcccgcccctccccggctccccaagggcagggctggaccgagctgcagagttggccggacactgactgggtcaagtgaccttgggctgaccgcacccccacccccggtcgccccgggtcgctggtgcactgcgcctgcgcgcgtctccccgaggagttcgcggcgaggggcggagcttggcgcgccagtgcctcggtttccaggcaccgggaataacagaagccagctgagagcgcctgcgcggctgtcggttgatggggaggtcaggtctgggaaactaggccctggggttttccctgagcaggagcggtgcccgagggcctcaggcgtcagtccaggccctgaatggctggtctccagcggttggcgtcacatctgcctgtgggcgttatgctcccacataatacaacggaagctccagggccccactcagccaagcaagactcttacgaacaaggtgactcttcccagcagtccttgaaggggcacctgaggaacaatttccagaagcagcttttgagcaacaaagagttgattctggataaagtctatactcaccccaaatggaacacccaaacaaaagcccggagctactcctatccccactgtactggaatcagccagcaagatccagaaagtgattcccagggccaaggaaatggtttgttttactcgtcaggccctcaatcctggtatcccaaagccaataaccaggactttatcccctttacaaagaaacgagttggagtggaccgggcgttcccattgaaacccatggtccacaggaagtcgtgcagtacaggtgaggctggcactgatggggaccataatgtctacccaaggccccctgagccgagagagttttcatctaggaactttggtgtgaggaaccagggcaacttttctgtggttggtactgttcttgctgccacgcaggcggagaaggccgtggcaaactttgacaggacggagtgggtgcagatccgaagactagaagctgcaggggagagcttagaggaggaaatccgaagaaagcagattctcctgaggggaaagctgaagaagacagaggaggaactcagaaggatccagacgcaaaaggaacaggccaaggaaaatgaaaacggagagctacagaaaattatactccccaggagcagagttaaaggtaataaaagcaacaccatgtacaaacctatcttctccccagaatttgagtttgaggaagaatttagtagagacaggagagaggatgaaacttggggacggtctcaacaaaattcaggtccattccagttctctgattatagaatccagaggctcaaaagggaaaggctggtagcaagcaataataaaattcgagacccagtctcagagccatcggtggagaaattctccccgccttcagaaacaccagtcggtgctttgcagggatccgccagaaattccagcctgtccatggcaccagactcctcaggttccagcggctccattgaagagccacagctgggtgagtgcagccactgtgggcgcaaattcctctcgttcaggctggagagacactccaacatctgcagcaggatgcggggttccaagaggaaagtgtttgactcctccagggcccgggctaagggcacagaactagagcagtacttgaactggaaggggccagcttcagccaaggctgaacctcctcagaagagcaactggagatagaagcatgaatcttttatccatacgttccgccaggctcgagaggtccagcaggtaactgccaaaggtggaaactgttcacacttgcctcccatcctgcctgcagaaaacccagactgcattcagtgtcctcagtgtagccaccactttgctcccaaggtggctgagcaacacattcccaagtgtaagaccatcaagaactgtcttccacctctaaggaagcattatagttgagcagacaacaatggaaacttttggatagttcagaaagctctgcttctcttcagcagtaaatgggagtagaatttgatgcaaagcagaaagaaatcaaacagctcccagatctgcctgcagagctaaaatctgtgaggagagagccactgctaagcagcaggaggcagaaggaagccccagcttcccactaaattacaaccttgggctggtatgctttatgttattgccctcagaattgatgggtgaagacactgaagagtcatgagcaggctccattaaagctcttttcttgcatgcctgacttgtggtttgtgctagttaagtgcctgcatctggttctgccttcttgtcactgcatgtatgttcagagttcctgttaactcttgcttttgtagaagctggagttattaggatgtgttggtgtcagaggggcatgatcacccagatagtaactcttataaaagataatacaattttgctataaggcattattaatggaaatctatccttggtctccctggtgcataagcctggccaaaacccaatacaagtatgtaaggttaaggcaccaatgtctcctaaaccttccctatggtgtactgtgtaataaaggaaagatctttatgtactttacagggtagggatgggtgttgggggggaaacacattatacttctctctacttgttcttttctaatgggtttcatatgttaagaaagaaacctccattttagctgttagtagcactctactttcaaatcggtttggctaaatgactgtttagaggcagcaaaatctaccatcaaagcaagctgagacaggctggtcatggtggctcattcctataattccagcactttgggaggctgaagtgggaggattgcttgaggccaggagttcaagagcggcctcgacaacaaagcaagaccccatctcaaaacaaaacaaagctgggacactgcacagtgtcacatgcccttggcaattatagcatagtcaacttctatttcagagagtaaactttgaagggaaagggatcaaatctttttaattttctctgtgtagaatattgcctagcacaagttagaccttcaattagtgaggtctggagatttaaaattaaacaagaagatgagtgagtcctacactagtgaaatcagagaactgataagttaatgtctgcgagagtattatcagttcagataggagtgaagttagcacaacagatagaaatcttaggattactgttctgtattactcaaattgttagtttaaaatactggagaaaaactgctcaatttgagctagtcaacagggctagacagacaacaaaatcctattttactaagtaacaaatggccactcactcttgctccatttccactgcactccagcctggtgacctagtgagactccatctcaaaaaaaaaaaaaaaaaaaagaaaaaaaaattgggctaacagatcagaccaatttgaaatgtgagttaaggctttagcggtgaagctgcaggacacaggctgggaaaaaatcctatatatttaaataggagcacacatttctttgcactctttttaattgttccaaaggaaaggaggtatcacataataaagctttatggttagccccttaaggaaacctcacacagagataatggatatttaacctaataggtacattccctaggcaagttcaatgaaatgtacactttaagtgggaatgtaaaccagtacattgcaatagatggcaagagtaagctgtggccaaggtcacaaaatggcaacatgtggattgctttgctccacagatgttttatttcgctggcctagcattcataatatgatctgacatttaaaaactgggatatggaacatctcttgaaaaactggaagttctggaaacactgggccagcaacccgcatggcacaaattgggtggggtttagaatcagatgctcctccagatgggaatggtagcaccagaccactgcagtctcacttggcctgcttcacttctttaccttatctgcctggtaccacaggcacttggatttgggatcgctggatgttagtaaggtcatagatccgggccctccagagagaacaaattgttgttatatgtggggagtgctttctaaaaaggaagcagttgtttgctctcattttgctaaagaaataaaacaatagtcaatgc

SEQ ID NO: 204282 - DNA, 544 bp, Homo sapiens
  Payload ID: 20289
  Gene Name: zinc finger, C2HC-type containing 1C
  ENST ID: ENST00000525046
  CDS Start-End: 269-544
gatggggaggtcaggtctgggaaactaggccctggggttttccctgagcaggagcggtgcccgagggcctcaggtacgcagaagggcggggagacatgggatcagcacctccacctcctaagggaccgaagggcaggagagcgagaggacttgtccccagaggtggagtccgaagtgggggcgccccagttgacccttcgggacaaaacgtgacttcagccttaaggatctaaaaccggccgcggtcaggcgtcagtccaggccctgaatggctggtctccagcggttggcgtcacatctgcctgtgggcgttatgctcccacataatacaacggaagctccagggccccactcagccaagcaagactcttacgaacaaggtgactcttcccagcagtccttgaaggggcacctgaggaacaatttccagaagcagcttttgagcaacaaagagttgattctggataaagtctatactcaccccaaatggaacacccaaacaaaagcccggagctactcctatccccactgtactggaatcagc

SEQ ID NO: 204283 - DNA, 809 bp, Homo sapiens
  Payload ID: 20289
  Gene Name: zinc finger, C2HC-type containing 1C
  ENST ID: ENST00000526130
  CDS Start-End: 296-809
ggttgatggggaggtcaggtctgggaaactaggccctggggttttccctgagcaggagcggtgcccgagggcctcaggtacgcagaagggcggggagacatgggatcagcacctccacctcctaagggaccgaagggcaggagagcgagaggacttgtccccagaggtggagtccgaagtgggggcgccccagttgacccttcgggacaaaacgtgacttcagccttaaggatctaaaaccggccgcggtcaggtcaggtggccctcaacgctcaggcgtcagtccaggccctgaatggctggtctccagcggttggcgtcacatctgcctgtgggcgttatgctcccacataatacaacggaagctccagggccccactcagccaagcaagactcttacgaacaaggtgactcttcccagcagtccttgaaggggcacctgaggaacaatttccagaagcagcttttgagcaacaaagagttgattctggataaagtctatactcaccccaaatggaacacccaaacaaaagcccggagctactcctatccccactgtactggaatcagccagcaagatccagaaagtgattcccagggccaaggaaatggtttgttttactcgtcaggccctcaatcctggtatcccaaagccaataaccaggactttatcccctttacaaagaaacgagttggagtggaccgggcgttcccattgaaacccatggtccacaggaagtcgtgcagtacaggtgaggctggcactgatggggaccataatgtctacccaaggccccctgagccgagag

SEQ ID NO: 204284 - DNA, 547 bp, Homo sapiens
  Payload ID: 20289
  Gene Name: zinc finger, C2HC-type containing 1C
  ENST ID: ENST00000554763
  CDS Start-End: 65-547
agaagccagctgagagcgcctgcgcggctgtcggttgatggggaggcgtcagtccaggccctgaatggctggtctccagcggttggcgtcacatctgcctgtgggcgttatgctcccacataatacaacggaagctccagggccccactcagccaagcaagactcttacgaacaaggtgactcttcccagcagtccttgaaggggcacctgaggaacaatttccagaagcagcttttgagcaacaaagagttgattctggataaagtctatactcaccccaaatggaacacccaaacaaaagcccggagctactcctatccccactgtactggaatcagccagcaagatccagaaagtgattcccagggccaaggaaatggtttgttttactcgtcaggccctcaatcctggtatcccaaagccaataaccaggactttatcccctttacaaagaaacgagttggagtggaccgggcgttcccattgaaacccatggtccacaggaagtcgtgcagtacaggtgaggctggcactgatggggaccat

SEQ ID NO: 204285 - DNA, 7285 bp, Homo sapiens
  Payload ID: 20290
  Gene Name: zinc finger, C3H1-type containing
  Uniprot ID: O60293
  ENST ID: ENST00000378743
  CDS Start-End: 360-6329
tcctagtgagtatcgagttggtcttattatcgcgtgaactgggagcctttgtttcctgcgtgtcgcaggaagtgacgtttcgggtacagccgctaccagagtccctttctcgcgaggcggaagaaccccgatcgctgaggagcaagggggcgctaggaaagggaactgggttgcgacggtccggcgagagagagctggggtgctggggtgcggggaagttggggagcagaggccgcttggtgtccgagtagggtaagaccgcaccgacccagtccgttaggaaagaagggaaacgaggcaattgtcgggcggatccccggacggagggctaaggttgtgtggaaggcgctgctccccggatggcgaccgcagatactccggccccggcctccagtggcctctcgccgaaggaagaaggggagcttgaagatggggaaatcagtgacgacgataataacagccagatacggagtcggagcagcagcagcagcagcggcggcgggctgttaccctatccgcggcgaaggcctcctcactcggcccggggcggtggatctggcggaggcggtggctcttcctcgtcatcgtcctcttctcagcagcagctgaggaatttctcacgctcgcggcacgcgtctgagcggggccacctcaggggacccagcagctaccgacccaaagaaccgttccggtctcatccgccttctgtacggatgccttcgagctcactgtccgaaagcagtccccggccgtctttctgggagcggagccacctcgccttggaccgtttccgctttcgaggcaggccttaccggggtgggagtcgctggagtcgggggcgaggagtgggtgagcgaggaggcaagccggggtgcagacctcctctgggaggaggagcaggatccgggttcagcagcagtcagagctggcgagagccctctccacctcggaagagctccaaaagttttggaaggtctccatcaagaaaacaaaattattcatcaaaaaatgaaaactgtgtggaagaaacttttgaagatttgcttttaaagtataaacaaatacagttggaactagaatgcatcaataaggatgaaaaactagcattgagtagcaaagaagagaatgtgcaggaagatcctaaaacattgaacttcgaggaccaaactagcactgataatgtcagtattacaaaggattcaagtaaagaagtagctcctgaggagaaaacacaagtcaaaacttttcaggcatttgaattaaaaccactcaggcaaaaattgactttaccaggagataagaaccgtttgaaaaaagttaaagatggagcaaaaccactttccctgaaatccgacactactgattctagtcaaggattacaagataaagaacaaaatttaacaagaagaattagtacctcagatattctgtctgaaaagaaacttggtgaagatgaagaggaactatctgaattacagcttcgccttttggctcttcagtcagccagtaaaaaatggcaacaaaaagaacagcaggtgatgaaagaaagcaaagaaaagttgactaagacgaaaactgtacagcaaaaagttaaaacaagtacaaaaacacattcggccaaaaaagttagcactacagctaaacaagcattgaggaagcagcaaacaaaggcatggaagaaactacaacaacaaaaagagcaggaaagacagaaagaagaggatcagcggaaacaagctgaagaagaagagagaaggaaaagagaggaagaaatcagaaaaattcgagatctctcaaatcaggaagaacagtacaatcgattcatgaaattggttggtggcaagaggagatcaagaagtaaatcttcagatcctgacctgaggcgatccttagataagcaacctactgatagtggaggaggcatttatcagtatgataactatgaagaagttgctatggatacagatagtgaaaccagttctccagctccttcaccagtgcaaccgccatttttctctgaatgttcattggggtatttttctccagcaccatctctttctttgcctccaccacctcaggtttcttctctgccacctttgagccagccttatgtggaaggcttgtgtgtttctcttgaacctctacctcctctaccaccattaccacctctcccacctgaagatccagaacagcctccaaaaccaccttttgcagatgaggaagaggaggaagaaatgctgcttcgagaagaactacttaaatctctagcaaataaaagagcttttaagccagaggaaacatccagtaatagtgacccaccttcacctccagttctgaacaattcacatcctgtgccaagaagcaatctatcaatagtcagtattaacacagtgtctcagcctaggatacagaatccaaagtttcacagaggaccccgtcttccacgaactgtgatctcgcttccaaagcataaatcagtggttgtaacactaaatgattcagatgatagtgaatctgatggagaggcttccaagtcaacaaatagtgtttttggtggattagagtccatgattaaagaagcaagacgaactgctgagcaagcttcaaaaccgaaagtacctccaaaatctgaaaaagaaaatgatcctctgcgaacaccggaggctttgcctgaagaaaagaagattgaatatagattgttaaaggaagagattgccaaccgtgagaaacagcgtttgattaaatcagatcagctgaagacaagttcatcatccccagcaaactctgatgtggaaattgatggtattggcaggatagcaatggttactaagcaggttacagatgcagaatcaaaactgaaaaaacataggattctcttgatgaaagatgaatctgttttaaagaatttagtgcaacaagaagctaagaagaaagaatctgttagaaatgctgaagcaaagattacaaaacttacagaacagcttcaagcaactgaaaaaattcttaatgttaacagaatgtttttgaagaagcttcaggaacaaattcacagagttcaacagcgtgttacaattaagaaagctttgactctaaaatatggagaagagcttgctcgggcaaaggcagtggccagtaaagaaataggaaaacgtaaactggaacaagatcgctttgggccaaacaaaatgatgagactggacagttctccagtatcaagtccaagaaagcattcagcagaactaattgctatggagaaaagacggttacaaaagctagaatatgaatatgccctgaaaattcaaaaattaaaagaagcccgtgcccttaaagcaaaggaacaacaaaatatctctccagttgtggaagaggaacccgaattttctttacctcaaccctcacttcatgatctgacacaagataaattaaccctggacactgaagaaaatgatgttgatgatgaaattttgtctggttcaagcagagagcgaagaagatcttttttagaatccaattattttactaaacctaaccttaagcacactgatactgctaacaaagaatgcataaacaaacttaataaaaatactgtagaaaaaccagaactttttctagggttaaaaattggtgaattgcaaaaattgtattcaaaagctgacagcctaaaacagctgattttaaaaaccaccacaggcattacagagaaggttttgcatggtcaggagatttctgtagatgtggattttgtcacagcacaaagtaaaacaatggaagtgaagccatgtccttttagaccctaccatagtcctcttctagtttttaagtcctacagatttagtccatattatcgaaccaaggaaaaacttcccctgagctcagtatcatacagtaatatgattgaaccggatcagtgtttctgccgttttgatttaacaggaacatgtaatgatgatgattgtcaatggcagcatatacaagactatacacttagccgaaaacagttattccaggacattctgtcatataatctgtctttgattggttgtgcagagacaagtactaatgaagaaattactgcttcagcagaaaaatatgttgagaaactttttggagtaaacaaagatcgaatgtcaatggaccagatggctgttctccttgttagcaatatcaatgaaagtaaaggtcatactcctccatttacaacctacaaagataaaagaaagtggaagccaaagttttggagaaaacctatttcagataatagcttcagtagtgatgaggaacagtctacaggaccaattaagtatgctttccagccagagaaccaaataaatgttccagctctggatacagttgtcactccagatgatgtcagatactttacaaatgagactgatgacatcgctaatttagaagcaagtgtgcttgaaaatccttctcatgtacaactttggctcaagcttgcgtacaagtacttgaatcaaaatgagggggagtgctcagaatccttggattctgctttaaatgttctggcgcgagcattggaaaataacaaagacaatccagaaatttggtgccattacctcagattgttctcaaaaagaggaaccaaggacgaggtgcaggaaatgtgtgaaacagctgttgaatatgctccagattatcaaagcttttggacttttctacacctagaaagtacctttgaagaaaaggattacgtatgtgagagaatgttggagtttctgatgggagcagccaagcaggaaacatccaatattttgtcctttcagcttttagaggctcttttgtttagagttcagctgcacatatttactggaagatgccaaagtgcactggcaattttacagaatgcattgaaatctgctaatgatggaatagtagctgaataccttaaaaccagtgatcgatgtttggcatggttggcctacatacatcttattgaattcaacattctcccttcaaaattttatgatccatctaatgataatccttcaagaattgttaacactgaatcatttgtaatgccatggcaagctgttcaagatgtaaagactaatcctgacatgttgttagcagtttttgaagatgcagtgaaagcttgcacagatgagagccttgctgttgaggaaagaatagaggcctgccttccactttacacaaacatgattgctctgcaccaactcctggagaggtatgaggctgcaatggagctttgtaaatctttattggaatcatgtcctattaactgccagttgctggaagctcttgttgcattatatttgcaaacaaatcagcatgacaaagccagagcagtgtggcttactgcatttgaaaaaaatcctcagaatgcagaggttttttatcatatgtgcaaattcttcatcttacagaatcgaggcgataatcttcttccatttttgcggaaatttattgcatccttctttaaaccggggtttgagaagtataataacttggatctgtttcggtatctcttaaatattccaggaccaattgacattccatctcgtttatgtaaagggaattttgatgatgatatgtttaaccaccaagttccttatttgtggctgatttactgcctttgtcatcctcttcaatcaagtattaaagaaacagtggaggcatatgaggcagcattaggggtggctatgagatgtgatatagtacagaagatatggatggattatcttgtctttgcaaataatagagctgctggatccagaaacaaagttcaagaattcaaattttttactgatttagtgaatagatgtttggttacagtccctgcccgataccccattccttttagcagtgctgattactggtccaactatgaatttcataatagggttattttcttttatttgagctgtgttccaaagacccagcattccaaaaccttggaacggttttgttcagttatgccagctaattctggacttgcattgaggttacttcaacatgaatgggaagaaagcaatgttcagattctgaaacttcaagccaagatgtttacatataatatcccaacatgcctggccacctggaaaatagccattgctgctgagattgttctaaagggacaaagagaggtccaccgtttatatcagagagccttacagaagttacctctttgtgcatcactgtggaaagatcaactcttgtttgaagcatcagaaggaggtaaaactgataacctgagaaaactagtttccaagtgccaagagattggagtcagcctaaatgagctcttaaatttaaacagtaacaaaacagaaagcaagaatcactgaacactgggtgcagtcagttctaagtccttataataattgccaaaattatttgaatgattcttcaagattaggctgatccctggctaaggtctgtgtaaggcagacaagcgttattgatcatatcaagttccctacaatatcctgtcctcaaaaccggaagcaatgaacatgatcctcttcggttggataaatgaacttcctgtttggcctgcttctaggccctgccagattctcataacatcatatacgtaagtatagttcctcaaagtgactgacatttattttaattttgctttgtttttttttattttctcccccattcctttattttgtgttattcctgactcacttgacactctctgatgcctgagagattcctgtttgggatttaatatccagggctgtgtttacagtaaaaaaagcaggcagtcccttttagtttttcctttttaaatttttttgagattcttcatttcaggatttaaaactatagcagtccatcttaaggaaagtgtaactgccatggccacaagtctgctagttgcacttgaatgctctatcagggttgtttattaccctttctacgttctggactccttgccgagactgtttaacttgaagattaaagaaactattgcaaatgccagtgcatcagaacctaagagtggtcaaatattatgtgcaatttttttgtaaagaaattttaatttataataaagtttaacagtttaaagaacagttaatatttgaactgctttgtattgaaatactactttgtagtattgaaattgtttatatacttttttaatataagttaactttctaaaaactcttgctgtctttattcacttttcacactggtgggaaagggttgaagtcggagatacggatattcaccataacttatagcaatacttttttatcttgaaactgctttcccattaaaaaaaaaaaaa

SEQ ID NO: 204286 - DNA, 7597 bp, Homo sapiens
  Payload ID: 20290
  Gene Name: zinc finger, C3H1-type containing
  Uniprot ID: O60293
  ENST ID: ENST00000552994
  CDS Start-End: 210-5942
cgctaggaaagggaactgggttgcgacggtccggcgagagagagctggggtgctggggtgcggggaagttggggagcagaggccgcttggtgtccgagtagggtaagaccgcaccgacccagtccgttaggaaagaagggaaacgaggcaattgtcgggcggatccccggacggagggctaaggttgtgtggaaggcgctgctccccggatggcgaccgcagatactccggccccggcctccagtggcctctcgccgaaggaagaaggggagcttgaagatggggaaatcagtgacgacgataataacagccagatacggagtcggagcagcagcagcagcagcggcggcgggctgttaccctatccgcggcgaaggcctcctcactcggcccggggcggtggatctggcggaggcggtggctcttcctcgtcatcgtcctcttctcagcagcagctgaggaatttctcacgctcgcggcacgcgtctgagcggggccacctcaggggacccagcagctaccgacccaaagaaccgttccggtctcatccgccttctgtacggatgccttcgagctcactgtccgaaagcagtccccggccgtctttctgggagcggagccacctcgccttggaccgtttccgctttcgaggcaggccttaccggggtgggagtcgctggagtcgggggcgaggagtgggtgagcgaggaggcaagccggggtgcagacctcctctgggaggaggagcaggatccgggttcagcagcagtcagagctggcgagagccctctccacctcggaagagctccaaaagttttggaaggtctccatcaagaaaacaaaattattcatcaaaaaatgaaaactgtgtggaagaaacttttgaagatttgcttttaaagtataaacaaatacagttggaactagaatgcatcaataaggatgaaaaactagcattgagtagcaaagaagagaatgtgcaggaagatcctaaaacattgaacttcgaggaccaaactagcactgataatgtcagtattacaaaggattcaagtaaagaagtagctcctgaggagaaaacacaagtcaaaacttttcaggcatttgaattaaaaccactcaggcaaaaattgactttaccaggagataagaaccgtttgaaaaaagttaaagatggagcaaaaccactttccctgaaatccgacactactgattctagtcaaggattacaagataaagaacaaaatttaacaagaagaattagtacctcagatattctgtctgaaaagaaacttggtgaagatgaagaggaactatctgaattacagcttcgccttttggctcttcagtcagccagtaaaaaatggcaacaaaaagaacagcaggtgatgaaagaaagcaaagaaaagttgactaagacgaaaactgtacagcaaaaagttaaaacaagtacaaaaacacattcggccaaaaaagttagcactacagctaaacaagcattgaggaagcagcaaacaaaggcatggaagaaactacaacaacaaaaagagcaggaaagacagaaagaagaggatcagcggaaacaagctgaagaagaagagagaaggaaaagagaggaagaaatcagaaaaattcgagatctctcaaatcaggaagaacagtacaatcgattcatgaaattggttggtggcaagaggagatcaagaagtaaatcttcagatcctgacctgaggcgatccttagataagcaacctactgatagtggaggaggcatttatcagtatgataactatgaagaagttgctatggatacagatagtgaaaccagttctccagctccttcaccagtgcaaccgccatttttctctgaatgttcattggggtatttttctccagcaccatctctttctttgcctccaccacctcaggtttcttctctgccacctttgagccagccttatgtggaaggcttgtgtgtttctcttgaacctctacctcctctaccaccattaccacctctcccacctgaagatccagaacagcctccaaaaccaccttttgcagatgaggaagaggaggaagaaatgctgcttcgagaagaactacttaaatctctagcaaataaaagagcttttaagccagaggaaacatccagtaatagtgacccaccttcacctccagttctgaacaattcacatcctgtgccaagaagcaatctatcaatagtcagtattaacacagtgtctcagcctaggatacagaatccaaagtttcacagaggaccccgtcttccacgaactgtgatctcgcttccaaagcataaatcagtggttgtaacactaaatgattcagatgatagtgaatctgatggagaggcttccaagtcaacaaatagtgtttttggtggattagagtccatgattaaagaagcaagacgaactgctgagcaagcttcaaaaccgaaagtacctccaaaatctgaaaaagaaaatgatcctctgcgaacaccggaggctttgcctgaagaaaagaagattgaatatagattgttaaaggaagagattgccaaccgtgagaaacagcgtttgattaaatcagatcagctgaagacaagttcatcatccccagcaaactctgatgtggaaattgatggtattggcaggatagcaatggttactaagcaggttacagatgcagaatcaaaactgaaaaaacataggattctcttgatgaaagatgaatctgttttaaagaatttagtgcaacaagaagctaagaagaaagaatctgttagaaatgctgaagcaaagattacaaaacttacagaacagcttcaagcaactgaaaaaattcttaatgttaacagaatgtttttgaagaagcttcaggaacaaattcacagagttcaacagcgtgttacaattaagaaagctttgactctaaaatatggagaagagcttgctcgggcaaaggcagtggccagtaaagaaataggaaaacgtaaactggaacaagatcgctttgggccaaacaaaatgatgagactggacagttctccagtatcaagtccaagaaagcattcagcagaactaattgctatggagaaaagacggttacaaaagctagaatatgaatatgccctgaaaattcaaaaattaaaagaagcccgtgcccttaaagcaaaggaacaacaaaatatctctccagttgtggaagaggaacccgaattttctttacctcaaccctcacttcatgatctgacacaagataaattaaccctggacactgaagaaaatgatgttgatgatgaaattttgtctggttcaagcagagagcgaagaagatcttttttagaatccaattattttactaaacctaaccttaagcacactgatactgctaacaaagaatgcataaacaaacttaataaaaatactgtagaaaaaccagaactttttctagggttaaaaattggtgaattgcaaaaattgtattcaaaagctgacagcctaaaacagctgattttaaaaaccaccacaggcattacagagaaggttttgcatggtcaggagatttctgtagatgtggattttgtcacagcacaaagtaaaacaatggaagtgaagccatgtccttttagaccctaccatagtcctcttctagtttttaagtcctacagatttagtccatattatcgaaccaaggaaaaacttcccctgagctcagtatcatacagtaatatgattgaaccggatcagtgtttctgccgttttgatttaacaggaacatgtaatgatgatgattgtcaatggcagcatatacaagactatacacttagccgaaaacagttattccaggacattctgtcatataatctgtctttgattggttgtgcagagacaagtactaatgaagaaattactgcttcagcagaaaaatatgttgagaaactttttggagtaaacaaagatcgaatgtcaatggaccagatggctgttctccttgttagcaatatcaatgaaagtaaaggtcatactcctccatttacaacctacaaagataaaagaaagtggaagccaaagttttggagaaaacctatttcagataatagcttcagtagtgatgaggaacagtctacaggaccaattaagtatgctttccagccagagaaccaaataaatgttccagctctggatacagttgtcactccagatgatgtcagatactttacaaatgagactgatgacatcgctaatttagaagcaagtgtgcttgaaaatccttctcatgtacaactttggctcaagcttgcgtacaagtacttgaatcaaaatgagggggagtgctcagaatccttggattctgctttaaatgttctggcgcgagcattggaaaataacaaagacaatccagaaatttggtgccattacctcagattgttctcaaaaagaggaaccaaggacgaggtgcaggaaatgtgtgaaacagctgttgaatatgctccagattatcaaagcttttggacttttctacacctagaaagtacctttgaagaaaaggattacgtatgtgagagaatgttggagtttctgatgggagcagccaagcaggaaacatccaatattttgtcctttcagcttttagaggctcttttgtttagagttcagctgcacatatttactggaagatgccaaagtgcactggcaattttacagaatgcattgaaatctgctaatgatggaatagtagctgaataccttaaaaccagtgatcgatgtttggcatggttggcctacatacatcttattgaattcaacattctcccttcaaaattttatgatccatctaatgataatccttcaagaattgttaacactgaatcatttgtaatgccatggcaagctgttcaagatgtaaagactaatcctgacatgttgttagcagtttttgaagatgcagtgaaagcttgcacagatgagagccttgctgttgaggaaagaatagaggcctgccttccactttacacaaacatgattgctctgcaccaactcctggagaggtatgaggctgcaatggagctttgtaaatctttattggaatcatgtcctattaactgccagttgctggaagctcttgttgcattatatttgcaaacaaatcagcatgacaaagccagagcagtgtggcttactgcatttgaaaaaaatcctcagaatgcagaggttttttatcatatgtgcaaattcttcatcttacagaatcgaggcgataatcttcttccatttttgcggaaatttattgcatccttctttaaaccggggtttgagaagtataataacttggatctgtttcggtatctcttaaatattccaggaccaattgacattccatctcgtttatgtaaagggaattttgatgatgatatgtttaaccaccaagttccttatttgtggctgatttactgcctttgtcatcctcttcaatcaagtattaaagaaacagtggaggcatatgaggcagcattaggggtggctatgagatgtgatatagtacagaagatatggatggattatcttgtctttgcaaataatagagctgctggatccagaaacaaagttcaagaattcaaattttttactgatttagtgaatagatgtttggttacagtccctgcccgataccccattccttttagcagtgctgattactggtccaactatgaatttcataatagggttattttcttttatttgagctgtgttccaaagacccagcattccaaaaccttggaacggttttgttcagttatgccagctaattctggacttgcattgaggttacttcaacatgaatgggaagaaagcaatgttcagattctgaaacttcaagccaagatgtttacatataatatcccaacatgcctggccacctggaaaatgtaatgcaacaatcatgtacatgtttttatagctattgcttttatttataaggtttgctccagacaggtaaatctgaaatgacatctatatatatatatatatatatatttttttttttttttttcctggacagattgctattcttaatttagatttgtttttagcatttactgaggtttaatgagagtgagtactcattgaatagcctctaaaagcaaaaagcgtagacttttaattttctttgaaggacaacatttaggtgacagtactgttatcaaacaaatctgctacagacattttaagaccacctcttgaaatggtggtgtgtcacctgttgtagtctgatttcttctttcttttaaaggtgttagtgctaggtatttttgactagtaattatgaggtgttttttttttgttgttgttgttgttttttttttctcctgtgaacgttatttatgttcaaaacactggtctgcttttttcttgtaaagttgataaaaattgttgaatttttcttttcactataggttttcctccttggaagtttagcctgttaactttcaggaagttttgtactcagattcccacagtcagtattctgccagtggtggtgtttcattttgttcaaagatatataaatttttcttttcctttttctatatttctttttttttttttttctcttagagccattgctgctgagattgttctaaagggacaaagagaggtccaccgtttatatcagagagccttacagaagttacctctttgtgcatcactgtggaaagatcaactcttgtttgaagcatcagaaggaggtaaaactgataacctgagaaaactagtttccaagtgccaagagattggagtcagcctaaatgagctcttaaatttaaacagtaacaaaacagaaagcaagaatcactgaacactgggtgcagtcagttctaagtccttataataattgccaaaattatttgaatgattcttcaagattaggctgatccctggctaaggtctgtgtaaggcagacaagcgttattgatcatatcaagttccctacaatatcctgtcctcaaaaccggaagcaatgaacatgatcctcttcggttggataaatgaacttcctgtttggcctgcttctaggccctgccagattctcataacatcatatacgtaagtatagttcctcaaagtgactgacatttattttaattttgctttgtttttttttattttctcccccattcctttattttgtgttattcctgactcacttgacactctctgatgcctgagagattcctgtttgggatttaatatccagggctgtgtttacagtaaaaaaagcaggcagtcccttttagtttttcctttttaaatttttttgagattcttcatttcaggatttaaaactatagcagtccatcttaaggaaagtgtaactgccatggccacaagtctgctagttgcacttgaatgctctatcagggttgtttattaccctttctacgttctggactccttgccgagactgtttaacttgaagattaaagaaactattgcaaatgccagtgcatcagaacctaagagtggtcaaatattatgtgcaatttttttgtaaagaaattttaatttataataaagtttaacagttt

SEQ ID NO: 204287 - DNA, 1484 bp, Homo sapiens
  Payload ID: 20290
  Gene Name: zinc finger, C3H1-type containing
  ENST ID: ENST00000552037
  CDS Start-End: 249-1325
gcgaggcggaagaaccccgatcgctgaggagcaagggggcgctaggaaagggaactgggttgcgacggtccggcgagagagagctggggtgctggggtgcggggaagttggggagcagaggccgcttggtgtccgagtagggtaagaccgcaccgacccagtccgttaggaaagaagggaaacgaggcaattgtcgggcggatccccggacggagggctaaggttgtgtggaaggcgctgctccccggatggcgaccgcagatactccggccccggcctccagtggcctctcgccgaaggaagaaggggagcttgaagatggggaaatcagtgacgacgataataacagccagatacggagtcggagcagcagcagcagcagcggcggcgggctgttaccctatccgcggcgaaggcctcctcactcggcccggggcggtggatctggcggaggcggtggctcttcctcgtcatcgtcctcttctcagcagcagctgaggaatttctcacgctcgcggcacgcgtctgagcggggccacctcaggggacccagcagctaccgacccaaagaaccgttccggtctcatccgccttctgtacggatgccttcgagctcactgtccgaaagcagtccccggccgtctttctgggagcggagccacctcgccttggaccgtttccgctttcgaggcaggccttaccggggtgggagtcgctggagtcgggggcgaggagtgggtgagcgaggaggcaagccggggtgcagacctcctctgggaggaggagcaggatccgggttcagcagcagtcagagctggcgagagccctctccacctcggaagagctccaaaagttttggaaggtctccatcaagaaaacaaaattattcatcaaaaaatgaaaactgtgtggaagaaacttttgaagatttgcttttaaagtataaacaaatacagttggaactagaatgcatcaataaggatgaaaaactagcattgagtagcaaagaagagaatgtgcaggaagatcctaaaacattgaacttcgaggaccaaactagcactgataatgtcagtattacaaaggattcaagtaaagaagtagctcctgaggagaaaacacaagtcaaaacttttcaggcatttgaattaaaaccactcaggcaaaaattgactttaccaggagataagaaccgtttgaaaaaagttaaagatggagcaaaaccactttccctgaaatccgacactactgattctagtcaaggtatcccttatcgggtaaaggagggttttactcctattcctggtttgaaattttcagcgtgaatggatgttgaagtttacaaaatctgttttcttcattattgggatgagcatctaatttattttaatttgttagtgtaatgaattatataatttatttctagtattaaaccacccttgtatgcttgcgtttaatacagtttatgatataccatttttaaa

SEQ ID NO: 204288 - DNA, 1771 bp, Homo sapiens
  Payload ID: 20290
  Gene Name: zinc finger, C3H1-type containing
  Uniprot ID: O60293
  ENST ID: ENST00000548100
  CDS Start-End: 215-1255
gggggcgctaggaaagggaactgggttgcgacggtccggcgagagagagctggggtgctggggtgcggggaagttggggagcagaggccgcttggtgtccgagtagggtaagaccgcaccgacccagtccgttaggaaagaagggaaacgaggcaattgtcgggcggatccccggacggagggctaaggttgtgtggaaggcgctgctccccggatggcgaccgcagatactccggccccggcctccagtggcctctcgccgaaggaagaaggggagcttgaagatggggaaatcagtgacgacgataataacagccagatacggagtcggagcagcagcagcagcagcggcggcgggctgttaccctatccgcggcgaaggcctcctcactcggcccggggcggtggatctggcggaggcggtggctcttcctcgtcatcgtcctcttctcagcagcagctgaggaatttctcacgctcgcggcacgcgtctgagcggggccacctcaggggacccagcagctaccgacccaaagaaccgttccggtctcatccgccttctgtacggatgccttcgagctcactgtccgaaagcagtccccggccgtctttctgggagcggagccacctcgccttggaccgtttccgctttcgaggcaggccttaccggggtgggagtcgctggagtcgggggcgaggagtgggtgagcgaggaggcaagccggggtgcagacctcctctgggaggaggagcaggatccgggttcagcagcagtcagagctggcgagagccctctccacctcggaagagctccaaaagttttggaaggtctccatcaagaaaacaaaattattcatcaaaaaatgaaaactgtgtggaagaaacttttgaagatttgcttttaaagtataaacaaatacagttggaactagaatgcatcaataaggatgaaaaactagcattgagtagcaaagaagagaatgtgcaggaagatcctaaaacattgaacttcgaggaccaaactagcactgataatgtcagtattacaaaggattcaagtaaagaagtagctcctgaggagaaaacacaagtcaaaacttttcaggcatttgaattaaaaccactcaggcaaaaattgactttaccaggagataagaaccgtttgaaaaaagttaaagatggagcaaaaccactttccctgaaatccgacactactgattctagtcaaggtaatggaattaaatatttcagttagtaatgactcttcttcctctaaagtagtaactacttgttttggcagtgtacttcattgaaatgattgtaattatctgtaaattcttttgtactttctatgtagacattcatatcattgaataattactaattttgtttacttttagtctttatttatttatttattttttgcctgacattctggcctctataatagaatgttatacataagtgataatagtggacacctttgtttcctaatttaaagaaaatggttttgacatttaccattaaatatgatgttaatttttttgtaggtatcccttatcgggtaaaggagggttttactcctattcctggtttgaaattttcagcgtgaatggatgttgaagtttacaaaatctgttttcttcattattgggatgagcatctaatttattttaatttgttagtgtaatgaattatataatttatttctagtattaaaccacccttgtatgcttgcgtttaatacagtttatgatataccatttttaaa

SEQ ID NO: 204289 - DNA, 2017 bp, Homo sapiens
  Payload ID: 20291
  Gene Name: zinc finger, C3HC-type containing 1
  Uniprot ID: Q86WB0
  ENST ID: ENST00000311873
  CDS Start-End: 195-1640
gcctcaagaggcggatattaacctcccaggacggaagttccggagccttcaaactctcggggaagcaactcggcagcggaccaagatggcggcgccctgtgagggacaagcgtttgccgtaggggttgaaaagaattggggtgcagtagttcgctccccagaagggaccccccagaaaatccggcagctgatagatgaggggattgccccggaagagggaggcgtggacgcaaccacacccgcttgaggctctctatgaatctctgagagtcttagagaaggacacgtctgccacatcccagtcagttaatggatcaccccaagcggaacaaccttcattggaatctacaagcaaagaagccttctttagcagagtggaaacattttcttctttgaaatgggcaggtaagccctttgagctgtctccactcgtctgtgcaaaatatggctgggtcacagtggaatgtgatatgctcaagtgctctagctgtcaagcttttctctgtgccagtttacaaccagcttttgactttgacagatataagcaacgatgtgctgagctgaagaaagccttgtgtactgcccatgagaagttctgtttctggccagacagcccatccccagaccgatttgggatgttgcccctggatgagcctgctattcttgttagtgaattcctagatcgttttcaaagcctttgtcacttggacctccagcttccttccctaaggccggaggacttgaaaactatgtgcttgacagaagacaagatcagtcttctcctacacttgcttgaagatgaacttgatcaccgaactgatgagagaaaaactacaatcaaattaggctcagacatccaagtccacgtcactgcctgtattctctctgtgtgtggctgggcgtgtagttcctctttggaatccatgcagctctccctgataacatgttcgcaatgtatgaggaaggtggggctctggggcttccagcagattgaatcgtccatgactgacctggatgcatcctttggcctgaccagctccccaatcccaggccttgaggggcgaccagagcgcttacctctggtgcctgaatctcctcggaggatgatgacccggagccaggatgccactttctccccaggctcagagcaggctgaaaagagccctggtcccattgtctctcgaactcggagctgggactcttccagtcctgttgaccgtcctgagccagaggctgctagccccaccaccagaactcgcccagtgacccgaagcatgggaacaggagacacccctggcctggaggtaccatctagccctctgcggaaagccaagcgagctcgcctctgctcctccagcagttcggacacatcttcccgaagcttctttgatcccacctctcagcatagagactggtgcccttgggtgaatatcacacttggcaaagaaagcagggagaatggtggaactgaaccagatgccagcgccccagcagagccaggctggaaagcagtgctgaccatcctcttggcgcacaaacagtctagccagccagctgaaacggactccatgagtctctctgagaaatcaaggaaagtattccgaatatttcggcagtgggaatctctgtgctcatgctgaagatactccagcgccttcctggagatagctggaatgagagtgactttttgaaaaattaaggctgagttcctttcggtcagctgacactaagtttttcctgttctgggttaatcataaggagccccctgccatagcaaaggcagtgagtgtcaactatctgcatctggctgagagagacccgtttcctttcagggatgtggacagggtaagggcagcaagcatggttctgttaaaggagtgtgggattaacagactagaaggaagactaaggacctgaccacccatttcagcatcttcaatgtggagcagtgttctgaggactcttctatcctaggactatgacagtgtgtattaataaaatatttgctaagattctc

SEQ ID NO: 204290 - DNA, 1972 bp, Homo sapiens
  Payload ID: 20291
  Gene Name: zinc finger, C3HC-type containing 1
  Uniprot ID: Q86WB0
  ENST ID: ENST00000358303
  CDS Start-End: 86-1594
gcctcaagaggcggatattaacctcccaggacggaagttccggagccttcaaactctcggggaagcaactcggcagcggaccaagatggcggcgccctgtgagggacaagcgtttgccgtaggggttgaaaagaattggggtgcagtagttcgctccccagaagggaccccccagaaaatccggcagctgatagatgaggggattgccccggaagagggaggcgtggacgcgaaggacacgtctgccacatcccagtcagttaatggatcaccccaagcggaacaaccttcattggaatctacaagcaaagaagccttctttagcagagtggaaacattttcttctttgaaatgggcaggtaagccctttgagctgtctccactcgtctgtgcaaaatatggctgggtcacagtggaatgtgatatgctcaagtgctctagctgtcaagcttttctctgtgccagtttacaaccagcttttgactttgacagatataagcaacgatgtgctgagctgaagaaagccttgtgtactgcccatgagaagttctgtttctggccagacagcccatccccagaccgatttgggatgttgcccctggatgagcctgctattcttgttagtgaattcctagatcgttttcaaagcctttgtcacttggacctccagcttccttccctaaggccggaggacttgaaaactatgtgcttgacagaagacaagatcagtcttctcctacacttgcttgaagatgaacttgatcaccgaactgatgagagaaaaactacaatcaaattaggctcagacatccaagtccacgtcactgcctgtattctctctgtgtgtggctgggcgtgtagttcctctttggaatccatgcagctctccctgataacatgttcgcaatgtatgaggaaggtggggctctggggcttccagcagattgaatcgtccatgactgacctggatgcatcctttggcctgaccagctccccaatcccaggccttgaggggcgaccagagcgcttacctctggtgcctgaatctcctcggaggatgatgacccggagccaggatgccactttctccccaggctcagagcaggctgaaaagagccctggtcccattgtctctcgaactcggagctgggactcttccagtcctgttgaccgtcctgagccagaggctgctagccccaccaccagaactcgcccagtgacccgaagcatgggaacaggagacacccctggcctggaggtaccatctagccctctgcggaaagccaagcgagctcgcctctgctcctccagcagttcggacacatcttcccgaagcttctttgatcccacctctcagcatagagactggtgcccttgggtgaatatcacacttggcaaagaaagcagggagaatggtggaactgaaccagatgccagcgccccagcagagccaggctggaaagcagtgctgaccatcctcttggcgcacaaacagtctagccagccagctgaaacggactccatgagtctctctgagaaatcaaggaaagtattccgaatatttcggcagtgggaatctctgtgctcatgctgaagatactccagcgccttcctggagatagctggaatgagagtgactttttgaaaaattaaggctgagttcctttcggtcagctgacactaagtttttcctgttctgggttaatcataaggagccccctgccatagcaaaggcagtgagtgtcaactatctgcatctggctgagagagacccgtttcctttcagggatgtggacagggtaagggcagcaagcatggttctgttaaaggagtgtgggattaacagactagaaggaagactaaggacctgaccacccatttcagcatcttcaatgtggagcagtgttctgaggactcttctatcctaggactatgacagtgtgtattaataaaatatttgctaagattctca

SEQ ID NO: 204291 - DNA, 1676 bp, Homo sapiens
  Payload ID: 20291
  Gene Name: zinc finger, C3HC-type containing 1
  Uniprot ID: Q86WB0
  ENST ID: ENST00000360708
  CDS Start-End: 9-1304
ggaccaagatggcggcgccctgtgagggacaagcgtttgccgtaggggttgaaaagaattggggtgcagtagttcgctccccagaagggaccccccagaaaatccggcagctgatagatgaggggattgccccggaagagggaggcgtggacgcgaaggacacgtctgccacatcccagtcagttaatggatcaccccaagcggaacaaccttcattggaatctacaagcaaagaagccttctttagcagagtggaaacattttcttctttgaaatgggcaggtaagccctttgagctgtctccactcgtctgtgcaaaatatggctgggtcacagtggaatgtgatatgctcaagtgctctagctgtcaagcttttctctgtgccagtttacaaccagcttttgactttgacagatataagcaacgatgtgctgagctgaagaaagccttgtgtactgcccatgagaagttctgtttctggccagacagcccatccccagaccgatttgggatgttgcccctggatgagcctgctattcttgttagtgaattcctagatcgttttcaaagcctttgtcacttggacctccagcttccttccctaaggccggaggacttgaaaactatgtgcttgacagaagacaagatcagtcttctcctacacttgcttgaagatgaacttgatcaccgaactgatgagagaaaaactacaatcaaattaggctcagacatccaagtccacgtcactgcctgtattctctctgtgtgtggctgggcgtgtagttcctctttggaatccatgcagctctccctgataacatgttcgcaatgtatgaggaaggtggggctctggggcttccagcagattgaatcgtccatgactgacctggatgcatcctttggcctgaccagctccccaatcccaggccttgaggggcgaccagagcgcttacctctggtgcctgaatctcctcggaggatgatgacccggagccaggatgccactttctccccaggctcagagcaggacacatcttcccgaagcttctttgatcccacctctcagcatagagactggtgcccttgggtgaatatcacacttggcaaagaaagcagggagaatggtggaactgaaccagatgccagcgccccagcagagccaggctggaaagcagtgctgaccatcctcttggcgcacaaacagtctagccagccagctgaaacggactccatgagtctctctgagaaatcaaggaaagtattccgaatatttcggcagtgggaatctctgtgctcatgctgaagatactccagcgccttcctggagatagctggaatgagagtgactttttgaaaaattaaggctgagttcctttcggtcagctgacactaagtttttcctgttctgggttaatcataaggagccccctgccatagcaaaggcagtgagtgtcaactatctgcatctggctgagagagacccgtttcctttcagggatgtggacagggtaagggcagcaagcatggttctgttaaaggagtgtgggattaacagactagaaggaagactaaggacctgaccacccatttcagcatcttcaatgtggagcagtgttctgaggactcttctatcctaggactatgacagtgtgtattaataaaatatttgctaaga

SEQ ID NO: 204292 - DNA, 559 bp, Homo sapiens
  Payload ID: 20291
  Gene Name: zinc finger, C3HC-type containing 1
  ENST ID: ENST00000484432
  CDS Start-End: 20-307
aactcggcagcggaccaagatggcggcgccctgtgagggacaagcgtttgccgtaggggttgaaaagaattggggtgcagtagttcgctccccagaagggaccccccagaaaatccggcagctgatagatgaggggattgccccggaagagggaggcgtggacgcgaaggacacgtctgccacatcccagtcagttaatggatcaccccaagcggaacaaccttcattggaatctacaagcaaagaagccttctttagcagagtggaaacattttcttactttgatcaatcccctatatgtgcttaatctcccatttctgccatgctgccatcctttcttgcatgaatctctcgtcaccccatttaggtcctagcactccacacttggctgcccgcaagtgaatgcctgttacataccactttggttctgacaccctgggctgagctgcctcttcgcagcctcctggctctgacatcttccttgttcaccgcctaatggctttaagactgaattgctcaggaaagggaagataagcaacgatgtgctgagctgaagaaa

SEQ ID NO: 204293 - DNA, 760 bp, Homo sapiens
  Payload ID: 20291
  Gene Name: zinc finger, C3HC-type containing 1
  ENST ID: ENST00000483827
  CDS Start-End: 9-158
ggaccaagatggcggcgccctgtgagggacaagcgtttgccgtaggggttgaaaagaattggggtgcagtagttcgctccccagaagggaccccccagaaaatccggcagctgatagatgaggggattgccccggaagagggaggcgtggacgcataagcaacgatgtgctgagctgaagaaagccttgtgtactgcccatgagaagttctgtttctggccagacagcccatccccaggtacctggaactcaatgtgtataaaactgaactcttcatcttatacctaaaactttctccatcttggcaaatggcactgacgtcccatccagttgtcctagccagaaacctgaaagtcactttagatgctcttctctatggtcacccactttgacctatccattctacctcctacatggatcttagatataacctttcaattatatgatcccttggtttggttctttaacattcaaaggacatttgtgtggataaaagaacactcagttatttcactttatgcttaaatttattaagcaaaactaataattttgaagaccgatttgggatgttgcccctggatgagcctgctattcttgttagtgaattcctagatcgttttcaaagcctttgtcacttggacctccagcttccttccctaaggccggaggacttgaaaactatgtgcttgacagaagacaagatcagtcttctcctacacttgcttgaagatgaacttgatcaccgaactgatgagagaaa

SEQ ID NO: 204294 - DNA, 1741 bp, Homo sapiens
  Payload ID: 20291
  Gene Name: zinc finger, C3HC-type containing 1
  ENST ID: ENST00000481503
  CDS Start-End: 24-1403
aagcaactcggcagcggaccaagatggcggcgccctgtgagggacaagcgtttgccgtaggggttgaaaagaattggggtgcagtagttcgctccccagaagggaccccccagaaaatccggcagctgatagatgaggggattgccccggaagagggaggcgtggacgcgaaggacacgtctgccacatcccagtcagttaatggatcaccccaagcggaacaaccttcattggaatctacaagcaaagaagccttctttagcagagtggaaacattttcttctttgaaatgggcaggtaagccctttgagctgtctccactcgtctgtgcaaaatatggctgggtcacagtggaatgtgatatgctcaagtgctctagctgtcaagcttttctctgtgccagtttacaaccagcttttgactttgacagatataagcaacgatgtgctgagctgaagaaagccttgtgtactgcccatgagaagttctgtttctggccagacagcccatccccagaccgatttgggatgttgcccctggatgagcctgctattcttgttagtgaattcctagatcgttttcaaagcctttgtcacttggacctccagcttccttccctaaggccggaggacttgaaaactatgtgcttgacagaagacaagatcagtcttctcctacacttgcttgaagatgaacttgatcaccgaactgatgagagaaaaactacaatcaaattaggctcagacatccaagtccacgtcactgcctgtattctctctgtgtgtggctgggcgtgtagctccccaatcccaggccttgaggggcgaccagagcgcttacctctggtgcctgaatctcctcggaggatgatgacccggagccaggatgccactttctccccaggctcagagcaggctgaaaagagccctggtcccattgtctctcgaactcggagctgggactcttccagtcctgttgaccgtcctgagccagaggctgctagccccaccaccagaactcgcccagtgacccgaagcatgggaacaggagacacccctggcctggaggtaccatctagccctctgcggaaagccaagcgagctcgcctctgctcctccagcagttcggacacatcttcccgaagcttctttgatcccacctctcagcatagagactggtgcccttgggtgaatatcacacttggcaaagaaagcagggagaatggtggaactgaaccagatgccagcgccccagcagagccaggctggaaagcagtgctgaccatcctcttggcgcacaaacagtctagccagccagctgaaacggactccatgagtctctctgagaaatcaaggaaagtattccgaatatttcggcagtgggaatctctgtgctcatgctgaagatactccagcgccttcctggagatagctggaatgagagtgactttttgaaaaattaaggctgagttcctttcggtcagctgacactaagtttttcctgttctgggttaatcataaggagccccctgccatagcaaaggcagtgagtgtcaactatctgcatctggctgagagagacccgtttcctttcagggatgtggacagggtaagggcagcaagcatggttctgttaaaggagtgtgggattaacagactagaaggaagactaaggacctgaccacccatttcagcatcttcaatgtggagcagtgttctgaggactcttctatcctaggact

SEQ ID NO: 204295 - DNA, 1934 bp, Homo sapiens
  Payload ID: 20291
  Gene Name: zinc finger, C3HC-type containing 1
  ENST ID: ENST00000467642
  CDS Start-End: 9-170
ggaccaagatggcggcgccctgtgagggacaagcgtttgccgtaggggttgaaaagaattggggtgcagtagttcgctccccagaagggaccccccagaaaatccggcagctgatagatgaggggattgccccggaagagggaggcgtggacgcaaccacacccgcttgaggctctctatgaatctctgagagtcttagagaaggacacgtctgccacatcccagtcagttaatggatcaccccaagcggaacaaccttcattggaatctacaagcaaagaagccttctttagcagagtggaaacattttcttctttgaaatgggcaggtaagccctttgagctgtctccactcgtctgtgcaaaatatggctgggtcacagtggaatgtgatatgctcaagtgctctagctgtcaagcttttctctgtgccagtttacaaccagcttttgactttgacagatataagcaacgatgtgctgagctgaagaaagccttgtgtactgcccatgagaagttctgtttctggccagacagcccatccccagaccgatttgggatgttgcccctggatgagcctgctattcttgttagtgaattcctagatcgttttcaaagcctttgtcacttggacctccagcttccttccctaaggccggaggacttgaaaactatgtgcttgacagaagacaagatcagtcttctcctacacttgcttgaagatgaacttgatcaccgaactgatgagagaaaaactacaatcaaattaggctcagacatccaagtccacgtcactgcctgtattctctctgtgtgtggctgggcgtgtagttcctctttggaatccatgcagctctccctgataacatgttcgcaatgtatgaggaaggtggggctctggggcttccagcagattgaatcgtccatgactgacctggatgcatcctttggcctgaccagctccccaatcccaggccttgaggggcgaccagagcgcttacctctggtgcctgaatctcctcggaggatgatgacccggagccaggatgccactttctccccaggctcagagcaggctgaaaagagccctggtcccattgtctctcgaactcggagctgggactcttccagtcctgttgaccgtcctgagccagaggctgctagccccaccaccagaactcgcccagtgacccgaagcatgggaacaggagacacccctggcctggaggtaccatctagccctctgcggaaagccaagcgagctcgcctctgctcctccagcagttcggacacatcttcccgaagcttctttgatcccacctctcagcatagagactggtgcccttgggtgaatatcacacttggcaaagaaagcagggagaatggtggaactgaaccagatgccagcgccccagcagagccaggctggaaagcagtgctgaccatcctcttggcgcacaaacagtctagccagccagctgaaacggactccatgagtctctctgagaaatcaaggaaagtattccgaatatttcggcagtgggaatctctgtgctcatgctgaagatactccagcgccttcctggagatagctggaatgagagtgactttttgaaaaattaaggctgagttcctttcggtcagctgacactaagtttttcctgttctgggttaatcataaggagccccctgccatagcaaaggcagtgagtgtcaactatctgcatctggctgagagagacccgtttcctttcagggatgtggacagggtaagggcagcaagcatggttctgttaaaggagtgtgggattaacagactagaaggaagactaaggacctgaccacccatttcagcatcttcaatgtggagcagtgttctgaggactcttctatcctaggactatgacagtgtgtattaataaaatatttgctaag

SEQ ID NO: 204296 - DNA, 567 bp, Homo sapiens
  Payload ID: 20291
  Gene Name: zinc finger, C3HC-type containing 1
  ENST ID: ENST00000470651
  CDS Start-End: 12-164
agcggaccaagatggcggcgccctgtgagggacaagcgtttgccgtaggggttgaaaagaattggggtgcagtagttcgctccccagaagggaccccccagaaaatccggcagctgatagatgaggggattgccccggaagagggaggcgtggacgcaccatagaggttgtgaagctgaggatactctactccaacatggccaacatggtactgatgggtagctctgtgaaaggagcagagactgaaggcggaagaaatgtggtaccacaccacgtcttctgcttttcactactttattccctgtgtgcaaggacagaaagacttacatgtcttcattcttcctttgctgatgttggaatgtctttcaaattccttctttgaaatgggcaggtaagccctttgagctgtctccactcgtctgtgcaaaatatggctgggtcacagtggaatgtgatatgctcaagtgctctagctgtcaagcttttctctgtgccagtttacaaccagcttttgactttgacagatataagcaacgatgtgctgagctgaagaaagccttgtgtact

SEQ ID NO: 204297 - DNA, 2363 bp, Homo sapiens
  Payload ID: 20292
  Gene Name: zinc finger, C4H2 domain containing
  Uniprot ID: Q9NQZ6
  ENST ID: ENST00000337990
  CDS Start-End: 357-962
gctgtcggagctcagaccagcaggcctacgacctagaaagtgctcaaaaccccacttcctaaggcctagaaggagcgacgtgaagatataaggtctcactatgttgcccatgctggtttcaaactcctgggctcaagtgatcctcctgcctctgtcttccaaattgctgagattactggcatgagccattgcacctggccttcttttttgagatggcctcaggttggctctgcctggagagggggaagcttgtaaagatggcttagaaaaaaagtcctggctccatttctattttctcccttcttttgctggcctgtttcctgctttttgcaaattgcaggaacaagaccctgcagatggagaagatcaaggctcgtttgaaggctgagtttgaggcacttgagtcagaggaaaggcacctgaaggaatacaagcaggagatggaccttctgctacaggagaagatggcccatgtggaggaactccgactgatccacgctgacatcaatgtgatggaaaacactatcaaacaatctgagaatgacctaaacaagctgctagagtctacaaggaggctgcatgatgagtataagccactgaaagaacatgtggatgccctgcgcatgactctgggcctgcagaggctccctgacttgtgtgaagaagaggagaagctttccttggattactttgagaagcagaaagcagaatggcagacagaacctcaggagccccccatccctgagtccctggccgctgcagccgctgccgcccaacagctccaagtggctaggaagcaggatactcggcagacggccaccttcaggcagcagcccccacctatgaaggcctgcttgtcatgtcaccagcaaattcaccggaatgcacctatatgccctctttgcaaggccaagagtcggtcccggaaccccaaaaagccgaaacggaagcaggatgaataaagaaagggagagcacatgaagctttgctaattataacccctcaccttgaccagagtcattgatgtcctgatgtgaaacaacccttgcccaaccccacgaagtctcctatttaatgtgatggaagcacaacccctctctcactttgctcctatttctttctgctcttgggatttctggtttaggaagagatgtggttcaggtgctaaacagtgtgtctgatgatcccttctctcccactcacatttcaacccctgcccttgtttggagctaagggaagggcaaaaggctcagatatgattctctatctcttgtgcctgaggcctggagcctaaggagctgtagggtctgaggggcaggggaggcccatatcttgtttcaggtaaaggacccagtatttcccctccttgtacttttgccttaggttctcaagggacaatagtcttcatgttggattctccaacaggctgggtgcatgtatccccctactcctaccctcatctcatccttaaggcccagaggtagcttggacaagccctccttttcataatcatttgggaggcatggctgtaattctttagctttctccacttctgtctcccacatatactaaaattcttaggtactaggctgtgtgtcttgggatcttaagatcaatgaacctttccccaatatctagtctttgcaaattctagtagaagatttccacagtgaaatcagtgagccagaccaactctacatctcctgcctaacctactgcctaagtcattagggctgagggctcggctgtaggggcttccttaggctgagagtgcccccaggctgacatctgtgttggcttttgttcagaaccattactctggcacatgctcaatggtatattgcagggaggagaggagtagatttagatttgagtaaatgccaatcactttacacatgaaggtgggtgggactttccttccattcatcccttgctctcttggatctgaactcttctggagcctcagctcaggatagctgctggccactcctgtcctgtggattgtgcaggtggcctttcctcccaaaagaaaaggcatcaggctccccaagccccacagctctcctttccaccaaagccaggtttcctggtaaggtcactcgaagataagggatggggatgggggctgactgacaaaaaattttagccccaggtctcagtacctggctggggagggggatatttttccttccttaagtagttttacattgccacagtgtgtatgtgttcactatataaaatgttcctctgctctttgaaagtaagagtgttgtgtctgtacaaatccttttaacatgcattcattggagtaaattctgagtatctactgtgtattggataatacaaaagatgtaatgtcattt

SEQ ID NO: 204298 - DNA, 2184 bp, Homo sapiens
  Payload ID: 20292
  Gene Name: zinc finger, C4H2 domain containing
  Uniprot ID: Q9NQZ6
  ENST ID: ENST00000374839
  CDS Start-End: 108-782
caggctcatagccccaagcccggaggaggtggctacattgtgtctattgtatcccttggctggtgtatttgtacatctctcgggacgtgaaattgacagtgaaaagtatggcagatgagcaagaaatcatgtgcaaattggaaagcattaaagagatcaggaacaagaccctgcagatggagaagatcaaggctcgtttgaaggctgagtttgaggcacttgagtcagaggaaaggcacctgaaggaatacaagcaggagatggaccttctgctacaggagaagatggcccatgtggaggaactccgactgatccacgctgacatcaatgtgatggaaaacactatcaaacaatctgagaatgacctaaacaagctgctagagtctacaaggaggctgcatgatgagtataagccactgaaagaacatgtggatgccctgcgcatgactctgggcctgcagaggctccctgacttgtgtgaagaagaggagaagctttccttggattactttgagaagcagaaagcagaatggcagacagaacctcaggagccccccatccctgagtccctggccgctgcagccgctgccgcccaacagctccaagtggctaggaagcaggatactcggcagacggccaccttcaggcagcagcccccacctatgaaggcctgcttgtcatgtcaccagcaaattcaccggaatgcacctatatgccctctttgcaaggccaagagtcggtcccggaaccccaaaaagccgaaacggaagcaggatgaataaagaaagggagagcacatgaagctttgctaattataacccctcaccttgaccagagtcattgatgtcctgatgtgaaacaacccttgcccaaccccacgaagtctcctatttaatgtgatggaagcacaacccctctctcactttgctcctatttctttctgctcttgggatttctggtttaggaagagatgtggttcaggtgctaaacagtgtgtctgatgatcccttctctcccactcacatttcaacccctgcccttgtttggagctaagggaagggcaaaaggctcagatatgattctctatctcttgtgcctgaggcctggagcctaaggagctgtagggtctgaggggcaggggaggcccatatcttgtttcaggtaaaggacccagtatttcccctccttgtacttttgccttaggttctcaagggacaatagtcttcatgttggattctccaacaggctgggtgcatgtatccccctactcctaccctcatctcatccttaaggcccagaggtagcttggacaagccctccttttcataatcatttgggaggcatggctgtaattctttagctttctccacttctgtctcccacatatactaaaattcttaggtactaggctgtgtgtcttgggatcttaagatcaatgaacctttccccaatatctagtctttgcaaattctagtagaagatttccacagtgaaatcagtgagccagaccaactctacatctcctgcctaacctactgcctaagtcattagggctgagggctcggctgtaggggcttccttaggctgagagtgcccccaggctgacatctgtgttggcttttgttcagaaccattactctggcacatgctcaatggtatattgcagggaggagaggagtagatttagatttgagtaaatgccaatcactttacacatgaaggtgggtgggactttccttccattcatcccttgctctcttggatctgaactcttctggagcctcagctcaggatagctgctggccactcctgtcctgtggattgtgcaggtggcctttcctcccaaaagaaaaggcatcaggctccccaagccccacagctctcctttccaccaaagccaggtttcctggtaaggtcactcgaagataagggatggggatgggggctgactgacaaaaaattttagccccaggtctcagtacctggctggggagggggatatttttccttccttaagtagttttacattgccacagtgtgtatgtgttcactatataaaatgttcctctgctctttgaaagtaagagtgttgtgtctgtacaaatccttttaacatgcattcattggagtaaattctgagtatctactgtgtattggataatacaaaagatgtaatgtcattta

SEQ ID NO: 204299 - DNA, 2649 bp, Homo sapiens
  Payload ID: 20292
  Gene Name: zinc finger, C4H2 domain containing
  Uniprot ID: Q9NQZ6
  ENST ID: ENST00000447788
  CDS Start-End: 157-687
cctgaagctccggactacagctcccaggcctctccaagcccctaccgcacaggctcatagccccaagcccggaggaggtggctacattgtgtctattgtatcccttggctggtgtatttgtacatctctcgggacgtgaaattgacagtgaaaagtatggcagatgagcaagaaatcatgtgcaaattggaaagcattaaagagatcaggaacaagaccctgcagatggagaagatcaaggctcgtttgaaggctgagtttgaggcacttgagtcagaggaaaggcacctgaaggaatacaagcaggagatggaccttctgctacaggagaagatggcccatgtggaggaactccgactgatccacgctgacatcaatgtgatggaaaacactatcaaacaatctgagaatgacctaaacaagctgctagagtctacaaggaggctgcatgatgagtataagccactgaaagaacatgtggatgccctgcgcatgactctgggcctgcagaggctccctgacttgtgtgaagaagaggagaagctttccttggagcctgcttgtcatgtcaccagcaaattcaccggaatgcacctatatgccctctttgcaaggccaagagtcggtcccggaaccccaaaaagccgaaacggaagcaggatgaataaagaaagggagagcacatgaagctttgctaattataacccctcaccttgaccagagtcattgatgtcctgatgtgaaacaacccttgcccaaccccacgaagtctcctatttaatgtgatggaagcacaacccctctctcactttgctcctatttctttctgctcttgggatttctggtttaggaagagatgtggttcaggtgctaaacagtgtgtctgatgatcccttctctcccactcacatttcaacccctgcccttgtttggagctaagggaagggcaaaaggctcagatatgattctctatctcttgtgcctgaggcctggagcctaaggagctgtagggtctgaggggcaggggaggcccatatcttgtttcaggtaaaggacccagtatttcccctccttgtacttttgccttaggttctcaagggacaatagtcttcatgttggattctccaacaggctgggtgcatgtatccccctactcctaccctcatctcatccttaaggcccagaggtagcttggacaagccctccttttcataatcatttgggaggcatggctgtaattctttagctttctccacttctgtctcccacatatactaaaattcttaggtactaggctgtgtgtcttgggatcttaagatcaatgaacctttccccaatatctagtctttgcaaattctagtagaagatttccacagtgaaatcagtgagccagaccaactctacatctcctgcctaacctactgcctaagtcattagggctgagggctcggctgtaggggcttccttaggctgagagtgcccccaggctgacatctgtgttggcttttgttcagaaccattactctggcacatgctcaatggtatattgcagggaggagaggagtagatttagatttgagtaaatgccaatcactttacacatgaaggtgggtgggactttccttccattcatcccttgctctcttggatctgaactcttctggagcctcagctcaggatagctgctggccactcctgtcctgtggattgtgcaggtggcctttcctcccaaaagaaaaggcatcaggctccccaagccccacagctctcctttccaccaaagccaggtttcctggtaaggtcactcgaagataagggatggggatgggggctgactgacaaaaaattttagccccaggtctcagtacctggctggggagggggatatttttccttccttaagtagttttacattgccacagtgtgtatgtgttcactatataaaatgttcctctgctctttgaaagtaagagtgttgtgtctgtacaaatccttttaacatgcattcattggagtaaattctgagtatctactgtgtattggataatacaaaagatgtaatgtcatttacctttctgggtagctcttgtttgctcttattcattccaccttacaaatgagaaagccaggcaccaaggacaataatttacctaattatcacaataatttccatttatttagcacctactctgtgccaggtacctatgcaagttgcttaatataaatgattgtatttgacttccaaaataccttacaagctaagtattcttatcaccattttaaaaaaaaagggatactgaacctccaaaaacttaaaagctttttcagagttaaacagctagtaagaggaaattgcaggatttggagccagctttgtccaactccagagctcatttttttctacttcttctccatgatcatttttaagaaaacctttctccctttcagaatggcttgatgatgagagtggttgaaataactttggaactgaaatcaagaactgggtgtcaaatgactgattcagggatataaaggccaagggctctctaaataatatcctgtacactaatctgtctctgtgcttgtcagggaattcaacagctaaataaaacctctctgtgcctcagtgtcctcatctggaaaatgggg

SEQ ID NO: 204300 - DNA, 1945 bp, Homo sapiens
  Payload ID: 20293
  Gene Name: zinc finger, CCCH-type with G patch domain
  Uniprot ID: Q8N5A5
  ENST ID: ENST00000328969
  CDS Start-End: 128-1723
gaaaagggggcgccgggccgctctagccggtgaggccggcgggctctctgtggctgcggctgggaaaccgcgcggaggaggtgcccggccggggaccagccctggtccagcgcctccctctctcagcatggacgaggagagcctggagtcggccttgcagacctaccgtgcgcagctgcagcaggtggagctggccttgggcgccggcctggattcgtctgagcaggctgacctgcgccagctgcagggggacctgaaggagctcatcgagctcaccgaggccagcctggtgtctgtcaggaagagcagcttgttggccgcgctggacgaagagcgcccgggccgccaggaagatgctgagtaccaggctttccgggaggccatcactgaggcggtggaggcaccagcagcggcccgtgggtccggatcagagaccgttcctaaagcagaggcggggccagaatctgcggcaggtgggcaggaggaggaagagggagaggacgaggaagagctgagtgggacaaaggtgagcgcgccctactacagctcctggggcactctggagtatcacaacgccatggtggtgggaacggaagaggcggaggatggctcggcgggtgtccgtgtgctttacctgtaccccactcacaagtctctgaagccgtgcccgttcttcctggagggaaagtgccgctttaaggagaactgcaggttctcccatgggcaggtggtctctctggatgagctgcgccccttccaggacccagacctgagctccctgcaggccggctctgcgtgtctggccaagcaccaggatggcctctggcacgcagcacgcatcaccgatgtggacaacggctactacacagtcaagtttgactcgctgctgctgagggaggccgtggtggagggggacggcatcctgcccccactgcgcacagaggccacagagtccgactcagacagcgacggtacgggtgactccagctatgccagagtggtggggtcggacgccgtggactctgcacagtcctctgccctctgtccgtctcttgcagtggtggggtcagatgctgtggactctgggacctgcagctctgcctttgctggctgggaggtgcacacgcgaggtataggctccagactcctcaccaagatgggctatgagtttggcaagggtttgggccgacacgcggaaggccgggtggagcccatccatgctgtggtgttgcctcgagggaagtcgctggaccagtgtgtggagaccctgcagaagcagaccagggttggcaaggctggcaccaacaagccccccaggtgccggggaagaggggccaggcctgggggccgcccagctcctcggaatgtgtttgacttcctcaatgaaaagctgcaaggtcaggctcctggggccctagaagccggggcggccccagcggggaggaggagcaaggacatgtaccatgccagcaagagtgccaagcgggccctgagcctgcggctcttccagactgaggagaagatcgagcgaacccagcgggacatcaggagcatccaggaggctctcgcccgcaacgctggccggcatagcgtggcgtcagcccagctgcaggagaagctggcaggagcccagcgccagctggggcagctccgggctcaggaagccggcctgcagcaggagcagaggaaggcagacacccacaagaagatgactgagttctagagaccccacaagcactatggacgaagcgtgggaccccagcacgggctgccctcaggaagaccagtgttgcccgaggaggggccggcctgctggcctggggcgtgcagacactgctgagtggagacagagctgcggggtcccatctggacacttacttgcccacctgccagtgtcttgggcatttccttggcaaggacattaaagtgatttcatcacagtgtc

SEQ ID NO: 204301 - DNA, 1871 bp, Homo sapiens
  Payload ID: 20293
  Gene Name: zinc finger, CCCH-type with G patch domain
  Uniprot ID: Q8N5A5
  ENST ID: ENST00000355969
  CDS Start-End: 113-1648
aagcacttccggaagcggcggcgctcgggaggaagtgccgatcggctgctggggcgaaaagggggcgccgggccgctctagccgccctggtccagcgcctccctctctcagcatggacgaggagagcctggagtcggccttgcagacctaccgtgcgcagctgcagcaggtggagctggccttgggcgccggcctggattcgtctgagcaggctgacctgcgccagctgcagggggacctgaaggagctcatcgagctcaccgaggccagcctggtgtctgtcaggaagagcagcttgttggccgcgctggacgaagagcgcccgggccgccaggaagatgctgagtaccaggctttccgggaggccatcactgaggcggtggaggcaccagcagcggcccgtgggtccggatcagagaccgttcctaaagcagaggcggggccagaatctgcggcaggtgggcaggaggaggaagagggagaggacgaggaagagctgagtgggacaaaggtgagcgcgccctactacagctcctggggcactctggagtatcacaacgccatggtggtgggaacggaagaggcggaggatggctcggcgggtgtccgtgtgctttacctgtaccccactcacaagtctctgaagccgtgcccgttcttcctggagggaaagtgccgctttaaggagaactgcaggttctcccatgggcaggtggtctctctggatgagctgcgccccttccaggacccagacctgagctccctgcaggccggctctgcgtgtctggccaagcaccaggatggcctctggcacgcagcacgcatcaccgatgtggacaacggctactacacagtcaagtttgactcgctgctgctgagggaggccgtggtggagggggacggcatcctgcccccactgcgcacagaggccacagagtccgactcagacagcgacggtacgggtgactccagctatgccagagtggtggggtcagatgctgtggactctgggacctgcagctctgcctttgctggctgggaggtgcacacgcgaggtataggctccagactcctcaccaagatgggctatgagtttggcaagggtttgggccgacacgcggaaggccgggtggagcccatccatgctgtggtgttgcctcgagggaagtcgctggaccagtgtgtggagaccctgcagaagcagaccagggttggcaaggctggcaccaacaagccccccaggtgccggggaagaggggccaggcctgggggccgcccagctcctcggaatgtgtttgacttcctcaatgaaaagctgcaaggtcaggctcctggggccctagaagccggggcggccccagcggggaggaggagcaaggacatgtaccatgccagcaagagtgccaagcgggccctgagcctgcggctcttccagactgaggagaagatcgagcgaacccagcgggacatcaggagcatccaggaggctctcgcccgcaacgctggccggcatagcgtggcgtcagcccagctgcaggagaagctggcaggagcccagcgccagctggggcagctccgggctcaggaagccggcctgcagcaggagcagaggaaggcagacacccacaagaagatgactgagttctagagaccccacaagcactatggacgaagcgtgggaccccagcacgggctgccctcaggaagaccagtgttgcccgaggaggggccggcctgctggcctggggcgtgcagacactgctgagtggagacagagctgcggggtcccatctggacacttacttgcccacctgccagtgtcttgggcatttccttggcaaggacattaaagtgatttcatcacagtgtca

SEQ ID NO: 204302 - DNA, 1896 bp, Homo sapiens
  Payload ID: 20293
  Gene Name: zinc finger, CCCH-type with G patch domain
  Uniprot ID: Q8N5A5
  ENST ID: ENST00000357119
  CDS Start-End: 165-1673
cggcgctcgggaggaagtgccgatcggctgctggggcgaaaagggggcgccgggccgctctagccggtgaggccggcgggctctctgtggctgcggctgggaaaccgcgcggaggaggtgcccggccggggaccagccctggtccagcgcctccctctctcagcatggacgaggagagcctggagtcggccttgcagacctaccgtgcgcagctgcagcaggtggagctggccttgggcgccggcctggattcgtctgagcaggctgacctgcgccagctgcagggggacctgaaggagctcatcgagctcaccgaggccagcctggtgtctgtcaggaagagcagcttgttggccgcgctggacgaagagcgcccgggccgccaggaagatgctgagtaccaggctttccgggaggccatcactgaggcggtggaggcaccagcagcggcccgtgggtccggatcagagaccgttcctaaagcagaggcggggccagaatctgcggcaggtgggcaggaggaggaagagggagaggacgaggaagagctgagtgggacaaaggtgagcgcgccctactacagctcctggggcactctggagtatcacaacgccatggtggtgggaacggaagaggcggaggatggctcggcgggtgtccgtgtgctttacctgtaccccactcacaagtctctgaagccgtgcccgttcttcctggagggaaagtgccgctttaaggagaactgcaggttctcccatgggcaggtggtctctctggatgagctgcgccccttccaggacccagacctgagctccctgcaggccggctctgcgtgtctggccaagcaccaggatggcctctggcacgcagcacgcatcaccgatgtggacaacggctactacacagtcaagtttgactcgctgctgctgagggaggccgtggtggagggggacggcatcctgcccccactgcgcacagaggccacagagtccgactcagacagcgacgtggtggggtcagatgctgtggactctgggacctgcagctctgcctttgctggctgggaggtgcacacgcgaggtataggctccagactcctcaccaagatgggctatgagtttggcaagggtttgggccgacacgcggaaggccgggtggagcccatccatgctgtggtgttgcctcgagggaagtcgctggaccagtgtgtggagaccctgcagaagcagaccagggttggcaaggctggcaccaacaagccccccaggtgccggggaagaggggccaggcctgggggccgcccagctcctcggaatgtgtttgacttcctcaatgaaaagctgcaaggtcaggctcctggggccctagaagccggggcggccccagcggggaggaggagcaaggacatgtaccatgccagcaagagtgccaagcgggccctgagcctgcggctcttccagactgaggagaagatcgagcgaacccagcgggacatcaggagcatccaggaggctctcgcccgcaacgctggccggcatagcgtggcgtcagcccagctgcaggagaagctggcaggagcccagcgccagctggggcagctccgggctcaggaagccggcctgcagcaggagcagaggaaggcagacacccacaagaagatgactgagttctagagaccccacaagcactatggacgaagcgtgggaccccagcacgggctgccctcaggaagaccagtgttgcccgaggaggggccggcctgctggcctggggcgtgcagacactgctgagtggagacagagctgcggggtcccatctggacacttacttgcccacctgccagtgtcttgggcatttccttggcaaggacattaaagtgatttcatcacagtgtca

SEQ ID NO: 204303 - DNA, 1890 bp, Homo sapiens
  Payload ID: 20293
  Gene Name: zinc finger, CCCH-type with G patch domain
  Uniprot ID: Q8N5A5
  ENST ID: ENST00000369967
  CDS Start-End: 132-1667
gggcgaaaagggggcgccgggccgctctagccggtgaggccggcgggctctctgtggctgcggctgggaaaccgcgcggaggaggtgcccggccggggaccagccctggtccagcgcctccctctctcagcatggacgaggagagcctggagtcggccttgcagacctaccgtgcgcagctgcagcaggtggagctggccttgggcgccggcctggattcgtctgagcaggctgacctgcgccagctgcagggggacctgaaggagctcatcgagctcaccgaggccagcctggtgtctgtcaggaagagcagcttgttggccgcgctggacgaagagcgcccgggccgccaggaagatgctgagtaccaggctttccgggaggccatcactgaggcggtggaggcaccagcagcggcccgtgggtccggatcagagaccgttcctaaagcagaggcggggccagaatctgcggcaggtgggcaggaggaggaagagggagaggacgaggaagagctgagtgggacaaaggtgagcgcgccctactacagctcctggggcactctggagtatcacaacgccatggtggtgggaacggaagaggcggaggatggctcggcgggtgtccgtgtgctttacctgtaccccactcacaagtctctgaagccgtgcccgttcttcctggagggaaagtgccgctttaaggagaactgcaggttctcccatgggcaggtggtctctctggatgagctgcgccccttccaggacccagacctgagctccctgcaggccggctctgcgtgtctggccaagcaccaggatggcctctggcacgcagcacgcatcaccgatgtggacaacggctactacacagtcaagtttgactcgctgctgctgagggaggccgtggtggagggggacggcatcctgcccccactgcgcacagaggccacagagtccgactcagacagcgacggtacgggtgactccagctatgccagagtggtggggtcagatgctgtggactctgggacctgcagctctgcctttgctggctgggaggtgcacacgcgaggtataggctccagactcctcaccaagatgggctatgagtttggcaagggtttgggccgacacgcggaaggccgggtggagcccatccatgctgtggtgttgcctcgagggaagtcgctggaccagtgtgtggagaccctgcagaagcagaccagggttggcaaggctggcaccaacaagccccccaggtgccggggaagaggggccaggcctgggggccgcccagctcctcggaatgtgtttgacttcctcaatgaaaagctgcaaggtcaggctcctggggccctagaagccggggcggccccagcggggaggaggagcaaggacatgtaccatgccagcaagagtgccaagcgggccctgagcctgcggctcttccagactgaggagaagatcgagcgaacccagcgggacatcaggagcatccaggaggctctcgcccgcaacgctggccggcatagcgtggcgtcagcccagctgcaggagaagctggcaggagcccagcgccagctggggcagctccgggctcaggaagccggcctgcagcaggagcagaggaaggcagacacccacaagaagatgactgagttctagagaccccacaagcactatggacgaagcgtgggaccccagcacgggctgccctcaggaagaccagtgttgcccgaggaggggccggcctgctggcctggggcgtgcagacactgctgagtggagacagagctgcggggtcccatctggacacttacttgcccacctgccagtgtcttgggcatttccttggcaaggacattaaagtgatttcatcacagtgtca

SEQ ID NO: 204304 - DNA, 1881 bp, Homo sapiens
  Payload ID: 20293
  Gene Name: zinc finger, CCCH-type with G patch domain
  Uniprot ID: Q8N5A5
  ENST ID: ENST00000448100
  CDS Start-End: 124-1659
cgcctgggccacggcaccctcgagcgccagccccgcgccccacccgggagcagcgagccaccggcgcgctccccaggagcccctgcaggcgccggccctggtccagcgcctccctctctcagcatggacgaggagagcctggagtcggccttgcagacctaccgtgcgcagctgcagcaggtggagctggccttgggcgccggcctggattcgtctgagcaggctgacctgcgccagctgcagggggacctgaaggagctcatcgagctcaccgaggccagcctggtgtctgtcaggaagagcagcttgttggccgcgctggacgaagagcgcccgggccgccaggaagatgctgagtaccaggctttccgggaggccatcactgaggcggtggaggcaccagcagcggcccgtgggtccggatcagagaccgttcctaaagcagaggcggggccagaatctgcggcaggtgggcaggaggaggaagagggagaggacgaggaagagctgagtgggacaaaggtgagcgcgccctactacagctcctggggcactctggagtatcacaacgccatggtggtgggaacggaagaggcggaggatggctcggcgggtgtccgtgtgctttacctgtaccccactcacaagtctctgaagccgtgcccgttcttcctggagggaaagtgccgctttaaggagaactgcaggttctcccatgggcaggtggtctctctggatgagctgcgccccttccaggacccagacctgagctccctgcaggccggctctgcgtgtctggccaagcaccaggatggcctctggcacgcagcacgcatcaccgatgtggacaacggctactacacagtcaagtttgactcgctgctgctgagggaggccgtggtggagggggacggcatcctgcccccactgcgcacagaggccacagagtccgactcagacagcgacggtacgggtgactccagctatgccagagtggtggggtcagatgctgtggactctgggacctgcagctctgcctttgctggctgggaggtgcacacgcgaggtataggctccagactcctcaccaagatgggctatgagtttggcaagggtttgggccgacacgcggaaggccgggtggagcccatccatgctgtggtgttgcctcgagggaagtcgctggaccagtgtgtggagaccctgcagaagcagaccagggttggcaaggctggcaccaacaagccccccaggtgccggggaagaggggccaggcctgggggccgcccagctcctcggaatgtgtttgacttcctcaatgaaaagctgcaaggtcaggctcctggggccctagaagccggggcggccccagcggggaggaggagcaaggacatgtaccatgccagcaagagtgccaagcgggccctgagcctgcggctcttccagactgaggagaagatcgagcgaacccagcgggacatcaggagcatccaggaggctctcgcccgcaacgctggccggcatagcgtggcgtcagcccagctgcaggagaagctggcaggagcccagcgccagctggggcagctccgggctcaggaagccggcctgcagcaggagcagaggaaggcagacacccacaagaagatgactgagttctagagaccccacaagcactatggacgaagcgtgggaccccagcacgggctgccctcaggaagaccagtgttgcccgaggaggggccggcctgctggcctggggcgtgcagacactgctgagtggagacagagctgcggggtcccatctggacacttacttgcccacctgccagtgtcttgggcatttccttggcaaggacattaaagtgatttcatcacagtgtc

SEQ ID NO: 204305 - DNA, 427 bp, Homo sapiens
  Payload ID: 20293
  Gene Name: zinc finger, CCCH-type with G patch domain
  ENST ID: ENST00000431125
  CDS Start-End: 137-427
ggaggaagtgccgatcggctgctggggcgaaaagggggcgccgggccgctctagccggtgaggccggcgggctctctgtggctgcggctgggaaaccgcgcggaggagccctggtccagcgcctccctctctcagcatggacgaggagagcctggagtcggccttgcagacctaccgtgcgcagctgcagcaggtggagctggccttgggcgccggcctggattcgtctgagcaggctgacctgcgccagctgcagggggacctgaaggagctcatcgagctcaccgaggccagcctggtgtctgtcaggaagagcagcttgttggccgcgctggacgaagagcgcccgggccgccaggaagatgctgagtaccaggctttccgggaggccatcactgaggcggtggaggcaccagcagcggcccgt

SEQ ID NO: 204306 - DNA, 2178 bp, Homo sapiens
  Payload ID: 20294
  Gene Name: zinc finger, CCHC domain containing 10
  Uniprot ID: Q8TBK6
  ENST ID: ENST00000324170
  CDS Start-End: 68-580
ggttggaagccccgcccttccgaggagtttcccaaaaccctgcgcggccggctttgaccgcgctaagatggcgactcccatgcatcggctaatagcccggagacaagctgaagcaaataagcaacatgtaagatgtcagaaatgcttggaatttggacattggacttatgaatgcacaggaaaaagaaaatacctacataggccctcaaggacagcagaactaaagaaagctttaaaagaaaaagaaaacagattattattgcaacaaagcattggagaaaccaatgtagaaagaaaggccaagaaaaaaaggtctaagagtgtaaccagttccagtagcagtagcagtgacagttctgccagtgattcttcatcagagagtgaagaaacatctacctcttcctcctcagaggacagtgacactgatgaaagctcctctagttcctcatcctcagcctcctccacaacctcttcctcctcctctgattcagactcagattccagctcttccagtagcagtagcaccagcacagatagcagctctgacgatgaaccaccaaagaagaagaaaaagaaatagagttgctccattcatattggactgatggactgaaaacattgatgtgattcttgaaagggaatttagaatatgttaaggccaagtaggttaactggtgaacatttctagaattcaaaagtttctaaatgttttacattgtaagagcatagagaatattaataatggcttatagagagagacttttatttgaagggtgaatcttgttttttttatctttaaaatatatctctagaacttaaagctgaaatctgcaaatctgtttgtgtgatgaaactatcttttctctctgtgaaataaatgccatactttgttatatatgttagtggtatgtatcagacatattttcaggatggtgcgtcaggatatctggcagtggatttctaatgcttttggctgtatgttatgtaagatttaatatgttgttactgtaagcttaggagttttcctactattaataaatgtgctctatttttacatttatgttcagaaagttatctgactttttgtcctaagtggtatgttcaaggagcctattaatatatttatagtttttgaatgctgtaagtttcaaattgctgtgttacgtcattcattttcttctggttccttaagtttttcaagttatccttttctgaggaaaattattctagaggaacctaaaaagggacaaaaaaattgaaacttcttaggagtctaatcttggtgccttctgttaaaagtcagtgtatcagaaaagaaagcagccatgtaagaggctaacttaaatagaagtgctagaaatatctttgtgtattaacatgcaataaaaggtaccattcaaagcagggggaaaggtaggaagaagaggtaatttttactgaaaattagggcaatgttggtcgccttttattaaaagctttttttaagctttcataaagattgctttttgctatttttgaaaatatggtattatagtttgtatggtaactggtcatatatgacagtctactgcatatatatgaatgactaggattaatctggtgtgtttacataggatatacatagttgaaatctagcatgaaaggttaaaaaggagatactgcacaatatttcttaaaagtaaaatgctgttattgtgatgagtctttggtttaacatcacagtattctgtgatgtctttttaactttttggaaagaggtatcatttgtagaaaaaatttgatttgggttaaatataggtttttaaaactataaatgttgtcttttttatatttttatgaaaaagcagtagaaaattacttttgaagaaaacaggctatttaaatattgaaatatatgtatgttgtgagtttaaggagcctgtaattgtcagttttacaaaaccatctgtgttcaatggttgtaaataaattctcaaaacatcatttcaaaggctgcctacagaatattatcacttgacagatagagttaataaattaccaatcaggcacattttataatgtttgtctctgtaaaggtaatattagcagttaaagaacacggatgagaaaagaatgtgttacataggttgcatcacttgcagttaaataaaactcacaatttgtgctcacaagcttaaa

SEQ ID NO: 204307 - DNA, 2160 bp, Homo sapiens
  Payload ID: 20294
  Gene Name: zinc finger, CCHC domain containing 10
  ENST ID: ENST00000355372
  CDS Start-End: 13-573
gaccgcgctaagatggcgactcccatgcatcggctaatagcccggagacaagcattcgacacagagttgcagcctgtcaagaccttttggatcctgattcagccatccatcgttattagtgaagcaaataagcaacatgtaagatgtcagaaatgcttggaatttggacattggacttatgaatgcacaggaaaaagaaaatacctacataggccctcaaggacagcagaactaaagaaagctttaaaagaaaaagaaaacagattattattgcaacaaagcattggagaaaccaatgtagaaagaaaggccaagaaaaaaagttccagtagcagtagcagtgacagttctgccagtgattcttcatcagagagtgaagaaacatctacctcttcctcctcagaggacagtgacactgatgaaagctcctctagttcctcatcctcagcctcctccacaacctcttcctcctcctctgattcagactcagattccagctcttccagtagcagtagcaccagcacagatagcagctctgacgatgaaccaccaaagaagaagaaaaagaaatagagttgctccattcatattggactgatggactgaaaacattgatgtgattcttgaaagggaatttagaatatgttaaggccaagtaggttaactggtgaacatttctagaattcaaaagtttctaaatgttttacattgtaagagcatagagaatattaataatggcttatagagagagacttttatttgaagggtgaatcttgttttttttatctttaaaatatatctctagaacttaaagctgaaatctgcaaatctgtttgtgtgatgaaactatcttttctctctgtgaaataaatgccatactttgttatatatgttagtggtatgtatcagacatattttcaggatggtgcgtcaggatatctggcagtggatttctaatgcttttggctgtatgttatgtaagatttaatatgttgttactgtaagcttaggagttttcctactattaataaatgtgctctatttttacatttatgttcagaaagttatctgactttttgtcctaagtggtatgttcaaggagcctattaatatatttatagtttttgaatgctgtaagtttcaaattgctgtgttacgtcattcattttcttctggttccttaagtttttcaagttatccttttctgaggaaaattattctagaggaacctaaaaagggacaaaaaaattgaaacttcttaggagtctaatcttggtgccttctgttaaaagtcagtgtatcagaaaagaaagcagccatgtaagaggctaacttaaatagaagtgctagaaatatctttgtgtattaacatgcaataaaaggtaccattcaaagcagggggaaaggtaggaagaagaggtaatttttactgaaaattagggcaatgttggtcgccttttattaaaagctttttttaagctttcataaagattgctttttgctatttttgaaaatatggtattatagtttgtatggtaactggtcatatatgacagtctactgcatatatatgaatgactaggattaatctggtgtgtttacataggatatacatagttgaaatctagcatgaaaggttaaaaaggagatactgcacaatatttcttaaaagtaaaatgctgttattgtgatgagtctttggtttaacatcacagtattctgtgatgtctttttaactttttggaaagaggtatcatttgtagaaaaaatttgatttgggttaaatataggtttttaaaactataaatgttgtcttttttatatttttatgaaaaagcagtagaaaattacttttgaagaaaacaggctatttaaatattgaaatatatgtatgttgtgagtttaaggagcctgtaattgtcagttttacaaaaccatctgtgttcaatggttgtaaataaattctcaaaacatcatttcaaaggctgcctacagaatattatcacttgacagatagagttaataaattaccaatcaggcacattttataatgtttgtctctgtaaaggtaatattagcagttaaagaacacggatgagaaaagaatgtgttacataggttgcatcacttgcagttaaataaaactcacaatttgtgctc

SEQ ID NO: 204308 - DNA, 608 bp, Homo sapiens
  Payload ID: 20294
  Gene Name: zinc finger, CCHC domain containing 10
  ENST ID: ENST00000509008
  CDS Start-End: 13-291
gaccgcgctaagatggcgactcccatgcatcggctaatagcccggagacaagctgaagcaaataagcaacatgtaagatgtcagaaatgcttggaatttggacattggacttatgaatgcacaggaaaaagaaaatacctacataggccctcaaggacagcagaactaaagaaagctttaaaagaaaaagaaaacagattattattgcaacaaaggagcttttttccccctcgtgtttatcagcattggagaaaccaatgtagaaagaaaggccaagaaaaaaaggtctaagagtgtaaccagttccagtagcagtagcagtgacagttctgccagtgattcttcatcagagagtgaagaaacatctacctcttcctcctcagaggacagtgacactgatgaaagctcctctagttcctcatcctcagcctcctccacaacctcttcctcctcctctgattcagactcagattccagctcttccagtagcagtagcaccagcacagatagcagctctgacgatgaaccaccaaagaagaagaaaaagaaatagagttgctccattcatattggactgatggactgaaaacattgatgtgattcttgaa

SEQ ID NO: 204309 - DNA, 794 bp, Homo sapiens
  Payload ID: 20294
  Gene Name: zinc finger, CCHC domain containing 10
  ENST ID: ENST00000513541
  CDS Start-End: 13-357
gaccgcgctaagatggcgactcccatgcatcggctaatagcccggagacaagcattcgacacagagttgcagcctgtcaagaccttttggatcctgattcagccatccatcgttattagtgaagcaaataagcaacatgtaagatgtcagaaatgcttggaatttggacattggacttatgaatgcacaggaaaaagaaaatacctacataggccctcaaggacagcagaactaaagaaagctttaaaagaaaaagaaaacagattattattgcaacaaaggagcttttttccccctcgtgtttatcagcattggagaaaccaatgtagaaagaaaggccaagaaaaaaaggtctaagagtgtaaccagttccagtagcagtagcagtgacagttctgccagtgattcttcatcagagagtgaagaaacatctacctcttcctcctcagaggacagtgacactgatgaaagctcctctagttcctcatcctcagcctcctccacaacctcttcctcctcctctgattcagactcagattccagctcttccagtagcagtagcaccagcacagatagcagctctgacgatgaaccaccaaagaagaagaaaaagaaatagagttgctccattcatattggactgatggactgaaaacattgatgtgattcttgaaagggaatttagaatatgttaaggccaagtaggttaactggtgaacatttctagaattcaaaagtttctaaatgttttacattgtaagagcatagagaatattaataatggcttatagaga

SEQ ID NO: 204310 - DNA, 1070 bp, Homo sapiens
  Payload ID: 20294
  Gene Name: zinc finger, CCHC domain containing 10
  Uniprot ID: Q8TBK6
  ENST ID: ENST00000509437
  CDS Start-End: 9-587
gcgctaagatggcgactcccatgcatcggctaatagcccggagacaagcattcgacacagagttgcagcctgtcaagaccttttggatcctgattcagccatccatcgttattagtgaagcaaataagcaacatgtaagatgtcagaaatgcttggaatttggacattggacttatgaatgcacaggaaaaagaaaatacctacataggccctcaaggacagcagaactaaagaaagctttaaaagaaaaagaaaacagattattattgcaacaaagcattggagaaaccaatgtagaaagaaaggccaagaaaaaaaggtctaagagtgtaaccagttccagtagcagtagcagtgacagttctgccagtgattcttcatcagagagtgaagaaacatctacctcttcctcctcagaggacagtgacactgatgaaagctcctctagttcctcatcctcagcctcctccacaacctcttcctcctcctctgattcagactcagattccagctcttccagtagcagtagcaccagcacagatagcagctctgacgatgaaccaccaaagaagaagaaaaagaaatagagttgctccattcatattggactgatggactgaaaacattgatgtgattcttgaaagggaatttagaatatgttaaggccaagtaggttaactggtgaacatttctagaattcaaaagtttctaaatgttttacattgtaagagcatagagaatattaataatggcttatagagagagacttttatttgaagggtgaatcttgttttttttatctttaaaatatatctctagaacttaaagctgaaatctgcaaatctgtttgtgtgatgaaactatcttttctctctgtgaaataaatgccatactttgttatatatgttagtggtatgtatcagacatattttcaggatggtgcgtcaggatatctggcagtggatttctaatgcttttggctgtatgttatgtaagatttaatatgttgttactgtaagcttaggagttttcctactattaataaatgtgctctatttttacatttatgt

SEQ ID NO: 204311 - DNA, 325 bp, Homo sapiens
  Payload ID: 20294
  Gene Name: zinc finger, CCHC domain containing 10
  ENST ID: ENST00000504170
  CDS Start-End: 53-271
ccttccgaggagtttcccaaaaccctgcgcggccggctttgaccgcgctaagatggcgactcccatgcatcggctaatagcccggagacaagcattcgacacagagttgcagcctgtcaagaccttttggatcctgattcagccatccatcgttattagagacagtgttgcccaggctggtctcaaactcctgagctcgggtgatcctgccttggcctctcaaagtgccaggattataggcgtgagccactgcgtccagcctcatacctgagctttagatgatatttgtgaatgtcgtatttataacaataaaaaacaaactcca

SEQ ID NO: 204312 - DNA, 876 bp, Homo sapiens
  Payload ID: 20294
  Gene Name: zinc finger, CCHC domain containing 10
  ENST ID: ENST00000513848
  CDS Start-End: 35-505
aaaaccctgcgcggccggctttgaccgcgctaagatggcgactcccatgcatcggctaatagcccggagacaagctgaagcaaataagcaacatgtaagatgtcagaaatgcttggaatttggacattggacttatgaatgcacaggaaaaagaaaatacctacataggccctcaaggacagcagaactaaagaaagctttaaaagaaaaagaaaacagattattattgcaacaaaggtctaagagtgtaaccagttccagtagcagtagcagtgacagttctgccagtgattcttcatcagagagtgaagaaacatctacctcttcctcctcagaggacagtgacactgatgaaagctcctctagttcctcatcctcagcctcctccacaacctcttcctcctcctctgattcagactcagattccagctcttccagtagcagtagcaccagcacagatagcagctctgacgatgaaccaccaaagaagaagaaaaagaaatagagttgctccattcatattggactgatggactgaaaacattgatgtgattcttgaaagggaatttagaatatgttaaggccaagtaggttaactggtgaacatttctagaattcaaaagtttctaaatgttttacattgtaagagcatagagaatattaataatggcttatagagagagacttttatttgaagggtgaatcttgttttttttatctttaaaatatatctctagaacttaaagctgaaatctgcaaatctgtttgtgtgatgaaactatcttttctctctgtgaaataaatgccatactttgttatatatgttagtggtatgtatcagacatattttcaggatggtgcgtcaggatatctggc

SEQ ID NO: 204313 - DNA, 5743 bp, Homo sapiens
  Payload ID: 20295
  Gene Name: zinc finger, CCHC domain containing 11
  ENST ID: ENST00000257177
  CDS Start-End: 146-5083
gccactgagatgaggaggcgtcgcgcgcgcctgtagctcgcgggcctcgcagtttgcttgcctaaactggacttgaagcaatttaaactactggagatctgccattttataatatcacaattggaaagaaacagattttcaaataatggaagagtctaaaaccttaaaaagtgaaaatcatgaaccaaagaagaatgttatttgtgaagaaagcaaagcagttcaagttataggtaatcaaacattgaaagctagaaatgataaatccgtaaaagaaattgagaacagctctccaaataggaatagtagtaaaaaaaataagcaaaatgatatttgtatagaaaaaacagaagttaaatcatgtaaagtaaatgctgccaaccttccaggtcctaaagatttggggttagtccttcgagatcaaagtcattgcaaagcaaaaaaatttcctaattcaccggtgaaagccgaaaaggcaaccatttcacaggcaaaatcagaaaaggcaaccagtttacaggcaaaagcagaaaaatcaccaaagtcacctaattcagtgaaagcagaaaaagcatccagttatcagatgaagtcagaaaaagtaccaagttcaccagcagaagcagaaaagggacccagtttactgttgaaagacatgagacagaagacagaattacaacagattggaaaaaaaattccaagctcctttacttctgtggacaaagtgaatattgaagctgtagggggagaaaaatgtgctctgcaaaactcaccacgatctcagaagcaacagacatgtacagataatactggtgattctgatgatagtgcttcaggaattgaagacgtatcggacgatttaagtaaaatgaagaatgatgaatctaataaagaaaattcttcagagatggactacttagaaaatgccactgtgatagatgaatctgcattgacacctgagcagaggctggggttgaaacaagcagaagaacgcttagaaagagatcacatctttcgacttgaaaaacgatcaccagaatataccaattgtcggtatctatgcaaactttgcttaattcacattgaaaatatccagggggctcataaacatataaaggagaaacgacataagaaaaatattttggaaaaacaagaagaaagtgagcttcgttctctgccacctccttcccctgcccacttggctgctttaagtgttgcagtcattgaattagcaaaagaacatggaataacagatgatgacctcagagtccgtcaggaaattgtggaggaaatgtcaaaggttataacgacatttttaccagaatgttcacttaggttgtatggctcatctctgactagatttgctctgaaaagtagtgatgttaatatagatataaaatttcctcccaagatgaatcatccagatcttctgataaaagtacttgggattttaaagaaaaatgtattatatgtagatgtggaatctgattttcacgctaaagttcctgttgtggtgtgcagagatcgaaaaagtggtttactttgtagagtgagtgcaggaaacgatatggcatgtctcactactgatttacttactgcccttggcaaaatagaacctgtctttattcccttggtgttagcctttcgctactgggctaagttgtgctatattgactcccaaactgatggtggaatcccttcttactgttttgctttaatggtgatgttttttctacaacagagaaaaccccctcttcttccttgcttacttggaagttggattgaaggctttgacccaaaaagaatggatgactttcagctgaagggcatagtagaagagaagtttgtgaagtgggaatgtaattcaagtagtgcaactgagaaaaactcaattgctgaggaaaacaaagctaaggcagaccaaccaaaagatgataccaagaagacagaaacagacaaccaaagtaatgccatgaaggaaaaacatggcaaatctcctttagcattggaaacaccaaatcgggtatccttgggacagttatggttagagctgcttaaattctacacactggattttgctttggaggaatatgtcatatgtgtacggatacaagatattttaacaagagaaaataaaaactggcctaaaaggcgaatagccattgaagatccattttcagtcaagaggaatgttgcacggagcttaaacagccagctggtttacgaatatgttgtggagagatttagggcagcttatcggtattttgcctgtcctcagacgaagggtggaaataagtctacagtggatttcaagaaaagagagaaggggaaaataagcaataagaaaccagtcaagtcgaacaatatggcaaccaatggttgtattctgcttggggaaaccacagaaaaaataaatgcagaaagagagcaacctgttcaatgtgatgaaatggactgtacatcacagagatgtattattgacaacaacaatttgttggtaaatgaactagattttgctgaccacggacaggactcttcatctctttctaccagcaaaagcagtgaaatagagccaaaattagataagaaacaagatgatttagcgccttcagaaacttgtttaaaaaaagagctcagccaatgtaattgcattgatttgtctaagtcgcctgacccagataaatctactggaacagactgcaggtcaaatttagaaacagagagttcacatcagagtgtgtgcaccgacacatctgctacctcttgcaactgcaaagctacagaagatgcttctgaccttaatgatgatgataacctccccacccaggaattatattatgtgtttgataagtttattttaacctctggcaagccaccaacgatagtatgcagcatctgcaaaaaggatggccattcaaagaatgattgcccagaggattttaggaaaattgatttaaaacctctaccaccaatgacaaaccgatttcgggaaatacttgatttagtatgtaaaagatgttttgatgagttatcaccaccttgttctgaacaacacaacagggagcaaattttaattggcttggaaaagtttattcaaaaagaatatgatgaaaaggcaaggttgtgcttatttggctcttctaagaatggatttggatttcgtgatagtgatctggatatttgtatgaccctggaaggccatgaaaatgcagagaaattaaattgtaaggaaataattgaaaatttggcaaaaattcttaagagacatccaggtttaagaaacattttgcctataactactgccaaagtgcctatagtaaaatttgaacacaggcgaagtgggttagaaggcgatatcagtttatataatacgttggctcaacataacacaagaatgctagctacttatgcagctattgatcctagagtgcagtatttgggatatactatgaaagtgtttgctaagcgatgtgacattggggatgcttccaggggaagtttatcttcatatgcatatatccttatggtgctgtactttctgcagcagagaaagccacctgttatcccagttctacaagagatctttgatggaaaacagattccacagagaatggttgatggatggaatgctttcttctttgataaaacagaagaactgaaaaagcgtttaccttcacttggaaagaacacagaatcattaggggagctttggctgggactgcttcgtttctatactgaagagtttgatttcaaggaatatgtaattagcattcggcagaaaaagctgttgacaacttttgagaagcagtggacttccaagtgcattgcaattgaagacccttttgacttgaatcataaccttggtgctggagtttccagaaaaatgaccaatttcatcatgaaagcatttatcaatggaaggaaactttttggtacccctttttatccactcattggcagagaagctgagtacttctttgattccagagtattaacagatggagaactggctcccaatgatagatgttgccgtgtgtgtggaaaaataggccactacatgaaagactgccctaaaaggaaaagcagtttactgtttagactaaagaagaaagacagtgaagaagagaaggaagggaatgaagaagagaaagattcccgagatgttcttgacccccgagacctccacgatactcgagactttagagacccgagagacctcagatgttttatatgtggagatgctggacatgtacgaagggagtgcccagaggtcaagctggcccgtcagaggaatagcagtgtggcagcagcccagctggtccgcaaccttgtaaatgctcaacaggtggctggttcagctcagcaacagggtgatcagtccataaggactagacagtcatcagaatgttctgaatcaccatcttattctcctcagcctcagccatttccacagaactcttcccagtcagctgctattactcagccttcatctcagccaggatcccaacctaagcttggcccacctcagcagggagcccaacctccccatcaggtccagatgccactgtataactttccccagtcaccaccagctcagtattctcccatgcacaatatgggattgttgccaatgcaccctctccagatccctgccccgtcctggcccatccatggcccagtgatccactctgcaccaggcagtgcccccagcaatattggcctaaatgatcccagcatcatctttgcacagcctgctgccagacctgtggcaatccctaacacgtctcacgatggacactggccccgtactgtggctccaaattccctggtaaacagtggtgcagtggggaattcagagccaggctttcgaggactgactcctccaattccttgggaacatgcaccgcgtccccatttcccccttgtcccagcttcgtggccttatggtttgcatcaaaacttcatgcatcagggaaatgcccgattccagcccaacaaacctttctatactcaagacagatgtgccacccgtcggtgtagagagcgttgtccccacccaccaagaggaaacgtgtcggagtaatgcgagtccattttctttcagctggtctaccgatgcacagcaaccagccaatcctgctgtctcaagggtatccgtacctcaatgtcagttacattcagcagaaaaagtgacatttaatggaaagcaaaacaaatcaggtcctgatttaaaattttaacacgtttagatagcttatttaaattctaagactgtttttacagactgtattatttgtatataaatatgaactatagtttttactagtatcaccaaattgagtgatacaaatttcatctattttattaccctatttttaagggaattttatgttttgtttaaccttgatgaattgtataaagagagaatttaaaaaattacattctttattttctattagctgtattcatactttggttgcttcagactttatatattgttcttaaaagttaggaaagaatttcatgtgttttaaattgtcacttctattctttacagaaccttgtagtgccaaaaactttttaaaaggtaaaaaaataaaataaaattacaacatgaagattcagattttttttcttttccatacttgtatattgaacattcaaacttgaatggaaagttgattttgtctgtatttgaagtacttctattttaagttaataaatctttttgacaagagttaaa

SEQ ID NO: 204314 - DNA, 2152 bp, Homo sapiens
  Payload ID: 20295
  Gene Name: zinc finger, CCHC domain containing 11
  ENST ID: ENST00000355809
  CDS Start-End: 158-1087
gggagagcaggagccactgagatgaggaggcgtcgcgcgcgcctgtagctcgcgggcctcgcagtttgcttgcctaaactggacttgaagcaatttaaactactggagatctgccattttataatatcacaattggaaagaaacagattttcaaataatggaagagtctaaaaccttaaaaagtgaaaatcatgaaccaaagaagaatgttatttgtgaagaaagcaaagcagttcaagttataggtaatcaaacattgaaagctagaaatgataaatccgtaaaagaaattgagaacagctctccaaataggaatagtagtaaaaaaaataagcaaaatgatatttgtatagaaaaaacagaagttaaatcatgtaaagtaaatgctgccaaccttccaggtcctaaagatttggggttagtccttcgagatcaaagtcattgcaaagcaaaaaaatttcctaattcaccggtgaaagccgaaaaggcaaccatttcacaggcaaaatcagaaaaggcaaccagtttacaggcaaaagcagaaaaatcaccaaagtcacctaattcagtgaaagcagaaaaagcatccagttatcagatgaagtcagaaaaagtaccaagttcaccagcagaagcagaaaagggacccagtttactgttgaaagacatgagacagaagacagaattacaacagattggaaaaaaaattccaagctcctttacttctgtggacaaagtgaatattgaagctgtagggggagaaaaatgtgctctgcaaaactcaccacgatctcagaagcaacagacatgtacagataatactggtgattctgatgatagtgcttcaggaattgaagacgtatcggacgatttaagtaaaatgaagaatgatgaatctaataaagaaaattcttcagagatggactacttagaaaatgccactgtgatagatgaatctgcattgacacctgagcagaggctggggttgaaacaagcagaagaacgcttagaaagagatcacatctttcgacttgaaaaagtatactatgttgttttagttatttggggggaaatgtgtgtttcataactgttttccccaagtacagctttttttatttttcttttattcataagacagaggttgcattcatctttccttacttccctcttctctacctttcttcttctttccctcttttcttccttgcctctctttttcagcagttacttattatctgtgagtctgacttcattcatcccaagagttggcaaactatggtctatcccttgcttttgtttttgaatgggttaaaatacacctagtctccccaccgtttttggtaaacattttattggaatatagccatgcctatttgtttacatgtcgtttatggctactttcatgctacgatgggaaatttgagttgagtagttgtcacagagcttatatggcttgaaaagcataaaatatttagtctttgccaaagcataaaatgtctaccaaaatatttattcgcccctttatagacgaaacttgctgacctctgatttaggcactcatcaaatagacactgagcacttgttttgtgccaggtattctgataggcactggggatgtattggtgaaaatggcagtttcttcccattagaagttaaaagtccattcagattgatggaaataaaatagcattttatttattgaacctgtatttattgaacattaactgcgtaataggaactatcctagccattggtatcttattcctgtgtattaatttcttaatctagaaatacacattcctggcctcaataaaaacactgctaggttttgaaggaaagaatcacaaatcacggccaggcccagtggctcacgcctgtaatcccagcattttgggaagccgaggtgggcaggttgcttgaggtcaggaattcgagaccagcctgaccaacatggtgaaaccccgtctctactaaaaatacaaaaattagcgaggtgtggtagtcggtacctgtagtcccagctacttgggaggctgaggcaggagaattgcttgaacccagggggcagaggttgcggtgagccaagattgtgccactgcacaccagcctgggcgacagagcaagactccatctcaaaaaaaaaaaaaaaaaa

SEQ ID NO: 204315 - DNA, 5858 bp, Homo sapiens
  Payload ID: 20295
  Gene Name: zinc finger, CCHC domain containing 11
  Uniprot ID: Q5TAX3
  ENST ID: ENST00000371544
  CDS Start-End: 264-5198
cacaatgcagttcgcggcgcggcggacatggcggtggagtcctgagctagtcgtgtcccggcctccagcggcggcagcggcgacggcggcggcagcaggaggcggagggagagcaggagccactgagatgaggaggcgtcgcgcgcgcctgtagctcgcgggcctcgcagtttgcttgcctaaactggacttgaagcaatttaaactactggagatctgccattttataatatcacaattggaaagaaacagattttcaaataatggaagagtctaaaaccttaaaaagtgaaaatcatgaaccaaagaagaatgttatttgtgaagaaagcaaagcagttcaagttataggtaatcaaacattgaaagctagaaatgataaatccgtaaaagaaattgagaacagctctccaaataggaatagtagtaaaaaaaataagcaaaatgatatttgtatagaaaaaacagaagttaaatcatgtaaagtaaatgctgccaaccttccaggtcctaaagatttggggttagtccttcgagatcaaagtcattgcaaagcaaaaaaatttcctaattcaccggtgaaagccgaaaaggcaaccatttcacaggcaaaatcagaaaaggcaaccagtttacaggcaaaagcagaaaaatcaccaaagtcacctaattcagtgaaagcagaaaaagcatccagttatcagatgaagtcagaaaaagtaccaagttcaccagcagaagcagaaaagggacccagtttactgttgaaagacatgagacagaagacagaattacaacagattggaaaaaaaattccaagctcctttacttctgtggacaaagtgaatattgaagctgtagggggagaaaaatgtgctctgcaaaactcaccacgatctcagaagcaacagacatgtacagataatactggtgattctgatgatagtgcttcaggaattgaagacgtatcggacgatttaagtaaaatgaagaatgatgaatctaataaagaaaattcttcagagatggactacttagaaaatgccactgtgatagatgaatctgcattgacacctgagcagaggctggggttgaaacaagcagaagaacgcttagaaagagatcacatctttcgacttgaaaaacgatcaccagaatataccaattgtcggtatctatgcaaactttgcttaattcacattgaaaatatccagggggctcataaacatataaaggagaaacgacataagaaaaatattttggaaaaacaagaagaaagtgagcttcgttctctgccacctccttcccctgcccacttggctgctttaagtgttgcagtcattgaattagcaaaagaacatggaataacagatgatgacctcagagtccgtcaggaaattgtggaggaaatgtcaaaggttataacgacatttttaccagaatgttcacttaggttgtatggctcatctctgactagatttgctctgaaaagtagtgatgttaatatagatataaaatttcctcccaagatgaatcatccagatcttctgataaaagtacttgggattttaaagaaaaatgtattatatgtagatgtggaatctgattttcacgctaaagttcctgttgtggtgtgcagagatcgaaaaagtggtttactttgtagagtgagtgcaggaaacgatatggcatgtctcactactgatttacttactgcccttggcaaaatagaacctgtctttattcccttggtgttagcctttcgctactgggctaagttgtgctatattgactcccaaactgatggtggaatcccttcttactgttttgctttaatggtgatgttttttctacaacagagaaaaccccctcttcttccttgcttacttggaagttggattgaaggctttgacccaaaaagaatggatgactttcagctgaagggcatagtagaagagaagtttgtgaagtgggaatgtaattcaagtagtgcaactgagaaaaactcaattgctgaggaaaacaaagctaaggcagaccaaccaaaagatgataccaagaagacagaaacagacaaccaaagtaatgccatgaaggaaaaacatggcaaatctcctttagcattggaaacaccaaatcgggtatccttgggacagttatggttagagctgcttaaattctacacactggattttgctttggaggaatatgtcatatgtgtacggatacaagatattttaacaagagaaaataaaaactggcctaaaaggcgaatagccattgaagatccattttcagtcaagaggaatgttgcacggagcttaaacagccagctggtttacgaatatgttgtggagagatttagggcagcttatcggtattttgcctgtcctcagacgaagggtggaaataagtctacagtggatttcaagaaaagagagaaggggaaaataagcaataagaaaccagtcaagtcgaacaatatggcaaccaatggttgtattctgcttggggaaaccacagaaaaaataaatgcagaaagagagcaacctgttcaatgtgatgaaatggactgtacatcacagagatgtattattgacaacaacaatttgttggtaaatgaactagattttgctgaccacggacaggactcttcatctctttctaccagcaaaagcagtgaaatagagccaaaattagataagaaacaagatgatttagcgccttcagaaacttgtttaaaaaaagagctcagccaatgtaattgcattgatttgtctaagtcgcctgacccagataaatctactggaacagactgcaggtcaaatttagaaacagagagttcacatcagagtgtgtgcaccgacacatctgctacctcttgcaactgcaaagctacagaagatgcttctgaccttaatgatgatgataacctccccacccaggaattatattatgtgtttgataagtttattttaacctctggcaagccaccaacgatagtatgcagcatctgcaaaaaggatggccattcaaagaatgattgcccagaggattttaggaaaattgatttaaaacctctaccaccaatgacaaaccgatttcgggaaatacttgatttagtatgtaaaagatgttttgatgagttatcaccaccttgttctgaacaacacaacagggagcaaattttaattggcttggaaaagtttattcaaaaagaatatgatgaaaaggcaaggttgtgcttatttggctcttctaagaatggatttggatttcgtgatagtgatctggatatttgtatgaccctggaaggccatgaaaatgcagagaaattaaattgtaaggaaataattgaaaatttggcaaaaattcttaagagacatccaggtttaagaaacattttgcctataactactgccaaagtgcctatagtaaaatttgaacacaggcgaagtgggttagaaggcgatatcagtttatataatacgttggctcaacataacacaagaatgctagctacttatgcagctattgatcctagagtgcagtatttgggatatactatgaaagtgtttgctaagcgatgtgacattggggatgcttccaggggaagtttatcttcatatgcatatatccttatggtgctgtactttctgcagcagagaaagccacctgttatcccagttctacaagagatctttgatggaaaacagattccacagagaatggttgatggatggaatgctttcttctttgataaaacagaagaactgaaaaagcgtttaccttcacttggaaagaacacagaatcattaggggagctttggctgggactgcttcgtttctatactgaagagtttgatttcaaggaatatgtaattagcattcggcagaaaaagctgttgacaacttttgagaagcagtggacttccaagtgcattgcaattgaagacccttttgacttgaatcataaccttggtgctggagtttccagaaaaatgaccaatttcatcatgaaagcatttatcaatggaaggaaactttttggtacccctttttatccactcattggcagagaagctgagtacttctttgattccagagtattaacagatggagaactggctcccaatgatagatgttgccgtgtgtgtggaaaaataggccactacatgaaagactgccctaaaaggaaaagtttactgtttagactaaagaagaaagacagtgaagaagagaaggaagggaatgaagaagagaaagattcccgagatgttcttgacccccgagacctccacgatactcgagactttagagacccgagagacctcagatgttttatatgtggagatgctggacatgtacgaagggagtgcccagaggtcaagctggcccgtcagaggaatagcagtgtggcagcagcccagctggtccgcaaccttgtaaatgctcaacaggtggctggttcagctcagcaacagggtgatcagtccataaggactagacagtcatcagaatgttctgaatcaccatcttattctcctcagcctcagccatttccacagaactcttcccagtcagctgctattactcagccttcatctcagccaggatcccaacctaagcttggcccacctcagcagggagcccaacctccccatcaggtccagatgccactgtataactttccccagtcaccaccagctcagtattctcccatgcacaatatgggattgttgccaatgcaccctctccagatccctgccccgtcctggcccatccatggcccagtgatccactctgcaccaggcagtgcccccagcaatattggcctaaatgatcccagcatcatctttgcacagcctgctgccagacctgtggcaatccctaacacgtctcacgatggacactggccccgtactgtggctccaaattccctggtaaacagtggtgcagtggggaattcagagccaggctttcgaggactgactcctccaattccttgggaacatgcaccgcgtccccatttcccccttgtcccagcttcgtggccttatggtttgcatcaaaacttcatgcatcagggaaatgcccgattccagcccaacaaacctttctatactcaagacagatgtgccacccgtcggtgtagagagcgttgtccccacccaccaagaggaaacgtgtcggagtaatgcgagtccattttctttcagctggtctaccgatgcacagcaaccagccaatcctgctgtctcaagggtatccgtacctcaatgtcagttacattcagcagaaaaagtgacatttaatggaaagcaaaacaaatcaggtcctgatttaaaattttaacacgtttagatagcttatttaaattctaagactgtttttacagactgtattatttgtatataaatatgaactatagtttttactagtatcaccaaattgagtgatacaaatttcatctattttattaccctatttttaagggaattttatgttttgtttaaccttgatgaattgtataaagagagaatttaaaaaattacattctttattttctattagctgtattcatactttggttgcttcagactttatatattgttcttaaaagttaggaaagaatttcatgtgttttaaattgtcacttctattctttacagaaccttgtagtgccaaaaactttttaaaaggtaaaaaaataaaataaaattacaacatgaagattcagattttttttcttttccatacttgtatattgaacattcaaacttgaatggaaagttgattttgtctgtatttgaagtacttctattttaagttaataaatctttttgacaagagttaaa

SEQ ID NO: 204316 - DNA, 2047 bp, Homo sapiens
  Payload ID: 20295
  Gene Name: zinc finger, CCHC domain containing 11
  ENST ID: ENST00000473856
  CDS Start-End: 233-1264
cggtggagtcctgagctagtcgtgtcccggcctccagcggcggcagcggcgacggcggcggcagcaggaggcggagggagagcaggagccactgagatgaggaggcgtcgcgcgcgcctgtagctcgcgggcctcgcagtttgcttgcctaaactggacttgaagcaatttaaactactggagatctgccattttataatatcacaattggaaagaaacagattttcaaataatggaagagtctaaaaccttaaaaagtgaaaatcatgaaccaaagaagaatgttatttgtgaagaaagcaaagcagttcaagttataggtaatcaaacattgaaagctagaaatgataaatccgtaaaagaaattgagaacagctctccaaataggaatagtagtaaaaaaaataagcaaaatgatatttgtatagaaaaaacagaagttaaatcatgtaaagtaaatgctgccaaccttccaggtcctaaagatttggggttagtccttcgagatcaaagtcattgcaaagcaaaaaaatttcctaattcaccggtgaaagccgaaaaggcaaccatttcacaggcaaaatcagaaaaggcaaccagtttacaggcaaaagcagaaaaatcaccaaagtcacctaattcagtgaaagcagaaaaagcatccagttatcagatgaagtcagaaaaagtaccaagttcaccagcagaagcagaaaagggacccagtttactgttgaaagacatgagacagaagacagaattacaacagattggaaaaaaaattccaagctcctttacttctgtggacaaagtgaatattgaagctgtagggggagaaaaatgtgctctgcaaaactcaccacgatctcagaagcaacagacatgtacagataatactggtgattctgatgatagtgcttcaggaattgaagacgtatcggacgatttaagtaaaatgaagaatgatgaatctaataaagaaaattcttcagagatggactacttagaaaatgccactgtgatagatgaatctgcattgacacctgagcagaggctggggttgaaacaagcagaagaacgcttagaaagagatcacatctttcgacttgaaaaacgatcaccagaatataccaattgtcggtatctatgcaaactttgcttaattcacattgaaaatatccagggggctcataaacatataaaggagaaacgacataagaaaaatattttgaatgttcacttaggttgtatggctcatctctgactagatttgctctgaaaagtagtgatgttaatatagatataaaatttcctcccaagatgaatcatccagatcttctgataaaagtacttgggattttaaagaaaaatgtattatatgtagatgtggaatctgattttcacgctaaagttcctgttgtggtgtgcagagatcgaaaaagtggtttactttgtagagtgagtgcaggaaacgatatggcatgtctcactactgatttacttactgcccttggcaaaatagaacctgtctttattcccttggtgttagcctttcgctactgggctaagttgtgctatattgactcccaaactgatggtggaatcccttcttactgttttgctttaatggtgatgttttttctacaacagagaaaaccccctcttcttccttgcttacttggaagttggattgaaggctttgacccaaaaagaatggatgactttcagctgaagggcatagtagaagagaagtttgtgaagtgggaatgtaattcaagtagtgcaactgagaaaaactcaattgctgaggaaaacaaagctaaggcagaccaaccaaaagatgataccaagaagacagaaacagacaaccaaagtaatgccatgaaggaaaaacatggcaaatctcctttagcattggaaacaccaaatcgggtatccttgggacagttatggttagagctgcttaaattctacacactggattttgctttggaggaatatgtcatatgtgtacggatacaagatattttaacaagagaaaataaaa

SEQ ID NO: 204317 - DNA, 553 bp, Homo sapiens
  Payload ID: 20295
  Gene Name: zinc finger, CCHC domain containing 11
  ENST ID: ENST00000528457
  CDS Start-End: 1-493
ccagatccctgccccgtcctggcccatccatggcccagtgatccactctgcaccaggcagtgcccccagcaatattggcctaaatgatcccagcatcatctttgcacagcctgctgccagacctgtggcaatccctaacacgtctcacgatggacactggccccgtactgtggctccaaattccctggtaaacagtggtgcagtggggaattcagagccaggctttcgaggactgactcctccaattccttgggaacatgcaccgcgtccccatttcccccttgtcccagcttcgtggccttatggtttgcatcaaaacttcatgcatcagggaaatgcccgattccagcccaacaaacctttctatactcaaggtaagaaagctgcaattgtggaggtagaatgcagcagaagaaagacagctaaaatatggagacctgagttcaagttcccatgctaccatttatggctgtgggaacatcatacatattgatcaactttcaaatatatcatcagtaaaactagaataaaacctatttacctcacaggatta

SEQ ID NO: 204318 - DNA, 3854 bp, Homo sapiens
  Payload ID: 20295
  Gene Name: zinc finger, CCHC domain containing 11
  ENST ID: ENST00000528642
  CDS Start-End: 246-3854
gcggcggacatggcggtggagtcctgagctagtcgtgtcccggcctccagcggcggcagcggcgacggcggcggcagcaggaggcggagggagagcaggagccactgagatgaggaggcgtcgcgcgcgcctgtagctcgcgggcctcgcagtttgcttgcctaaactggacttgaagcaatttaaactactggagatctgccattttataatatcacaattggaaagaaacagattttcaaataatggaagagtctaaaaccttaaaaagtgaaaatcatgaaccaaagaagaatgttatttgtgaagaaagcaaagcagttcaagttataggtaatcaaacattgaaagctagaaatgataaatccgtaaaagaaattgagaacagctctccaaataggaatagtagtaaaaaaaataagcaaaatgatatttgtatagaaaaaacagaagttaaatcatgtaaagtaaatgctgccaaccttccaggtcctaaagatttggggttagtccttcgagatcaaagtcattgcaaagcaaaaaaatttcctaattcaccggtgaaagccgaaaaggcaaccatttcacaggcaaaatcagaaaaggcaaccagtttacaggcaaaagcagaaaaatcaccaaagtcacctaattcagtgaaagcagaaaaagcatccagttatcagatgaagtcagaaaaagtaccaagttcaccagcagaagcagaaaagggacccagtttactgttgaaagacatgagacagaagacagaattacaacagattggaaaaaaaattccaagctcctttacttctgtggacaaagtgaatattgaagctgtagggggagaaaaatgtgctctgcaaaactcaccacgatctcagaagcaacagacatgtacagataatactggtgattctgatgatagtgcttcaggaattgaagacgtatcggacgatttaagtaaaatgaagaatgatgaatctaataaagaaaattcttcagagatggactacttagaaaatgccactgtgatagatgaatctgcattgacacctgagcagaggctggggttgaaacaagcagaagaacgcttagaaagagatcacatctttcgacttgaaaaacgatcaccagaatataccaattgtcggtatctatgcaaactttgcttaattcacattgaaaatatccagggggctcataaacatataaaggagaaacgacataagaaaaatattttggaaaaacaagaagaaagtgagcttcgttctctgccacctccttcccctgcccacttggctgctttaagtgttgcagtcattgaattagcaaaagaacatggaataacagatgatgacctcagagtccgtcaggaaattgtggaggaaatgtcaaaggttataacgacatttttaccagaatgttcacttaggttgtatggctcatctctgactagatttgctctgaaaagtagtgatgttaatatagatataaaatttcctcccaagatgaatcatccagatcttctgataaaagtacttgggattttaaagaaaaatgtattatatgtagatgtggaatctgattttcacgctaaagttcctgttgtggtgtgcagagatcgaaaaagtggtttactttgtagagtgagtgcaggaaacgatatggcatgtctcactactgatttacttactgcccttggcaaaatagaacctgtctttattcccttggtgttagcctttcgctactgggctaagttgtgctatattgactcccaaactgatggtggaatcccttcttactgttttgctttaatggtgatgttttttctacaacagagaaaaccccctcttcttccttgcttacttggaagttggtctcctttagcattggaaacaccaaatcgggtatccttgggacagttatggttagagctgcttaaattctacacactggattttgctttggaggaatatgtcatatgtgtacggatacaagatattttaacaagagaaaataaaaactggcctaaaaggcgaatagccattgaagatccattttcagtcaagaggaatgttgcacggagcttaaacagccagctggtttacgaatatgttgtggagagatttagggcagcttatcggtattttgcctgtcctcagacgaagggtggaaataagtctacagtggatttcaagaaaagagagaaggggaaaataagcaataagaaaccagtcaagtcgaacaatatggcaaccaatggttgtattctgcttggggaaaccacagaaaaaataaatgcagaaagagagcaacctgttcaatgtgatgaaatggactgtacatcacagagatgtattattgacaacaacaatttgttggtaaatgaactagattttgctgaccacggacaggactcttcatctctttctaccagcaaaagcagtgaaatagagccaaaattagataagaaacaagatgatttagcgccttcagaaacttgtttaaaaaaagagctcagccaatgtaattgcattgatttgtctaagtcgcctgacccagataaatctactggaacagactgcaggtcaaatttagaaacagagagttcacatcagagtgtgtgcaccgacacatctgctacctcttgcaactgcaaagctacagaagatgcttctgaccttaatgatgatgataacctccccacccaggaattatattatgtgtttgataagtttattttaacctctggcaagccaccaacgatagtatgcagcatctgcaaaaaggatggccattcaaagaatgattgcccagaggattttaggaaaattgatttaaaacctctaccaccaatgacaaaccgatttcgggaaatacttgatttagtatgtaaaagatgttttgatgagttatcaccaccttgttctgaacaacacaacagggagcaaattttaattggcttggaaaagtttattcaaaaagaatatgatgaaaaggcaaggttgtgcttatttggctcttctaagaatggatttggatttcgtgatagtgatctggatatttgtatgaccctggaaggccatgaaaatgcagagaaattaaattgtaaggaaataattgaaaatttggcaaaaattcttaagagacatccaggtttaagaaacattttgcctataactactgccaaagtgcctatagtaaaatttgaacacaggcgaagtgggttagaaggcgatatcagtttatataatacgttggctcaacataacacaagaatgctagctacttatgcagctattgatcctagagtgcagtatttgggatatactatgaaagtgtttgctaagcgatgtgacattggggatgcttccaggggaagtttatcttcatatgcatatatccttatggtgctgtactttctgcagcagagaaagccacctgttatcccagttctacaagagatctttgatggaaaacagattccacagagaatggttgatggatggaatgctttcttctttgataaaacagaagaactgaaaaagcgtttaccttcacttggaaagaacacagaatcattaggggagctttggctgggactgcttcgtttctatactgaagagtttgatttcaaggaatatgtaattagcattcggcagaaaaagctgttgacaacttttgagaagcagtggacttccaagtgcattgcaattgaagacccttttgacttgaatcataaccttggtgctggagtttccagaaaaatgaccaatttcatcatgaaagcatttatcaatggaaggaaactttttggtacccctttttatccactcattggcagagaagct

SEQ ID NO: 204319 - DNA, 1010 bp, Homo sapiens
  Payload ID: 20295
  Gene Name: zinc finger, CCHC domain containing 11
  ENST ID: ENST00000474453
  CDS Start-End: 1-1010
gattccacagagaatggttgatggatggaatgctttcttctttgataaaacagaagaactgaaaaagcgtttaccttcacttggaaagaacacagaatcattaggggagctttggctgggactgcttcgtttctatactgaagagtttgatttcaaggaatatgtaattagcattcggcagaaaaagctgttgacaacttttgagaagcagtggacttccaagtgcattgcaattgaagacccttttgacttgaatcataaccttggtgctggagtttccagaaaaatgaccaatttcatcatgaaagcatttatcaatggaaggaaactttttggtacccctttttatccactcattggcagagaagctgagtacttctttgattccagagtattaacagatggagaactggctcccaatgatagatgttgccgtgtgtgtggaaaaataggccactacatgaaagactgccctaaaaggaaaagactaaagaagaaagacagtgaagaagagaaggaagggaatgaagaagagaaagattcccgagatgttcttgacccccgagacctccacgatactcgagactttagagacccgagagacctcagatgttttatatgtggagatgctggacatgtacgaagggagtgcccagaggtcaagctggcccgtcagaggaatagcagtgtggcagcagcccagctggtccgcaaccttgtaaatgctcaacaggtggctggttcagctcagcaacagggtgatcagtccataaggactagacagtcatcagaatgttctgaatcaccatcttattctcctcagcctcagccatttccacagaactcttcccagtcagctgctattactcagccttcatctcagccaggatcccaacctaagcttggcccacctcagcagggagcccaacctccccatcaggtccagatgccactgtataactttccccagtcaccaccagctcagtattctcccatgcacaatatgggat

SEQ ID NO: 204320 - DNA, 883 bp, Homo sapiens
  Payload ID: 20295
  Gene Name: zinc finger, CCHC domain containing 11
  ENST ID: ENST00000470626
  CDS Start-End: 623-883
ggcgcggcggacatggcggtggagtcctgagctagtcgtgtcccggcctccagcggcggcagcggcgacggcggcggcagcaggaggcggagggagagcaggagccactgagatgaggaggcgtcgcgcgcgcctgtagctcgcgggcctcgcagacagagtcttgctctgttgcctaggctggagtgcagtggcatgattgcagctcactgtagccttcacctcccaagtgcaagtgatcctcccacttcagcctcctgagactgggactacagagccagctgactatgcaacaagatgactatgcaacaagatgaatgaggagatatctacagcaggcttattgcttggaaatttcagaataccaaagcaaagagatcatcctagaagttttcttagagaaaaaaacagcctgaacgacagagcaagaccatgtctcaagaaagaagaagaagaaaaagattactcaaaatgaaaacctgtcaattttctgagcctgggactctccgggtacattgatctatattagtttgcttgcctaaactggacttgaagcaatttaaactactggagatctgccattttataatatcacaattggaaagaaacagattttcaaataatggaagagtctaaaaccttaaaaagtgaaaatcatgaaccaaagaagaatgttatttgtgaagaaagcaaagcagttcaagttataggtaatcaaacattgaaagctagaaatgataaatccgtaaaagaaattgagaacagctctccaaataggaatagtagtaaaaaaaataagcaaaatgatatttgtatagaaaaaacagaagttaaatcatgtaaagtaaatgctgccaaccttccaggtcctaaagatttgggg

SEQ ID NO: 204321 - DNA, 506 bp, Homo sapiens
  Payload ID: 20295
  Gene Name: zinc finger, CCHC domain containing 11
  ENST ID: ENST00000471623
  CDS Start-End: 1-317
acgatggacactggccccgtactgtggctccaaattccctggtaaacagtggtgcagtggggaattcagagccaggctttcgaggactgactcctccaattccttgggaacatgcaccgcgtccccatttcccccttgtcccagcttcgtggccttatggtttgcatcaaaacttcatgcatcagggaaatgcccgattccagcccaacaaacctttctatactcaagctggtctaccgatgcacagcaaccagccaatcctgctgtctcaagggtatccgtacctcaatgtcagttacattcagcagaaaaagtgacatttaatggaaagcaaaacaaatcaggtcctgatttaaaattttaacacgtttagatagcttatttaaattctaagactgtttttacagactgtattatttgtatataaatatgaactatagtttttactagtatcaccaaattgagtgatacaaatttcatctattttattaccctatttttaaggg

SEQ ID NO: 204322 - DNA, 2910 bp, Homo sapiens
  Payload ID: 20295
  Gene Name: zinc finger, CCHC domain containing 11
  ENST ID: ENST00000484723
  CDS Start-End: 192-2910
gcgcgctcccttccctccgcgtgggtttcgcggcgcggcggacatggcggtggagtcctgagctagtcgtgtcccggcctccagcggcggcagcggcgacggcggcggcagcaggaggcggagggagagcaggagccactgagatgaggaggcgtcgcgcgcgcctgtagctcgcgggcctcgcaggtaaaatgaagaatgatgaatctaataaagaaaattcttcagagatggactacttagaaaatgccactgtgatagatgaatctgcattgacacctgagcagaggctggggttgaaacaagcagaagaacgcttagaaagagatcacatctttcgacttgaaaaacgatcaccagaatataccaattgtcggtatctatgcaaactttgcttaattcacattgaaaatatccagggggctcataaacatataaaggagaaacgacataagaaaaatattttggaaaaacaagaagaaagtgagcttcgttctctgccacctccttcccctgcccacttggctgctttaagtgttgcagtcattgaattagcaaaagaacatggaataacagatgatgacctcagagtccgtcaggaaattgtggaggaaatgtcaaaggttataacgacatttttaccagaatgttcacttaggttgtatggctcatctctgactagatttgctctgaaaagtagtgatgttaatatagatataaaatttcctcccaagatgaatcatccagatcttctgataaaagtacttgggattttaaagaaaaatgtattatatgtagatgtggaatctgattttcacgctaaagttcctgttgtggtgtgcagagatcgaaaaagtggtttactttgtagagtgagtgcaggaaacgatatggcatgtctcactactgatttacttactgcccttggcaaaatagaacctgtctttattcccttggtgttagcctttcgctactgggctaagttgtgctatattgactcccaaactgatggtggaatcccttcttactgttttgctttaatggtgatgttttttctacaacagagaaaaccccctcttcttccttgcttacttggaagttggattgaaggctttgacccaaaaagaatggatgactttcagctgaagggcatagtagaagagaagtttgtgaagtgggaatgtaattcaagtagtgcaactgagaaaaactcaattgctgaggaaaacaaagctaaggcagaccaaccaaaagatgataccaagaagacagaaacagacaaccaaagtaatgccatgaaggaaaaacatggcaaatctcctttagcattggaaacaccaaatcgggtatccttgggacagttatggttagagctgcttaaattctacacactggattttgctttggaggaatatgtcatatgtgtacggatacaagatattttaacaagagaaaataaaaactggcctaaaaggcgaatagccattgaagatccattttcagtcaagaggaatgttgcacggagcttaaacagccagctggtttacgaatatgttgtggagagatttagggcagcttatcggtattttgcctgtcctcagacgaagggtggaaataagtctacagtggatttcaagaaaagagagaaggggaaaataagcaataagaaaccagtcaagtcgaacaatatggcaaccaatggttgtattctgcttggggaaaccacagaaaaaataaatgcagaaagagagcaacctgttcaatgtgatgaaatggactgtacatcacagagatgtattattgacaacaacaatttgttggtaaatgaactagattttgctgaccacggacaggactcttcatctctttctaccagcaaaagcagtgaaatagagccaaaattagataagaaacaagatgatttagcgccttcagaaacttgtttaaaaaaagagctcagccaatgtaattgcattgatttgtctaagtcgcctgacccagataaatctactggaacagactgcaggtcaaatttagaaacagagagttcacatcagagtgtgtgcaccgacacatctgctacctcttgcaactgcaaagctacagaagatgcttctgaccttaatgatgatgataacctccccacccaggaattatattatgtgtttgataagtttattttaacctctggcaagccaccaacgatagtatgcagcatctgcaaaaaggatggccattcaaagaatgattgcccagaggattttaggaaaattgatttaaaacctctaccaccaatgacaaaccgatttcgggaaatacttgatttagtatgtaaaagatgttttgatgagttatcaccaccttgttctgaacaacacaacagggagcaaattttaattggcttggaaaagtttattcaaaaagaatatgatgaaaaggcaaggttgtgcttatttggctcttctaagaatggatttggatttcgtgatagtgatctggatatttgtatgaccctggaaggccatgaaaatgcagagaaattaaattgtaaggaaataattgaaaatttggcaaaaattcttaagagacatccaggtttaagaaacattttgcctataactactgccaaagtgcctatagtaaaatttgaacacaggcgaagtgggttagaaggcgatatcagtttatataatacgttggctcaacataacacaagaatgctagctacttatgcagctattgatcctagagtgcagtatttgggatatactatgaaagtgtttgctaagatctttgatggaaaacagattccacagagaatggttgatggatggaatgctttcttctttgataaaacagaagaactgaaaaagcgtttaccttcacttggaaagaacacagaatcattag

SEQ ID NO: 204323 - DNA, 539 bp, Homo sapiens
  Payload ID: 20295
  Gene Name: zinc finger, CCHC domain containing 11
  ENST ID: ENST00000524582
  CDS Start-End: 309-539
ccctcctcgcgagctaacgagtgtctctcgcgcgctcccttccctccgcgtgggtttcgcggcgcggcggacatggcggtggagtcctgagctagtcgtgtcccggcctccagcggcggcagcggcgacggcggcggcagcaggaggcggagggagagcaggagccactgagatgaggaggcgtcgcgcgcgcctgtagctcgcgggcctcgcagtttgcttgcctaaactggacttgaagcaatttaaactactggagatctgccattttataatatcacaattggaaagaaacagattttcaaataatggaagagtctaaaaccttaaaaagtgaaaatcatgaaccaaagaagaatgttatttgtgaagaaagcaaagcagttcaagttataggtaatcaaacattgaaagctagaaatgataaatccgtaaaagaaattgagaacagctctccaaataggaatagtagtaaaaaaaataagcaaaatgatatttgtatagaaaaaacagaagttaaatcatgtaaagtaaatgct

SEQ ID NO: 204324 - DNA, 1016 bp, Homo sapiens
  Payload ID: 20295
  Gene Name: zinc finger, CCHC domain containing 11
  ENST ID: ENST00000531722
  CDS Start-End: 1-1016
ggatggaatgctttcttctttgataaaacagaagaactgaaaaagcgtttaccttcacttggaaagaacacagaatcattaggggagctttggctgggactgcttcgtttctatactgaagagtttgatttcaaggaatatgtaattagcattcggcagaaaaagctgttgacaacttttgagaagcagtggacttccaagtgcattgcaattgaagacccttttgacttgaatcataaccttggtgctggagtttccagaaaaatgaccaatttcatcatgaaagcatttatcaatggaaggaaactttttggtacccctttttatccactcattggcagagaagctgagtacttctttgattccagagtattaacagatggagaactggctcccaatgatagatgttgccgtgtgtgtggaaaaataggccactacatgaaagactgccctaaaaggaaaagactaaagaagaaagacagtgaagaagagaaggaagggaatgaagaagagaaagattcccgagatgttcttgacccccgagacctccacgatactcgagactttagagacccgagagacctcagatgttttatatgtggagatgctggacatgtacgaagggagtgcccagaggtcaagctggcccgtcagaggaatagcagtgtggcagcagcccagctggtccgcaaccttgtaaatgctcaacaggtggctggttcagctcagcaacagggtgatcagtccataaggactagacagtcatcagaatgttctgaatcaccatcttattctcctcagcctcagccatttccacagaactcttcccagtcagctgctattactcagccttcatctcagccaggatcccaacctaagcttggcccacctcagcagggagcccaacctccccatcagatccctgccccgtcctggcccatccatggcccagtgatccactctgcaccaggcagtgcccccagcaatattggcctaaatgatcccagcatcatctt

SEQ ID NO: 204325 - DNA, 691 bp, Homo sapiens
  Payload ID: 20295
  Gene Name: zinc finger, CCHC domain containing 11
  ENST ID: ENST00000527941
  CDS Start-End: 1-327
gccagacctgtggcaatccctaacacgtctcacgatggacactggccccgtactgtggctccaaattccctggtaaacagtggtgcagtggggaattcagagccaggctttcgaggactgactcctccaattccttgggaacatgcaccgcgtccccatttcccccttgtcccagcttcgtggccttatggtttgcatcaaaacttcatgcatcagggaaatgcccgattccagcccaacaaacctttctatactcaagacagatgtgccacccgtcggtgtagagagcgttgtccccacccaccaagaggaaacgtgtcggagtaatgcgagtccattttctttcagctggtctaccgatgcacagcaaccagccaatcctgctgtctcaaggatggagtcttgctctgtcgcccaggctggaatacagcggcgtgatctcggctcactacaatctccgcctcctggttcaagggattctcctgcctcagcctcctgagtagctgggattacaggtaagaaagctgcaattgtggaggtagaatgcagcagaagaaagacagctaaaatatggagacctgagttcaagttcccatgctaccatttatggctgtgggaacatcatacatattgatcaactttcaaatatatcatcagtaaaactagaataaaacctatttacctcacagga

SEQ ID NO: 204326 - DNA, 827 bp, Homo sapiens
  Payload ID: 20295
  Gene Name: zinc finger, CCHC domain containing 11
  ENST ID: ENST00000494469
  CDS Start-End: 1-455
ctcagcctcagccatttccacagaactcttcccagtcagctgctattactcagccttcatctcagccaggatcccaacctaagcttggcccacctcagcagggagcccaacctccccatcagcctgctgccagacctgtggcaatccctaacacgtctcacgatggacactggccccgtactgtggctccaaattccctggtaaacagtggtgcagtggggaattcagagccaggctttcgaggactgactcctccaattccttgggaacatgcaccgcgtccccatttcccccttgtcccagcttcgtggccttatggtttgcatcaaaacttcatgcatcagggaaatgcccgattccagcccaacaaacctttctatactcaagacagatgtgccacccgtcggtgtagagagcgttgtccccacccaccaagaggaaacgtgtcggagtaatgcgagtccattttctttcagctggtctaccgatgcacagcaaccagccaatcctgctgtctcaagggtatccgtacctcaatgtcagttacattcagcagaaaaagtgacatttaatggaaagcaaaacaaatcaggtcctgatttaaaattttaacacgtttagatagcttatttaaattctaagactgtttttacagactgtattatttgtatataaatatgaactatagtttttactagtatcaccaaattgagtgatacaaatttcatctattttattaccctatttttaagggaattttatgttttgtttaaccttgatgaattgtataaagagagaatttaaaaaattacattctttattttcta

SEQ ID NO: 204327 - DNA, 2231 bp, Homo sapiens
  Payload ID: 20296
  Gene Name: zinc finger, CCHC domain containing 12
  Uniprot ID: Q6PEW1
  ENST ID: ENST00000310164
  CDS Start-End: 508-1716
agaggataaaagccgccgcggctgccttaggaacggcgctgcctcgtctctgctacccctggttgggcggccctgcgaagcagctccttcgggcagccccgggtcgcttagcggccaaggaggcttcagttctttgccgcctgcaaggcggagaccagaaggcggaatccacagctggcgacgcgggagcatctgctgtccaccagcggagcacaggccatcaaagccgcatctgaacttgaattctgtgcagctgattgcagagctggacccggatctgcgaccccctgtggacagaggttgaccgtaccccggagaggagctttctcacggagggcactggttgcagaggctggaagtgaaataaagacgcgctcttgtttcagagttcgtcccctgctgagataggaaggcagagccacctcctctcctctcccacctgcagattaagcttttctaaaaagcctaggcatcttcttatattcagataccctatcgtcgtcagtcatggctagcatcattgcacgtgtcggtaacagccggcggctgaatgcacccttgccgccttgggcccattccatgctgaggtccctggggagaagtctcggtcctataatggccagcatggcagacagaaacatgaagttgttctcggggagggtggtgccagcccaaggggaagaaacctttgaaaactggctgacccaagtcaatggcgtcctgccagattggaatatgtctgaggaggaaaagctcaagcgcttgatgaaaacccttaggggccctgcccgcgaggtcatgcgtgtgcttcaggcgaccaaccctaacctaagtgtggcagatttcttgcgagccatgaaattggtgtttggggagtctgaaagcagtgtgactgcccatggtaaattttttaacaccctacaagctcaaggggagaaagcctccctttatgtgatccgtttagaggtgcagctccagaacgctattcaggcaggcattatagctgagaaagatgcaaaccggactcgcttgcagcagctccttttaggcggtgagctgagtagggacctccgactcagacttaaggattttctcaggatgtatgcaaatgagcaggagcggcttcccaactttctggagttaatcagaatggtaagggaggaagaggattgggatgatgcttttattaaacggaagcgtccaaaaaggtctgagtcaatggtggagagggcagtcagccctgtggcatttcagggctccccaccgatagtgatcggcagtgctgactgcaatgtgatagagatagatgataccctcgacgactccgatgaggatgtgatcctggtggagtctcaggaccctccacttccatcctggggtgcccctcccctcagagacagggccagacctcaggatgaagtgctggtcattgattccccccacaattccagggctcagtttccttccaccagtggtggttctggctataagaataacggtcctggggagatgcgtagagccaggaagcgaaaacacacaatccgctgttcgtattgtggtgaggaaggccactcaaaagaaacctgtgacaacgagagtgacaaggcccaggtttttgagaatttgatcatcactctccaggagctgacccatactgagatggagaggtcaagagtggcccctggcgaatacaatgacttctctgagccactgtaagggaccacccccaggtttcagtgaacccttacctatattcagcatccagtagtgggaaaactggggtgggggtgggggtgggacttctaactgcatgaattaatccacaaagcggctatcttttggggtggagtagaaagggtcttggataccagcacattggagggagatagcctgacctctgtccttgctccttctccctgcagcctacgggtctgttttctgtgtgtgcccatttccttgacagctttattctttgtgaaagtggtataatttattgttaaatatttgaacaataaaaaaggtacaaaaagtgaagtacaaattacccaaatctctccacccttatataatcattgtcaaccctttgatgagtgatatttccctatacctatgtacccagatagatatatgcatagataaaagtgatgaaatataagtgctgttctatctgtattttttcaccaaacaatatatgttgtgagcttctatgtcaataaatatatatatcagca

SEQ ID NO: 204328 - DNA, 842 bp, Homo sapiens
  Payload ID: 20297
  Gene Name: zinc finger, CCHC domain containing 13
  Uniprot ID: Q8WW36
  ENST ID: ENST00000339534
  CDS Start-End: 78-578
aagccgcccaaagcggggttgcgccggggcctccggggccgaggtgggcctgctcattggaagatcgcatcgcagccatgagcagtaaggatttcttcgcgtgtggacactctggccattgggctcggggatgccctagaggaggagctggagggcgaagaggtggaggccatggcagaggttctcaatgtggttccaccaccctatcttacacctgttactgctgtggtgagtccggtcgtaatgctaagaactgtgtccttctcggaaacatctgctacaactgtgggagaagcggccacatcgccaaagactgtaaggatcctaaacgagagagacgccaacactgttatacctgcggcagactaggacatctggctcgtgactgtgatcgtcagaaagagcagaaatgctactcttgcggcaaacttgggcacattcagaaagactgcgcccaggtcaagtgttaccgatgcggcgagattggccacgtggccatcaattgcagcaaggcgaggccaggtcaactgctaccgctgcggcaaatcccgacatctagccaaggaatgtcccagtgaggttaccacttaaatcttcccccccaccccccacccttttgctgattgataattgtattattttctccgaaaacttcactcaccgaaaggtcgatagattgaggctactctcaggcaagtgagctttaattaccatgttaaaggaggaaagagctagaaaaaaaaacctcaaaaaagttaatcattggtagatgccccacaattaacgtgttgcttctgccccacgggcaaatctagttattaaatagtcattctgagcaccaa

SEQ ID NO: 204329 - DNA, 7102 bp, Homo sapiens
  Payload ID: 20298
  Gene Name: zinc finger, CCHC domain containing 14
  Uniprot ID: Q8WYQ9
  ENST ID: ENST00000268616
  CDS Start-End: 219-3068
aggccaacaacccggccgacctgggcagcctcaccaacctgacggacgaggtggtgcgcagcaagctgctggtgtcgctggcgctgctgggctcggagcagcgcgaggcggcgggcgtgctctaccgcacgctcacgcacatcgactccatcatccacaactacgggctgcagcttaacgagggccgcacgggcgatgagttcctgctgctgttcaccatggcctccaaccacccggccttcagcttccaccagaagcaggtgctgcgccaggagctcacgcagatccagagcagcctgaacggcggcgggggccacggcggcaagggcgcgcccgggccgggcggcgcgctgcccacttgcccagcctgccacaagatcactccaagaactgaggcccctgtcagcagtgtcagtaatagtttggagaatgccctgcacacatcagcacattccacggaggagtcgctgcccaagaggcccttaggaaaacacagcaaagtgagtgttgaaaagatagacctgaagggattatcacacacaaaaaatgacagaaatgttgaatgttcctttgaggtcttgtggtctgattcttcaataacatcagtaaccaaatcttcctctgaagtgacggaatttatttcaaagctatgtcagctctatcctgaagagaacttggagaaactcattccttgcttagctggtccggacgcattttatgtggagcgaaaccacgtggatctggactcaggcctgaggtacctggcctcattaccttctcacgtgttgaaaaatgaccatgtcaggaggtttctcagcacttcctctcccccacagcagcttcagagtccaagtcctggcaatccctccctttctaaagtaggtaccgtgatgggcgtgtctggaaggcctgtgtgtggagtggctggtatcccgtcctcgcagagcggagcccagcaccacgggcagcacccggccggctccgccgcccccttgcctcactgctcccatgcgggcagcgcgggctcagccctggcctaccggacccagatggacacatcacctgccatcctcatgccttccagtctgcagacccctcagacccaggagcagaatgggattctagactggcttaggaaactgcgtttgcacaagtattaccccgtctttaagcagctctccatggagaagtttttgagccttactgaagaagatctgaataaatttgagtctcttaccatgggggcaaagaagaagctcaagacccagctggagctggaaaaggagaagtcagagagacggtgcctgaacccctcggccccgccgctggtcaccagcagtggtgtggctcgagtgccccccaccagccacgtcgggcccgtgcagtcggggcggggcagccatgcagcagagctgcgggtggaagtggagcagccccatcaccagctgccccgggaaggcagttcctcggagtactccagctcctcctccagccccatgggggtacaggcccgggaagagagctccgacagcgctgaggagaatgacagacgtgtggagattcacttggagagctctgacaaggagaagccggtgatgctgctgaatcacttcacttccagttccgccagacccacggcccaggttctccctgtgcagaatgaggccagctccaatccatcaggccaccaccccctgcccccgcagatgctgagcgcagcctcacacatcacacccatccgcatgctgaattccgtgcacaagccggaaagagggagcgcggacatgaagctcctctcgtcttctgtgcactcacttttgtctctagaagaaaggaataaaggatctggaccaagaagcagcatgaaagtggacaagagctttggcagcgccatgatggacgtgctgcccgcgtccgcaccccaccagcctgtgcaggtcctctctgggctttcggagagcagctccatgtcacccacagtctcctttggtccccggaccaaagtcgtgcatgcatccacgctggacagggtgctgaagacagcacagcaaccggccctggtcgtggagaccagcacggccgccacggggacgcccagcacagtcctccacgccgcccgtccgcccatcaaactgctgctgtcgtcatctgttcctgctgattctgccatttctgggcaaacttcctgtcctaataatgtgcaaataagtgtgccccctgcaataataaacccccggactgctctgtacacagccaacaccaaagttgccttttctgcaatgagcagtatgccagtgggccccctgcagggtggcttctgtgcaaacagcaacactgcctctcccagcagccacccctccacgtcctttgccaacatggccacgttgcccagctgcccagcccccagctccagcccggcgctgtcctccgtccctgaaagcagtttctatagcagcagtggcggtggcggctccacaggaaacattcctgcctcgaatccgaaccaccaccaccaccaccaccatcagcagcccccggcacccccgcagcccgccccacccccgccaggctgcattgtgtgcacgtcctgtggctgcagcggcagctgcggctcgagtggcctgactgtcagctacgccaactacttccagcacccgttctccggtccgtccgtgttcaccttccccttcttgcccttcagtcccatgtgcagcagcggctacgtcagcgcccagcagtacggcggcggctccaccttccccgtcgtgcacgccccttacagcagcagcgggaccccagaccctgtcctgagtgggcagtccacgtttgccgtgccacccatgcagaacttcatggcagggacagcaggggtgtaccagacccaaggactggtgggcagtagcaatggttccagtcacaaaaagagcgggaacctatcttgttacaactgcggggccactggtcaccgcgcccaggactgcaaacagccgtccatggacttcaaccggccaggtacttttaggttgaaatacgcccctccagcagaaagtctggactccacagattgatatttttctctggcaacagaacgttattaagccatggagacataaggaaaattaaatacaaaactgagaagtctagttgctgttgagcttaatctttttaatccaaaggtgctttacttttcctagactggatagaaaatctagcgtagaagtgcatcaaactcgatttattgccaaaaccctagattggagcttggtgtcagaactcgcctagtgggcatctctgtggctggtgagatcggccacctccacttttggttgcagtgcagagacgccatgtctcccgaagagcattgccatcactggccctcctaggctcacacgtcaattccagggcagctacacgtggtctgaatcgagaaccgagcttggagttctccaagtggagttccacccgccggactcctgacacccctgggctagggaaaatgtcgactttgttttgttctgttcctaaagtgattagcactaatctctgggatttttaaggattgcactacagaagaatgtaccctgatgtaaatctctgcggttctgggagccaaactcctctgagaacagtcagtgcaagagactccaataatccatattgaaagagtcagcaccagcagaggctactcgacttaggacgcaacagaggttttagtatttccttccctcctccaagcacttgtagcagtttcaggtttttaatttttttctgcaaataaatctaaactacgttattaaatagaaatagtttactcgcaacaacttaatttctaagggtccaagtcccagagaatccatagtcgtcaaagctttgagagtatctttcttcccagccagtcagtggctttgagccctatcttccactacaaatgacctctcgaggggggacggcgacagcgcggctctgtgagtggctgtgaggatgctgcacgtcctcagcagagtttgcaagttgctttatctcccacgggctccccaagaacctccaaccccgaggcttatcgctagcggattcacacctgagacagacatttcaacaatgatacagtcctgtcatttatcagcaaaagattgggaattttctcctgtcaacttcttttgtattaggctgtgtattgatagttaattccgttaaaaattacttggaaaacagtgggaagtggtaggactctggaagaggccacacacccgagagctgcgagatctgtgcaagtctggttttggttaggtagtaataaaagtcctcactgtagatctctaaatttcaacccacggaaatgaaagccttttgtctgaaatttacggacttaaatcttcaaggttaaagggaattttctgctcaaataatactcttatcgaaaatgctaaagtcttcaatgttaaaatactgattggtaaaatcttgcagttgggattttgcagttggatatttattttaaaaaaaattataatattcagactattcttaaaatgggacaatcagcctcatgaaaaattgatgtaaatcagaagaataccctagaatgaggccttgtgatgtgagcgttcaatttgaagagcagttcctaacttcatagaaactaaagcagaaagttgttacattttttttatgacaggcttttagtagaattttttagttttattttagttgaattttatttctatgcaatgcagaattaacagacctcttctcctcatggtacacagtattacagtgttgaagtaatggtgatgcttattacaacagctatttaggggaatgttacgttgatctcttaaattgtaaacactacaaaatgtcaaaataatgagaactgacacaactttgccttaaagagtactagactggaccttctcatattacgtttaaggaagacttagagtgttcattgatgtttacgattttaatatttctgaaggccattacagtggcctggatatgtgctgaaagccaaacttttaaattttttggtttttttaagcaaagaaatattttaaataaatcctatttcaacactgaaattgttgaaaaccgtctcataacaaaaggaaaaaacattggaatttttgttttagtggtcagtataggggaatgaaagcgtctgttgttacccacgtaactattttgataagtattagaggttaaccttaaatccagcaaaacattaaaacagaaacttttcaacttggagcctgccattcagcgttgaggtagatgagttccgacactgtcacggctgtgttcccagcagcgaaggcctctgcggagctgccagtcgtcttgaacgtgcatgggcggcgtgtgacatctccagggaggccgtccgaagtcgagaatcgtcagctgtaagtaggagctacacagcgcagagaaaatggaaccacccatccgtgaggcctctttccggagggagccgcacacttggacttgagagtttgccagcagcgagctcggatgcatctctccaaaagccaccaaggtcggcgcgtctgaagagcgttttgcggtcatcagacttcctcatctgaaaacacagaacatactgaccctttcaagtacttagtcattttcctgaaagtgtggtctgtttcagaatgctgtggcaaccaggtaggtgtggcactggccatgtgccacgtctttgccctttgtagtctgtcagatattaaagtttctaaccctgtttttttaatctccaagaatggggaaagtggaatgtagagatggaagcagaacgtgatgtttggatacaacagctatttaatccttttttattttttaagcaaaacactcagttttctaccttattttctaatgttgatttcatggtaatactgacagttggaagtgtttaacataaaaactcattgctaaagagcactgaggaaatgggagctagcgcacttgtaataaaaataaagacaaaatattttcttgaatgcatatatgtgattgggtattttaaaaaccagtatcatctgtcatctccaaaagattacaggagtcagcttgttaatacagtagtgttagtaggttctgtatttttaattcagtacttagaattctaggtcctttattgcccaaagtcagcacagttagtttataccacagactctgtcttggggcacagtagtggggcggggtagtgactttgcctaaacatcacccagctggaacagaggctgagcggggctttaggcacttgccagatgggaactgggttgcaccctccttgctccctgtcattttcttgtcactcttcctgcttcccagtgttttattttatgccttgctcgttgtacatcatgatgactgatggtcttcaaggttgtgaggaaagccgtctccctgcttgactcgactgctgtcccagaggagagtcctgtgcgacctgagcgggggtggctgccatttccagcatgcaggtgacttccaaagaatgagtcaggtggcactgaaagccatgggttctgaagaggcgaatttgttgaaaagtcccaagggtctgaatgaaagcatctttaatcaacactcaacactcgcaatattctagaaaaccatatactgtgctggttgaggccaaaggttaacattgctccactgttcaccaaggaagggggcagtggccatccgccgcggcctcacgtgcgttgtaacaagccctcatcacatgtgtgagtcttacgtgcacaaaaagagaaggctttggtactgaaactggacaccttgtgtactcgataccttcacagcttctattggacatattttctttttaggaatgaaggaaaattctcccatttttgagccattcttttgtcaattctacaaaattgcatgtaactttataaatatttttaaaagatatagttttgtaaatatttaatattccgctaatttgattttgaattgtaaatgtcaagtattctgtttttggggtttttatgttttattatactttgttaaaaaggacaaattgtacatttttagaatgtttttatgagtaaatttaatgtactgaaaataaaaattttaaaaaaggctg

SEQ ID NO: 204330 - DNA, 6242 bp, Homo sapiens
  Payload ID: 20298
  Gene Name: zinc finger, CCHC domain containing 14
  Uniprot ID: Q8WYQ9
  ENST ID: ENST00000568020
  CDS Start-End: 33-2882
gcacgggcgatgagttcctgctgctgttcaccatggcctccaaccacccggccttcagcttccaccagaagcaggtgctgcgccaggagctcacgcagatccagagcagcctgaacggcggcgggggccacggcggcaagggcgcgcccgggccgggcggcgcgctgcccacttgcccagcctgccacaagatcactccaagaactgaggcccctgtcagcagtgtcagtaatagtttggagaatgccctgcacacatcagcacattccacggaggagtcgctgcccaagaggcccttaggaaaacacagcaaagtgagtgttgaaaagatagacctgaagggattatcacacacaaaaaatgacagaaatgttgaatgttcctttgaggtcttgtggtctgattcttcaataacatcagtaaccaaatcttcctctgaagtgacggaatttatttcaaagctatgtcagctctatcctgaagagaacttggagaaactcattccttgcttagctggtccggacgcattttatgtggagcgaaaccacgtggatctggactcaggcctgaggtacctggcctcattaccttctcacgtgttgaaaaatgaccatgtcaggaggtttctcagcacttcctctcccccacagcagcttcagagtccaagtcctggcaatccctccctttctaaagtaggtaccgtgatgggcgtgtctggaaggcctgtgtgtggagtggctggtatcccgtcctcgcagagcggagcccagcaccacgggcagcacccggccggctccgccgcccccttgcctcactgctcccatgcgggcagcgcgggctcagccctggcctaccggacccagatggacacatcacctgccatcctcatgccttccagtctgcagacccctcagacccaggagcagaatgggattctagactggcttaggaaactgcgtttgcacaagtattaccccgtctttaagcagctctccatggagaagtttttgagccttactgaagaagatctgaataaatttgagtctcttaccatgggggcaaagaagaagctcaagacccagctggagctggaaaaggagaagtcagagagacggtgcctgaacccctcggccccgccgctggtcaccagcagtggtgtggctcgagtgccccccaccagccacgtcgggcccgtgcagtcggggcggggcagccatgcagcagagctgcgggtggaagtggagcagccccatcaccagctgccccgggaaggcagttcctcggagtactccagctcctcctccagccccatgggggtacaggcccgggaagagagctccgacagcgctgaggagaatgacagacgtgtggagattcacttggagagctctgacaaggagaagccggtgatgctgctgaatcacttcacttccagttccgccagacccacggcccaggttctccctgtgcagaatgaggccagctccaatccatcaggccaccaccccctgcccccgcagatgctgagcgcagcctcacacatcacacccatccgcatgctgaattccgtgcacaagccggaaagagggagcgcggacatgaagctcctctcgtcttctgtgcactcacttttgtctctagaagaaaggaataaaggatctggaccaagaagcagcatgaaagtggacaagagctttggcagcgccatgatggacgtgctgcccgcgtccgcaccccaccagcctgtgcaggtcctctctgggctttcggagagcagctccatgtcacccacagtctcctttggtccccggaccaaagtcgtgcatgcatccacgctggacagggtgctgaagacagcacagcaaccggccctggtcgtggagaccagcacggccgccacggggacgcccagcacagtcctccacgccgcccgtccgcccatcaaactgctgctgtcgtcatctgttcctgctgattctgccatttctgggcaaacttcctgtcctaataatgtgcaaataagtgtgccccctgcaataataaacccccggactgctctgtacacagccaacaccaaagttgccttttctgcaatgagcagtatgccagtgggccccctgcagggtggcttctgtgcaaacagcaacactgcctctcccagcagccacccctccacgtcctttgccaacatggccacgttgcccagctgcccagcccccagctccagcccggcgctgtcctccgtccctgaaagcagtttctatagcagcagtggcggtggcggctccacaggaaacattcctgcctcgaatccgaaccaccaccaccaccaccaccatcagcagcccccggcacccccgcagcccgccccacccccgccaggctgcattgtgtgcacgtcctgtggctgcagcggcagctgcggctcgagtggcctgactgtcagctacgccaactacttccagcacccgttctccggtccgtccgtgttcaccttccccttcttgcccttcagtcccatgtgcagcagcggctacgtcagcgcccagcagtacggcggcggctccaccttccccgtcgtgcacgccccttacagcagcagcgggaccccagaccctgtcctgagtgggcagtccacgtttgccgtgccacccatgcagaacttcatggcagggacagcaggggtgtaccagacccaaggactggtgggcagtagcaatggttccagtcacaaaaagagcgggaacctatcttgttacaactgcggggccactggtcaccgcgcccaggactgcaaacagccgtccatggacttcaaccggccaggtacttttaggttgaaatacgcccctccagcagaaagtctggactccacagattgatatttttctctggcaacagaacgttattaagccatggagacataaggaaaattaaatacaaaactgagaagtctagttgctgttgagcttaatctttttaatccaaaggtgctttacttttcctagactggatagaaaatctagcgtagaagtgcatcaaactcgatttattgccaaaaccctagattggagcttggtgtcagaactcgcctagtgggcatctctgtggctggtgagatcggccacctccacttttggttgcagtgcagagacgccatgtctcccgaagagcattgccatcactggccctcctaggctcacacgtcaattccagggcagctacacgtggtctgaatcgagaaccgagcttggagttctccaagtggagttccacccgccggactcctgacacccctgggctagggaaaatgtcgactttgttttgttctgttcctaaagtgattagcactaatctctgggatttttaaggattgcactacagaagaatgtaccctgatgtaaatctctgcggttctgggagccaaactcctctgagaacagtcagtgcaagagactccaataatccatattgaaagagtcagcaccagcagaggctactcgacttaggacgcaacagaggttttagtatttccttccctcctccaagcacttgtagcagtttcaggtttttaatttttttctgcaaataaatctaaactacgttattaaatagaaatagtttactcgcaacaacttaatttctaagggtccaagtcccagagaatccatagtcgtcaaagctttgagagtatctttcttcccagccagtcagtggctttgagccctatcttccactacaaatgacctctcgaggggggacggcgacagcgcggctctgtgagtggctgtgaggatgctgcacgtcctcagcagagtttgcaagttgctttatctcccacgggctccccaagaacctccaaccccgaggcttatcgctagcggattcacacctgagacagacatttcaacaatgatacagtcctgtcatttatcagcaaaagattgggaattttctcctgtcaacttcttttgtattaggctgtgtattgatagttaattccgttaaaaattacttggaaaacagtgggaagtggtaggactctggaagaggccacacacccgagagctgcgagatctgtgcaagtctggttttggttaggtagtaataaaagtcctcactgtagatctctaaatttcaacccacggaaatgaaagccttttgtctgaaatttacggacttaaatcttcaaggttaaagggaattttctgctcaaataatactcttatcgaaaatgctaaagtcttcaatgttaaaatactgattggtaaaatcttgcagttgggattttgcagttggatatttattttaaaaaaaattataatattcagactattcttaaaatgggacaatcagcctcatgaaaaattgatgtaaatcagaagaataccctagaatgaggccttgtgatgtgagcgttcaatttgaagagcagttcctaacttcatagaaactaaagcagaaagttgttacattttttttatgacaggcttttagtagaattttttagttttattttagttgaattttatttctatgcaatgcagaattaacagacctcttctcctcatggtacacagtattacagtgttgaagtaatggtgatgcttattacaacagctatttaggggaatgttacgttgatctcttaaattgtaaacactacaaaatgtcaaaataatgagaactgacacaactttgccttaaagagtactagactggaccttctcatattacgtttaaggaagacttagagtgttcattgatgtttacgattttaatatttctgaaggccattacagtggcctggatatgtgctgaaagccaaacttttaaattttttggtttttttaagcaaagaaatattttaaataaatcctatttcaacactgaaattgttgaaaaccgtctcataacaaaaggaaaaaacattggaatttttgttttagtggtcagtataggggaatgaaagcgtctgttgttacccacgtaactattttgataagtattagaggttaaccttaaatccagcaaaacattaaaacagaaacttttcaacttggagcctgccattcagcgttgaggtagatgagttccgacactgtcacggctgtgttcccagcagcgaaggcctctgcggagctgccagtcgtcttgaacgtgcatgggcggcgtgtgacatctccagggaggccgtccgaagtcgagaatcgtcagctgtaagtaggagctacacagcgcagagaaaatggaaccacccatccgtgaggcctctttccggagggagccgcacacttggacttgagagtttgccagcagcgagctcggatgcatctctccaaaagccaccaaggtcggcgcgtctgaagagcgttttgcggtcatcagacttcctcatctgaaaacacagaacatactgaccctttcaagtacttagtcattttcctgaaagtgtggtctgtttcagaatgctgtggcaaccagtgttttattttatgccttgctcgttgtacatcatgatgactgatggtcttcaaggttgtgaggaaagccgtctccctgcttgactcgactgctgtcccagaggagagtcctgtgcgacctgagcgggggtggctgccatttccagcatgcaggtgacttccaaagaatgagtcaggtggcactgaaagccatgggttctgaagaggcgaatttgttgaaaagtcccaagggtctgaatgaaagcatctttaatcaacactcaacactcgcaatattctagaaaaccatatactgtgctggttgaggccaaaggttaacattgctccactgttcaccaaggaagggggcagtggccatccgccgcggcctcacgtgcgttgtaacaagccctcatcacatgtgtgagtcttacgtgcacaaaaagagaaggctttggtactgaaactggacaccttgtgtactcgataccttcacagcttctattggacatattttctttttaggaatgaaggaaaattctcccatttttgagccattcttttgtcaattctacaaaattgcatgtaactttataaatatttttaaaagatatagttttgtaaatatttaatattccgctaatttgattttgaattgtaaatgtcaagtattctgtttttggggtttttatgttttattatactttgttaaaaaggacaaattgtacatttttagaatgtttttatgagtaaatttaatgtactgaaaataaaaatttt

SEQ ID NO: 204331 - DNA, 2548 bp, Homo sapiens
  Payload ID: 20298
  Gene Name: zinc finger, CCHC domain containing 14
  ENST ID: ENST00000561928
  CDS Start-End: 1-2539
ctttgaggtcttgtggtctgattcttcaataacatcagtaaccaaatcttcctctgaagtgacggaatttatttcaaagctatgtcagctctatcctgaagagaacttggagaaactcattccttgcttagctggtccggacgcattttatgtggagcgaaaccacgtggatctggactcaggcctgaggtacctggcctcattaccttctcacgtgttgaaaaatgaccatgtcaggaggtttctcagcacttcctctcccccacagcagcttcagagtccaagtcctggcaatccctccctttctaaagtaggtaccgtgatgggcgtgtctggaaggcctgtgtgtggagtggctggtatcccgtcctcgcagagcggagcccagcaccacgggcagcacccggccggctccgccgcccccttgcctcactgctcccatgcgggcagcgcgggctcagccctggcctaccggacccagatggacacatcacctgccatcctcatgccttccagtctgcagacccctcagacccaggagcagaatgggattctagactggcttaggaaactgcgtttgcacaagtattaccccgtctttaagcagctctccatggagaagtttttgagccttactgaagaagatctgaataaatttgagtctcttaccatgggggcaaagaagaagctcaagacccagctggagctggaaaaggagaagtcagagagacggtgcctgaacccctcggccccgccgctggtcaccagcagtggtgtggctcgagtgccccccaccagccacgtcgggcccgtgcagtcggggcggggcagccatgcagcagagctgcgggtggaagtggagcagccccatcaccagctgccccgggaaggcagttcctcggagtactccagctcctcctccagccccatgggggtacaggcccgggaagagagctccgacagcgctgaggagaatgacagacgtgtggagattcacttggagagctctgacaaggagaagccggtgatgctgctgaatcacttcacttccagttccgccagacccacggcccaggttctccctgtgcagaatgaggccagctccaatccatcaggccaccaccccctgcccccgcagatgctgagcgcagcctcacacatcacacccatccgcatgctgaattccgtgcacaagccggaaagagggagcgcggacatgaagctcctctcgtcttctgtgcactcacttttgtctctagaagaaaggaataaaggatctggaccaagaagcagcatgaaagtggacaagagctttggcagcgccatgatggacgtgctgcccgcgtccgcaccccaccagcctgtgcaggtcctctctgggctttcggagagcagctccatgtcacccacagtctcctttggtccccggaccaaagtcgtgcatgcatccacgctggacagggtgctgaagacagcacagcaaccggccctggtcgtggagaccagcacggccgccacggggacgcccagcacagtcctccacgccgcccgtccgcccatcaaactgctgctgtcgtcatctgttcctgctgattctgccatttctgggcaaacttcctgtcctaataatgtgcaaataagtgtgccccctgcaataataaacccccggactgctctgtacacagccaacaccaaagttgccttttctgcaatgagcagtatgccagtgggccccctgcagggtggcttctgtgcaaacagcaacactgcctctcccagcagccacccctccacgtcctttgccaacatggccacgttgcccagctgcccagcccccagctccagcccggcgctgtcctccgtccctgaaagcagtttctatagcagcagtggcggtggcggctccacaggaaacattcctgcctcgaatccgaaccaccaccaccaccaccaccatcagcagcccccggcacccccgcagcccgccccacccccgccaggctgcattgtgtgcacgtcctgtggctgcagcggcagctgcggctcgagtggcctgactgtcagctacgccaactacttccagcacccgttctccggtccgtccgtgttcaccttccccttcttgcccttcagtcccatgtgcagcagcggctacgtcagcgcccagcagtacggcggcggctccaccttccccgtcgtgcacgccccttacagcagcagcgggaccccagaccctgtcctgagtgggcagtccacgtttgccgtgccacccatgcagaacttcatggcagggacagcaggggtgtaccagacccaaggactggtgggcagtagcaatggttccagtcacaaaaagagcgggaacctatcttgttacaactgcggggccactggtcaccgcgcccaggactgcaaacagccgtccatggacttcaaccggccaggtaagcgcgcgccatggccgcgcccaccaggctcccgcaggaccagtgcacacaaatgcttggtttttatgaagagtaaacttctttctttgtaaagcaaataa

SEQ ID NO: 204332 - DNA, 2613 bp, Homo sapiens
  Payload ID: 20299
  Gene Name: zinc finger, CCHC domain containing 16
  Uniprot ID: Q6ZR62
  ENST ID: ENST00000340433
  CDS Start-End: 230-1162
accattggccttttccatgaagaagaggcaacattgagtggcggacaacactttttggcatctctccaattcagctgttagcatctcctagtgtcttcttcacagctaacagctttggctacttgctcatgacactccgtctctgatcacagagcaaatccactgtctccattggtttccagtactagtactcaattctactcaatcccacctgattccaggagacataatggagaagtgcacgaaatcatcatctaccatgcaggtagagccttcctttcttcaggcagagaatctgattctgcggcttcaaatgcagcatccaaccacggagaacactgctaaaaggggccaagtcatgcctgccctggccaccacagtgatgcctgtaccatactcacttgagcatctcacccagtttcatggtgaccctgccaattgctcagagttcctcactcaggtgactacctacttgacagctctccaaatctctaatcctgcaaatgatgcccagatcaaactcttttttgattacctatctcagcagttagaaagttgtgggatcatatctgggcctgacaagagtaccttactgaagcaatatgagaatcttattcttgagttccagcagtcatttggtaaacccacaaaacaggaaatcaatcctctgatgaatgctaagtttgacaaaggagacaactcctctcagcaggaccctgctactttccacctcctcgctcaaaatctgatctgtaatgaaaccaatcagagtggtcagttcgaaaaggcactagctgatcccaaccaggatgaagagagtgtcactgatatgatggacaatcttccagacctgatcactcagtgcattcagttggacaagaaacatagtgacaggccagagctcctacagtcagagacccagctcccattgttggcttccttgatccaacaccaagccctctttagccccacagatccaccacccaagaaagggcctatacagctgcgagaaggccagctgcctctcaccccagccaaacgagcccgccagcaagaaactcagttgtgcctctactgcagccaatctggtcacttcacaagagattgccttgccaaacgttctcgagctccggcaacgacaaataacacagctcaccagtaagaggagaccaggaaagtcactttttaaacttacatcccagccttactgatttataacctgcattaacttttaaaatacagatggggaactgtgacaccactttataggcagttatgaactgacacgctttgggggaatttaaacaatcagatcttgttcattggcaaattacccctcacgaaacctaacccgagaatgatgaaaacaattcacaggcactttctgcagttgggattaattctccaagagcaccaaaaacctgcaggcaaaactttgcccagtctgagccaatgaaaataaccgtggaagcacattgggaaccttatcctgaccaatgggtgacatctgggttgagtttgtgtcccaaatcctgaatcttgtgtgcctagaaatgagcccaagacttttaccttcacctttattggtctgtatcctagtttcctgttggcttaggacctttggctgaagtccaaatgacattcctataatctgcttatattctcctcctagagtttggaccatgcttcacctattgactacgatctaccttcagcataaatcaaccttcctggaaccacagctctgccacccttccatagagctatatgttttgtttccatctaaagactcatgctttcccaacaaacagaacctcctggctatttacaaaccagattgaatgggcatttgaatactgcttggaactgttggtccctttttctttgcaggctagcccatcaggcaggtgtatgcttttagccaagcccaccaattccaacttattcctctcttctccaacaaccctacttgaggttccagcatgtcttatagccaagtcaatatgctctaggataaggatttctgaaaggtatttagtgagagttggggatggtgtgtcataattactgtatctgtagcatgtccttgctgccttggacaagggacctggccaaataaatctccactgaagactgacagccagaccctgcagtagtttctaactctagaagcctcaatgtagtcaccatctaggattactactcattgctattgagctctacctttatggaccacctctgaagtccttcatctaattgaggatcttaaaaaacaatgaatggcaaaaaacttcctacactatctcatctgaaaaatcctggggcacatacattaaaaccatttgtgcacaaaactcaggaagtcgggattttattgcttatgttttactcttggtacacaccagctttgtgtagattcctgatgcttctgaacaaaagtagtgttatgctagaaaggcaaaactccctaaaatgttaaaactgttcagcaatgatcactgctggtaattaccagccctctgttccctgcttcttgtttctgatgtatgtccccaaaatggatatcctggagaaatatcagtaatcacatattccctagcaaccatcaaggcc

SEQ ID NO: 204333 - DNA, 1605 bp, Homo sapiens
  Payload ID: 20300
  Gene Name: zinc finger, CCHC domain containing 17
  Uniprot ID: Q9NP64
  ENST ID: ENST00000344147
  CDS Start-End: 137-862
cttgtgggtggaaacgcgctggctgactggggtcggcgtttagttcagcgcagcgactcggggacctggagctgacgcctagacacttgtattagctttaatagaagagaaatggaggagccatagaatattaaggatgaattcaggaaggcctgagaccatggaaaacttgcctgctctctacactattttccaaggagaggttgctatggtgacagactatggggcctttatcaaaatcccaggctgtcggaagcaaggtctggtccatcgaactcatatgtcatcctgtcgggtggataagccctctgagatagtagatgttggagataaagtgtgggtgaagcttattggccgagagatgaaaaatgatagaataaaagtatccctctccatgaaggttgtcaatcaagggactgggaaagaccttgatcccaacaatgttatcattgagcaagaagagaggcggaggcgatccttccaggattacactgggcagaagatcacccttgaggctgtcttgaacactacctgcaagaagtgtggctgtaaaggccactttgcaaaagattgtttcatgcaaccaggtgggactaaatactctctgatacctgatgaggaagaggaaaaggaagaggcaaagtcagcagagtttgagaagcctgaccctacaaggaatccttctagaaaaagaaagaaggagaagaagaaaaagaaacatagagataggaagtcatctgactctgacagctcagactctgagagtgatacaggcaagagggcaaggcacacatcaaaagacagcaaggcagcaaagaagaagaaaaagaagaagaagcacaagaagaagcacaaggagtgagagtataaagagtgtagggggtggttgagagtaagaaaccaggagccttgtgccttgagactcctggaaagactcaatagtgagaatatagcctcccaccccattaacttcgctcccatgggagatggcttcccctcatgcaacaggcaggtttgggagttagaggtcaaaagcagctgcctgaatgagttgttgtttccttatcactcctggtccctttgcaagtgaaccctgcagctcacccattcattcacccaacttccttcattcagcaggaggtcctattaccctctccagctgccactgccagagctggattcctgtaaaggagtccaggctagagccacagagactgttgtggaggtgagttcggctgtagttagagtgattggacccttcctattggtctgtcctgggccaactggtgggtgatctctgctgcatccaacatgggagcagagactggcagcaggaggggggaacatggtgagaagtggtgctcacttttcccattcctcctaacatagttctactatgctagaagtggcatccagcggccacagctagaaaacagtctgcagtgtgacttaacttgtgtattgcattccagcagaccactgaaccagacagcgaagccaagatcattgttctactttgtatttactactgtgtgaatcagttgattctacttcaggtccttgcttaaattcctgtcactaaatggaaatgtgtttggttttaaa

SEQ ID NO: 204334 - DNA, 1730 bp, Homo sapiens
  Payload ID: 20300
  Gene Name: zinc finger, CCHC domain containing 17
  Uniprot ID: Q9NP64
  ENST ID: ENST00000373714
  CDS Start-End: 262-987
acgcgctggctgactggggtcggcgtttagttcagcgcagcgactcggggacctggagctgacgcctagtacgtatgaggaagaacggggtgggtggctgcctgagtctggaggcgacgcctcggttgtgcagtctgaacctgcccttctcagctgagggtgctgacagcaaggggtgggaggcgggccccgagtccccagctgtggacacttgtattagctttaatagaagagaaatggaggagccatagaatattaaggatgaattcaggaaggcctgagaccatggaaaacttgcctgctctctacactattttccaaggagaggttgctatggtgacagactatggggcctttatcaaaatcccaggctgtcggaagcaaggtctggtccatcgaactcatatgtcatcctgtcgggtggataagccctctgagatagtagatgttggagataaagtgtgggtgaagcttattggccgagagatgaaaaatgatagaataaaagtatccctctccatgaaggttgtcaatcaagggactgggaaagaccttgatcccaacaatgttatcattgagcaagaagagaggcggaggcgatccttccaggattacactgggcagaagatcacccttgaggctgtcttgaacactacctgcaagaagtgtggctgtaaaggccactttgcaaaagattgtttcatgcaaccaggtgggactaaatactctctgatacctgatgaggaagaggaaaaggaagaggcaaagtcagcagagtttgagaagcctgaccctacaaggaatccttctagaaaaagaaagaaggagaagaagaaaaagaaacatagagataggaagtcatctgactctgacagctcagactctgagagtgatacaggcaagagggcaaggcacacatcaaaagacagcaaggcagcaaagaagaagaaaaagaagaagaagcacaagaagaagcacaaggagtgagagtataaagagtgtagggggtggttgagagtaagaaaccaggagccttgtgccttgagactcctggaaagactcaatagtgagaatatagcctcccaccccattaacttcgctcccatgggagatggcttcccctcatgcaacaggcaggtttgggagttagaggtcaaaagcagctgcctgaatgagttgttgtttccttatcactcctggtccctttgcaagtgaaccctgcagctcacccattcattcacccaacttccttcattcagcaggaggtcctattaccctctccagctgccactgccagagctggattcctgtaaaggagtccaggctagagccacagagactgttgtggaggtgagttcggctgtagttagagtgattggacccttcctattggtctgtcctgggccaactggtgggtgatctctgctgcatccaacatgggagcagagactggcagcaggaggggggaacatggtgagaagtggtgctcacttttcccattcctcctaacatagttctactatgctagaagtggcatccagcggccacagctagaaaacagtctgcagtgtgacttaacttgtgtattgcattccagcagaccactgaaccagacagcgaagccaagatcattgttctactttgtatttactactgtgtgaatcagttgattctacttcaggtccttgcttaaattcctgtcactaaatggaaatgtgtttggttttaaa

SEQ ID NO: 204335 - DNA, 1140 bp, Homo sapiens
  Payload ID: 20300
  Gene Name: zinc finger, CCHC domain containing 17
  ENST ID: ENST00000422613
  CDS Start-End: 193-831
gggtcggcgtttagttcagcgcagcgactcggggacctggagctgacgcctagacacttgtattagctttaatagaagagaaatggaggagccatagaatattaaggatgaattcaggaaggcctgagaccatggaaaacttgcctgctctctacactattttccaaggagaggttgctatggtgacagactatggggcctttatcaaaatcccaggctgtcggaagcaaggtctggtccatcgaactcatgtcatcctgtcgggtggataagccctctgagatagtagatgttggagataaagtgtgggtgaagcttattggccgagagatgaaaaatgatagaataaaagtatccctctccatgaaggttgtcaatcaagggactgggaaagaccttgatcccaacaatgttatcattgagcaagaagagaggcggaggcgatccttccaggattacactgggcagaagatcacccttgaggctgtcttgaacactacctgcaagaagtgtggctgtaaaggccactttgcaaaagattgtttcatgcaaccaggtgggactaaatactctctgatacctgatgaggaagaggaaaaggaagaggcaaagtcagcagagtttgagaagcctgaccctacaaggaatccttctagaaaaagaaagaaggagaagaagaaaaagaaacatagagataggaagtcatctgactctgacagctcagactctgagagtgatacaggcaagagggcaaggcacacatcaaaagacagcaaggcagcaaagaagaagaaaaagaagaagaagcacaagaagaagcacaaggagtgagagtataaagagtgtagggggtggttgagagtaagaaaccaggagccttgtgccttgagactcctggaaagactcaatagtgagaatatagcctcccaccccattaacttcgctcccatgggagatggcttcccctcatgcaacaggcaggtttgggagttagaggtcaaaagcagctgcctgaatgagttgttgtttccttatcactcctggtccctttgcaagtgaaccctgcagctcacccattcattcacccaacttccttcattcagcaggaggtcctattaccctctccagctgccactgcca

SEQ ID NO: 204336 - DNA, 1705 bp, Homo sapiens
  Payload ID: 20300
  Gene Name: zinc finger, CCHC domain containing 17
  Uniprot ID: Q9NP64
  ENST ID: ENST00000546109
  CDS Start-End: 244-945
aggcgcgctgggtcttgtgggtggaaacgcgctggctgactggggtcggcgtttagttcagcgcagcgactcggggacctggagctgacgcctagacacttgtattagctttaatagaagagaaatggaggagccatagaatattaaggatgaattcaggaaggcctgagaccatggaaaacttgcctgctctctacactattttccaaggagagttatggtgaagctgaaacagtgctcaagatgaagcagctaattgaagacactgaaaagaataaagtttatgttgctatggtgacagactatggggcctttatcaaaatcccaggctgtcggaagcaaggtctggtccatcgaactcatatgtcatcctgtcgggtggataagccctctgagatagtagatgttggagataaagtgtgggtgaagcttattggccgagagatgaaaaatgatagaataaaagtatccctctccatgaaggttgtcaatcaagggactgggaaagaccttgatcccaacaatgttatcattgagcaagaagagaggcggaggcgatccttccaggattacactgggcagaagatcacccttgaggctgtcttgaacactacctgcaagaagtgtggctgtaaaggccactttgcaaaagattgtttcatgcaaccaggtgggactaaatactctctgatacctgatgaggaagaggaaaaggaagaggcaaagtcagcagagtttgagaagcctgaccctacaaggaatccttctagaaaaagaaagaaggagaagaagaaaaagaaacatagagataggaagtcatctgactctgacagctcagactctgagagtgatacaggcaagagggcaaggcacacatcaaaagacagcaaggcagcaaagaagaagaaaaagaagaagaagcacaagaagaagcacaaggagtgagagtataaagagtgtagggggtggttgagagtaagaaaccaggagccttgtgccttgagactcctggaaagactcaatagtgagaatatagcctcccaccccattaacttcgctcccatgggagatggcttcccctcatgcaacaggcaggtttgggagttagaggtcaaaagcagctgcctgaatgagttgttgtttccttatcactcctggtccctttgcaagtgaaccctgcagctcacccattcattcacccaacttccttcattcagcaggaggtcctattaccctctccagctgccactgccagagctggattcctgtaaaggagtccaggctagagccacagagactgttgtggaggtgagttcggctgtagttagagtgattggacccttcctattggtctgtcctgggccaactggtgggtgatctctgctgcatccaacatgggagcagagactggcagcaggaggggggaacatggtgagaagtggtgctcacttttcccattcctcctaacatagttctactatgctagaagtggcatccagcggccacagctagaaaacagtctgcagtgtgacttaacttgtgtattgcattccagcagaccactgaaccagacagcgaagccaagatcattgttctactttgtatttactactgtgtgaatcagttgattctacttcaggtccttgcttaaattcctgtcactaaatggaaatgtgtttggttttaaacttactgagttattttt

SEQ ID NO: 204337 - DNA, 1652 bp, Homo sapiens
  Payload ID: 20300
  Gene Name: zinc finger, CCHC domain containing 17
  ENST ID: ENST00000615916
  CDS Start-End: 101-892
aggcgcgctgggtcttgtgggtggaaacgcgctggctgactggggtcggcgtttagttcagcgcagcgactcggggacctggagctgacgcctagtacgtatgaggaagaacggggtgggtggctgcctgagtctggaggcgacgcctcggttgtgcagtctgaacctgcccttctcagctgagggtgctgacagcaaggggtgggaggcgggccccgagtccccagctgtggttgctatggtgacagactatggggcctttatcaaaatcccaggctgtcggaagcaaggtctggtccatcgaactcatatgtcatcctgtcgggtggataagccctctgagatagtagatgttggagataaagtgtgggtgaagcttattggccgagagatgaaaaatgatagaataaaagtatccctctccatgaaggttgtcaatcaagggactgggaaagaccttgatcccaacaatgttatcattgagcaagaagagaggcggaggcgatccttccaggattacactgggcagaagatcacccttgaggctgtcttgaacactacctgcaagaagtgtggctgtaaaggccactttgcaaaagattgtttcatgcaaccaggtgggactaaatactctctgatacctgatgaggaagaggaaaaggaagaggcaaagtcagcagagtttgagaagcctgaccctacaaggaatccttctagaaaaagaaagaaggagaagaagaaaaagaaacatagagataggaagtcatctgactctgacagctcagactctgagagtgatacaggcaagagggcaaggcacacatcaaaagacagcaaggcagcaaagaagaagaaaaagaagaagaagcacaagaagaagcacaaggagtgagagtataaagagtgtagggggtggttgagagtaagaaaccaggagccttgtgccttgagactcctggaaagactcaatagtgagaatatagcctcccaccccattaacttcgctcccatgggagatggcttcccctcatgcaacaggcaggtttgggagttagaggtcaaaagcagctgcctgaatgagttgttgtttccttatcactcctggtccctttgcaagtgaaccctgcagctcacccattcattcacccaacttccttcattcagcaggaggtcctattaccctctccagctgccactgccagagctggattcctgtaaaggagtccaggctagagccacagagactgttgtggaggtgagttcggctgtagttagagtgattggacccttcctattggtctgtcctgggccaactggtgggtgatctctgctgcatccaacatgggagcagagactggcagcaggaggggggaacatggtgagaagtggtgctcacttttcccattcctcctaacatagttctactatgctagaagtggcatccagcggccacagctagaaaacagtctgcagtgtgacttaacttgtgtattgcattccagcagaccactgaaccagacagcgaagccaagatcattgttctactttgtatttactactgtgtgaatcagttgattctacttcaggtccttgcttaaattcctgtcactaaatggaaatgtgtttggttttaaacttactgagttattttt

SEQ ID NO: 204338 - DNA, 1489 bp, Homo sapiens
  Payload ID: 20300
  Gene Name: zinc finger, CCHC domain containing 17
  ENST ID: ENST00000618216
  CDS Start-End: 150-590
aggcgcgctgggtcttgtgggtggaaacgcgctggctgactggggtcggcgtttagttcagcgcagcgactcggggacctggagctgacgcctagacacttgtattagctttaatagaagagaaatggaggagccatagaatattaaggatgaattcaggaaggcctgagaccatggaaaacttgcctgctctctacactattttccaaggagaggttgctatggtgacagactatggggcctttatcaaaatcccaggctgtcggaagcaaggtctggtccatcgaactcatatgtcatcctgtcgggtggataagccctctgagatagtagatgttggagataaagtgtgggtgaagcttattggccgagagatgaaaaatgatagaataaaagtatccctctccatgaaggttgtcaatcaagggactgggaaagaccttgatcccaacaatgttatcattgagcaagaagagaggcggaggcgatccttccaggattacactgggcagaagatcacccttgaggctgtcttgaacactacctgcaagaagtgtggctgtaaaggagaagaagaaaaagaaacatagagataggaagtcatctgactctgacagctcagactctgagagtgatacaggcaagagggcaaggcacacatcaaaagacagcaaggcagcaaagaagaagaaaaagaagaagaagcacaagaagaagcacaaggagtgagagtataaagagtgtagggggtggttgagagtaagaaaccaggagccttgtgccttgagactcctggaaagactcaatagtgagaatatagcctcccaccccattaacttcgctcccatgggagatggcttcccctcatgcaacaggcaggtttgggagttagaggtcaaaagcagctgcctgaatgagttgttgtttccttatcactcctggtccctttgcaagtgaaccctgcagctcacccattcattcacccaacttccttcattcagcaggaggtcctattaccctctccagctgccactgccagagctggattcctgtaaaggagtccaggctagagccacagagactgttgtggaggtgagttcggctgtagttagagtgattggacccttcctattggtctgtcctgggccaactggtgggtgatctctgctgcatccaacatgggagcagagactggcagcaggaggggggaacatggtgagaagtggtgctcacttttcccattcctcctaacatagttctactatgctagaagtggcatccagcggccacagctagaaaacagtctgcagtgtgacttaacttgtgtattgcattccagcagaccactgaaccagacagcgaagccaagatcattgttctactttgtatttactactgtgtgaatcagttgattctacttcaggtccttgcttaaattcctgtcactaaatggaaatgtgtttggttttaaacttactgagttattttt

SEQ ID NO: 204339 - DNA, 1458 bp, Homo sapiens
  Payload ID: 20300
  Gene Name: zinc finger, CCHC domain containing 17
  ENST ID: ENST00000616859
  CDS Start-End: 244-726
aggcgcgctgggtcttgtgggtggaaacgcgctggctgactggggtcggcgtttagttcagcgcagcgactcggggacctggagctgacgcctagacacttgtattagctttaatagaagagaaatggaggagccatagaatattaaggatgaattcaggaaggcctgagaccatggaaaacttgcctgctctctacactattttccaaggagagttatggtgaagctgaaacagtgctcaagatgaagcagctaattgaagacactgaaaagaataaagtttatgttgctatggtgacagactatggggcctttatcaaaatcccaggctgtcggaagcaaggtctggtccatcgaactcatatgtcatcctgtcgggtggataagccctctgagatagtagatgttggagataaagtgtgggtgaagcttattggccgagagatgaaaaatgatagaataaaagtatccctctccatgaaggttgtcaatcaagggactgggaaagaccttgatcccaacaatgttatcattgagagaagaagaaaaagaaacatagagataggaagtcatctgactctgacagctcagactctgagagtgatacaggcaagagggcaaggcacacatcaaaagacagcaaggcagcaaagaagaagaaaaagaagaagaagcacaagaagaagcacaaggagtgagagtataaagagtgtagggggtggttgagagtaagaaaccaggagccttgtgccttgagactcctggaaagactcaatagtgagaatatagcctcccaccccattaacttcgctcccatgggagatggcttcccctcatgcaacaggcaggtttgggagttagaggtcaaaagcagctgcctgaatgagttgttgtttccttatcactcctggtccctttgcaagtgaaccctgcagctcacccattcattcacccaacttccttcattcagcaggaggtcctattaccctctccagctgccactgccagagctggattcctgtaaaggagtccaggctagagccacagagactgttgtggaggtgagttcggctgtagttagagtgattggacccttcctattggtctgtcctgggccaactggtgggtgatctctgctgcatccaacatgggagcagagactggcagcaggaggggggaacatggtgagaagtggtgctcacttttcccattcctcctaacatagttctactatgctagaagtggcatccagcggccacagctagaaaacagtctgcagtgtgacttaacttgtgtattgcattccagcagaccactgaaccagacagcgaagccaagatcattgttctactttgtatttactactgtgtgaatcagttgattctacttcaggtccttgcttaaattcctgtcactaaatggaaatgtgtttggttttaaacttactgagttattttt

SEQ ID NO: 204340 - DNA, 1534 bp, Homo sapiens
  Payload ID: 20300
  Gene Name: zinc finger, CCHC domain containing 17
  ENST ID: ENST00000616393
  CDS Start-End: 235-774
aggcgcgctgggtcttgtgggtggaaacgcgctggctgactggggtcggcgtttagttcagcgcagcgactcggggacctggagctgacgcctagacacttgtattagctttaatagaagagaaatggaggagccatagaatattaaggatgaattcaggaaggcctgagaccatggaaaacttgcctgctctctacactattttccaaggagaggttgctatggtgacagactatggggcctttatcaaaatcccaggctgtcggaagcaagatgaaaaatgatagaataaaagtatccctctccatgaaggttgtcaatcaagggactgggaaagaccttgatcccaacaatgttatcattgagcaagaagagaggcggaggcgatccttccaggattacactgggcagaagatcacccttgaggctgtcttgaacactacctgcaagaagtgtggctgtaaaggccactttgcaaaagattgtttcatgcaaccaggtgggactaaatactctctgatacctgatgaggaagaggaaaaggaagaggcaaagtcagcagagtttgagaagcctgaccctacaaggaatccttctagaaaaagaaagaaggagaagaagaaaaagaaacatagagataggaagtcatctgactctgacagctcagactctgagagtgatacaggcaagagggcaaggcacacatcaaaagacagcaaggcagcaaagaagaagaaaaagaagaagaagcacaagaagaagcacaaggagtgagagtataaagagtgtagggggtggttgagagtaagaaaccaggagccttgtgccttgagactcctggaaagactcaatagtgagaatatagcctcccaccccattaacttcgctcccatgggagatggcttcccctcatgcaacaggcaggtttgggagttagaggtcaaaagcagctgcctgaatgagttgttgtttccttatcactcctggtccctttgcaagtgaaccctgcagctcacccattcattcacccaacttccttcattcagcaggaggtcctattaccctctccagctgccactgccagagctggattcctgtaaaggagtccaggctagagccacagagactgttgtggaggtgagttcggctgtagttagagtgattggacccttcctattggtctgtcctgggccaactggtgggtgatctctgctgcatccaacatgggagcagagactggcagcaggaggggggaacatggtgagaagtggtgctcacttttcccattcctcctaacatagttctactatgctagaagtggcatccagcggccacagctagaaaacagtctgcagtgtgacttaacttgtgtattgcattccagcagaccactgaaccagacagcgaagccaagatcattgttctactttgtatttactactgtgtgaatcagttgattctacttcaggtccttgcttaaattcctgtcactaaatggaaatgtgtttggttttaaacttactgagttattttt

SEQ ID NO: 204341 - DNA, 1158 bp, Homo sapiens
  Payload ID: 20300
  Gene Name: zinc finger, CCHC domain containing 17
  ENST ID: ENST00000627541
  CDS Start-End: 68-799
agttcagcgcagcgactcggggacctggagctgacgcctagtacgtatgaggaagaacggggttgctatggtgacagactatggggcctttatcaaaatcccaggctgtcggaagcaaggtctggtccatcgaactcatatgtcatcctgtcgggtggataagccctctgagatagtagatgttggagataaagtgtgggtgaagcttattggccgagagatgaaaaatgatagaataaaagtatccctctccatgaaggttgtcaatcaagggactgggaaagaccttgatcccaacaatgttatcattgagcaagaagagaggcggaggcgatccttccaggattacactgggcagaagatcacccttgaggctgtcttgaacactacctgcaagaagtgtggctgtaaaggtagggtgaagcctctgccctttccacgtttctctccttgtggatggacccttttctggaagaaggaggcagcccagtgccactttgcaaaagattgtttcatgcaaccaggtgggactaaatactctctgatacctgatgaggaagaggaaaaggaagaggcaaagtcagcagagtttgagaagcctgaccctacaaggaatccttctagaaaaagaaagaaggagaagaagaaaaagaaacatagagataggaagtcatctgactctgacagctcagactctgagagtgatacaggcaagagggcaaggcacacatcaaaagacagcaaggcagcaaagaagaagaaaaagaagaagaagcacaagaagaagcacaaggagtgagagtataaagagtgtagggggtggttgagagtaagaaaccaggagccttgtgccttgagactcctggaaagactcaatagtgagaatatagcctcccaccccattaacttcgctcccatgggagatggcttcccctcatgcaacaggcaggtttgggagttagaggtcaaaagcagctgcctgaatgagttgttgtttccttatcactcctggtccctttgcaagtgaaccctgcagctcacccattcattcacccaacttccttcattcagcaggaggtcctattaccctctccagctgccactgccagagctggattcctgtaaaggagtccaggctagagccacagagactgttgt

SEQ ID NO: 204342 - DNA, 2907 bp, Homo sapiens
  Payload ID: 20301
  Gene Name: zinc finger, CCHC domain containing 18
  Uniprot ID: P0CG32
  ENST ID: ENST00000537356
  CDS Start-End: 1415-2626
ccggcccgtcacgctcttttgtctcagtcgccagagactgaaagcaaccgcggctgcccggagggccgaactggagggtgggcgcagccttggctgccttgggaaccgtgctgcctcgactcggctacccctcgctgggcggtcgtgcgcactcgctaggtcgggcagccccgggtcgcttagcggccgaggaggcggcagagatcccgttcccctgcagagctacggggaccggaaggcgaaacagagctgtggacgcgggagcacatgctgcccaccagtggagcacaagtaaagaaagaacgcgcgattgcccggcgcggagaggggtgggggaagccccgccaggactgggcggcgcccggcttggagaatcagtaactgcgaggcaggggatggagcactcccttggcctggttgcgctgaggaaggagttgtggttcatctggatgctgccgactggataggatttaggatttgcctggattaaggtgggtgggggtgttgtcgtaggtcgggggtgttgttgggtgtcgggggcggggtgtgttcggggaggtggcaaggggcgggaggagacgatcgcaagctgtcttgaaccccttttgcatctcctcatctcttcctgggaaggaatatgagggtgggaggttatccaacttctagtctctttctccctggcaggtcatcaaagccgaatccgaacttgaattctgtgcggcggattgcagagctgtcttgaggccctgaggactgggatctgcgacacccagtggacaaaagtcggccgtaccccagaggctaattttctcacggcaggcacctgttgcagaggctgcacgtaaaataaaggcgaacgctagtttccgagctcatgtaagaatctgagaaataacgggggaaacgttgacaagggggtgtgattgagacctgaggccatgaggttaatggtttcttattatcataaatctgtgacacacaaccattgagttccgttttgagggcccagtatcagctcccaacactatgtcatctagaattagaagcaacagttgtcgcccctcctggagtacaggcaggaggggatggatgtggctctgaaaaactacctactagcccagggacacctgctagctctggaatgttgtaattgccagtctcctgcagggtattgttaaggcactgggcagatataaaatgcactgcaaggctattcaggaagatagagaatgctactgcagactgcttccccacagcccactatcttattaaccttttttactttccttagaatccctactgaaatataaggcaggcacagcccaggaacgttgctttggagaatcctgcagataaggcttttccaaaaagcgcgagcatcttgttgtattcagataccctatcgtcgtcagtcatggctagcatcactgcgtgtgtgggtaacagcaggcagcagaatgcacctttgccgccttgggcccattccatgttgaggtctctggggaggagtctctgtcctttagtggtcaaaatggcagagagaaacatgaagttgttctcaggaagagtggtgccagcccaggggaaagaaacctttgaaaactggctgatccaagtcaatgaggtcctgccagattggagtatgtctgaggaggaaaaactcaagcgcttgatgaaaacacttaggggccctgcccgggaggtcatgcgtttgcttcaggcggccaaccccaacctaagtgtagcagatttcttgcgggcaatgaaattggtgtttggggagtctgaaagcagtgtgactgcccatggtaaattttttaacaccctgcaggcacaaggggagaaagcctccctttatgtgatccgtttagaggtgcagctccagaatgctattcaggcaggcatcctagctgagaaagatgcaaaccagactcgcttgcaacagcttcttttaggcgctgagctgaatagggacctgcgcttcaggcttaagcatcttctcaggatgtatgcaaataagcaggagcggcttcccaatttcctggagttaatcaagatgataagggaggaagaggattgggatgatgcttttattaaacggaagcggccgaaaaggtctgagccaataatggagagggcagccagccctgtggcatttcagggcgcccagccaatagcaatcagcagtgctgactgtaactgcaacgtgatagaaatagatgatacccttgatgactctgatgaggatgtgatcctggtggtgtctctgtacccttcactgacacctacaggtgcccctcccttcagaggaagagccagacctctggatcaagtgctggttattgattcccccaacaattctggggctcagtctctttctaccagtggtggttctgggtataagaatgatggtcctgggaatattcgtagagccaggaagcgaaaatacacaacccgctgctcatattgtggggaggagggccactcaaaagaaacctgtgacaatgagagcaacaaggcccaggtttttgagaatctgatcatcaccctgcaggagctgacacatacagaggagaggtcaaaagaggtccctggagaacacagtgatgcttctgagccacagtaaggatctagtccagccctaaatgagtccttgactgtattcagagtctggtaatgggaataacaggagaggggggtgggtttctaactgcatgaattaatccacaaagcagttttcctttgggaaggagaagaggtcttgcataccagcacagtggatggggaatggtgtgacctctgtccctgctctcttctctgctggcttaagggtctattctccatgtgtctatttctttgatgactttatactttttatgaaaggagcatcttttcattaaaccttca

SEQ ID NO: 204343 - DNA, 2941 bp, Homo sapiens
  Payload ID: 20301
  Gene Name: zinc finger, CCHC domain containing 18
  Uniprot ID: P0CG32
  ENST ID: ENST00000611638
  CDS Start-End: 1207-2418
cttttgtctcagtcgccagagactgaaagcaaccgcggctgcccggagggccgaactggagggtgggcgcagccttggctgccttgggaaccgtgctgcctcgactcggctacccctcgctgggcggtcgtgcgcactcgctaggtcgggcagccccgggtcgcttagcggccgaggaggcggcagagatcccgttcccctgcagagctacggggaccggaaggcgaaacagagctgtggacgcgggagcacatgctgcccaccagtggagcacaagtaaagaaagaacgcgcgattgcccggcgcggagaggggtgggggaagccccgccaggactgggcggcgcccggcttggagaatcagtaactgcgaggcaggggatggagcactcccttggcctggttgcgctgaggaaggagttgtggttcatctggatgctgccgactggataggatttaggatttgcctggattaaggtcatcaaagccgaatccgaacttgaattctgtgcggcggattgcagagctgtcttgaggccctgaggactgggatctgcgacacccagtggacaaaagtcggccgtaccccagaggctaattttctcacggcaggcacctgttgcagaggctgcacgtaaaataaaggcgaacgctagtttccgagctcatgtaagaatctgagaaataacgggggaaacgttgacaagggggtgtgattgagacctgaggccatgaggttaatggtttcttattatcataaatctgtgacacacaaccattgagttccgttttgagggcccagtatcagctcccaacactatgtcatctagaattagaagcaacagttgtcgcccctcctggagtacaggcaggaggggatggatgtggctctgaaaaactacctactagcccagggacacctgctagctctggaatgttgtaattgccagtctcctgcagggtattgttaaggcactgggcagatataaaatgcactgcaaggctattcaggaagatagagaatgctactgcagactgcttccccacagcccactatcttattaaccttttttactttccttagaatccctactgaaatataaggcaggcacagcccaggaacgttgctttggagaatcctgcagataaggcttttccaaaaagcgcgagcatcttgttgtattcagataccctatcgtcgtcagtcatggctagcatcactgcgtgtgtgggtaacagcaggcagcagaatgcacctttgccgccttgggcccattccatgttgaggtctctggggaggagtctctgtcctttagtggtcaaaatggcagagagaaacatgaagttgttctcaggaagagtggtgccagcccaggggaaagaaacctttgaaaactggctgatccaagtcaatgaggtcctgccagattggagtatgtctgaggaggaaaaactcaagcgcttgatgaaaacacttaggggccctgcccgggaggtcatgcgtttgcttcaggcggccaaccccaacctaagtgtagcagatttcttgcgggcaatgaaattggtgtttggggagtctgaaagcagtgtgactgcccatggtaaattttttaacaccctgcaggcacaaggggagaaagcctccctttatgtgatccgtttagaggtgcagctccagaatgctattcaggcaggcatcctagctgagaaagatgcaaaccagactcgcttgcaacagcttcttttaggcgctgagctgaatagggacctgcgcttcaggcttaagcatcttctcaggatgtatgcaaataagcaggagcggcttcccaatttcctggagttaatcaagatgataagggaggaagaggattgggatgatgcttttattaaacggaagcggccgaaaaggtctgagccaataatggagagggcagccagccctgtggcatttcagggcgcccagccaatagcaatcagcagtgctgactgtaactgcaacgtgatagaaatagatgatacccttgatgactctgatgaggatgtgatcctggtggtgtctctgtacccttcactgacacctacaggtgcccctcccttcagaggaagagccagacctctggatcaagtgctggttattgattcccccaacaattctggggctcagtctctttctaccagtggtggttctgggtataagaatgatggtcctgggaatattcgtagagccaggaagcgaaaatacacaacccgctgctcatattgtggggaggagggccactcaaaagaaacctgtgacaatgagagcaacaaggcccaggtttttgagaatctgatcatcaccctgcaggagctgacacatacagaggagaggtcaaaagaggtccctggagaacacagtgatgcttctgagccacagtaaggatctagtccagccctaaatgagtccttgactgtattcagagtctggtaatgggaataacaggagaggggggtgggtttctaactgcatgaattaatccacaaagcagttttcctttgggaaggagaagaggtcttgcataccagcacagtggatggggaatggtgtgacctctgtccctgctctcttctctgctggcttaagggtctattctccatgtgtctatttctttgatgactttatactttttatgaaaggagcatcttttcattaaaccttcaaaaataaaggaagatacaaaaactaaagtacaaattacctgaaactcagcacccttttgtaaccattgtcagccctttggtgaatgtccttccagatatctccctgtacctgtgtacccagatagatatatgtatagataagagtgaccaaatataagtgctgttctatactgtgtatttttcaccaaataatgtatctcgtggacttctatgtcgatgaatatatataaatatctaacttc

SEQ ID NO: 204344 - DNA, 5959 bp, Homo sapiens
  Payload ID: 20302
  Gene Name: zinc finger, CCHC domain containing 2
  Uniprot ID: Q9C0B9
  ENST ID: ENST00000269499
  CDS Start-End: 419-3955
gcccggcccggctgctccacctcctcacccagccgctccgtcctcaccggctcgcgagggaacagctcaggcaccgccgccccggctcagcgcggacggcggagagagggaggcggaaggaggacaccctcgctcgcttgctcccacccgcacccgggctcccagaaccggcgaggagcccagggggaggagccgtcgcgggcacgccccgcccccagcccgggaagacgacgccagcgaccccgccggccggccaccgcccccctcgccggccgagacccgcccccggccccggccctcccccggcggcatggaggggccccgctcctgacggccgcgccgccgcctcggcccgtgctccacctcgcggcccctcccgcccgcccccgctcgcatgtctgcgccgccctagccgaggatgctgaggatgaagctgccgctgaagccaacgcaccccgcggagccgccgcccgaggcggaggagcccgaggcggacgcgcggccgggcgcgaaggcgccttcgcgccgccgccgcgactgccgccccccgccgccgccgccgccgcccgcgggcccgtcgcggggccctctgccgccgccgccgccgccccggggactcgggccgcctgttgctggtggagcggcggcgggggcgggtatgccgggcggcggcggggggccctcggcggcgctgcgcgagcaggagcgggtatacgagtggttcgggctggtgctgggctcggcgcagcgcctggagttcatgtgcgggctgctggacctgtgcaacccgctggagctgcgcttccttggctcgtgcctggaggacctggcgcgcaaggactaccactacctgcgcgactcggaggccaaggccaacggcctctcggacccggggccgctggccgacttccgagagcccgcggtgcgctcgcgcctcatcgtctacctggcgctgctgggctcggagaaccgggaggccgctggccgtctgcaccgcctgctaccccaggtggactcggtgctcaaaagcctgcgcgcggcccggggcgagggctcgcggggcggcgcggaggacgagcgcggcgaggacggcgacggcgagcaggacgccgagaaggacggctcaggcccggaaggcggcattgtggagccccgggtcggcggcgggcttggctccagggcccaggaggaactgctgctgctcttcaccatggcctcgctgcacccggctttctccttccaccagcgggtcaccctgagggaacacttggagaggctccgcgccgcgctccgcgggggccccgaggacgcggaggtggaggtagagccgtgcaagtttgccggccccagggcccagaacaactctgctcatggtgattacatgcaaaataacgagagcagcttaatagagcaagctccaatacctcaggacggacttaccgtggcacctcacagagctcagcgagaagctgtacacattgagaagataatgttgaaaggagtccagagaaaaagagctgacaaatactgggagtacactttcaaagtaaattggtctgatctttcagtcacaacagtaacaaaaacccaccaagaactacaggaatttctactgaagcttccaaaggaactgtcttcagagacttttgacaagaccatcttaagagccctgaatcagggttccttgaaaagggaggaacggcgacatcctgacctagagcccatcctaaggcagctattttcaagttcatcacaagcttttctacaaagtcagaaagtacacagcttctttcagtccatatcatcagactccctacacagtatcaataacttacaatcctctctgaagacttctaagatattagaacacttaaaagaagacagctctgaagcttcaagtcaagaagaagatgtgttgcagcatgccataatccacaagaagcatactgggaaaagtcccattgtgaacaatattggtacaagttgttctccattggatgggcttaccatgcaatattctgaacagaatggaattgtggattggaggaagcaaagctgtaccaccattcaacacccagagcactgtgtgacctcggctgaccagcattctgctgaaaaacggagtttatcttcaataaataagaagaaaggaaagccacaaacagaaaaggagaaaattaagaaaactgacaacagattgaatagtagaataaatggtattagactctccactcctcagcatgcccatggtggtactgtgaaagatgtgaatttggacattggctctggacatgacacatgtggagaaacatcttcagagagttacagttctccatctagtccccgacatgatggaagagaaagttttgaaagtgaagaagagaaagacagagacacagacagcaattctgaggattctgggaatccatcaacaactaggtttacaggttacggttctgtcaaccagactgtcactgtcaagccacctgttcaaattgcttcactaggaaatgagaatggaaaccttttagaagatcccttaaactcacccaagtatcagcatatttcttttatgccaacgttacactgtgtcatgcacaatggtgcccagaagtctgaagttgtcgttcctgcacccaaacccgctgatggcaaaaccatagggatgcttgttcctagtcctgttgctatttctgcaataagggagtctgcaaattcaacccctgttggaatactagggccaacagcttgcactggagaatcggaaaagcaccttgagttactggcttcccctttacctattccatcaaccttccttccacacagtagtactcccgctttgcatcttacagttcagaggctaaagttgccaccaccacagggatcttctgagagctgcacagttaacatcccacaacaaccacccggaagcctgagcatcgcatcaccaaacactgcctttattcctatccataacccaggtagtttcccaggctctcctgttgctaccacggaccccatcacaaaatctgcatcccaagtggtaggactcaatcaaatggtgcctcaaattgagggaaacacagggacagtccctcagcctaccaatgtgaaggtagttcttccagcagctggcctctcagctgctcagccaccagcttcctaccccttaccaggctctccccttgctgccggcgtgttacccagccagaactccagtgtgctcagcacagcagcaacttctccccagccagcgagcgcaggtatcagccaggcccaggcaactgttcctcctgcagttcctacccacaccccaggccctgccccgagcccaagccctgccttgacacacagtaccgcgcagagtgacagcacctcttacatcagtgctgtggggaacacgaacgctaatgggacagtagtgccaccgcagcagatgggctcaggtccttgtggttcttgtgggcgaaggtgcagctgtgggaccaatggaaaccttcagctaaatagttactattatcctaatccaatgcctggaccaatgtaccgagtcccttcattctttactctgccatccatttgcaatggcagctacctcaaccaagcacatcagagcaatggaaaccaacttcctttttttctgcctcagactccatatgcaaatggactggtacatgacccagtcatggggagccaagccaactatggcatgcagcagatggcaggatttgggagattctatcctgtatatccagcacctaacgtagttgccaacaccagtggttcggggcccaagaagaatgggaatgtctcatgttacaattgtggtgtaagcggacactatgcacaggactgtaagcagtcgtccatggaggccaatcaacaaggcacttacagactgagatacgcacctcccctccccccttctaatgatacgttggattctgcagactgaaacgagtaaagcttgcctacttaatacactcaagtgtggggagtcatggggtgtggaggggaggaaaggaaaggtattttgtttctttgtctatacatttcctagatttctatgcagttgggatttttcatttctcttgtaccaatgtccaaaacaagaaagaatgcaatgcttttgagcctctggtctcctggttcaacaacaggcttatatgtatgatacatgtaatttaaaccttcagacaaacttaaatgttggtgcgtgcttttttttttttttttacactgaatacttgctgtgtgcaatgtttactgaatctttaaaactgtgtatttgaccttttttttacaacactggtgacagtcatatggttttgaaaaaaaaaagaaattttgcttcttcccagcttttctcactttcaccctaaacgacacttcctccccagccagcctcactctgtctccggcccgcagcaggagcagccagcagtgcattcaccccacttttgtaaactgctctgcatataaaccaagggcagaatgtttcaccctgatcttatgggaggaatcaaactcccaaaatagtgtgtatatatgtaataaacagcgtcacgtaaatacatatatgcagtgcttgttgtccaaatagaaatgaaaataagtggaagagagaggaagaagtcaaaccatatgaaactgaaaaaatatgacgtacgaaatggacaaaaagctttttctgaaaccaactttttacttccatcatccttttttagcctgttgcttcagagagacacaaagtgaacacactggtgtgaatgtcgctctctgtgtgcttgtgtttgtaatgaaagtctacagccaattttacttgtctaccaccgtgttgtgctcaaagagacactacttgagtgaagatttcttctttccctgtaccagctgttacagtgttacgttgtgtttaaaatgtgtatggtttattgcaatctgaacagagctatgggtttctaccataagtcaggttgtttgttccctaacctgtctctcatagcaaagtcacttttataacagtttaccactatgcttgattataatgtgaaaggcggaattctgagtgtgttaagatggtattaatcatgtcggtgtcatgtcactaagtttaatgctgctgtttttaaaaaaaaaaaaaagtttttttaaaaagccaatctatgtactaaattgcttccaggtaatttttgatttcctaaagtgcactgaggttatctggaagattgggtgtattttttggtgactgctgcattcatcagcaatgaacagtttccactgtatagtcctaggggtcagggggtgggggtttcattttccattcctcagcacagagcagaaatgatagatttttattgtttggagtaacgttggtatgcagcagaggaacgtaaacatttggtcttggttcagaagcctaacagattgctagacaagagaaaaaacttgaagaaaaaagaagcttaatttcatgcttcataagtagcatttatatttatagcaccaatgtacattttgaaactttctttcaggggtgggagttatggggaaggggtgggtgtgaaggggtagatgaaagctttaatttagaaagaaagttcaagtaaaggaaattattttgattaaatatattttatttgatctgggtatttttggaccacattattaaattaattgttaagctgcagttgagttgttcaagtgagagttttgataagccacttatgggccgcgttgtgaatcacttgccagttgtactttatggagcttattttatgatttaaaatactgtactgtacataggaggtatgttaccttctccttatttgtatgtttaccatatactttgatatttgaaatgttatgtactggaaaggccacttatatttctagaacagattggattttatgcaaccttttttccttgaattaacagcaataaaaaaatgaaaaacagctt

SEQ ID NO: 204345 - DNA, 4765 bp, Homo sapiens
  Payload ID: 20302
  Gene Name: zinc finger, CCHC domain containing 2
  Uniprot ID: Q9C0B9
  ENST ID: ENST00000586834
  CDS Start-End: 192-2765
gcttgcggctctcacactgtgcctttgtgcccatagtgtgcagtcacctattggacctctaaaaattgccactaaaatggttgttagtaaaatgagaagacctaaatctgtgattattactcttagtccatggtttaagttaacgtatctccctctttctcatctagaacaactctgctcatggtgattacatgcaaaataacgagagcagcttaatagagcaagctccaatacctcaggacggacttaccgtggcacctcacagagctcagcgagaagctgtacacattgagaagataatgttgaaaggagtccagagaaaaagagctgacaaatactgggagtacactttcaaagtaaattggtctgatctttcagtcacaacagtaacaaaaacccaccaagaactacaggaatttctactgaagcttccaaaggaactgtcttcagagacttttgacaagaccatcttaagagccctgaatcagggttccttgaaaagggaggaacggcgacatcctgacctagagcccatcctaaggcagctattttcaagttcatcacaagcttttctacaaagtcagaaagtacacagcttctttcagtccatatcatcagactccctacacagtatcaataacttacaatcctctctgaagacttctaagatattagaacacttaaaagaagacagctctgaagcttcaagtcaagaagaagatgtgttgcagcatgccataatccacaagaagcatactgggaaaagtcccattgtgaacaatattggtacaagttgttctccattggatgggcttaccatgcaatattctgaacagaatggaattgtggattggaggaagcaaagctgtaccaccattcaacacccagagcactgtgtgacctcggctgaccagcattctgctgaaaaacggagtttatcttcaataaataagaagaaaggaaagccacaaacagaaaaggagaaaattaagaaaactgacaacagattgaatagtagaataaatggtattagactctccactcctcagcatgcccatggtggtactgtgaaagatgtgaatttggacattggctctggacatgacacatgtggagaaacatcttcagagagttacagttctccatctagtccccgacatgatggaagagaaagttttgaaagtgaagaagagaaagacagagacacagacagcaattctgaggattctgggaatccatcaacaactaggtttacaggttacggttctgtcaaccagactgtcactgtcaagccacctgttcaaattgcttcactaggaaatgagaatggaaaccttttagaagatcccttaaactcacccaagtatcagcatatttcttttatgccaacgttacactgtgtcatgcacaatggtgcccagaagtctgaagttgtcgttcctgcacccaaacccgctgatggcaaaaccatagggatgcttgttcctagtcctgttgctatttctgcaataagggagtctgcaaattcaacccctgttggaatactagggccaacagcttgcactggagaatcggaaaagcaccttgagttactggcttcccctttacctattccatcaaccttccttccacacagtagtactcccgctttgcatcttacagttcagaggctaaagttgccaccaccacagggatcttctgagagctgcacagttaacatcccacaacaaccacccggaagcctgagcatcgcatcaccaaacactgcctttattcctatccataacccaggtagtttcccaggctctcctgttgctaccacggaccccatcacaaaatctgcatcccaagtggtaggactcaatcaaatggtgcctcaaattgagggaaacacagggacagtccctcagcctaccaatgtgaaggtagttcttccagcagctggcctctcagctgctcagccaccagcttcctaccccttaccaggctctccccttgctgccggcgtgttacccagccagaactccagtgtgctcagcacagcagcaacttctccccagccagcgagcgcaggtatcagccaggcccaggcaactgttcctcctgcagttcctacccacaccccaggccctgccccgagcccaagccctgccttgacacacagtaccgcgcagagtgacagcacctcttacatcagtgctgtggggaacacgaacgctaatgggacagtagtgccaccgcagcagatgggctcaggtccttgtggttcttgtgggcgaaggtgcagctgtgggaccaatggaaaccttcagctaaatagttactattatcctaatccaatgcctggaccaatgtaccgagtcccttcattctttactctgccatccatttgcaatggcagctacctcaaccaagcacatcagagcaatggaaaccaacttcctttttttctgcctcagactccatatgcaaatggactggtacatgacccagtcatggggagccaagccaactatggcatgcagcagatggcaggatttgggagattctatcctgtatatccagcacctaacgtagttgccaacaccagtggttcggggcccaagaagaatgggaatgtctcatgttacaattgtggtgtaagcggacactatgcacaggactgtaagcagtcgtccatggaggccaatcaacaaggcacttacagactgagatacgcacctcccctccccccttctaatgatacgttggattctgcagactgaaacgagtaaagcttgcctacttaatacactcaagtgtggggagtcatggggtgtggaggggaggaaaggaaaggtattttgtttctttgtctatacatttcctagatttctatgcagttgggatttttcatttctcttgtaccaatgtccaaaacaagaaagaatgcaatgcttttgagcctctggtctcctggttcaacaacaggcttatatgtatgatacatgtaatttaaaccttcagacaaacttaaatgttggtgcgtgcttttttttttttttttacactgaatacttgctgtgtgcaatgtttactgaatctttaaaactgtgtatttgaccttttttttacaacactggtgacagtcatatggttttgaaaaaaaaaagaaattttgcttcttcccagcttttctcactttcaccctaaacgacacttcctccccagccagcctcactctgtctccggcccgcagcaggagcagccagcagtgcattcaccccacttttgtaaactgctctgcatataaaccaagggcagaatgtttcaccctgatcttatgggaggaatcaaactcccaaaatagtgtgtatatatgtaataaacagcgtcacgtaaatacatatatgcagtgcttgttgtccaaatagaaatgaaaataagtggaagagagaggaagaagtcaaaccatatgaaactgaaaaaatatgacgtacgaaatggacaaaaagctttttctgaaaccaactttttacttccatcatccttttttagcctgttgcttcagagagacacaaagtgaacacactggtgtgaatgtcgctctctgtgtgcttgtgtttgtaatgaaagtctacagccaattttacttgtctaccaccgtgttgtgctcaaagagacactacttgagtgaagatttcttctttccctgtaccagctgttacagtgttacgttgtgtttaaaatgtgtatggtttattgcaatctgaacagagctatgggtttctaccataagtcaggttgtttgttccctaacctgtctctcatagcaaagtcacttttataacagtttaccactatgcttgattataatgtgaaaggcggaattctgagtgtgttaagatggtattaatcatgtcggtgtcatgtcactaagtttaatgctgctgtttttaaaaaaaaaaaaaagtttttttaaaaagccaatctatgtactaaattgcttccaggtaatttttgatttcctaaagtgcactgaggttatctggaagattgggtgtattttttggtgactgctgcattcatcagcaatgaacagtttccactgtatagtcctaggggtcagggggtgggggtttcattttccattcctcagcacagagcagaaatgatagatttttattgtttggagtaacgttggtatgcagcagaggaacgtaaacatttggtcttggttcagaagcctaacagattgctagacaagagaaaaaacttgaagaaaaaagaagcttaatttcatgcttcataagtagcatttatatttatagcaccaatgtacattttgaaactttctttcaggggtgggagttatggggaaggggtgggtgtgaaggggtagatgaaagctttaatttagaaagaaagttcaagtaaaggaaattattttgattaaatatattttatttgatctgggtatttttggaccacattattaaattaattgttaagctgcagttgagttgttcaagtgagagttttgataagccacttatgggccgcgttgtgaatcacttgccagttgtactttatggagcttattttatgatttaaaatactgtactgtacataggaggtatgttaccttctccttatttgtatgtttaccatatactttgatatttgaaatgttatgtactggaaaggccacttatatttctagaacagattggattttatgcaaccttttttccttgaattaacagcaataaaaaaatgaaaaaca

SEQ ID NO: 204346 - DNA, 1877 bp, Homo sapiens
  Payload ID: 20302
  Gene Name: zinc finger, CCHC domain containing 2
  ENST ID: ENST00000588676
  CDS Start-End: 1-1135
gggactcgggccgcctgttgctggtggagcggcggcgggggcgggtatgccgggcggcggcggggggccctcggcggcgctgcgcgagcaggagcgggtatacgagtggttcgggctggtgctgggctcggcgcagcgcctggagttcatgtgcgggctgctggacctgtgcaacccgctggagctgcgcttccttggctcgtgcctggaggacctggcgcgcaaggactaccactacctgcgcgactcggaggccaaggccaacggcctctcggacccggggccgctggccgacttccgagagcccgcggtgcgctcgcgcctcatcgtctacctggcgctgctgggctcggagaaccgggaggccgctggccgtctgcaccgcctgctaccccaggtggactcggtgctcaaaagcctgcgcgcggcccggggcgagggctcgcggggcggcgcggaggacgagcgcggcgaggacggcgacggcgagcaggacgccgagaaggacggctcaggcccggaaggcggcattgtggagccccgggtcggcggcgggcttggctccagggcccaggaggaactgctgctgctcttcaccatggcctcgctgcacccggctttctccttccaccagcgggtcaccctgagggaacacttggagaggctccgcgccgcgctccgcgggggccccgaggacgcggaggtggaggtagagccgtgcaagtttgccggccccagggcccaggtaaggcgcacggagcctccctggactcgcggtgcgatcgctgccccggcggcctccccggcctcgctctcggacgccccttgcccgagccccagcccggcgcaggtggctcggaatccccacccggcagctcccagcgccagagggctgagcttcgtctcgctgggccgctccgttccactcccccaccccaccccacaccccggcagacacagccacccgccatcacagaatgctctagaagtcccttccgtgccacggtgttgccacggaagacgtggagctccccgcccggggcccctctcggaggaaaagtgtcgggacgtttttggctctgagcatctcagcgctcggtgcgggagccgccgggcgctggaggaacctgtgtgagagccagccgcagtgagccccaggcagcgccgtccttccccgcctgcctggccggggctccgcctcccgtctccgggctctgccgggccctcggcggggtgtcctgaaggtgcgctcccggcgagctgcccttgtctttggcacagagggactttttttgcccagtgtgtgcctgagttaaaaggggtcgtacgggtccttgtggcttctgctctgagggcttgtgttcccagcagacatctgacgtagagacctgcgaatggatctgagatgagtagtaacgcaggttgtccggggagagaaaccttttctagcgcggcctgggatgctttttccctccggcacacgcgctttctcacgggcttgattcctgcctacagattggggttccgggatatttgttgagcgtttacgataggcgttaatgttgcccaaaagaatcacttaaacaccaaaatgtagtagacgagaatccagatgagacacttgtcgcaaacattaaagatgaattttttttacagccatgaaagcaatttaatgataattagggtccagtgagtctttgaggaggacttttccatgggaaggtggggagtaggtttcagtaagagtgagaactgtaaagtgagattatttgtggggtcacaggcttttgaaaggtgttgatttggatgccatgtttttcagcttaggtgatctctaggagataatggaaaaggggattttctcctctccttgcttg

SEQ ID NO: 204347 - DNA, 673 bp, Homo sapiens
  Payload ID: 20302
  Gene Name: zinc finger, CCHC domain containing 2
  ENST ID: ENST00000591145
  CDS Start-End: 1-321
ttttttctgcctcagactccatatgcaaatggactggtacatgacccagtcatggggagccaagccaactatggcatgcagcagatggcaggatttgggagattctatcctgtatatccagcacctaacgtagttgccaacaccagtggttcggggcccaagaagaatgggaatgtctcatgttacaattgtggtgtaagcggacactatgcacaggactgtaagcagtcgtccatggaggccaatcaacaaggcacttacagactgagatacgcacctcccctccccccttctaatgatacgttggattctgcagactgaaacgagtaaagcttgcctacttaatacactcaagtgtggggagtcatggggtgtggaggggaggaaaggaaagttccaatttgagccgctgtgaaaaaggcctccaccagcctctcaccagaagagattgctcattggaacgcaatgccacctggtgggggacgaggacagtgcgagcaagcagatgttatttcctactgacctaatttagagaacattaaacagtggaagtttccagagaaaacagccatcaaagaaggttgagagtgagaattaagagacactggagaagatcaagagaatgtgccctgaagacaacaacaaaaatcaataaaagatttcaagaatgaaa

SEQ ID NO: 204348 - DNA, 5652 bp, Homo sapiens
  Payload ID: 20302
  Gene Name: zinc finger, CCHC domain containing 2
  ENST ID: ENST00000585873
  CDS Start-End: 1-3295
gccgggcggcggcggggggccctcggcggcgctgcgcgagcaggagcgggtatacgagtggttcgggctggtgctgggctcggcgcagcgcctggagttcatgtgcgggctgctggacctgtgcaacccgctggagctgcgcttccttggctcgtgcctggaggacctggcgcgcaaggactaccactacctgcgcgactcggaggccaaggccaacggcctctcggacccggggccgctggccgacttccgagagcccgcggtgcgctcgcgcctcatcgtctacctggcgctgctgggctcggagaaccgggaggccgctggccgtctgcaccgcctgctaccccaggtggactcggtgctcaaaagcctgcgcgcggcccggggcgagggctcgcggggcggcgcggaggacgagcgcggcgaggacggcgacggcgagcaggacgccgagaaggacggctcaggcccggaaggcggcattgtggagccccgggtcggcggcgggcttggctccagggcccaggaggaactgctgctgctcttcaccatggcctcgctgcacccggctttctccttccaccagcgggtcaccctgagggaacacttggagaggctccgcgccgcgctccgcgggggccccgaggacgcggaggtggaggtagagccgtgcaagtttgccggccccagggcccagaacaactctgctcatggtgattacatgcaaaataacgagagcagcttaatagagcaagctccaatacctcaggacggacttaccgtggcacctcacagagctcagcgagaagctgtacacattgagaagataatgttgaaaggagtccagagaaaaagagctgacaaatactgggagtacactttcaaagtaaattggtctgatctttcagtcacaacagtaacaaaaacccaccaagaactacaggaatttctactgaagcttccaaaggaactgtcttcagagacttttgacaagaccatcttaagagccctgaatcagggttccttgaaaagggaggaacggcgacatcctgacctagagcccatcctaaggcagctattttcaagttcatcacaagcttttctacaaagtcagaaagtacacagcttctttcagtccatatcatcagactccctacacagtatcaataacttacaatcctctctgaagacttctaagatattagaacacttaaaagaagacagctctgaagcttcaagtcaagaagaagatgtgttgcagcatgccataatccacaagaagcatactgggaaaagtcccattgtgaacaatattggtacaagttgttctccattggatgggcttaccatgcaatattctgaacagaatggaattgtggattggaggaagcaaagctgtaccaccattcaacacccagagcactgtgtgacctcggctgaccagcattctgctgaaaaacggagtttatcttcaataaataagaagaaaggaaagccacaaacagaaaaggagaaaattaagaaaactgacaacagattgaatagtagaataaatggtattagactctccactcctcagcatgcccatggtggtactgtgaaagatgtgaatttggacattggctctggacatgacacatgtggagaaacatcttcagagagttacagttctccatctagtccccgacatgatggaagagaaagttttgaaagtgaagaagagaaagacagagacacagacagcaattctgaggattctgggaatccatcaacaactaggtttacaggttacggttctgtcaaccagactgtcactgtcaagccacctgttcaaattgcttcactaggaaatgagaatggaaaccttttagaagatcccttaaactcacccaagtatcagcatatttcttttatgccaacgttacactgtgtcatgcacaatggtgcccagaagtctgaagttgtcgttcctgcacccaaacccgctgatggcaaaaccatagggatgcttgttcctagtcctgttgctatttctgcaataagggagtctgcaaattcaacccctgttggaatactagggccaacagcttgcactggagaatcggaaaagcaccttgagttactggcttcccctttacctattccatcaaccttccttccacacagtagtactcccgctttgcatcttacagttcagaggctaaagttgccaccaccacagggatcttctgagagctgcacagttaacatcccacaacaaccacccggaagcctgagcatcgcatcaccaaacactgcctttattcctatccataacccaggtagtttcccaggctctcctgttgctaccacggaccccatcacaaaatctgcatcccaagtggtaggactcaatcaaatggtgcctcaaattgagggaaacacagggacagtccctcagcctaccaatgtgaaggtagttcttccagcagctggcctctcagctgctcagccaccagcttcctaccccttaccaggctctccccttgctgccggcgtgttacccagccagaactccagtgtgctcagcacagcagcaacttctccccagccagcgagcgcaggtatcagccaggcccaggcaactgttcctcctgcagttcctacccacaccccaggccctgccccgagcccaagccctgccttgacacacagtaccgcgcagagtgacagcacctcttacatcagtgctgtggggaacacgaacgctaatgggacagtagtgccaccgcagcagatgggctcaggtccttgtggttcttgtgggcgaaggtgcagctgtgggaccaatggaaaccttcagctaaatagttactattatcctaatccaatgcctggaccaatgtaccgagtcccttcattctttactctgccatccatttgcaatggcagctacctcaaccaagcacatcagagcaatggaaaccaacttcctttttttctgcctcagactccatatgcaaatggactggtacatgacccagtcatggggagccaagccaactatggcatgcagcagatggcaggatttgggagattctatcctgtatatccagcacctaacgtagttgccaacaccagtggttcggggcccaagaagaatgggaatgtctcatgttacaattgtggtgtaagcggacactatgcacaggactgtaagcagtcgtccatggaggccaatcaacaaggcacttacagactgagatacgcacctcccctccccccttctaatgatacgttggattctgcagactgaaacgagtaaagcttgcctacttaatacactcaagtgtggggagtcatggggtgtggaggggaggaaaggaaagttccaatttgagccgctgtgaaaaaggcctccaccagcctctcaccagaagagattgctcattggaacgcaatgccacctggtgggggacgaggacagtgcgagcaagcagatgttatttcctactgacctaatttagagaacattaaacgtaagagagggaacatttggggttggaagcctgtgcccaaaaccttaaagagtgcaggcagctggccataaaagcagcttgagcaaacccctcattcagccgttgaaatgtgtgtgtgaacactttaaaggtttcctctgtgcttttcctgcgtgcatttggtcatcacagctgtgaagtggggtgggaatgtttcccctcgttttctaggagagaaattttgggttcagtgagacgaagtgctgcagacaggcccatggtgatgctcaggcctctgcttgaagttggtgctcacttcctggcaccacttcctgcccccaccagtgcttctggcagagcccagggcagtggctttatggaactgtgtaaggtgataggaacccacaggtggaatggccgtgtggcctctggactgaggagggctggaccaggttgtgggcacgcctggaacacacgccacatcctatcccatagcgaggcctcttccttgtggctctcgaaggatttgaggacgcgggagggtgaaatgtttccagagaaatatccaggacttttagaactaggctttcaaaagcatttacctgtcagataaattcaagtggcatcaatgcagattttaaatgtgtacagatatctccactcgcacgctgagttgtgcttcacacaagttttgcgcacggagtattccattaaatctactgaagcagtggggcaaggagaaaggagaggtgactgctgatgtttttaaagctctgacagtcacatatagattgtcccaggtacccctgctgcccccaagacactccaaaggcaaagatggatggtgacaaagtaaccttcatgcagaaacaagaacagtcacccccaacaacaagccctgctgaaggtgaagaatgccaccaggctgcctggcagttactgagtgcttattcctgctagcctattggagtcacgtcatatttgttacatggtaacttaattgtgccttccacgccttcacaaaatcagttgtacaagagaaggcacccaccacagtccatgtgacctttctcggtctgatttacatagtggggatgatgacactcgcgttgtagagtagttgcacgattaaacctggcacacagacataaagcactcaatgtctgacacatagtggactctcaagaagtttgtcatgcaggggacacttgaatgcccagtatgggccagacagcatcagctcatttcagtcccacagccctgtgagggaggaactctgccctgttttacagttagggaaattgaggcacaaaggctaagaagtcgatatccaagggcacagaatgattgggtgacggtgagcccaggcagtgtgacaacaaggttgctgccccacgccacctctgtctttcgtgggtatgtcggtgtgaggtgtaggcagccctgcactggcattcagcaggcgggactcccgggcaggctcttctgcgaacactcatgggccaccagccctttctggaacttgccttttttttttttttttacctgaaagctacgtgaatcgttggtaaattggtgtaaaaatggaactgagtcatctcaaaagttcctttcagttctaaaattctgtgaattgaagcctactttttcactttaaatgatttattgggtttacagttctttacgctttctgattgaactgatttgaagttcttatttcgtgtgttggggaacacacccccaacccgtcacagcgtggccgtgggtgggagatggacgttaggctggccagtcactagggggcagcatcagcacgggtctggctgtccctggccttagggagcagtttctgcccctcctgccccgtcagaaagtctcggactcctctctgcttgcatgtgtaaagttttcattttcaggggccttttagtcaaaaaaaataaagctgtatgacttagtgctgaaggatatgaattaggcgtagctcttgggttggcagcataaaccaaggggcatcaacccaccaccgacaagctaagaatggtttttacatctttaaatggttgaaaaaggaaaaagaatgtttagtgacacgtgaaaaatacatgaaattcaaacttcagtgtctacaaataaagtgcattagcacacggtc

SEQ ID NO: 204349 - DNA, 704 bp, Homo sapiens
  Payload ID: 20302
  Gene Name: zinc finger, CCHC domain containing 2
  ENST ID: ENST00000621048
  CDS Start-End: 118-704
ccaggctttgggctagcgccggagacttccaggcggactcgagaaccacgtggatgctgcgctgggccgtactgggccgtggcgataaccctgaacaactctgctcatggtgattacatgcaaaataacgagagcagcttaatagagcaagctccaatacctcaggacggacttaccgtggcacctcacagagctcagcgagaagctgtacacattgagaagataatgttgaaaggagtccagagaaaaagagctgacaaatactgggagtacactttcaaagtaaattggtctgatctttcagtcacaacagtaacaaaaacccaccaagaactacaggaatttctactgaagcttccaaaggaactgtcttcagagacttttgacaagaccatcttaagagccctgaatcagggttccttgaaaagggaggaacggcgacatcctgacctagagcccatcctaaggcagctattttcaagttcatcacaagcttttctacaaagtcagaaagtacacagcttctttcagtccatatcatcagactccctacacagtatcaataacttacaatcctctctgaagacttctaagatattagaacacttaaaagaagacagctctgaagcttcaagtcaagaagaagatgtgttgcagcatgccataatccacaagaagcatactgggaaaagtcccattgtgaa

SEQ ID NO: 204350 - DNA, 906 bp, Homo sapiens
  Payload ID: 20303
  Gene Name: zinc finger, CCHC domain containing 24
  ENST ID: ENST00000372333
  CDS Start-End: 52-738
acccatctgtggccttcacttcctccccttgtgggggttttctctgcaaagatgcaagaggtgtgttcgggggaggacacacatgggggtcactttccttccagacctgggcacaccggcgctgagcaacagtgtgtacaagggcgcctcaccctatggctccctcaacaacatcgccgatggcctcagctccctcaccgagcacttctcagacctgaccctcacctccgaggctcgcaagcccagcaagcggcccccacccaactacctgtgccacctgtgcttcaacaaaggacactacatcaaggactgcccccaggcacgccccaaaggcgagggcctgactccataccagggcaaaaagcgctgcttcggcgagtacaagtgtcccaagtgcaagagaaaatggatgagcgggaactcctgggccaacatggggcaggagtgcatcaagtgccacatcaacgtgtatccacacaagcagagacccctggagaagcccgacggcctggacgtgtccgaccagagcaaggagcacccgcagcacctctgcgagaagtgcaaggtcctgggctactactgccgtcgcgtgcagtgacgggctgcccgcccgcacccagagccaccccccgccagcccgaggagacgctgcttccctgtgctactccgaggggctgcgtgtcgccctgtgcatggggtgccctcgcaggcctgcggggctgggccgggggctcttagcgtccttgtcttgtgtgtgttgacaaacagtgttactgacattgctgccccccacaggccagggaaagcagggagtctggggctttttgcaggcgggcctggggtctcagtggaggggacaaaggcaagcaaaagcccatgtccaggagccctgggtgtccccacagg

SEQ ID NO: 204351 - DNA, 4933 bp, Homo sapiens
  Payload ID: 20303
  Gene Name: zinc finger, CCHC domain containing 24
  Uniprot ID: Q8N2G6
  ENST ID: ENST00000372336
  CDS Start-End: 188-913
cgcagtcggggggaggcggcggcagcggcagcggctgcgggcagcgcgcggggcgcagggcgcggggcgatcaccgtcggggctcgggaggcgggcagtgggcacaggctccccggtgcccgcccctccgctgcggaggggggccgcgagcgggcggccggggaggggccggcaccgccgccacaaaatgagcctgctgtcggccatcgacacgagcgccgcctcggtgtaccagcccgcccagctgctcaactgggtctacctgtcgctgcaggacacgcaccaggctagcgccttcgatgccttccggcccgagccgaccgccggcgccgcacccccggagctggccttcggcaagggccgccccgagcagctgggctcgcccctgcactccagctatctcaacagcttcttccagctgcagcgcggagaggcgctgagcaacagtgtgtacaagggcgcctcaccctatggctccctcaacaacatcgccgatggcctcagctccctcaccgagcacttctcagacctgaccctcacctccgaggctcgcaagcccagcaagcggcccccacccaactacctgtgccacctgtgcttcaacaaaggacactacatcaaggactgcccccaggcacgccccaaaggcgagggcctgactccataccagggcaaaaagcgctgcttcggcgagtacaagtgtcccaagtgcaagagaaaatggatgagcgggaactcctgggccaacatggggcaggagtgcatcaagtgccacatcaacgtgtatccacacaagcagagacccctggagaagcccgacggcctggacgtgtccgaccagagcaaggagcacccgcagcacctctgcgagaagtgcaaggtcctgggctactactgccgtcgcgtgcagtgacgggctgcccgcccgcacccagagccaccccccgccagcccgaggagacgctgcttccctgtgctactccgaggggctgcgtgtcgccctgtgcatggggtgccctcgcaggcctgcggggctgggccgggggctcttagcgtccttgtcttgtgtgtgttgacaaacagtgttactgacattgctgccccccacaggccagggaaagcagggagtctggggctttttgcaggcgggcctggggtctcagtggaggggacaaaggcaagcaaaagcccatgtccaggagccctgggtgtccccacaggctcgcctctgagagcctctttggggtgagcagccttgtattggccacaggtgcactaaattgactgtgaatcccaaacctccccagaccagccaggccgcctgcccccacccagaaccttccggtttgccctgtatggaaagccactctcagaaatccctctttcctgagtcagcaatcgtggcaaggggacatgtgttccaacagcggctggggagtggacctctctgtcccttgcccaccttaagccccaaatccagaccccctctgacatcactggcattgcacctgggtgtgcccccctccccacgctatggacccagataggaggggttaggcatgggggaggcacagaatgctggagagatgcgtcctggtgaacgtggggcagcccctcccacgacccccaccagactgccttaggttttgtcagccccactccctttccttcccctctgcctcccacccactctgggggtccacatcaagatagctgggcccagtgtggaagcccagcgtgtctgttccagcagaaaggacacaagcctggtgttctggagacctcggctcaagtctttgccctgctgccgacgcattgtgtcaccttgggcaaggacttcgcatctccaggcctcagtttccccattagttaaatgacagcataacactagagagcagagggcccatttcagctctgttgttctgggattcaggctggccggtgctgtgtcctggagctttatttggggagtttcacccagaatggtgggagaaacctcccaggtgccaggtaccccgcatcgtgacccttcacttggtgtcttaggaagtcaagctgagggatgctgagtcctcccctgctggcccctgcagccccagccctgcttttcatcccccacccctgcaaacatggaggagccccctccttctcacctcggtctcctagcccctgacatggagaaccctgagacaagccacagaacccctcttttctaaaatggagacaataatttcctacctcccaagggagcagagaggcctcgtggcacgtccgtggccagggagcccactgtcctggctggcggcgggatcgtgcgctcctctgtctcccggatgagaagccccgtttccatggtcttgacccttcctttctcccggctgtcagaactgggtctcttgattttgcccctacattatgcctctgtgggaaaaaaaaaaaatcagaccaagaaatgagcctgaaattcagtgtttaccatggctcaaggatgcccatctggtgtccagttgccttttgtattcaaatgaaaatgctttgtacaactgaggagttacagtgaagtgttaaccaggggtccagggagcgagttgaaaagatggagtgagtgtatttgcagccagggagctgcagggtggatttgaggggccataccctctgagcacttaaaaaaggtatttgctccaggccaggcagcaggctgtggacacccttgccaccactggggactgccactgaggactccccgagcacgttgttccccgtcttctccaaggtgttgaggtgagctggggttggccccggcccaggcttctgtcccaaggagaagctgccactgacagtcatcctaccgcactgctaaagagaatgttcgcagtggtgggcggcgtgcctgtgccaacccttccagggacccggccatgggggaccttggcccaaggatgcctggggcctgccagctgtgctgcaaaggtggggggcccacaccctaaaactaacccaggccccagaccactggaggccagggcttccctgcacgggctaaggggagttgggatatcaccccaaagtgaccttgccagtgagctgttcagcaggtagccactgccctgccatctgtgcagagccagccaccttgggggctggggttcccgctttgaggcccaccttccatactccccttgactcggctctggctgaactggggaactctcttgtggtcagcaaagcccctgccatgcaggccaggtgccattgagaattaagtgctcagagggccaggagcccaggggatgggaaagtgtgtggttttagtacgttcaaaagggacaatcgcttgcagttggtagatctagcgatctagttgggagataatggtgtttaccccatatgaagtattcaatagttctacttgtgaatttgtatttattttgagttatacttgacacagaattccttttttaaaaaaatatgtgtgtattttggaaaaaaaattcatagatgttaaaatttctgcatggttaccagtttttctcacaacactgaatttggtagcttttcccgaaaaaatcttcacagtaattttttgtctgtatatatttgagggcctttttttaaaaaaaaaaaaagaaaagaaaaatataattgtttgatttttgagattaaaacaaacaaaaagagaggcattttcaaaatttcagaactttcaggagggcaagagaatatcaaacaaagatttctggaagtattttgccaaccttctggttgagctgcaagaaaatatttatggtgagaacttttctgtttcccgttattgggtttttggttggtttttgtttgttttttactatgctttggtctgtaaaaatatgcaactgaactacattcagaaggaaatattgtctacatagaatattatatgaagttggtacataattctgatgaggaaaaaaaatctttgcaattctttaagccatattgttgtttttctgtgttgttttccctggatgaaaatatcagtattaagtagacagcatattattcaagtgtttagacttattaatatgttcttgtcctgtatttatacatatgtgtattttggaaagtattgccttttttaagggaagctataattcgatacatagtgaaaaagggaatggtgacccctttgtgcctcttccactgaggataacaaacagcattgtaatccattctcttgcaccttcttcttcttatcttgttattacggttttattaattttgtagagggacagggagtgggcaaggggaagaagcagcttatttgactaaccagcccctctgtggtccaccagcgtcttggcttggtgggagggctctcaatcagcagggccccaggagggaagaagaagtggggcaaagcctggcctcgccgctcgggagctttgccatctgagccacgcctcctccaggccatgctccttgaacttggaaatgtcaaccggagcccttacaccagccctccagcatctaatagacttgaatctactctaaacgaatatttaatccaacctcactacattgtagctcagtccaacgactaaccctgaaatgggggtgttccagccttcagcgagatggccaagcggtcccctgggggctgtggcagcgggcttatccttctctgttgccaaccttgccgtccgacctcctccgcccccatgcggtgaccccgtccgtgtctgtgtctgtccatacgtgtgagtccagctaaaaagacaaaacagaacccgtgggcccagctcggaaggtgcgtggagaaggctccgacgtctccgaagtgcagcccttgggatggcattccgttgtgtgccttattcctggagaatctgtatacggctcgcctatagaaatatagcctcttcatgctgtattaaaaggacttttaaaagcaaaa

SEQ ID NO: 204352 - DNA, 3354 bp, Homo sapiens
  Payload ID: 20304
  Gene Name: zinc finger, CCHC domain containing 3
  Uniprot ID: Q9NUD5
  ENST ID: ENST00000500893
  CDS Start-End: 620-1831
tagtgtgacagagtaaaattttaatgataaaaagttaatggtaaaatgttcactgtaaaactttcaacttttcttcttgaaaacgtgcataatccgacgtgggaaaaaaaataacgcattgcagtcagttctggggaaacggaaagctaagttttaattttgctattgcttttgcttttttaacagaaaaggtacaaaaaagaaaaaatgggagagatgttgccgaactccgtcccgcctgtgggctgtgggccgttagcaaagctgctagcatgaaatcgtcgagcaccgcttgcgaaacgccaaatcctcgagagcgaggccggaggctgccaaacccgcgctggggaaagggccgcctccgggcgccccatcccgctgcggacggaggtgaggttggagcgagcgctggcggaagagaggctcagcgcagggggcgcagagccggcgctggccaatatgcgccgcatgtgatacctttgagggcgcggcgggggagggtagcgtcaaatttcaaaaaaaaaaaaaaaccaaacccacacagccccggcgggcgggcgcgcgcgatgggcgccctttggctgcgggagcgagtggaggatgctgggaaggaggtaaaatggccaccggcggcggcgcggaggaagagaggaaacgggggcggccgcagcttctgccccccgcgcggcccgcggcccggggcgaggaggccgacggcggccgcgagaagatgggctgggcccaggtggtgaagaatctagccgagaagaagggcgaattccgcgagccgcggccgccgcggcgggaggaggaaagcggcggcggtggagggagcgccgggctcggcggccccgcgggcctggcggcgccggacctcggcgacttcccaccggctggccgcggggatccgaagggccgtcggagagatccggccggcgaggcggtggacccccgcaaaaagaagggcgctgcggaggcgggcaggaggaagaaggccgaggcggcggcggccgccatggcgaccccggccaggcccggcgaggccgaggacgcggccgagcggcccctccaggatgagccggcggcggcggcaggcccgggcaagggtcgcttcctcgtccgcatctgtttccagggagacgagggcgcctgcccgacccgggacttcgtggtaggagcgcttatcctgcgctccatcggcatggacccgagcgacatctacgcggtcatccagatcccgggcagccgcgaattcgacgtgagcttccgctcagcggagaagctggccctgttcctacgcgtctacgaggagaagcgggagcaggaggactgctgggagaactttgtggtgctggggcggagcaagtccagcttgaagacgctcttcatcctcttccggaacgagacggtggacgtggaggacattgtgacttggctcaagcgccactgcgacgtgctggccgtgccggtgaaagtgaccgacaggtttgggatctggaccggggagtacaaatgcgagatcgagctgcgccagggggagggcggggtcaggcacttgccaggggccttcttcctgggggccgagaggggctacagctggtacaaggggcagcccaagacatgctttaaatgtggttcccggacccacatgagcggcagctgcacgcaggacaggtgcttcaggtgcggggaggaggggcacctgagcccttactgccggaagggcatcgtgtgcaacctctgtggcaagcgaggacacgcctttgcccagtgtcccaaagcagtgcacaattccgtggcagctcagctaaccggcgtggccgggcactaaacacccgcctgcctgccagggtgaacacacagccagcttatccctcttaagtgccaaaacttttttttaaaccattttttatcgtttttgaaggagatctttttaaaacctacaagagacatctctctatgccttcttaaaccgagtttactccatttcagcctgttctgaattggtgactctgtcaccaataacgactgcggagaactgtagcgtgcagatgtgttgcccctcccttttaaaattttattttcgtttttctattgggtatttgttttgtttcttgtactttttctctctctccttgcccccctcccgccctccccgccccataccttttcttcccctggattttcaccctttgggctgccttgctcatctttatgccccagcactaggtacggggcccaacacgtggtaggcactccatcagtgtttgctgaattgaaaacattgttgactgtggcttctatcagagtgtctaccttttgcagctcttcccctccctcatttaatttgctgcttttaatctacgtggtctgagaatttgtgaaaccagtgttgttagaagtgtatataatctgaatcaataagctctgaatggtggccaagggcctctcttatggcacaaagatgcatggacttcatgacagctcttttggtggctcagaagccattttttatagaatcatggaatctagaatattcctgctggaaagaacctgagagttggtttggaccaattccctggttttccagcagatgaaacaggcccaaagaggttaaatgactgggtgaaaatcacatagctgtctggtgccagagccagcctatagtagagtcccctgaccccaagcccggtgctcattccactacctctcacacttcacaacaatttcctcaacacttgagggcccagaaagtctgatctctccagaatgatcagcccagaggaatgctgagaaatcacctggaggagggagcagaaagagaaggtttttaaggaggggcttctgaatacttgggagatacggaacggaccaaggaccacactccagggtgcattcgttgctccctggggcaccacttctggattacagtgtgccaggtcctttggaggccctaccccttccccattcattgccaccagtgagaaatgggggtgcccctgtgtaaagaaacctaccaaaggtttacatttgcaccttagcctcaatagctacgaaccctagagaagcagctagctggagctcatgtgcaactcctgattctcaggagaaagatggattttaacccaaaattatgagtgagctgttaactctaaaatgtacttgggagataggccaagcgagaggtcatgggccaactaagtgttatccagtagaaaagacagtacactgcttttcttttagtgtttgcttttcctttgctatatgttttgctatttccttgtggcttagaatgtaaaattgattgttaaaagttttgttctgaataaatatttatcttttgtattgctaaaa

SEQ ID NO: 204353 - DNA, 2785 bp, Homo sapiens
  Payload ID: 20305
  Gene Name: zinc finger, CCHC domain containing 4
  Uniprot ID: Q9H5U6
  ENST ID: ENST00000302874
  CDS Start-End: 25-1566
ggctttcgggacggcggcgggaagatggcggcctccaggaatgggtttgaagccgtggaggcagagggcagcgcagggtgccggggaagctcgggaatggaggtggtgcttcctttggatcctgccgtccccgccccgctgtgccctcacggacccactcttctgtttgtaaaggtgacccaagggaaagaagaaactcggaggttttatgcctgttcagcctgtagagatagaaaagactgtaatttttttcagtgggaagatgaaaagttgtcaggagctagacttgctgcccgagaagctcataaccgaagatgtcagcctcccctgtcccgaacgcagtgtgtggaaaggtacttgaagtttattgagttgcccttgactcagagaaagttttgtcaaacatgtcagcagttgttgttaccagatgactgggggcaacatagtgagcatcaggttctgggtaatgtgtccattacccagttaagaaggcccagtcaactcctttatccactggaaaacaagaagacaaatgcccagtatctgtttgctgatcggagctgtcagttcttggtagacttactttctgccctcggattcagaagagtactgtgtgttggaacaccaaggttgcatgagctgatcaagttgacagcatcaggtgacaagaagtctaacattaaaagccttttattggatattgattttcggtattcacagttttatatggaagatagcttttgccattataatatgtttaaccatcatttctttgatggaaagactgcccttgaagtatgcagagcatttttacaggaagataaaggcgaaggaatcattatggtgacggatcctccgtttggtggcttggttgaacctctggctattacattcaagaagttaattgctatgtggaaagaaggtcaaagccaagatgacagtcacaaagaactacccattttctggattttcccctatttttttgaatcccgaatttgtcagttttttccaagcttccagatgctggattaccaggtagattatgataatcatgcactttataaacacggaaagacaggtcgaaaacagtctcccgtgcgtattttcaccaacattccgcccaacaaaataatccttcctactgaagaagggtacagattttgctctccgtgtcaacggtatgtttctctagagaatcaacactgtgagctctgtaattcttgcacatccaaggatggcaggaaatggaaccattgctttctctgtaaaaagtgtgtaaagccttcctggatccactgtagcatctgcaatcactgtgctgttccagatcattcttgtgagggccccaaacatggctgctttatttgtggtgaactggatcataaacgcagtacttgtcctaacattgctacatctaagagagctaacaaagctgtcagaaagcagaagcaaagaaaaagtaataagatgaaaatggagaccacgaaaggacaatccatgaatcatacatctgctacaaggagaaagaaaaggagggaaagagcccatcaatatcttggctcttaaatgtccagtgactggagaataagaaagatttatggtccaacctttgatgccattttctgaaagtgccacactggacttaaattcagctgcttccagaggtgtgcacctttctgagctagataacaggcaggtggcatttgctggtttacagtcccttatctgcctctctggagacatggggagttgttccatcttcagccagtttactagttctttcagcattcatttttcctcactttaagtctctcccagtcacattgttctatttttatgttttcattttttttgagatggagtcttgctctgtctcccaggctagagtgcaatggcacaacctcagctcactgcaacctctgcctcccgggttcaagcaattctcctgccttagcctcctgagtagctggaattataggcacatgccaccacgactggctaatttttgtatttttagtagagacggggtttcaccatgttggccaggctggtctcgaactcctggcctcaagtgatttgcctgccttggcctcccaaagtgctgggattacaggcatgagccacctcacccagctccggtcacattattctagcctttttatccaaaaaatgggcagaccattcttttgcagaagatgtcagaagaaaatgaaagtgaaaacctatgcagtttgtttaccgtgaacataaaagtatgttaatttaaataggaaaatattttatgttaaatatgaaacaatagtttaaaccccacttgaaaagtatagcgtacaattatttttagactgaatttgaagatgatggaaagggtttttacaaaggcactgtttagatatacagattataattataattacattattattaaatatttattcttcaagtactttttgcagttgtcctctgacggtctagaatcacttaaatgcttgttgaatgagtgagatgtttagaactacgacttgctctgtcattccagtgtcgtttaacctatgcagtaagattctgtctttgtaaaagtagttcgtagcagaagccaggatagtttggtaattaaacgcccaaactaaactcctcattcctacccttaatatttcctggctgtatgatcttggccaggtcactctctaaaagccccggtttcttcattattatcattattataatggggagaataacagctatacctgaggtttgttttgtgattaaattaaatgagacccaa

SEQ ID NO: 204354 - DNA, 2045 bp, Homo sapiens
  Payload ID: 20305
  Gene Name: zinc finger, CCHC domain containing 4
  Uniprot ID: Q9H5U6
  ENST ID: ENST00000507760
  CDS Start-End: 16-705
gacggcggcgggaagatggcggcctccaggaatgggtttgaagccgtggaggcagagggcagcgcagggtgccggggaagctcgggaatggaggtggtgcttcctttggatcctgccgtccccgccccgctgtgccctcacggacccactcttctgtttgtaaaggtgacccaagggaaagaagaaactcggaggttttatgcctgttcagcctgtagagatagaaaagactgtaatttttttcagtgggaagatgaaaagttgtcaggagctagacttgctgcccgagaagctcataaccgaagatgtcagcctcccctgtcccgaacgcagtgtgtggaaaggtacttgaagtttattgagttgcccttgactcagagaaagttttgtcaaacatgtcagcagttgttgttaccagatgactgggggcaacatagtgagcatcaggttctgggtaatgtgtccattacccagttaagaaggcccagtcaactcctttatccactggaaaacaagaagacaaatgcccagtatctgtttgctgatcggagctgtcagttcttggtagacttactttctgccctcggattcagaagagtactgtgtgttggaacaccaaggttgcatgagctgatcaagttgacagcatcaggtgacaagaagtctaacattaaaagccttttattggatattgattttcggtagattatgataatcatgcactttataaacacggaaagacaggtcgaaaacagtctcccgtgcgtattttcaccaacattccgcccaacaaaataatccttcctactgaagaagggtacagattttgctctccgtgtcaacggtatgtttctctagagaatcaacactgtgagctctgtaattcttgcacatccaaggatggcaggaaatggaaccattgctttctctgtaaaaagtgtgtaaagccttcctggatccactgtagcatctgcaatcactgtgctgttccagatcattcttgtgagggccccaaacatggctgctttatttgtggtgaactggatcataaacgcagtacttgtcctaacattgctacatctaagagagctaacaagtcagtcgaatactttactagaaaaatgtattccatctgtgttttatacaggataatccacaaaagcatgcaacattcagaggatcttgaagtgccaagttaattgtcactttcactattaagtactggctgcatagatggatggagggaggagaggaagatgattcaaagagcttgctttcaaagagcttacagttctacagcttagagatgaaaataaccaaaatatgaggtagaaagtggttaattttacctctccttggctttacgtctcatgtgtaaagttatagggggtgacagttcatgctttattgaaggacatgatatttacgtcaggctttgagggacagatcagatatagacacatgatggcaggaaaggctggagaaggcatttcagattgaatagcaagtaattccacagtaggaaaattgtgagaaagctatttctttgtatcaaattttaagaaaaatatttagacatgcttaatgcttaaatatttgaaatttttattactttttttcctgtgattattttcacatctctcaccaatatttgattggagctatggattacaactcagagtatggggatacctatgacaatagcttatttagaagaggcactgcttctggaatagttatccccaaaacaaaacaaaaagagaaaaacattgctattttaaccgagctaatttgaatgattatacttttttcctaactaaaagggatgatagtgattaagtcctcttcctttattgctaagaaaactaatgttacacagttattaattggagattaccagacagctaaatttgacattatatgaaattatatgacattatatgaaaattcagattgggctaccatgtgactatgacttgtaatttaaaaaaattgatttgtgttagaaatatctgatagtttaataattatttatggtaatatta

SEQ ID NO: 204355 - DNA, 1903 bp, Homo sapiens
  Payload ID: 20305
  Gene Name: zinc finger, CCHC domain containing 4
  ENST ID: ENST00000505412
  CDS Start-End: 1-907
ctgggggcaacatagtgagcatcaggttctgggtaatgtgtccattacccagttaagaaggcccagtcaactcctttatccactggaaaacaagaagacaaatgcccagtatctgtttgctgatcggagctgtcagttcttggtagacttactttctgccctcggattcagaagagtactgtgtgttggaacaccaaggttgcatgagctgatcaagttgacagcatcaggtgacaagaagtctaacattaaaagccttttattggatattgattttcggtattcacagttttatatggaagatagcttttgccattataatatgtttaaccatcatttctttgatggaaagactgcccttgaagtatgcagagcatttttacaggaagataaaggcgaaggaatcattatggtgacggatcctccgtttggtggcttggttgaacctctggctattacattcaagaagttaattgctatgtggaaagaaggtcaaagccaagatgacagtcacaaagaactacccattttctggattttcccctatttttttgaatcccgaatttgtcagttttttccaagcttccagatgctggattaccaggtagattatgataatcatgcactttataaacacggaaagacaggtcgaaaacagtctcccgtgcgtattttcaccaacattccgcccaacaaaataatccttcctactgaagaagggtacagattttgctctccgtgtcaacggtatgtttctctagagaatcaacactgtgagctctgtaattcttgcacatccaaggatggcaggaaatggaaccattgctttctctgtaaaaagtgtgtaaagccttcctggatccactgtagcatctgcaatcactgtgctgttccagatcattcttagctgtcagaaagcagaagcaaagaaaaagtaataagatgaaaatggagaccacgaaaggacaatccatgaatcatacatctgctacaaggagaaagaaaaggagggaaagagcccatcaatatcttggctcttaaatgtccagtgactggagaataagaaagatttatggtccaacctttgatgccattttctgaaagtgccacactggacttaaattcagctgcttccagaggtgtgcacctttctgagctagataacaggcaggtggcatttgctggtttacagtcccttatctgcctctctggagacatggggagttgttccatcttcagccagtttactagttctttcagcattcatttttcctcactttaagtctctcccagtcacattgttctatttttatgttttcattttttttgagatggagtcttgctctgtctcccaggctagagtgcaatggcacaacctcagctcactgcaacctctgcctcccgggttcaagcaattctcctgccttagcctcctgagtagctggaattataggcacatgccaccacgactggctaatttttgtatttttagtagagacggggtttcaccatgttggccaggctggtctcgaactcctggcctcaagtgatttgcctgccttggcctcccaaagtgctgggattacaggcatgagccacctcacccagctccggtcacattattctagcctttttatccaaaaaatgggcagaccattcttttgcagaagatgtcagaagaaaatgaaagtgaaaacctatgcagtttgtttaccgtgaacataaaagtatgttaatttaaataggaaaatattttatgttaaatatgaaacaatagtttaaaccccacttgaaaagtatagcgtacaattatttttagactgaatttgaagatgatggaaagggtttttacaaaggcactgtttagatatacagattataattataattacattattattaa

SEQ ID NO: 204356 - DNA, 938 bp, Homo sapiens
  Payload ID: 20305
  Gene Name: zinc finger, CCHC domain containing 4
  ENST ID: ENST00000612982
  CDS Start-End: 65-448
ctccaggaatgggtttgaagccgtggaggcagagggcagcgcagggtgccggggaagctcgggaatggaggtggtgcttcctttggatcctgccgtccccgccccgctgtgccctcacggacccactcttctgtttgtaaaggtgacccaagggaaagaagaaactcggaggttttatgcctgttcagcctgtagagatagaaaagactgtaatttttttcagtgggaagatgaaaagttgtcaggagctagacttgctgcccgagaagctcataaccgaagatgtcagcctcccctgtcccgaacgcagtgtggaaggtacttgaagtttattgagttgcccttgactcagagaaagttttgtcaaacatgtcagcagttgttgttaccagatgactgggggcaacatagtgagcatcagttctgggtatgtgtcattaccagttaagaaggcccagtcaactcctttatccactggaaaacaagaagacaaatgcccagtatctgtttgctgatcggagctgtcagttcttggtagacttactttctgccctcggattcagaagagtactgtgtgttggaacaccaaggttgcatgagctgatcaagttgacagcatcaggtgacaagaagtctaacattaaaagccttttattggatattgattttcggtattcacagttttatatggaagatagcttttgccattataatatgtttaaccatcatttctttgatggaaagactgcccttgaagtatgcagagcatttttacaggaagataaaggcgaaggaatcattatggtgacggatcctccgtttggtggcttggttgaacctctggctattacattcaagaagttaattgctatgtggaaagaaggtcaaagccaaggtgtataatttattactgcaaaataaatacatatctatatatc

SEQ ID NO: 204357 - DNA, 2648 bp, Homo sapiens
  Payload ID: 20306
  Gene Name: zinc finger, CCHC domain containing 5
  Uniprot ID: Q8N8U3
  ENST ID: ENST00000321110
  CDS Start-End: 297-1724
atttacacatttccctcctcagcaatgggtacacagacagccaagctcctggactaagtctctgaatgtgtatctgacacttccccttactgagctccggaggctccttcttgccgagctccggaggctcccagtgacctcttgataatcagccttggcggggcccaaataccaccccttggaaaactcactgagcctgacatctgcctgtaagcagctttcaggaaggatctcacaaacacccacccaatctctcttggtagcaaattgtcaaatcatacccatttcctcaaaagatggtggaggacttagcagcctcctatattgttctgaaattggagaatgaaattcggcaggctcaagtgcagtggctgatggaagaaaatgctgctctccaggcccagatcccagagcttcagaagtcccaagcagccaaggagtatgatctactccgaaagtcctcagaggccaaggagccccagaagctcccagagcacatgaatcccccagcagcctgggaggcccaaaagaccccagagttcaaggaaccccagaagccaccagagccacaggatcttctaccctgggaacccccagcagcctgggaactccaggaggccccagcagccccagagtccctggcgcctccagcaacccgggagtcccagaaacctccaatggcccatgagatcccaacagtcttggagggccaggggcctgcaaacacccaggatgccacaatagcccaagagcccaagaattcagaaccccaggatcccccaaatattgagaagccccaggaggcaccagaataccaggaaactgcagcacagctagagttccttgagcttccacctccccaggagcctctggagccttcaaatgcccaggaattcctagaactctcagcagcccaggagtccctggagggtctaatagttgtggagacatcagcagcttcagagtttccacaggcccctattgggttagaggctacagatttccccctgcaatacactttaaccttcagtggagattcccagaagcttcctgagttcctggttcagctgtatagttacatgagagtcagagggcacctgtatcccactgaagcagccctggtgagctttgttggcaattgcttctcaggtagggcaggatggtggttccagctcttactggatatccaaagccccttactggagcaatgtgaaagtttcatacctgtgctccaggatacttttgataatccagaaaacatgaaagatgccaaccagtgcatccatcaactctgccaaggggagggtcatgtagcaacccacttccacctcattgctcaagagctgaactgggatgaaagcactctctggatccaatttcaagaaggtcttgccagttctatacaagatgaactgtctcacacaagcccagccaccaacctatctgatctcatcactcagtgcatcagcctggaagagaagcctgatcccaatccattagggaaaagttcctctgcagagggagatggacccgagagtccaccagctgaaaaccaacctatgcaggctgcaatcaactgcccacacatcagtgaagctgaatgggtccgttggcacaaaggccgcttatgcctctactgtggttatcctggtcattttgccagagattgccctgtcaagcctcatcaggccctgcaggcgggaaacatccaggcctgccagtaagggggaccccacgtgggccaatctacaaatatgcgtccccctctcttccaatatccatgtctcatacactatggcttactgttgaaatccaactgggaagaagataattctttgagcaagcaatggtagattcaggctcctacagaaacagcattgatcatactgtggttcttcgagagaagctgcccatccgcagtaatatcttccctctgatgctggaaactgtcgacggccatccacttattaatggacccataactaaggaaacatcacctgtccaagttcaaattggaaaccatgttgaagagctccagtttgacattattcatgcaccacgataccctctgattattggaatccattggcttgagacacatgacccaaacatagaatggagtacccgcactgtgtcctttctatcacgttattgtcactacaattgcttcaggcacaggtggaatagaagaaatcgtgatgaaataatttctgggtagatcctgtgtcctagtgactgttcctggcaacctgtcttctgttacctcagctgtcatcagcatttgctgctccctgaatcttctactgaacatcttgctatgtactaaggctacctgtacaacgactctgcctcttagatgatagactgaacctgatgactttgagctgcttttttttttttcactaactctgcatgcctctatctcagaactctgcatcctgcggaactgttttaattacaattatactaacaatacacatgagaatagatattagaaactaataatgaaaaagcatagctgttaaactgacttgatttttttcttatcaatattttctatatcacaaaaatggcaacatcttttacataaagaaaataagtttgtaagtgatatttcttaaaagaatcaataaatattagcaatttct

SEQ ID NO: 204358 - DNA, 5724 bp, Homo sapiens
  Payload ID: 20307
  Gene Name: zinc finger, CCHC domain containing 6
  ENST ID: ENST00000277141
  CDS Start-End: 2426-4780
aggaagaggctggggaccgcggcgaaggtggtgagtgctcttgggcgccttctcccaacgtccctgccagactcgcctccgggctgattctccagttggtttcctggactccagagtagctgtccggcctggccccggaggtgcaaagtaagaaaattgaagtcaaagaccatgggagatacagcaaaaccttatttcgtgaagcgcactaaagaccgggggactatggatgatgatgacttcagaaggggtcacccccaacaagattatttaataatagatgaccatgctaaaggccatggcagtaaaatggaaaagggccttcaaaaaaagaagataacaccagggaactatgggaatacccccagaaaaggaccatgtgctgtttccagcaatccatatgcatttaaaaacccaatctacagtcaacccgcttggatgaatgacagccacaaagatcagagtaagagatggctgtctgatgaacatactggtaattcagacaactggagagaattcaaacctggacctagaattcctgttataaaccgacaaagaaaagactcctttcaagaaaatgaagatggttataggtggcaagacacaagaggctgcagaactgtaagacgactgtttcataaagacctaacaagcctagaaaccacgtcagaaatggaagcaggaagtcctgaaaacaagaagcagaggtccagacctaggaagccacggaagactagaaatgaggaaaatgagcaggatggagacttggaaggccctgtgatcgatgagtctgtactttcaacgaaggagctgctaggcttacagcaggctgaggagagactgaagagagactgcattgacaggctaaaaaggcgaccacgaaactaccctacagcaaagtacacctgcagactctgtgatgttttaattgaatccattgcatttgcccataagcatatcaaggaaaagaggcacaagaaaaacattaaggagaagcaagaggaagagttgctcactacgttacccccaccaacaccctcccagataaatgcagttggcattgccattgacaaagtggtacaggaatttggcttacacaatgagaacttggaacagaggctggaaattaaacgtatcatggaaaatgtgttccaacacaagttaccagattgttccctaagattatatgggtcatcctgtagcagattgggtttcaaaaattcggatgtaaacattgacatccagtttccagccattatgtctcagccagatgtcctcttacttgttcaagaatgtttaaagaacagtgactcctttattgatgttgatgcagacttccatgctagggtgccagtggtggtgtgcagagaaaagcaaagtggtcttctgtgtaaagtgagcgcaggaaatgaaaatgcttgtctgacaacaaagcatttaactgcccttggaaaactagaaccaaagctggttcctttggtgattgcatttaggtactgggcaaagctttgcagtatagatcgccctgaagaaggaggtctgccaccttatgtgtttgccctgatggccattttctttcttcagcagaggaaagaaccccttttgcctgtatatctaggatcatggattgaaggattctcattaagcaaactagggaatttcaaccttcaagacattgaaaaagatgttgtgatctgggaacatactgacagtgctgcaggggacacaggcataacaaaagaagaggcaccaagagaaacgccgattaaaaggggacaggtggtatcatccctactctgcagataatgatagcgaccattttttgaacactgtgtgccaggcactgtgctaagcactttacagacactatctcactcagtcctcccaacaaccctatgaggtgtcattaatattggatgtgaaacaccagccttcagtaccagttgggcagctctgggtggaattgctgcggttctatgctttagaatttaatttggctgatttagtgataagtattcgtgtcaaagaattggtatctcgggaattgaaggattggcccaaaaagcgcattgccattgaagatccctactctgttaaaagaaatgtggcaagaaccctaaatagtcaacctgtgtttgaatatatacttcattgtttaaggacaacatacaagtattttgctcttccacacaaaattacaaaatccagccttctaaagcctctgaatgcaattacatgtatttcagaacattctaaagaagtaataaatcatcatccagatgtacaaacaaaagatgataagctcaaaaactcagttttggcccaaggtcctggtgctaccagttcagctgcaaatacctgtaaggtacagccacttactcttaaagagactgctgaaagttttggaagcccaccaaaagaagaaatgggaaatgaacacatcagtgtccaccctgaaaactcagactgtatccaagcagatgttaactctgatgattacaagggtgataaagtataccatccagaaacaggaaggaaaaacgagaaagagaaagttggaaggaagggcaagcatctgttgactgttgatcagaaacgtggagagcatgttgtctgtggcagcacacgtaataatgagtcagagagcactttggatttagaaggcttccaaaatcccacagctaaagagtgtgagggacttgccactttagataacaaggctgatcttgatggagaaagtacagaaggtactgaggaactagaagactctctaaaccactttacccactcagtacagggccagacatcagaaatgattccctctgatgaagaggaggaggacgacgaagaagaggaggaggaagaagaacctaggctcaccattaaccaaagggaagatgaagatggcatggctaatgaagatgagttagacaacacctacactgggtcaggggatgaggacgccctatctgaagaggatgatgagttaggcgaagctgctaagtatgaagacgtgaaagaatgtggaaaacatgtagaaagagctctcctagtggaacttaataaaataagtctcaaggaagaaaatgtatgtgaagaaaaaaattcacctgtggatcagtctgattttttttatgaattcagtaaacttatcttcaccaaaggcaagtctcctacggtagtgtgcagcttatgcaaacgagagggtcatctaaagaaggactgtcctgaagacttcaaaagaatccagctagaacctctgccaccattaacacccaagtttttaaatatcttagatcaagtctgtatccagtgttataaggatttttctccaacaattatagaagatcaggctcgtgaacatattcggcaaaacctagaaagtttcataagacaggactttccaggaactaaattgagcctgtttggctcctccaaaaatggatttgggttcaaacagagtgaccttgacgtctgtatgacaattaatggacttgaaactgctgagggattggactgtgtcagaactattgaagaattagcaagagtcctcagaaaacattcaggtctgagaaacatcttacctattacaacagcaaaggtgccaattgtgaagttcttccatttgagaagtggtctggaagtagatatcagtttgtataacacattggcccttcataacacaaggcttttatctgcttattccgccattgatcccagagtgaagtatttgtgctataccatgaaagtatttacaaagatgtgtgatattggtgatgcatctagaggcagcttatcatcgtatgcatatactcttatggtgctatattttctccagcagaggaatccaccagtcattcctgtccttcaagagatatacaaaggtgaaaagaaacctgaaatatttgttgatggctggaatatttatttttttgatcaaatagatgaactgcctacctattggtcagaatgtggaaaaaatacagaatctgttgggcagttatggttgggccttcttcgtttctacacagaggaatttgattttaaagaacatgttattagcatcaggagaaaaagtctgcttacaacttttaagaaacagtggacctcaaaatacattgttattgaagatccctttgatttgaatcataatcttggagctggattatcaaggaaaatgacaaattttataatgaaggcttttatcaatggtagaagagtatttggtattcctgtcaagggatttccaaaggactacccctcaaaaatggaatacttttttgatccagatgtgttaactgaaggagagctggccccaaatgatagatgttgtcgaatttgtggaaaaatcggacacttcatgaaggactgtcctatgaggagaaaagtaagacggcggcgagatcaggaagatgccctgaaccaaagataccctgagaacaaggaaaaaagaagcaaagaggacaaagaaattcacaacaagtacacagaaagggaggtgtcaacaaaagaagataagcccatacagtgcacacctcagaaagccaagccaatgcgggcagctgctgacctggggagggagaagatcctcaggccaccagtagaaaaatggaagagacaggatgacaaagacttaagagaaaaacgttgttttatttgtggaagagaagggcacattaaaaaggaatgcccacagtttaaaggctcttcaggtagcctttccagtaaatatatgactcagggaaaagcctcagcgaagaggacccagcaggaatcatgagggaaggaaaatgcagcactctaaatggccactcaggcgttcctattcactcggaaaattaggttcatttcacaggacacagcagtgtagatcaggcttcaacttaacatttaagggaaatgtcagatttttttttaatttaatgaaattgttaatgaggaaaaatttttaatatagtcttatctaccacacatccccatagatttaaggattttaatagaaagacatgatgtatgtatttaagccacgttaaaagaaaaaatataactatggaccggtattcagtgaatacagtttcatggtttttaattctttcaaagcacattaaaaatggtgtgctgataaaccccaagtaaattaaccctttttccgtataaatccattttttgttttgaagaggggaaattatatttattgttgtttactgaatcctggtgtgaaagcatatcagatatgtatgaactgctactgctgtacttccgatttacggacatcattttattgctatttgtagacgtgataacatgaacatgagtacctatttatgtgggccttcagtggatgggcagtgccactcaggtctctggggtttccctctctaattttaagtaaattgacatataactactatgcttataaaaatgaagtaaggaaaacaagtagtcctgtttgccactaaaaacattttcaaaggaaaaataaaatgaaagtactttttactttttatgatactcagaaattaggatgaagaacttttaaaattgctgaagatcaaagaggttatctctgccagtcacaagtgtggctggtgtcattctgggtctgactggagccctcctggactgtttctttaatttcaaaagccctgcagacatagtacctggtcagaactatgcctcggtttatttatcattttgaaataaaatcagaatttcaacctgtaa

SEQ ID NO: 204359 - DNA, 611 bp, Homo sapiens
  Payload ID: 20307
  Gene Name: zinc finger, CCHC domain containing 6
  ENST ID: ENST00000375947
  CDS Start-End: 9-515
cgtcagaaatggaagcaggaagtcctgaaaacaagaagcagaggtccagacctaggaagccacggaagactagaaatgaggaaaatgagcaggatggagacttggaaggccctgtgatcgatgagtctgtactttcaacgaaggagctgctaggcttacagcaggctgaggagagactgaagagagactgcattgacaggctaaaaaggcgaccacgaaactaccctacagcaaagtacacctgcagactctgtgatgttttaattgaatccattgcatttgcccataagcatatcaaggaaaagaggcacaagaaaaacattaaggagaagcaagaggaagagttgctcactacgttacccccaccaacaccctcccagataaatgcagttggcattgccattgacaaagtggtacaggaatttggcttacacaatgagaacttggaacagaggctggaaattaaacgtatcatggaaaatgtgttccaacacaagttaccaggtattttctagatttgtttttctatttaactacctaaaagtacctcattcatttctcctaccaatagtaattttcatcaaataaaaatttatttaccatgtcatgaa

SEQ ID NO: 204360 - DNA, 958 bp, Homo sapiens
  Payload ID: 20307
  Gene Name: zinc finger, CCHC domain containing 6
  ENST ID: ENST00000375948
  CDS Start-End: 50-424
gggtttcaaaaattcggatgtaaacattgacatccagtttccagccattatgtctcagccagatgtcctcttacttgttcaagaatgtttaaagaacagtgactcctttattgatgttgatgcagacttccatgctagggtgccagtggtggtgtgcagagaaaagcaaagtggtcttctgtgtaaagtgagcgcaggaaatgaaaatgcttgtctgacaacaaagcatttaactgcccttggaaaactagaaccaaagctggttcctttggtgattgcatttaggtactgggcaaagctttgcagtatagatcgccctgaagaaggaggtctgccaccttatgtgtttgccctgatggccattttctttcttcagcagaggaaagaaccccttttgcctgtatatctaggatcatgggtataaaacattttttttgcttatatatctgaacagattttattacaggtccacaattaaattttgcataatttcaaaatctagacacctaaccagaactgacatggatttatttattctactcatgtgaatattcatacctttcactgctgaaatactaatgtgtttgatttcagtatgttgccctataacctgcttagggatattattacctttctagactgcaaaatctcttaatttttgaaatatgtatggtcctgagacgaacaagagactgaccctgtaaatttaccatttggtacattctttctttgggtacagttttctaaattgatacttgaatttacatatcacctccagacagacagactgtgggaagcatttggttcactgtaacttactttctgtttctaatctatttctccccataacctgtaaaacaaaaaaatatataaacattgaaattgctacctgtaccacaagatgcagaacctagtagtcatctcttgaataatattttgacattattttaaagatgaa

SEQ ID NO: 204361 - DNA, 2262 bp, Homo sapiens
  Payload ID: 20307
  Gene Name: zinc finger, CCHC domain containing 6
  ENST ID: ENST00000375957
  CDS Start-End: 133-1320
gatcaggctcgtgaacatattcggcaaaacctagaaagtttcataagacaggactttccaggaactaaattgagcctgtttggctcctccaaaaatggatttgggttcaaacagagtgaccttgacgtctgtatgacaattaatggacttgaaactgctgagggattggactgtgtcagaactattgaagaattagcaagagtcctcagaaaacattcaggtctgagaaacatcttacctattacaacagcaaaggtgccaattgtgaagttcttccatttgagaagtggtctggaagtagatatcagtttgtataacacattggcccttcataacacaaggcttttatctgcttattccgccattgatcccagagtgaagtatttgtgctataccatgaaagtatttacaaagatatacaaaggtgaaaagaaacctgaaatatttgttgatggctggaatatttatttttttgatcaaatagatgaactgcctacctattggtcagaatgtggaaaaaatacagaatctgttgggcagttatggttgggccttcttcgtttctacacagaggaatttgattttaaagaacatgttattagcatcaggagaaaaagtctgcttacaacttttaagaaacagtggacctcaaaatacattgttattgaagatccctttgatttgaatcataatcttggagctggattatcaaggaaaatgacaaattttataatgaaggcttttatcaatggtagaagagtatttggtattcctgtcaagggatttccaaaggactacccctcaaaaatggaatacttttttgatccagatgtgttaactgaaggagagctggccccaaatgatagatgttgtcgaatttgtggaaaaatcggacacttcatgaaggactgtcctatgaggagaaaagtaagacggcggcgagatcaggaagatgccctgaaccaaagataccctgagaacaaggaaaaaagaagcaaagaggacaaagaaattcacaacaagtacacagaaagggaggtgtcaacaaaagaagataagcccatacagtgcacacctcagaaagccaagccaatgcgggcagctgctgacctggggagggagaagatcctcaggccaccagtagaaaaatggaagagacaggatgacaaagacttaagagaaaaacgttgttttatttgtggaagagaagggcacattaaaaaggaatgcccacagtttaaaggctcttcaggtagcctttccagtaaatatatgactcagggaaaagcctcagcgaagaggacccagcaggaatcatgagggaaggaaaatgcagcactctaaatggccactcaggcgttcctattcactcggaaaattaggttcatttcacaggacacagcagtgtagatcaggcttcaacttaacatttaagggaaatgtcagatttttttttaatttaatgaaattgttaatgaggaaaaatttttaatatagtcttatctaccacacatccccatagatttaaggattttaatagaaagacatgatgtatgtatttaagccacgttaaaagaaaaaatataactatggaccggtattcagtgaatacagtttcatggtttttaattctttcaaagcacattaaaaatggtgtgctgataaaccccaagtaaattaaccctttttccgtataaatccattttttgttttgaagaggggaaattatatttattgttgtttactgaatcctggtgtgaaagcatatcagatatgtatgaactgctactgctgtacttccgatttacggacatcattttattgctatttgtagacgtgataacatgaacatgagtacctatttatgtgggccttcagtggatgggcagtgccactcaggtctctggggtttccctctctaattttaagtaaattgacatataactactatgcttataaaaatgaagtaaggaaaacaagtagtcctgtttgccactaaaaacattttcaaaggaaaaataaaatgaaagtactttttactttttatgatactcagaaattaggatgaagaacttttaaaattgctgaagatcaaagaggttatctctgccagtcacaagtgtggctggtgtcattctgggtctgactggagccctcctggactgtttctttaatttcaaaagccctgcagacatagtacctggtcagaactatgcctcggtttatttatcattttgaaataaaatcagaatttcaacctgt

SEQ ID NO: 204362 - DNA, 4939 bp, Homo sapiens
  Payload ID: 20307
  Gene Name: zinc finger, CCHC domain containing 6
  Uniprot ID: Q5VYS8
  ENST ID: ENST00000375960
  CDS Start-End: 216-3995
aagtggggccgaaggaaaacacggagagggagcccggccgggacaggaagaggctggggaccgcggcgaaggtggtgagtgctcttgggcgccttctcccaacgtccctgccagactcgcctccgggctgattctccagttggtttcctggactccagagtagctgtccggcctggccccggaggtgcaaagtaagaaaattgaagtcaaagaccatgggagatacagcaaaaccttatttcgtgaagcgcactaaagaccgggggactatggatgatgatgacttcagaaggggtcacccccaacaagattatttaataatagatgaccatgctaaaggccatggcagtaaaatggaaaagggccttcaaaaaaagaagataacaccagggaactatgggaatacccccagaaaaggaccatgtgctgtttccagcaatccatatgcatttaaaaacccaatctacagtcaacccgcttggatgaatgacagccacaaagatcagagtaagagatggctgtctgatgaacatactggtaattcagacaactggagagaattcaaacctggacctagaattcctgttataaaccgacaaagaaaagactcctttcaagaaaatgaagatggttataggtggcaagacacaagaggctgcagaactgtaagacgactgtttcataaagacctaacaagcctagaaaccacgtcagaaatggaagcaggaagtcctgaaaacaagaagcagaggtccagacctaggaagccacggaagactagaaatgaggaaaatgagcaggatggagacttggaaggccctgtgatcgatgagtctgtactttcaacgaaggagctgctaggcttacagcaggctgaggagagactgaagagagactgcattgacaggctaaaaaggcgaccacgaaactaccctacagcaaagtacacctgcagactctgtgatgttttaattgaatccattgcatttgcccataagcatatcaaggaaaagaggcacaagaaaaacattaaggagaagcaagaggaagagttgctcactacgttacccccaccaacaccctcccagataaatgcagttggcattgccattgacaaagtggtacaggaatttggcttacacaatgagaacttggaacagaggctggaaattaaacgtatcatggaaaatgtgttccaacacaagttaccagattgttccctaagattatatgggtcatcctgtagcagattgggtttcaaaaattcggatgtaaacattgacatccagtttccagccattattgaaggattctcattaagcaaactagggaatttcaaccttcaagacattgaaaaagatgttgtgatctgggaacatactgacagtgctgcaggggacacaggcataacaaaagaagaggcaccaagagaaacgccgattaaaaggggacaggtgtcattaatattggatgtgaaacaccagccttcagtaccagttgggcagctctgggtggaattgctgcggttctatgctttagaatttaatttggctgatttagtgataagtattcgtgtcaaagaattggtatctcgggaattgaaggattggcccaaaaagcgcattgccattgaagatccctactctgttaaaagaaatgtggcaagaaccctaaatagtcaacctgtgtttgaatatatacttcattgtttaaggacaacatacaagtattttgctcttccacacaaaattacaaaatccagccttctaaagcctctgaatgcaattacatgtatttcagaacattctaaagaagtaataaatcatcatccagatgtacaaacaaaagatgataagctcaaaaactcagttttggcccaaggtcctggtgctaccagttcagctgcaaatacctgtaaggtacagccacttactcttaaagagactgctgaaagttttggaagcccaccaaaagaagaaatgggaaatgaacacatcagtgtccaccctgaaaactcagactgtatccaagcagatgttaactctgatgattacaagggtgataaagtataccatccagaaacaggaaggaaaaacgagaaagagaaagttggaaggaagggcaagcatctgttgactgttgatcagaaacgtggagagcatgttgtctgtggcagcacacgtaataatgagtcagagagcactttggatttagaaggcttccaaaatcccacagctaaagagtgtgagggacttgccactttagataacaaggctgatcttgatggagaaagtacagaaggtactgaggaactagaagactctctaaaccactttacccactcagtacagggccagacatcagaaatgattccctctgatgaagaggaggaggacgacgaagaagaggaggaggaagaagaacctaggctcaccattaaccaaagggaagatgaagatggcatggctaatgaagatgagttagacaacacctacactgggtcaggggatgaggacgccctatctgaagaggatgatgagttaggcgaagctgctaagtatgaagacgtgaaagaatgtggaaaacatgtagaaagagctctcctagtggaacttaataaaataagtctcaaggaagaaaatgtatgtgaagaaaaaaattcacctgtggatcagtctgattttttttatgaattcagtaaacttatcttcaccaaaggcaagggattggactgtgtcagaactattgaagaattagcaagagtcctcagaaaacattcaggtctgagaaacatcttacctattacaacagcaaaggtgccaattgtgaagttcttccatttgagaagtggtctggaagtagatatcagtttgtataacacattggcccttcataacacaaggcttttatctgcttattccgccattgatcccagagtgaagtatttgtgctataccatgaaagtatttacaaagatgtgtgatattggtgatgcatctagaggcagcttatcatcgtatgcatatactcttatggtgctatattttctccagcagaggaatccaccagtcattcctgtccttcaagagatatacaaaggtgaaaagaaacctgaaatatttgttgatggctggaatatttatttttttgatcaaatagatgaactgcctacctattggtcagaatgtggaaaaaatacagaatctgttgggcagttatggttgggccttcttcgtttctacacagaggaatttgattttaaagaacatgttattagcatcaggagaaaaagtctgcttacaacttttaagaaacagtggacctcaaaatacattgttattgaagatccctttgatttgaatcataatcttggagctggattatcaaggaaaatgacaaattttataatgaaggcttttatcaatggtagaagagtatttggtattcctgtcaagggatttccaaaggactacccctcaaaaatggaatacttttttgatccagatgtgttaactgaaggagagctggccccaaatgatagatgttgtcgaatttgtggaaaaatcggacacttcatgaaggactgtcctatgaggagaaaagtaagacggcggcgagatcaggaagatgccctgaaccaaagataccctgagaacaaggaaaaaagaagcaaagaggacaaagaaattcacaacaagtacacagaaagggaggtgtcaacaaaagaagataagcccatacagtgcacacctcagaaagccaagccaatgcgggcagctgctgacctggggagggagaagatcctcaggccaccagtagaaaaatggaagagacaggatgacaaagacttaagagaaaaacgttgttttatttgtggaagagaagggcacattaaaaaggaatgcccacagtttaaaggctcttcaggtagcctttccagtaaatatatgactcagggaaaagcctcagcgaagaggacccagcaggaatcatgagggaaggaaaatgcagcactctaaatggccactcaggcgttcctattcactcggaaaattaggttcatttcacaggacacagcagtgtagatcaggcttcaacttaacatttaagggaaatgtcagatttttttttaatttaatgaaattgttaatgaggaaaaatttttaatatagtcttatctaccacacatccccatagatttaaggattttaatagaaagacatgatgtatgtatttaagccacgttaaaagaaaaaatataactatggaccggtattcagtgaatacagtttcatggtttttaattctttcaaagcacattaaaaatggtgtgctgataaaccccaagtaaattaaccctttttccgtataaatccattttttgttttgaagaggggaaattatatttattgttgtttactgaatcctggtgtgaaagcatatcagatatgtatgaactgctactgctgtacttccgatttacggacatcattttattgctatttgtagacgtgataacatgaacatgagtacctatttatgtgggccttcagtggatgggcagtgccactcaggtctctggggtttccctctctaattttaagtaaattgacatataactactatgcttataaaaatgaagtaaggaaaacaagtagtcctgtttgccactaaaaacattttcaaaggaaaaataaaatgaaagtactttttactttttatgatactcagaaattaggatgaagaacttttaaaattgctgaagatcaaagaggttatctctgccagtcacaagtgtggctggtgtcattctgggtctgactggagccctcctggactgtttctttaatttcaaaagccctgcagacatagtacctggtcagaactatgcctcggtttatttatcattttgaaataaaatcagaatttcaacctgtaa

SEQ ID NO: 204363 - DNA, 5379 bp, Homo sapiens
  Payload ID: 20307
  Gene Name: zinc finger, CCHC domain containing 6
  Uniprot ID: Q5VYS8
  ENST ID: ENST00000375963
  CDS Start-End: 174-4661
acaggaagaggctggggaccgcggcgaaggtggtgagtgctcttgggcgccttctcccaacgtccctgccagactcgcctccgggctgattctccagttggtttcctggactccagagtagctgtccggcctggccccggaggtgcaaagtaagaaaattgaagtcaaagaccatgggagatacagcaaaaccttatttcgtgaagcgcactaaagaccgggggactatggatgatgatgacttcagaaggggtcacccccaacaagattatttaataatagatgaccatgctaaaggccatggcagtaaaatggaaaagggccttcaaaaaaagaagataacaccagggaactatgggaatacccccagaaaaggaccatgtgctgtttccagcaatccatatgcatttaaaaacccaatctacagtcaacccgcttggatgaatgacagccacaaagatcagagtaagagatggctgtctgatgaacatactggtaattcagacaactggagagaattcaaacctggacctagaattcctgttataaaccgacaaagaaaagactcctttcaagaaaatgaagatggttataggtggcaagacacaagaggctgcagaactgtaagacgactgtttcataaagacctaacaagcctagaaaccacgtcagaaatggaagcaggaagtcctgaaaacaagaagcagaggtccagacctaggaagccacggaagactagaaatgaggaaaatgagcaggatggagacttggaaggccctgtgatcgatgagtctgtactttcaacgaaggagctgctaggcttacagcaggctgaggagagactgaagagagactgcattgacaggctaaaaaggcgaccacgaaactaccctacagcaaagtacacctgcagactctgtgatgttttaattgaatccattgcatttgcccataagcatatcaaggaaaagaggcacaagaaaaacattaaggagaagcaagaggaagagttgctcactacgttacccccaccaacaccctcccagataaatgcagttggcattgccattgacaaagtggtacaggaatttggcttacacaatgagaacttggaacagaggctggaaattaaacgtatcatggaaaatgtgttccaacacaagttaccagattgttccctaagattatatgggtcatcctgtagcagattgggtttcaaaaattcggatgtaaacattgacatccagtttccagccattatgtctcagccagatgtcctcttacttgttcaagaatgtttaaagaacagtgactcctttattgatgttgatgcagacttccatgctagggtgccagtggtggtgtgcagagaaaagcaaagtggtcttctgtgtaaagtgagcgcaggaaatgaaaatgcttgtctgacaacaaagcatttaactgcccttggaaaactagaaccaaagctggttcctttggtgattgcatttaggtactgggcaaagctttgcagtatagatcgccctgaagaaggaggtctgccaccttatgtgtttgccctgatggccattttctttcttcagcagaggaaagaaccccttttgcctgtatatctaggatcatggattgaaggattctcattaagcaaactagggaatttcaaccttcaagacattgaaaaagatgttgtgatctgggaacatactgacagtgctgcaggggacacaggcataacaaaagaagaggcaccaagagaaacgccgattaaaaggggacaggtgtcattaatattggatgtgaaacaccagccttcagtaccagttgggcagctctgggtggaattgctgcggttctatgctttagaatttaatttggctgatttagtgataagtattcgtgtcaaagaattggtatctcgggaattgaaggattggcccaaaaagcgcattgccattgaagatccctactctgttaaaagaaatgtggcaagaaccctaaatagtcaacctgtgtttgaatatatacttcattgtttaaggacaacatacaagtattttgctcttccacacaaaattacaaaatccagccttctaaagcctctgaatgcaattacatgtatttcagaacattctaaagaagtaataaatcatcatccagatgtacaaacaaaagatgataagctcaaaaactcagttttggcccaaggtcctggtgctaccagttcagctgcaaatacctgtaaggtacagccacttactcttaaagagactgctgaaagttttggaagcccaccaaaagaagaaatgggaaatgaacacatcagtgtccaccctgaaaactcagactgtatccaagcagatgttaactctgatgattacaagggtgataaagtataccatccagaaacaggaaggaaaaacgagaaagagaaagttggaaggaagggcaagcatctgttgactgttgatcagaaacgtggagagcatgttgtctgtggcagcacacgtaataatgagtcagagagcactttggatttagaaggcttccaaaatcccacagctaaagagtgtgagggacttgccactttagataacaaggctgatcttgatggagaaagtacagaaggtactgaggaactagaagactctctaaaccactttacccactcagtacagggccagacatcagaaatgattccctctgatgaagaggaggaggacgacgaagaagaggaggaggaagaagaacctaggctcaccattaaccaaagggaagatgaagatggcatggctaatgaagatgagttagacaacacctacactgggtcaggggatgaggacgccctatctgaagaggatgatgagttaggcgaagctgctaagtatgaagacgtgaaagaatgtggaaaacatgtagaaagagctctcctagtggaacttaataaaataagtctcaaggaagaaaatgtatgtgaagaaaaaaattcacctgtggatcagtctgattttttttatgaattcagtaaacttatcttcaccaaaggcaagtctcctacggtagtgtgcagcttatgcaaacgagagggtcatctaaagaaggactgtcctgaagacttcaaaagaatccagctagaacctctgccaccattaacacccaagtttttaaatatcttagatcaagtctgtatccagtgttataaggatttttctccaacaattatagaagatcaggctcgtgaacatattcggcaaaacctagaaagtttcataagacaggactttccaggaactaaattgagcctgtttggctcctccaaaaatggatttgggttcaaacagagtgaccttgacgtctgtatgacaattaatggacttgaaactgctgagggattggactgtgtcagaactattgaagaattagcaagagtcctcagaaaacattcaggtctgagaaacatcttacctattacaacagcaaaggtgccaattgtgaagttcttccatttgagaagtggtctggaagtagatatcagtttgtataacacattggcccttcataacacaaggcttttatctgcttattccgccattgatcccagagtgaagtatttgtgctataccatgaaagtatttacaaagatgtgtgatattggtgatgcatctagaggcagcttatcatcgtatgcatatactcttatggtgctatattttctccagcagaggaatccaccagtcattcctgtccttcaagagatatacaaaggtgaaaagaaacctgaaatatttgttgatggctggaatatttatttttttgatcaaatagatgaactgcctacctattggtcagaatgtggaaaaaatacagaatctgttgggcagttatggttgggccttcttcgtttctacacagaggaatttgattttaaagaacatgttattagcatcaggagaaaaagtctgcttacaacttttaagaaacagtggacctcaaaatacattgttattgaagatccctttgatttgaatcataatcttggagctggattatcaaggaaaatgacaaattttataatgaaggcttttatcaatggtagaagagtatttggtattcctgtcaagggatttccaaaggactacccctcaaaaatggaatacttttttgatccagatgtgttaactgaaggagagctggccccaaatgatagatgttgtcgaatttgtggaaaaatcggacacttcatgaaggactgtcctatgaggagaaaagtaagacggcggcgagatcaggaagatgccctgaaccaaagataccctgagaacaaggaaaaaagaagcaaagaggacaaagaaattcacaacaagtacacagaaagggaggtgtcaacaaaagaagataagcccatacagtgcacacctcagaaagccaagccaatgcgggcagctgctgacctggggagggagaagatcctcaggccaccagtagaaaaatggaagagacaggatgacaaagacttaagagaaaaacgttgttttatttgtggaagagaagggcacattaaaaaggaatgcccacagtttaaaggctcttcaggtagcctttccagtaaatatatgactcagggaaaagcctcagcgaagaggacccagcaggaatcatgagggaaggaaaatgcagcactctaaatggccactcaggcgttcctattcactcggaaaattaggttcatttcacaggacacagcagtgtagatcaggcttcaacttaacatttaagggaaatgtcagatttttttttaatttaatgaaattgttaatgaggaaaaatttttaatatagtcttatctaccacacatccccatagatttaaggattttaatagaaagacatgatgtatgtatttaagccacgttaaaagaaaaaatataactatggaccggtattcagtgaatacagtttcatggtttttaattctttcaaagcacattaaaaatggtgtgctgataaaccccaagtaaattaaccctttttccgtataaatccattttttgttttgaagaggggaaattatatttattgttgtttactgaatcctggtgtgaaagcatatcagatatgtatgaactgctactgctgtacttccgatttacggacatcattttattgctatttgtagacgtgataacatgaacatgagtacctatttatgtgggccttcagtggatgggcagtgccactcaggtctctggggtttccctctctaattttaagtaaattgacatataactactatgcttataaaaatgaagtaaggaaaacaagtagtcctgtttgccactaaaaacattttcaaaggaaaaataaaatgaaagtacttttt

SEQ ID NO: 204364 - DNA, 1219 bp, Homo sapiens
  Payload ID: 20308
  Gene Name: zinc finger, CCHC domain containing 7
  ENST ID: ENST00000322831
  CDS Start-End: 270-887
cctgttcgcagctgcggcagtgagtatgtgtgtgacggacccccgccgcccgcggctcgggacccctgcctaccctccttcttgcccgccgggctgtggaactagcgcgtgccccctcgccggcctcgacgtctcccgtccgcccctcactcgtggcagggcgcagctcctggagaatctgagcatggggaataaagtcaggaaggatcgcaagtgaggattatattaatatgataattagcacgcttcaaggttactgactttttatgatgtttggtggctatgagactatagaagcatacgaagatgatctttatcgagatgagtcatctagtgaactgagtgttgatagtgaggtggaatttcaactctatagccaaattcattatgcccaagatcttgatgatgtcatcagggaggaagagcatgaagaaaagaactctgggaattcggaatcttcgagtagtaaaccaaatcagaagaagctaatcgtcctttcagatagtgaggtcatccagctgtcagatgggtcagaggtcatcactttgtctgatgaagacagtatttatagatgtaaaggaaagaatgttagagttcaagcacaagaaaatgcccatggtctttcttcttctcttcaatctaatgagctggttgataagaaatgcaagagtgatattgagaagcctaaatctgaagagagatcaggtgtaatccgagaggtcatgattatagaggtcagttcaagtgaagaggaagagagcaccatttcagaaggtgataatgtggaaagctggatgctactgggatgtgaagtagatgataaagatgatgatatccttctcaaccttgtgggatgtgaaaactctgttactgaaggccaagaataaaatctttatgaactaacaagatgaattaaagatggaatgattcatttctatggttaggttttaattaatacatgggggatgattttggcactttttcaaagaatttgtttctgtgtatctgaatttgcacctactctgtaacctaactgcgatttataaaatgaaacaatctcttctaatttggcacttgataggtgctttgactttaaaaggcaagtgtatttttctgtcacgaatatcttgtcattctaaaataagtaaaaacaatggattgatgaaacttcttcactgcttttttctttgtgtataacaaatacattgatattttactg

SEQ ID NO: 204365 - DNA, 2619 bp, Homo sapiens
  Payload ID: 20308
  Gene Name: zinc finger, CCHC domain containing 7
  Uniprot ID: Q8N3Z6
  ENST ID: ENST00000336755
  CDS Start-End: 107-1738
ctccttacctcatttgtcctcgcccctccccgtccctctacgcgttttggttcccggttggtgcttcctgttcgcagctgcggcacttcaaggttactgactttttatgatgtttggtggctatgagactatagaagcatacgaagatgatctttatcgagatgagtcatctagtgaactgagtgttgatagtgaggtggaatttcaactctatagccaaattcattatgcccaagatcttgatgatgtcatcagggaggaagagcatgaagaaaagaactctgggaattcggaatcttcgagtagtaaaccaaatcagaagaagctaatcgtcctttcagatagtgaggtcatccagctgtcagatgggtcagaggtcatcactttgtctgatgaagacagtatttatagatgtaaaggaaagaatgttagagttcaagcacaagaaaatgcccatggtctttcttcttctcttcaatctaatgagctggttgataagaaatgcaagagtgatattgagaagcctaaatctgaagagagatcaggtgtaatccgagaggtcatgattatagaggtcagttcaagtgaagaggaagagagcaccatttcagaaggtgataatgtggaaagctggatgctactgggatgtgaagtagatgataaagatgatgatatccttctcaaccttgtgggatgtgaaaactctgttactgaaggagaagatggtataaactggtccatcagtgacaaagacattgaggcccagatagctaataaccgaacacctggaagatggacccagcggtactattcagccaacaaaaacattatctgtagaaattgtgacaaacgtggtcatttatcaaaaaactgccccttaccacgaaaagttcgtcgctgcttcctgtgctccaggagaggacatctcctgtattcctgtccagcccccctttgcgaatactgtcctgtgcctaagatgttggaccactcatgtcttttcagacattcctgggataaacagtgtgaccgatgtcatatgctaggccactatacagatgcttgcacagaaatctggaggcagtatcacctaacgaccaaacctggaccacccaaaaagccgaagaccccttcaagaccatcagccttagcatattgctatcactgcgcgcaaaaaggccattatggacacgaatgtccagaaagagaagtgtatgacccgtctccagtatctccattcatctgctactatgatgacaaatatgaaattcaggagagagaaaagagactaaaacaaaaaataaaagtactcaagaaaaatggggttatcccagagccatccaagctaccttatataaaagcagcaaatgagaacccccaccatgatataaggaagggccgtgcctcatggaaaagcaacaggtggcctcaagaaaataaagaaacacaaaaagaaatgaagaacaagaatagaaactgggagaagcacaggaaggctgacagacatcgtgaagtggatgaggattttcccaggggccccaaaacctactcttctcctggcagttttaaaacccagaagccttctaagccctttcaccgttcatcacattaccacacgtcaagagaagacaagtctcccaaggaaggcaagaggggcaagcagaagaaaaaggagaggtgctgggaagatgatgacaatgataacttatttcttattaagcagagaaaaaaaaagtcttaagccgtcaggcagcctctgatgtggcttttcattgttcatttggcctttgtgtctataaccttctggcactgtgtttattatctatgattaaataaagtgagtttttggttttgtttttttaatttcagccattcctagagttactgaatatccatggagatctcaattctctgtgtccaacaggatattaggtaagaaagtacaaagataaacctggacttctcctattccaatatgtcatctttactcagaatcctagggataggtagaagaattcatcttttcaagaaagtgttttaaaaatactttgggaaaaaaactgcatcaaaggtaatttatcctcaaattaaatccttgcaggaagagaaattaacactaagaaaaagtcatcaatatttttcaactttttttttttttttttttactttggaaaggacaataactataaacctatatccagattttctttctgctgaagctgttgtcagaatcttcctttggacaaaacatcactagctgactataaaaacaaaagtgtcatcattgaagccctgaagaggcagggaattgagcttcagcaaaatacaggaaaagaactatccagtataaatgtcagaagacagatttcctaaacaagtaaaagagacatcaaaaattttaacataatcacaatgaaatcattttttaccacttttacagcggtgtttcaagcggactgtcactcagatctgcagagatgaatattactcaaaaaatttttttgttctcttgcatttttttcaactaccgcaaagctatacagatttttttgtacttgtggatcttttgtacttctcataacctaatgtcagactaagaaaaataaaatatctgagagtaaa

SEQ ID NO: 204366 - DNA, 2828 bp, Homo sapiens
  Payload ID: 20308
  Gene Name: zinc finger, CCHC domain containing 7
  Uniprot ID: Q8N3Z6
  ENST ID: ENST00000534928
  CDS Start-End: 319-1950
ggtgcttcctgttcgcagctgcggcagtgagtatgtgtgtgacggacccccgccgcccgcggctcgggacccctgcctaccctccttcttgcccgccgggctgtggaactagcgcgtgccccctcgccggcctcgacgtctcccgtccgcccctcactcgtggcagggcgcagctcctggtccgtcacctgcgcgccgccccacgcggccgggctgcgggtctagggggtccgcgtctccctggctttccaagggctaatgccgtgattctagagcggctgggcgtctagggcctcgcttcaaggttactgactttttatgatgtttggtggctatgagactatagaagcatacgaagatgatctttatcgagatgagtcatctagtgaactgagtgttgatagtgaggtggaatttcaactctatagccaaattcattatgcccaagatcttgatgatgtcatcagggaggaagagcatgaagaaaagaactctgggaattcggaatcttcgagtagtaaaccaaatcagaagaagctaatcgtcctttcagatagtgaggtcatccagctgtcagatgggtcagaggtcatcactttgtctgatgaagacagtatttatagatgtaaaggaaagaatgttagagttcaagcacaagaaaatgcccatggtctttcttcttctcttcaatctaatgagctggttgataagaaatgcaagagtgatattgagaagcctaaatctgaagagagatcaggtgtaatccgagaggtcatgattatagaggtcagttcaagtgaagaggaagagagcaccatttcagaaggtgataatgtggaaagctggatgctactgggatgtgaagtagatgataaagatgatgatatccttctcaaccttgtgggatgtgaaaactctgttactgaaggagaagatggtataaactggtccatcagtgacaaagacattgaggcccagatagctaataaccgaacacctggaagatggacccagcggtactattcagccaacaaaaacattatctgtagaaattgtgacaaacgtggtcatttatcaaaaaactgccccttaccacgaaaagttcgtcgctgcttcctgtgctccaggagaggacatctcctgtattcctgtccagcccccctttgcgaatactgtcctgtgcctaagatgttggaccactcatgtcttttcagacattcctgggataaacagtgtgaccgatgtcatatgctaggccactatacagatgcttgcacagaaatctggaggcagtatcacctaacgaccaaacctggaccacccaaaaagccgaagaccccttcaagaccatcagccttagcatattgctatcactgcgcgcaaaaaggccattatggacacgaatgtccagaaagagaagtgtatgacccgtctccagtatctccattcatctgctactatgatgacaaatatgaaattcaggagagagaaaagagactaaaacaaaaaataaaagtactcaagaaaaatggggttatcccagagccatccaagctaccttatataaaagcagcaaatgagaacccccaccatgatataaggaagggccgtgcctcatggaaaagcaacaggtggcctcaagaaaataaagaaacacaaaaagaaatgaagaacaagaatagaaactgggagaagcacaggaaggctgacagacatcgtgaagtggatgaggattttcccaggggccccaaaacctactcttctcctggcagttttaaaacccagaagccttctaagccctttcaccgttcatcacattaccacacgtcaagagaagacaagtctcccaaggaaggcaagaggggcaagcagaagaaaaaggagaggtgctgggaagatgatgacaatgataacttatttcttattaagcagagaaaaaaaaagtcttaagccgtcaggcagcctctgatgtggcttttcattgttcatttggcctttgtgtctataaccttctggcactgtgtttattatctatgattaaataaagtgagtttttggttttgtttttttaatttcagccattcctagagttactgaatatccatggagatctcaattctctgtgtccaacaggatattaggtaagaaagtacaaagataaacctggacttctcctattccaatatgtcatctttactcagaatcctagggataggtagaagaattcatcttttcaagaaagtgttttaaaaatactttgggaaaaaaactgcatcaaaggtaatttatcctcaaattaaatccttgcaggaagagaaattaacactaagaaaaagtcatcaatatttttcaactttttttttttttttttttactttggaaaggacaataactataaacctatatccagattttctttctgctgaagctgttgtcagaatcttcctttggacaaaacatcactagctgactataaaaacaaaagtgtcatcattgaagccctgaagaggcagggaattgagcttcagcaaaatacaggaaaagaactatccagtataaatgtcagaagacagatttcctaaacaagtaaaagagacatcaaaaattttaacataatcacaatgaaatcattttttaccacttttacagcggtgtttcaagcggactgtcactcagatctgcagagatgaatattactcaaaaaatttttttgttctcttgcatttttttcaactaccgcaaagctatacagatttttttgtacttgtggatcttttgtacttctcataacctaatgtcagactaagaaaaataaaatatctgagagt

SEQ ID NO: 204367 - DNA, 1252 bp, Homo sapiens
  Payload ID: 20309
  Gene Name: zinc finger, CCHC domain containing 8
  ENST ID: ENST00000536663
  CDS Start-End: 698-1252
aggtgatgaaataccggctgcttagacgcgggatcggtttttataccggggcaaacgctagtggtcccagaatgcagagttgggggcctcaaggaatccgggtgtgctgagataattggttaattgcttgattaaaattggggattaattttagagttcttccactcggagctcgcttctgtgctgaagatgctttgcaacgccttgaggaaaacgcgccaaagaagtttctgttagacttgagttacaagattgcagatttttcttgatttgctatggaatattggtgaacgatactaagttagatggacctatattacagattctattcatgaacaatgctatttcaaatttcatatttatattggtgtttccttatgtacgtattaagaatctctgggaggaggatgtggaagacctgaatatatggactatctttgtgttgcagaaatagatggccaagagacagggcaatatcatcaagaaatagaggaatttgtatcaaatttagtaaaaagatttgaggaacagcagaaaaatgatgtggaaaagacttcctttaatcttttgccccagccatccagtattgtgctagaggaggaccacaaagtggaagagtcctgtgccattaaaaacaacaaggaagctttcagtgccaaagcctcactgtttcaattgtggttctgaagaacaccaaatgaaagattgcccaatgcctcggaatgctgctcgaataagtgaaaagagaaaagagtatatggatgcctgtggagaagcaaacaatcagaatttccagcagcgataccacgcagaagaagtagaagaaagatttggaagattcaagccaggagttattagtgaggaacttcaagatgcactaggtgtgacagacaagagtcttccaccttttatctatcggatgcgccagctagggtacccaccagggtggctcaaagaggctgaattggagaattcggggcttgcactctatgatggaaaagatggcactgatggggaaacagaagttggagaaatacaacagaataaaagtgtcacttacgatctctcaaaattggtcaactatcctggttttaatatatctactcccagaggaattccagacgaatggaggatctttggttccataccaatgcaggcatgtcagcagaaggatgtgtttgccaattaccttacttctaacttccaagcgccaggtgtgaagtctggcaacaagaggtcttcatctcactct

SEQ ID NO: 204368 - DNA, 5663 bp, Homo sapiens
  Payload ID: 20309
  Gene Name: zinc finger, CCHC domain containing 8
  Uniprot ID: Q6NZY4
  ENST ID: ENST00000543897
  CDS Start-End: 2357-3766
ggcagcgccaggcgtggggccggggcagcgccgggcgagggcgagggcgcgggcggaagttccaggagggccagaattccaagtgctttctgtcacccgccggcggaccgagagtctagggttcggggcgcgcaggctgcctcggcgcagacctcttcccctcagggaggccgtctcctgaccagacccactcctgcctcccacccgggtgccgtgtttagggttattttaggctgctcacctgacagattgtacacaagcccttaattgcccccctctgtttgaggtcgtggtgaggtttcatatttcgcagccacgctcaaattgtgccgtcatgttacagttgtaggtgatgaaataccggctgcttagacgcgggatcggtttttataccggggcaaacgctagtggtcccagaatgcagagttgggggcctcaaggaatccgggtgtgctgagataattggttaattgcttgattaaaattggggattaattttagagttcttccactcggagctcgcttctgtgctgaagatgctttgcaacgccttgaggaaaacgcgccaaagaagtttctgttagacttgagttacaagattgcagatttttcttgatttgctagtatgtttttttttacgttcgtagagttttataggtagatagataactttggttcgggtagttttccttttaaaatttgtagagaactgaaagtggctgatatgttagcttttttagggggacggggtcggggaatggagtctcagtctgttgcccaggctggagtgcagtggcgcgatctcggctcactgcaacctccgcctcccgggttcaagcgattctcctgcctcagcctcccgaatagctgggattacaggcgcccgccacggcgcccagtcagtatatcagtttttaaggtttgtgaagcgcgatttattttttcagaatgtcgtcttcctccacattgtgaggaaaattttcagaatacaaaaagttgaggccgggcgctgtggctcaagcctgtaatcccagcactttgggaggccgaggcgggtggatcatgaggtcaggaggatcatgaggatcaggtggatcatgaggatcaggaggtcagcctggccaacatggtgaaaccccgtctctactaaaaatacaaaattagccgggcgtggtggcgcgtgcttgtaatcccagctactcaggaggctgaggcaggagaatcccttgaacctgggaggcggaggttgcagtgagccaagatcacaccattgcactccagcctgggcgacagggtgagactgtgtctcaaaaaaaaaaaaaaaaagttgaaaggattctacagtggacatccatagatttattccaaattctaaagttgttaacagctcgttatactgcattctctttatcacatagtggttgttgaaaggtttgacaggaacactgatgcttcaataatggttttggttcagtttgttagtctgttgaacttcaggatcgtgtcttagaatatatgttcgaaaggataaaaaccgtactttaattttgggtttcaaaagcctacccctgcaacaaaatagaagctcaataagtgtgtcatcctcaaaatatccgtgggtcttttgtctttataatattctgacaccaaaagtgagagaagtagtagttgaattttatgatttgcattgttaaatgagggcttatcttccttaacaaataataacatcaagaacttaaacgaaaattgaacattctgactcgaccgagtggaatattggtgaacgatactaagttagatggacctatattacagattctattcatgaacaatgctatttcaaagcaatatcatcaagaaatagaggaatttgtatcaaatttagtaaaaagatttgaggaacagcagaaaaatgatgtggaaaagacttcctttaatcttttgccccagccatccagtattgtgctagaggaggaccacaaagtggaagagtcctgtgccattaaaaacaacaaggaagctttcagtgttgtaggaagtgtcctgtattttactaatttttgccttgataaattggggcaaccgcttctaaatgaaaaccctcagctttccgaaggatgggaaatacccaagtatcctacatagtgaatgaagatcttttatgcatcttgccactaagttcacctttaaaacaatttccaaattttgcagaccatgataactattccttaataaaattcactaaaggtaccatcaagtcttcagccacattgtttctctagaagggcaagaaatacaagtaaaggcaaaaaggccaaagcctcactgtttcaattgtggttctgaagaacaccaaatgaaagattgcccaatgcctcggaatgctgctcgaataagtgaaaagagaaaagagtatatggatgcctgtggagaagcaaacaatcagaatttccagcagcgataccacgcagaagaagtagaagaaagatttggaagattcaagccaggagttattagtgaggaacttcaagatgcactaggtgtgacagacaagagtcttccaccttttatctatcggatgcgccagctagggtacccaccagggtggctcaaagaggctgaattggagaattcggggcttgcactctatgatggaaaagatggcactgatggggaaacagaagttggagaaatacaacagaataaaagtgtcacttacgatctctcaaaattggtcaactatcctggttttaatatatctactcccagaggaattccagacgaatggaggatctttggttccataccaatgcaggcatgtcagcagaaggatgtgtttgccaattaccttacttctaacttccaagcgccaggtgtgaagtctggcaacaagaggtcttcatctcactctagcccaggtagtccaaagaagcagaagaatgaaagcaactcagcgggatctcccgccgacatggagctcgattcagatatggaggtaccacatggttctcagagcagcgaaagttttcagtttcaaccaccattacctcctgacactcctccactcccccggggaactcctccacccgtcttcacccctccactcccaaagggcaccccgccgctgactcccagtgactcaccccagaccagaacagcatctggagctgtggatgaggacgcactgactctagaagaacttgaagaacagcagaggcggatctgggcagctcttgagcaggccgagagcgtaaacagcgactccgacgttcctgtggacacacctttaactggcaattccgttgcctcatcaccttgtccaaatgagctagacctccctgtcccggagggaaaaacatctgaaaagcagacgctggatgagcctgaggtaccagagatttttacaaagaaatcagaagctggacatgcctccagtccagactctgaggtgacatcactttgtcagaaggaaaaagcagagttggctccggtaaacactgaaggtgcccttcttgataatggcagtgtcgtaccaaactgtgacatcagcaatgggggcagccagaagctctttcctgcagacaccagtccttcaacggccactaaaattcatagccctatacctgacatgagcaaatttgcaactggaatcacgccatttgaatttgagaatatggcagaatctactggaatgtacctcaggataagaagcttgttaaagaactcaccccgaaaccagcagaaaaacaaaaaggcctctgaataatggcttgacttagcactgagagctatttaataactttgttccgttaattagtactaattaagtggatagatagaatggttttcctgtttgtccctcccatgtttaaaaatctatccaaggttcatgttccaaagtcaagcctattttaaagaaagactgagctcactagttcagtatattttattctcactgacaaaacttggggggagatgtgaatatgacctggtttagagagggtttgttaaggtttatactatttttggattgtgactatccgtcgagagtgatggtttttatctgtcttttgtacattgttttccctttctacattttgctaattatcctgtatataagtttaatatatcactttttaaaagaaaaaattctaccattttaaattcatgtttcaactcctacaaccaaatgagaaaaatcagggatgagcagctttatcccatttggggtatttttgtaagtgatttacatgtgtcaattttagtaatacttttacttttttgtaacttcatccttcatatatgcttgctatacaggtatgttcatctttgtgtacagaggtttaataaattagttttcatatacataatctaagactttgaatacaaaaaagtgattcacaggtaaaatcagtgtatataaccttttttttttttgagacaagggtttcactcttgttgcccaggctggagtgcaatggcacaatctcggctcaccgcaacctccgcctcccgagtttaagcgattctcctgcctcagcctccggagtagctgggattacaggcatgtgccaccacgcccagctaacttcgtatttttagtagagatggggtttctccacgtcgggtcaggctggtcttgacctcctgacttcaggtgatctgcccgcccagcctcccaaagtgctgggattacaggcgtaagccacctcacctggccggtgcatataacttttaagtttaaaagtaaattgttggccaggcgtggtggctcatgcttataatcctagcactttgggaggccaaggaggaaggatcacctgaggtcaggagttcgagaccagcctggccaacatggcaaaaccccatctctacataaatacaaaaattagccaggtgtggtggtacatgcctgtaatcccagctactcgggaggctgaggcaggagaatcacttgaacctgggagtgggaggttgcagtgagccgaggtcgcgccattgcactccagcctgggcaacaagagcaaaactccatctcaaaaaaaaaaaaaaaaaaaggtaaattgtaaaaatcagtggtagcaaaacaaaaataatgataggaattgcaagtttgggtgttttcagtggatttcagccttaaatatagaaacagcagaatttttgaaaagtaattattttgaaaaatgaatggcatgcagctagcctttgtataaaaataattttctagatttgaaccctaatagttaaaaattaaaaattaaacataaacatactgcttttaattgtcaggtatatatataagatagagctgaaactgtggtttaggtctttctgtggaatgccattacatctttatattagtcaagtccatgaaaataaatgtttagatcgtcttgaattgttagtctcaggcagtgttatcctgctctcaggccaacagggggagcaaaatagaaacattccagatatagctttcatttttgagaacttgagtaatcagaatttactgttctgtaaagaataaaggaaaggaaaattataaagagagaaatttctttttaaagccctcacagaatgtgctagaaatagaataaaatttaaaatacttttggcttcttttcctcagcttaagttcaaaataaaagcaatcctttacagtt

SEQ ID NO: 204369 - DNA, 1250 bp, Homo sapiens
  Payload ID: 20309
  Gene Name: zinc finger, CCHC domain containing 8
  ENST ID: ENST00000540586
  CDS Start-End: 1136-1250
attccaagtgctttctgtcacccgccggcggaccgagagtctagggttcggggcgcgcaggctgcctcggcgcagacctcttcccctcagggaggccgtctcctgaccagacccactcctgcctcccacccgggtgccgtgtttagggttattttaggctgctcacctgacagattgtacacaagcccttaattgcccccctctgtttgaggtcgtggtgaggtttcatatttcgcagccacgctcaaattgtgccgtcatgttacagttgtaggtgatgaaataccggctgcttagacgcgggatcggtttttataccggggcaaacgctagtggtcccagaatgcagagttgggggcctcaaggaatccgggtgtgctgagataattggttaattgcttgattaaaattggggattaattttagagttcttccactcggagctcgcttctgtgctgaagatgctttgcaacgccttgaggaaaacgcgccaaagaagtttctgttagacttgagttacaagattgcagatttttcttgatttgctatggaatattggtgaacgatactaagttagatggacctatattacagattctattcatgaacaatgctatttcaaagcaatatcatcaagaaatagaggaatttgtatcaaatttagtaaaaagatttgaggaacagcagaaaaatgatgtggaaaagacttcctttaatcttttgccccagccatccagtattgtgctagaggaggaccacaaagtggaagagtcctgtgccattaaaaacaacaaggaagctttcagtgttgtaggaagtgtcctgtattttactaatttttgccttgataaattggggcaaccgcttctaaatgaaaaccctcagctttccgaaggatgggaaatacccaagtatcctacatagtgaatgaagatcttttatgcatcttgccactaagttcacctttaaaacaatttccaaattttgcagaccatgataactattccttaataaaattcactaaaggtaccatcaagtcttcagccacattgtttctctagaagggcaagaaatacaagtaaaggcaaaaaggccaaagcctcactgtttcaattgtggttctgaagaacaccaaatgaaagattgcccaatgcctcggaatgctgctcgaataagtgaaaagagaaaagagtatatggatgcctgtggagaagcaaacaatcagaatttccagcagcgataccacgcag

SEQ ID NO: 204370 - DNA, 1561 bp, Homo sapiens
  Payload ID: 20309
  Gene Name: zinc finger, CCHC domain containing 8
  ENST ID: ENST00000544054
  CDS Start-End: 928-1561
caagattgcaccactgtactccagcctgggcaacagagaccctatctcaaaacaaacaaaaaagtgtatgtgtgtgtgttcggtgtatgtgtaaagagagagagaggcagacaaaaatgttaaactattaacagttgtttaggtgaaggatacattgggtattcattgtaccacttttccaacttgtctgtatggaattttttcaaaaagaactggagggataagaaaagagtaaatgggaagaaaggaaatggaaacaataactaaagggtctgcatgtcttgcaaagagaagcaatgaaatggggcattggagggaaatatgagagtcaaggttttcattttttgtttgaattctgtagagaatgcagctgatagtcatgatccaatacagaggaaaaactgatctagcagagagagggaactgacgatgtagtttctacttacacatcaaagtctggctccttaataacaaggaagttattatttctaataattccatccaaaaataaattgttaaaacagttaatcataatcttacattatttaatgtctttttttctgcttaaatagcaatattttttgacttgttttctgcaggttgtaggaagtgtcctgtattttactaatttttgccttgataaattggggcaaccgcttctaaatgaaaaccctcagctttccgaaggatgggaaatacccaagtatcctacatagtgaatgaagatcttttatgcatcttgccactaagttcacctttaaaacaatttccaaattttgcagaccatgataactattccttaataaaattcactaaaggtaccatcaagtcttcagccacattgtttctctagaagggcaagaaatacaagtaaaggcaaaaaggccaaagcctcactgtttcaattgtggttctgaagaacaccaaatgaaagattgcccaatgcctcggaatgctgctcgaataagtgaaaagagaaaagagtatatggatgcctgtggagaagcaaacaatcagaatttccagcagcgataccacgcagaagaagtagaagaaagatttggaagattcaagccaggagttattagtgaggaacttcaagatgcactaggtgtgacagacaagagtcttccaccttttatctatcggatgcgccagctagggtacccaccagggtggctcaaagaggctgaattggagaattcggggcttgcactctatgatggaaaagatggcactgatggggaaacagaagttggagaaatacaacagaataaaagtgtcacttacgatctctcaaaattggtcaactatcctggttttaatatatctactcccagaggaattccagacgaatggaggatctttggttccataccaatgcaggcatgtcagcagaaggatgtgtttgccaattaccttacttctaacttccaagcgccaggtgtgaagtctggcaacaagaggtcttcatctcactctagcccaggtagtccaaagaagcagaagaatgaaagcaactcagcgggatctcccgccgacatggagctcgattcaggta

SEQ ID NO: 204371 - DNA, 2904 bp, Homo sapiens
  Payload ID: 20309
  Gene Name: zinc finger, CCHC domain containing 8
  Uniprot ID: Q6NZY4
  ENST ID: ENST00000536306
  CDS Start-End: 868-2277
ttgcactccagcctgggcgacagggtgagactgtgtctcaaaaaaaaaaaaaaaaagttgaaaggattctacagtggacatccatagatttattccaaattctaaagttgttaacagctcgttatactgcattctctttatcacatagtggttgttgaaaggtttgacaggaacactgatgcttcaataatggttttggttcagtttgttagtctgttgaacttcaggatcgtgtcttagaatatatgttcgaaaggataaaaaccgtactttaattttgggtttcaaaagcctacccctgcaacaaaatagaagctcaataagtgtgtcatcctcaaaatatccgtgggtcttttgtctttataatattctgacaccaaaagtgagagaagtagtagttgaattttatgatttgcattgttaaatgagggcttatcttccttaacaaataataacatcaagaacttaaacgaaaattgaacattctgactcgaccgagtggaatattggtgaacgatactaagttagatggacctatattacagattctattcatgaacaatgctatttcaaagcaatatcatcaagaaatagaggaatttgtatcaaatttagtaaaaagatttgaggaacagcagaaaaatgatgtggaaaagacttcctttaatcttttgccccagccatccagtattgtgctagaggaggaccacaaagtggaagagtcctgtgccattaaaaacaacaaggaagctttcagtgtaccatcaagtcttcagccacattgtttctctagaagggcaagaaatacaagtaaaggcaaaaaggccaaagcctcactgtttcaattgtggttctgaagaacaccaaatgaaagattgcccaatgcctcggaatgctgctcgaataagtgaaaagagaaaagagtatatggatgcctgtggagaagcaaacaatcagaatttccagcagcgataccacgcagaagaagtagaagaaagatttggaagattcaagccaggagttattagtgaggaacttcaagatgcactaggtgtgacagacaagagtcttccaccttttatctatcggatgcgccagctagggtacccaccagggtggctcaaagaggctgaattggagaattcggggcttgcactctatgatggaaaagatggcactgatggggaaacagaagttggagaaatacaacagaataaaagtgtcacttacgatctctcaaaattggtcaactatcctggttttaatatatctactcccagaggaattccagacgaatggaggatctttggttccataccaatgcaggcatgtcagcagaaggatgtgtttgccaattaccttacttctaacttccaagcgccaggtgtgaagtctggcaacaagaggtcttcatctcactctagcccaggtagtccaaagaagcagaagaatgaaagcaactcagcgggatctcccgccgacatggagctcgattcagatatggaggtaccacatggttctcagagcagcgaaagttttcagtttcaaccaccattacctcctgacactcctccactcccccggggaactcctccacccgtcttcacccctccactcccaaagggcaccccgccgctgactcccagtgactcaccccagaccagaacagcatctggagctgtggatgaggacgcactgactctagaagaacttgaagaacagcagaggcggatctgggcagctcttgagcaggccgagagcgtaaacagcgactccgacgttcctgtggacacacctttaactggcaattccgttgcctcatcaccttgtccaaatgagctagacctccctgtcccggagggaaaaacatctgaaaagcagacgctggatgagcctgaggtaccagagatttttacaaagaaatcagaagctggacatgcctccagtccagactctgaggtgacatcactttgtcagaaggaaaaagcagagttggctccggtaaacactgaaggtgcccttcttgataatggcagtgtcgtaccaaactgtgacatcagcaatgggggcagccagaagctctttcctgcagacaccagtccttcaacggccactaaaattcatagccctatacctgacatgagcaaatttgcaactggaatcacgccatttgaatttgagaatatggcagaatctactggaatgtacctcaggataagaagcttgttaaagaactcaccccgaaaccagcagaaaaacaaaaaggcctctgaataatggcttgacttagcactgagagctatttaataactttgttccgttaattagtactaattaagtggatagatagaatggttttcctgtttgtccctcccatgtttaaaaatctatccaaggttcatgttccaaagtcaagcctattttaaagaaagactgagctcactagttcagtatattttattctcactgacaaaacttggggggagatgtgaatatgacctggtttagagagggtttgttaaggtttatactatttttggattgtgactatccgtcgagagtgatggtttttatctgtcttttgtacattgttttccctttctacattttgctaattatcctgtatataagtttaatatatcactttttaaaagaaaaaattctaccattttaaattcatgtttcaactcctacaaccaaatgagaaaaatcagggatgagcagctttatcccatttggggtatttttgtaagtgatttacatgtgtcaattttagtaatacttttacttttttgtaacttcatccttcatatatgcttgctatacaggtatgttcatctttgtgtacagaggtttaataaattagttttcatatacataatctaagactttgaatacaaaaaa

SEQ ID NO: 204372 - DNA, 2955 bp, Homo sapiens
  Payload ID: 20309
  Gene Name: zinc finger, CCHC domain containing 8
  Uniprot ID: Q6NZY4
  ENST ID: ENST00000633063
  CDS Start-End: 234-2357
atgccgtcctccgggcaatcgcaagcccgataggccccgctgcattccgggagttgtagtctctagcgactggccccgccccgtgtgcagctttcgcggcctgcgtctggagaaaaccctagcgggtggctccgtgcggccagagctctagagagtggtgccgccttccaaccttcttccccaagccctggtggccggctccgcctcttctcgaatcttttccacagcccaaaatggccgcagaggtgtattttggcgatctagagctcttcgagccgttcgaccacccagaggagtcgattccgaagcccgttcacactcgcttcaaggacgacgacggcgacgaggaggacgaaaatggggtcggcgacgcggagctacgggagcggcttcggcagtgcgaggagaccatcgagcagctccgcgccgagaatcaagaacttaaacgaaaattgaacattctgactcgaccgagtggaatattggtgaacgatactaagttagatggacctatattacagattctattcatgaacaatgctatttcaaagcaatatcatcaagaaatagaggaatttgtatcaaatttagtaaaaagatttgaggaacagcagaaaaatgatgtggaaaagacttcctttaatcttttgccccagccatccagtattgtgctagaggaggaccacaaagtggaagagtcctgtgccattaaaaacaacaaggaagctttcagtgttgtaggaagtgtcctgtattttactaatttttgccttgataaattggggcaaccgcttctaaatgaaaaccctcagctttccgaaggatgggaaatacccaagtaccatcaagtcttcagccacattgtttctctagaagggcaagaaatacaagtaaaggcaaaaaggccaaagcctcactgtttcaattgtggttctgaagaacaccaaatgaaagattgcccaatgcctcggaatgctgctcgaataagtgaaaagagaaaagagtatatggatgcctgtggagaagcaaacaatcagaatttccagcagcgataccacgcagaagaagtagaagaaagatttggaagattcaagccaggagttattagtgaggaacttcaagatgcactaggtgtgacagacaagagtcttccaccttttatctatcggatgcgccagctagggtacccaccagggtggctcaaagaggctgaattggagaattcggggcttgcactctatgatggaaaagatggcactgatggggaaacagaagttggagaaatacaacagaataaaagtgtcacttacgatctctcaaaattggtcaactatcctggttttaatatatctactcccagaggaattccagacgaatggaggatctttggttccataccaatgcaggcatgtcagcagaaggatgtgtttgccaattaccttacttctaacttccaagcgccaggtgtgaagtctggcaacaagaggtcttcatctcactctagcccaggtagtccaaagaagcagaagaatgaaagcaactcagcgggatctcccgccgacatggagctcgattcagatatggaggtaccacatggttctcagagcagcgaaagttttcagtttcaaccaccattacctcctgacactcctccactcccccggggaactcctccacccgtcttcacccctccactcccaaagggcaccccgccgctgactcccagtgactcaccccagaccagaacagcatctggagctgtggatgaggacgcactgactctagaagaacttgaagaacagcagaggcggatctgggcagctcttgagcaggccgagagcgtaaacagcgactccgacgttcctgtggacacacctttaactggcaattccgttgcctcatcaccttgtccaaatgagctagacctccctgtcccggagggaaaaacatctgaaaagcagacgctggatgagcctgaggtaccagagatttttacaaagaaatcagaagctggacatgcctccagtccagactctgaggtgacatcactttgtcagaaggaaaaagcagagttggctccggtaaacactgaaggtgcccttcttgataatggcagtgtcgtaccaaactgtgacatcagcaatgggggcagccagaagctctttcctgcagacaccagtccttcaacggccactaaaattcatagccctatacctgacatgagcaaatttgcaactggaatcacgccatttgaatttgagaatatggcagaatctactggaatgtacctcaggataagaagcttgttaaagaactcaccccgaaaccagcagaaaaacaaaaaggcctctgaataatggcttgacttagcactgagagctatttaataactttgttccgttaattagtactaattaagtggatagatagaatggttttcctgtttgtccctcccatgtttaaaaatctatccaaggttcatgttccaaagtcaagcctattttaaagaaagactgagctcactagttcagtatattttattctcactgacaaaacttggggggagatgtgaatatgacctggtttagagagggtttgttaaggtttatactatttttggattgtgactatccgtcgagagtgatggtttttatctgtcttttgtacattgttttccctttctacattttgctaattatcctgtatataagtttaatatatcactttttaaaagaaaaaattctaccattttaaattcatgtttcaactcctacaaccaaatgagaaaaatcagggatgagcagctttatcccatttggggtatttttgtaagtgatttacatgtgtcaattttagtaatacttttacttttttgtaacttcatccttcatatatgcttgctatacaggtatgttcatctttgtgtacagaggtttaataaattagttttcatat

SEQ ID NO: 204373 - DNA, 4606 bp, Homo sapiens
  Payload ID: 20310
  Gene Name: zinc finger, CCHC domain containing 9
  Uniprot ID: Q8N567
  ENST ID: ENST00000254037
  CDS Start-End: 3156-3971
ctccaataccgcaggagggcggtcttccccggctcgccaactcggctgctctgggggattcgtgcgcggtaagaagctgcgcggtagcgcggtgaggtgaggttctcagccaccaaagctgcagggtctcgtcgttcgttccctctggcctggcggaacttgcgtgggaagctgggaggacagaaggcttagccgctgggtccctgagctggctggagcgcgggctgtctaggggcggcgacctcagctgttgggctccggctgctgggggctgtgcgtccagccgccctggaatccgcctgtgggtgggccgcttggctctcccacttcaccctcttgataacccagagcctcccccttcccacgtacgtaggggaaggataatctacttccttttgaacagcttcggtccccactatgacagtcgcataaacttcagcgaagagtgcgctggtaaagtggcatggagtttctcacaccaattcattgggtccacccttcagcttctgtggaaggggtctttctgttactaggagctgagacttggggggttgccagggatgctggtcttaaaaggtgataatttaggccgggcgcggtggctcacgcctgtaatcccagcactttgggaggtcgaggcgggcagatctcctgagctcaggagttcgagaccaccctgggcaacatggtgaaaccccttctctactaaaatacaaaaaattagctgggcgtggtggcacgcgcctgtaatcccagctattcgggaggctgaggcccgagaatcgcttgagccctggcggcagaggttgcagtgagccaagatcgcccactgcactccaggttgggctacagagtgagactccgtctcaacaacgaccacaacaacaacaaaaaaggtggtggcttaatacagccatgctccccttaagaactggtatagttatgagaaatggttgggccgtttcgtggttgtgtgaacatcatagtgtacttgcacaaacctacacagctgggccgtatgggatagcctgttactcctagtctacagacctgtacagtataactactaaatactgtaggcagttgtaaaaggatggtgtgtatctaaacacagaaaagatactgtaaaaatatagtgtaaaagaaaacatggtacagctgaatagggcacttacgcatggagcttgcagggctgtcggtagctattaagtgagtcagtgagtggtatgtgagtgtgaaggcctacgatattatttagggtattactgtacactactgtagactttataaatgcggtatgcttagtctaagtttattaaaaataaggtaataaccttagcttactgtgcttttttaactttataaacttttaaattaattttaactccttgaccttttttttttttttttgagacggagtttattctctctgtctctcatttttgagacagagttttgctcttgtcacccaggctggagtgcagtggcgcaatctcagctcactgcaacgtccacctcttgagttcaagcgattctcctgcctcagcttcccaggtggtgcgcgcctgtagctgggactacaagagtgcgccaccacgcccagctaatttttgtatttttagtagagatggggtttgaccatgttggccaggatggtctcgatatcctgaccttgtgatccacctggccttggcctcccaaagtgctgggattacaggcgtgagccaccatacccggcccactcttttgtaataacacttagcttaaaatgctaatgtgttgtatagctatataaaaatattttctttattcccttacattattctatagctttttcctgtaaaaattttttttgttgttataaactaagacacacacattgtgcctacaccgggtcaggagcatcaatatcactcttttcttcctccacatcttgtcctactggaaggttttcaggggcagtaacatgaatggagctgtcatctcctataataactgcttttttctggaatacttataattgtctagtattatgtacagtacatcattgtaagcattatgcttgtatatgactggcatcccaggtttgtttacaccagcattaccacagacatgagtaatgtgttacactacaagttatgagggctacaaagtcaataggaatttttcagctccattataatcatctgagaccagtatcatgtgtgcagtcgctgttgacctaaatgttatgtagcatgtgactagctgatgaatctttgattatggctgaatgttctcattcattgcaggaaaaaaatatcctccaaatcactaggtagtatgtaagtgaccaaaacttttttccattttatgttggagccaaatcattagtgttaggataaattacttctttatgtatgtgctctaaaatgaaaagttatttctgaatattaaagcatatgtattaagagtataaaaacaagatacagattttggtgtgaaatatatcttatgattcaagtcataatttaaatagaattgaagatgatgtgaaatcactgggctggaagtagcttataccttgattagtaagaggaagcccgggatcatcctgtgatggtaaacacttttatatgttttacttataactttgccaggaaatttcaacaaacttcatattaaaggacatgatttctgtatacttagtaatctgctatgcaaattgttgcattgaaatggcagacgaagcaagaagattgggagaaagtagctgtgggacttggagataggaaaataaacagccgggaaaactgcagaatgtgggaggaataattgcattcattgtattactatctgatttatattttatgaaataatttggtttcttaagatagtttttcaattttaagcacaccttttttaactggtgtggcagcttttctggtaagtggtagatttatgttagaagcatgtctatgcagcatattatagcattaaatatgtatacagatatctaactgaaataaaaagtgttttaataattaaaagtttaacatatgggcatatgtgacatatagtgatatagcatgtctctttagttttgttgtttttgttgttgatggctaaccacccatgcttgtcttaaaaattgataaggtaccactgatgaaattatgaccaggtgggcccgagttagtaccacatataacaagagacccttgcctgcaacatcatgggaggacatgaagaagggatcctttgagggaacaagccaaaacctaccaaagcgtaaacaacttgaagccaataggctatccctcaaaaatgatgcaccccaagcaaaacataaaaagaacaaaaagaaaaaagagtacttaaatgaagatgtgaatggattcatggaatacctaagacagaattcacagatggttcacaatgggcaaattatagcaacagacagtgaggaagtaagggaagaaattgcagttgctttaaagaaagacagtcgacgggaaggaagaagattaaaaagacaagcggcaaagaaaaatgcaatggtgtgtttccattgtagaaaacctggtcatggaattgcagattgccccgccgcccttgaaaatcaagacatgggcactgggatatgttacaggtgtgggtccacagagcacgaaataaccaagtgtaaggctaaagtagacccggctcttggcgaatttccttttgcaaaatgttttgtttgtggagaaatggggcacctgtctagatcttgtcctgataatcccaaaggactctatgctgatggtggcggttgcaaactttgtggctctgtggaacatttaaagaaagattgccctgaaagtcagaattcagagcgaatggtcacagttggtcgctgggcaaagggaatgagtgcagactatgaagaaattttggatgtacctaaaccgcaaaaacccaaaacaaaaatacctaaagttgttaatttttgataacagctagcactatcatgagttactacctcattgttactttctaaaccaggcccgcttcacgagttagagttgagctcccctgtagccaggactatgctgtagatatcagtatgatctgggtgtggccaaaaacaattttctttattctgtctatcaaatagtacttctaccactgtttggagaaaattgaagaaaagaataagatgattaaatgaattctctaaaagaacatattttaagagacagaacttagacataaccaagtagttgtatacctgattgtaacaatcatcttttataaaagcaaaattatgcataaatgtaaaacacccctaaacaaagggaacaaatgaatttttggttatattgttttcttggctcaaagtatcaatttattattataatagaaatttataagttgctagaaagtctatatttttaaagtacggaataaaaatatgttttctattaagcaatagaaatatttttgtgtataatttttctgaatacttgattctcgattgaaatatccattgttcgttaatatccatgtaacaatcccattggaaacaagattttttttgaatcctagatgagaataaacagggatttggtttttgttttagttttga

SEQ ID NO: 204374 - DNA, 1372 bp, Homo sapiens
  Payload ID: 20310
  Gene Name: zinc finger, CCHC domain containing 9
  Uniprot ID: Q8N567
  ENST ID: ENST00000380199
  CDS Start-End: 65-880
gtcttccccggctcgccaactcggctgctctgggggattcgtgcgcggtaccactgatgaaattatgaccaggtgggcccgagttagtaccacatataacaagagacccttgcctgcaacatcatgggaggacatgaagaagggatcctttgagggaacaagccaaaacctaccaaagcgtaaacaacttgaagccaataggctatccctcaaaaatgatgcaccccaagcaaaacataaaaagaacaaaaagaaaaaagagtacttaaatgaagatgtgaatggattcatggaatacctaagacagaattcacagatggttcacaatgggcaaattatagcaacagacagtgaggaagtaagggaagaaattgcagttgctttaaagaaagacagtcgacgggaaggaagaagattaaaaagacaagcggcaaagaaaaatgcaatggtgtgtttccattgtagaaaacctggtcatggaattgcagattgccccgccgcccttgaaaatcaagacatgggcactgggatatgttacaggtgtgggtccacagagcacgaaataaccaagtgtaaggctaaagtagacccggctcttggcgaatttccttttgcaaaatgttttgtttgtggagaaatggggcacctgtctagatcttgtcctgataatcccaaaggactctatgctgatggtggcggttgcaaactttgtggctctgtggaacatttaaagaaagattgccctgaaagtcagaattcagagcgaatggtcacagttggtcgctgggcaaagggaatgagtgcagactatgaagaaattttggatgtacctaaaccgcaaaaacccaaaacaaaaatacctaaagttgttaatttttgataacagctagcactatcatgagttactacctcattgttactttctaaaccaggcccgcttcacgagttagagttgagctcccctgtagccaggactatgctgtagatatcagtatgatctgggtgtggccaaaaacaattttctttattctgtctatcaaatagtacttctaccactgtttggagaaaattgaagaaaagaataagatgattaaatgaattctctaaaagaacatattttaagagacagaacttagacataaccaagtagttgtatacctgattgtaacaatcatcttttataaaagcaaaattatgcataaatgtaaaacacccctaaacaaagggaacaaatgaatttttggttatattgttttcttggctcaaagtatcaatttattattataatagaaatttataagttgctagaaagtctatatttttaaagtacggaataaaaatatgttttctattaagcaatagaaatattttt

SEQ ID NO: 204375 - DNA, 1555 bp, Homo sapiens
  Payload ID: 20310
  Gene Name: zinc finger, CCHC domain containing 9
  Uniprot ID: Q8N567
  ENST ID: ENST00000407610
  CDS Start-End: 105-920
cgcaggagggcggtcttccccggctcgccaactcggctgctctgggggattcgtgcgcggtaagaagctgcgcggtagcgcggtgaggtaccactgatgaaattatgaccaggtgggcccgagttagtaccacatataacaagagacccttgcctgcaacatcatgggaggacatgaagaagggatcctttgagggaacaagccaaaacctaccaaagcgtaaacaacttgaagccaataggctatccctcaaaaatgatgcaccccaagcaaaacataaaaagaacaaaaagaaaaaagagtacttaaatgaagatgtgaatggattcatggaatacctaagacagaattcacagatggttcacaatgggcaaattatagcaacagacagtgaggaagtaagggaagaaattgcagttgctttaaagaaagacagtcgacgggaaggaagaagattaaaaagacaagcggcaaagaaaaatgcaatggtgtgtttccattgtagaaaacctggtcatggaattgcagattgccccgccgcccttgaaaatcaagacatgggcactgggatatgttacaggtgtgggtccacagagcacgaaataaccaagtgtaaggctaaagtagacccggctcttggcgaatttccttttgcaaaatgttttgtttgtggagaaatggggcacctgtctagatcttgtcctgataatcccaaaggactctatgctgatggtggcggttgcaaactttgtggctctgtggaacatttaaagaaagattgccctgaaagtcagaattcagagcgaatggtcacagttggtcgctgggcaaagggaatgagtgcagactatgaagaaattttggatgtacctaaaccgcaaaaacccaaaacaaaaatacctaaagttgttaatttttgataacagctagcactatcatgagttactacctcattgttactttctaaaccaggcccgcttcacgagttagagttgagctcccctgtagccaggactatgctgtagatatcagtatgatctgggtgtggccaaaaacaattttctttattctgtctatcaaatagtacttctaccactgtttggagaaaattgaagaaaagaataagatgattaaatgaattctctaaaagaacatattttaagagacagaacttagacataaccaagtagttgtatacctgattgtaacaatcatcttttataaaagcaaaattatgcataaatgtaaaacacccctaaacaaagggaacaaatgaatttttggttatattgttttcttggctcaaagtatcaatttattattataatagaaatttataagttgctagaaagtctatatttttaaagtacggaataaaaatatgttttctattaagcaatagaaatatttttgtgtataatttttctgaatacttgattctcgattgaaatatccattgttcgttaatatccatgtaacaatcccattggaaacaagattttttttgaatcctagatgagaataaacagggatttggtttttgttttagttttga

SEQ ID NO: 204376 - DNA, 1248 bp, Homo sapiens
  Payload ID: 20310
  Gene Name: zinc finger, CCHC domain containing 9
  Uniprot ID: Q8N567
  ENST ID: ENST00000438268
  CDS Start-End: 433-1248
aactcggctgctctgggggattcgtgcgcggtaagaagctgcgcggtagcgcggtgaggtgaggttctcagccaccaaagctgcagggtctcgtcgttcgttccctctggcctggcggaacttgcgtgggaagctgggaggacagaaggcttagccgctgggtccctgagctggctggagcgcgggctgtctaggggcggcgacctcagctgttgggctccggctgctgggggctgtgcgtccagccgccctggaatccgcctgtgggtgggccgcttggctctcccacttcaccctcttgataacccagagcctcccccttcccacgtacgtaggggaaggataatctacttccttttgaacagcttcggtccccactatgacagtcgcataaacttcagcgaagagtgcgctggtaccactgatgaaattatgaccaggtgggcccgagttagtaccacatataacaagagacccttgcctgcaacatcatgggaggacatgaagaagggatcctttgagggaacaagccaaaacctaccaaagcgtaaacaacttgaagccaataggctatccctcaaaaatgatgcaccccaagcaaaacataaaaagaacaaaaagaaaaaagagtacttaaatgaagatgtgaatggattcatggaatacctaagacagaattcacagatggttcacaatgggcaaattatagcaacagacagtgaggaagtaagggaagaaattgcagttgctttaaagaaagacagtcgacgggaaggaagaagattaaaaagacaagcggcaaagaaaaatgcaatggtgtgtttccattgtagaaaacctggtcatggaattgcagattgccccgccgcccttgaaaatcaagacatgggcactgggatatgttacaggtgtgggtccacagagcacgaaataaccaagtgtaaggctaaagtagacccggctcttggcgaatttccttttgcaaaatgttttgtttgtggagaaatggggcacctgtctagatcttgtcctgataatcccaaaggactctatgctgatggtggcggttgcaaactttgtggctctgtggaacatttaaagaaagattgccctgaaagtcagaattcagagcgaatggtcacagttggtcgctgggcaaagggaatgagtgcagactatgaagaaattttggatgtacctaaaccgcaaaaacccaaaacaaaaatacctaaagttgttaatttttga

SEQ ID NO: 204377 - DNA, 2110 bp, Homo sapiens
  Payload ID: 20311
  Gene Name: zinc finger, CW type with PWWP domain 1
  Uniprot ID: Q9H0M4
  ENST ID: ENST00000360951
  CDS Start-End: 234-1808
gagatgcgccgcccggtctccctgccagcggagtgctgggccgaggacagggcggcaggggtgacagtggggtccaggagagtctcaaaatcctaagctttcagtatttgttattgtgaaagaagttaattcacctgaaacagaggaggggcaacctgagttatcagaaagtgacttcctggccttcccttctttactgatcagaggcacacaaagcgtagtttctaagctgaatgatgacaacgttgcagaataaagaagaatgtggaaagggaccaaagagaatctttgccccacctgcacaaaaatcttacagcctgttaccttgtagccctaactcccctaaggaggagaccccggggatcagttccccagagacagaggccaggataagcctgccaaaggccagtttaaagaagaaagaggaaaaagcaaccatgaagaatgttccaagcagggaacaggagaaaaaaagaaaggcacaaatcaacaagcaagcagagaagaaagaaaaggaaaaatcaagtcttaccaatgcagaatttgaggagattgtccagattgttctgcagaagtcccttcaggagtgcttggggatgggatctggccttgattttgcagagacttcttgtgcccagcccgtagtatctacccaatcagacaaggagccaggaattactgcttctgctactgatactgataatgctaatggagaggaggtaccacatactcaagagatttcagtgtcttgggaaggtgaagctgcccctgagataaggacatctaagttaggccagccagatcctgcaccctctaagaagaaatccaatagactcaccttaagcaaaagaaagaaggaagctcaagatgagaaggtggagaaaactcaaggtggacatgagcacagacaggaagaccgactaaagaaaacagttcaggatcattctcagatcagggaccagcaaaaaggagagataagtggttttggtcaatgtctggtctgggtccagtgttccttcccaaactgtgggaaatggaggcggctgtgtgggaacattgacccctcagttctcccagataattggtcctgtgatcagaacacagatgtgcagtataatcgctgtgatattcctgaggagacctggacagggcttgagagtgatgtggcctatgcctcctacatcccaggatccatcatctgggccaagcaatacggttacccctggtggccaggcatgatagaatctgatcctgacttaggggaatattttctttttacttcccatcttgattccctgccgtctaagtaccatgtgacgttttttggagaaacagtttctcgtgcatggatcccagtcaacatgctaaagaacttccaggagctgtccctggagctatcagtcatgaaaaagcgcagaaatgactgcagccagaaactgggggtggccctgatgatggctcaagaggcagaacagatcagcattcaggaacgggttaacttgtttggtttctggagccgattcaacggatctaacagtaatggggaaagaaaagacttacagctctctggtttgaacagcccaggatcctgcttagagaaaaaggagaaagaggaagagttggaaaaggaggaaggagagaaaacagccctaagaaaaaatttaaagctccccagagcaaggccttggcagccagcttttcagagggaaaagaagttagaacagtgccaaagaacctgggcctatcagcgtgtaagggggcctgcccctcatctgcgaaagaagagcccagacaccgggaacccctgacccaggaggctggaagtgtcccccttgaggacgaagcctccagtgacctggacctggagcaactcatggaagatgttgggagagagctggggcagagcggggagctgcagcacagcaacagtgatggcgaggacttccccgtggcgctgtttgggaagtagctggtgctcctctgctccctctttttctcccttctctggggcgcaggagggagaagttgctaagtgctgggtctgttcattggctatgaggttcaaatgtgtgtggtgcagtttctgtgttaataaagcaggttacagtcg

SEQ ID NO: 204378 - DNA, 2356 bp, Homo sapiens
  Payload ID: 20311
  Gene Name: zinc finger, CW type with PWWP domain 1
  Uniprot ID: Q9H0M4
  ENST ID: ENST00000398027
  CDS Start-End: 249-2195
cgccgttttcccggggagatgcgccgcccggtctccctgccagcggagtgctgggccgaggacagggcggcaggggtgacagtggggtccaggagagtctcaaaatcctaagctttcagtatttgttattgtgaaagaagttaattcacctgaaacagaggaggggcaacctgagttatcagaaagtgacttcctggccttcccttctttactgatcagaggcacacaaagcgtagtttctaagctgaatgatgacaacgttgcagaataaagaagaatgtggaaagggaccaaagagaatctttgccccacctgcacaaaaatcttacagcctgttaccttgtagccctaactcccctaaggaggagaccccggggatcagttccccagagacagaggccaggataagcctgccaaaggccagtttaaagaagaaagaggaaaaagcaaccatgaagaatgttccaagcagggaacaggagaaaaaaagaaaggcacaaatcaacaagcaagcagagaagaaagaaaaggaaaaatcaagtcttaccaatgcagaatttgaggagattgtccagattgttctgcagaagtcccttcaggagtgcttggggatgggatctggccttgattttgcagagacttcttgtgcccagcccgtagtatctacccaatcagacaaggagccaggaattactgcttctgctactgatactgataatgctaatggagaggaggtaccacatactcaagagatttcagtgtcttgggaaggtgaagctgcccctgagataaggacatctaagttaggccagccagatcctgcaccctctaagaagaaatccaatagactcaccttaagcaaaagaaagaaggaagctcatgagaaggtggagaaaactcaaggtggacatgagcacagacaggaagaccgactaaagaaaacagttcaggatcattctcagatcagggaccagcaaaaaggagagataagtggttttggtcaatgtctggtctgggtccagtgttccttcccaaactgtgggaaatggaggcggctgtgtgggaacattgacccctcagttctcccagataattggtcctgtgatcagaacacagatgtgcagtataatcgctgtgatattcctgaggagacctggacagggcttgagagtgatgtggcctatgcctcctacatcccaggatccatcatctgggccaagcaatacggttacccctggtggccaggcatgatagaatctgatcctgacttaggggaatattttctttttacttcccatcttgattccctgccgtctaagtaccatgtgacgttttttggagaaacagtttctcgtgcatggatcccagtcaacatgctaaagaacttccaggagctgtccctggagctatcagtcatgaaaaagcgcagaaatgactgcagccagaaactgggggtggccctgatgatggctcaagaggcagaacagatcagcattcaggaacgggttaacttgtttggtttctggagccgattcaacggatctaacagtaatggggaaagaaaagacttacagctctctggtttgaacagcccaggatcctgcttagagaaaaaggagaaagaggaagagttggaaaaggaggaaggagagaaaacagacccaattttgcccattcgtaagcgagtcaaaatacagacccaaaaaaccaagccaagagggcttgggggtgatgcaggcacagcagatggccgaggcaggacactgcagaggaagataatgaagagatctctaggcaggaaatccacagctcctcctgcacccagaatgggaaggaaagaaggccaagggaattcagattctgaccagccaggccctaagaaaaaatttaaagctccccagagcaaggccttggcagccagcttttcagagggaaaagaagttagaacagtgccaaagaacctgggcctatcagcgtgtaagggggcctgcccctcatctgcgaaagaagagcccagacaccgggaacccctgacccaggaggctggaagtgtcccccttgaggacgaagcctccagtgacctggacctggagcaactcatggaagatgttgggagagagctggggcagagcggggagctgcagcacagcaacagtgatggcgaggacttccccgtggcgctgtttgggaagtagctggtgctcctctgctccctctttttctcccttctctggggcgcaggagggagaagttgctaagtgctgggtctgttcattggctatgaggttcaaatgtgtgtggtgcagtttctgtgttaataaagcaggttacagtcgactgggttggctggtctcta

SEQ ID NO: 204379 - DNA, 822 bp, Homo sapiens
  Payload ID: 20311
  Gene Name: zinc finger, CW type with PWWP domain 1
  ENST ID: ENST00000471336
  CDS Start-End: 1-741
ggtcaatgtctggtctgggtccagtgttccttcccaaactgtgggaaatggaggcggctgtgtgggaacattgacccctcagttctcccagataattggtcctgtgatcagaacacagatgtgcagtataatcgctgtgatattcctgaggagacctggacagggcttgagagtgatgtggcctatgcctcctacatcccaggatccatcatctgggccaagcaatacggttacccctggtggccaggcatgatagaatctgatcctgacttaggggaatattttctttttacttcccatcttgattccctgccgtctaagtaccatgtgacgttttttggagaaacagtttctcgtgcatggatcccagtcaacatgctaaagaacttccaggagctgtccctggagctatcagtcatggaacgggttaacttgtttggtttctggagccgattcaacggatctaacagtaatggggaaagaaaagacttacagctctctggtttgaacagcccaggatcctgcttagagaaaaaggagaaagaggaagagttggaaaaggaggaaggagagaaaacagccctaagaaaaaatttaaagctccccagagcaaggccttggcagccagcttttcagagggaaaagaagttagaacagtgccaaagaacctgggcctatcagcgtgtaagggggcctgcccctcatctgcgaaagaagagcccagacaccgggaacccctgacccaggaggctggaagtgtcccccttgaggacgaagcctccagtgacctggacctggagcaactcatggaagatgttggga

SEQ ID NO: 204380 - DNA, 2031 bp, Homo sapiens
  Payload ID: 20311
  Gene Name: zinc finger, CW type with PWWP domain 1
  Uniprot ID: Q9H0M4
  ENST ID: ENST00000490721
  CDS Start-End: 439-1872
gaaagggaccaaagagaatctttgccccacctgcacaaaaatcttacagcctgttaccttgtagccctaactcccctaaggaggagaccccggggatcagttccccagagacagaggccaggataagcctgccaaaggccagtttaaagaagaaagaggaaaaagcaaccatgaagaatgttccaagcagggaacaggagaaaaaaagaaaggcacaaatcaacaagcaagcagagaagaaagaaaaggaaaaatcaagtcttaccaatgcagaatttgaggagattgtccagattgttctgcagaagtcccttcaggagtgcttgggtatggcatgtagtaagagaaaaagggtttcagttaagcagtgactgttacctgagagggagagttaagtctgacagcttctctctttctctcccatcttctaaataagggatgggatctggccttgattttgcagagacttcttgtgcccagcccgtagtatctacccaatcagacaaggagccaggaattactgcttctgctactgatactgataatgctaatggagaggaggtaccacatactcaagagatttcagtgtcttgggaaggtgaagctgcccctgagataaggacatctaagttaggccagccagatcctgcaccctctaagaagaaatccaatagactcaccttaagcaaaagaaagaaggaagctcaagatgagaaggtggagaaaactcaaggtggacatgagcacagacaggaagaccgactaaagaaaacagttcaggatcattctcagatcagggaccagcaaaaaggagagataagtggttttggtcaatgtctggtctgggtccagtgttccttcccaaactgtgggaaatggaggcggctgtgtgggaacattgacccctcagttctcccagataattggtcctgtgatcagaacacagatgtgcagtataatcgctgtgatattcctgaggagacctggacagggcttgagagtgatgtggcctatgcctcctacatcccaggatccatcatctgggccaagcaatacggttacccctggtggccaggcatgatagaatctgatcctgacttaggggaatattttctttttacttcccatcttgattccctgccgtctaagtaccatgtgacgttttttggagaaacagtttctcgtgcatggatcccagtcaacatgctaaagaacttccaggagctgtccctggagctatcagtcatgaaaaagcgcagaaatgactgcagccagaaactgggggtggccctgatgatggctcaagaggcagaacagatcagcattcaggaacgggttaacttgtttggtttctggagccgattcaacggatctaacagtaatggggaaagaaaagacttacagctctctggtttgaacagcccaggatcctgcttagagaaaaaggagaaagaggaagagttggaaaaggaggaaggagagaaaacagacccaattttgcccattcgtaagcgagtcaaaatacagacccaaaaaaccaagccaagaggccctaagaaaaaatttaaagctccccagagcaaggccttggcagccagcttttcagagggaaaagaagttagaacagtgccaaagaacctgggcctatcagcgtgtaagggggcctgcccctcatctgcgaaagaagagcccagacaccgggaacccctgacccaggaggctggaagtgtcccccttgaggacgaagcctccagtgacctggacctggagcaactcatggaagatgttgggagagagctggggcagagcggggagctgcagcacagcaacagtgatggcgaggacttccccgtggcgctgtttgggaagtagctggtgctcctctgctccctctttttctcccttctctggggcgcaggagggagaagttgctaagtgctgggtctgttcattggctatgaggttcaaatgtgtgtggtgcagtttctgtgttaataaagcaggttacagtcgactgggttggctggtctc

SEQ ID NO: 204381 - DNA, 617 bp, Homo sapiens
  Payload ID: 20311
  Gene Name: zinc finger, CW type with PWWP domain 1
  ENST ID: ENST00000472716
  CDS Start-End: 503-617
aacacccaccgcggcgccacgccgacttatataccagcgagtgtgggcggggacgggggttcggtccgcgctgggcccccccagcttctgccaatgaggaagaagcgagtctacgccgttttcccggggagatgcgccgcccggtctccctgccagcggagtgctgggccgaggacagggcggcaggggtgacagtggggtccaggagagtctcaaaatcctaagctttcagtatttgttattgtgaaagaagttaattcacctgaaacagaggaggggcaacctgagttatcagaaagtgacttcctggccttcccttctttactgatcagaggcacacaaagcgtagtttctaagctgaatgatgacaacgttgcagaataaagaagccctaactcccctaaggaggagaccccggggatcagttccccagagacagaggccaggataagcctgccaaaggccagtttaaagaagaaagaggaaaaagcaaccatgaagaatgttccaagcagggaacaggagaaaaaaagaaaggcacaaatcaacaagcaagcagagaagaaagaaaaggaaaaatcaagtcttaccaatgcagaatttgaggagattgtcca

SEQ ID NO: 204382 - DNA, 1716 bp, Homo sapiens
  Payload ID: 20312
  Gene Name: zinc finger, CW type with PWWP domain 2
  Uniprot ID: Q504Y3
  ENST ID: ENST00000383768
  CDS Start-End: 189-1259
ggcgggacggggcggggccgcgggacgccaggaggcggaggcggagtggagttagattcatcccagtagaacgcctgcctctttagtgactacagacctcacttcccttctctggagttttggagtctattttcttcatggaattttgctaggaacaaaagaaaagtctaactccattaaatgccttaatggataaagaaaaattggatgttaagattgaatattgtaactatgcaatggattcctcagtggaaaacatgtatgtaaacaaagtgtgggttcaatgtgagaatgaaaattgtttgaaatggagattgttatcaagtgaggattcagccaaggttgatcatgatgaaccatggtactgcttcatgaacactgattcaagatataataactgctcaatttctgaagaagacttccctgaagagtctcagcttcatcagtgtggatttaagattgtctattcacagctccctcttggaagcctggttttggtaaaattacagaattggccaagttggccaggaatactttgccctgaccgttttaaagggaaatatgtaacttatgacccggatggaaatgttgaagagtatcacatagaattcctgggcgatccccattcaagatcatggataaaggcaacattcgttggacattatagtatcacattaaagccagaaaagtgtaagaataaaaagaagtggtataaaagtgcactacaagaagcatgtctactctatggatattctcatgagcaaagactggaaatgtgctgcctatcaaaactacaagataaatccgaaacacatgacaaagttgctgcactggtcaagaaaaggaagcagacttctaaaaataatattgaaaagaagaagcccaaatttagaaaaaggaaaaggaaagcaattttaaaatgctcttttgaaaatgtttattctgatgatgccttatcaaaggagaacagggttgtctgtgagacggaagttttactaaaagagctggagcaaatgctgcagcaagcactgcaacccacagccacacctgatgaatcagaagaaggacatggagaggaaataaatatgggagaaaagttatctaaatgcagcccagaagctcctgcaggcagtctgtttgaaaaccactatgaagaggactatcttgtaattgatgggataaaattaaaagctggagaatgtattgaggatataactaataaatttaaagaaatagatgctttgatgtctgagttttagaacattatacatttttcaaattaattataaaaatattggcatctttatatttatccaaagttaaaactttaaaaatgtttagtgaaataggtataaattataccaaagtttatatttgcggtaactttctacttcatattttgagaatggccatgatttttagagccagtcaaatggtatttaagttagtgttaaaaatttagaattaaaaaaccctgatatttgtatttatatatttcttgtttgccttaatttttaaatggtttgtgaaatttgcctaacaaacatatgttttacaatgattgtttaggccctttgttcaaaaatggataacttaaaatggctggccaagctattataattctcagaggtaattcaaatctaataaacttagagaatgtatatttgcagtggaatcaaactattacaaaataaaaggaaataattttttaaataa

SEQ ID NO: 204383 - DNA, 767 bp, Homo sapiens
  Payload ID: 20312
  Gene Name: zinc finger, CW type with PWWP domain 2
  ENST ID: ENST00000428875
  CDS Start-End: 1-496
ggattcctcagtggaaaacatgtatgtaaacaaagtgtgggttcaatgtgagaatgaaaattgtttgaaatggagattgttatcaagtgaggattcagccaaggttgatcatgatgaaccatggtactgcttcatgaacactgattcaagatataataactgctcaatttctgaagaagacttccctgaagagtctcagcttcatcagtgtggatttaagattgtctattcacagctccctcttggaagcctggttttggtaaaattacagaattggccaagttggccaggaatactttgccctgaccgttttaaagggaaatatgtaacttatgacccggatggaaatgttgaagagtatcacatagaattcctgggcgatccccattcaagatcatggataaaggcaacattcgttggacattatagtatcacattaaagattatgagatctatgacttatatccacatgttgctacagacatataagaaataatttaaagtaatgatcaatatttgaaatcataccaatgaatttttgaagctctataaagaagattaggctaatcacataattcaggattaaaaaatgtagcagcctttcattttcatctccagtttcctgactgggttgtttttcatgccaccttgaacgaaatatatctatttatactactcaataaatatttactcaactcctattatttgaaattcttctaggttccaaagtgaacaaaatagaccaaattgaatgccctcataaaatt

SEQ ID NO: 204384 - DNA, 759 bp, Homo sapiens
  Payload ID: 20312
  Gene Name: zinc finger, CW type with PWWP domain 2
  ENST ID: ENST00000457897
  CDS Start-End: 1-575
tagccttttcagctatcaagatgagagtcaacgctaagaatctaccccagatgtcaagaaagaccctgggcataatcaatgctgaagtgaaaaggatcaacactggagagagaagaggggaagagaagcagacttctaaaaataatattgaaaagaagaagcccaaatttagaaaaaggaaaaggaaagcaattttaaaatgctcttttgaaaatgtttattctgatgatgccttatcaaaggagaacagggttgtctgtgagacggaagttttactaaaagagctggagcaaatgctgcagcaagcactgcaacccacagccacacctgatgaatcagaagaaggacatggagaggaaataaatatgggagaaaagacaatttttttttttggagatagagtctcactttgtcaccaaggctggagtgaagtaatgcaatctttgctcactgcaatctctgcctcccaagttcaagtgattctcctgcctcagcctcctgagtatctgggattacagaataataaccaaaggaggtttatggtggaggatgaagaaaagctctgtctgagttagtgagtttgttaaagcaatttttcaagcaaaagaaaatttgtgattgaggccaaagagaatttgagagcctcaattactcagattttaaaaaacaacacttaatgtttacacttagtgtttgacgcttcattttccttcatatggataatagctaacatttattaaacacttcttatatgcccga

SEQ ID NO: 204385 - DNA, 1181 bp, Homo sapiens
  Payload ID: 20312
  Gene Name: zinc finger, CW type with PWWP domain 2
  ENST ID: ENST00000419130
  CDS Start-End: 1-724
atggataaaggcaacattcgttggacattatagtatcacattaaagactggagtgcagtggcacaatctcgcatcactgcagcatctgcctcccaggttcaagcagttctcctacctcagcctcccaagtagctgggaattacagccagaaaagtgtaagaataaaaagaagtggtataaaagtgcactacaagaagcatgtctactctatggatattctcatgagcaaagactggaaatgtgctgcctatcaaaactacaagataaatccgaaacacatgacaaagttgctgcactggtcaagaaaaggaagcagacttctaaaaataatattgaaaagaagaagcccaaatttagaaaaaggaaaaggaaagcaattttaaaatgctcttttgaaaatgtttattctgatgatgccttatcaaaggagaacagggttgtctgtgagacggaagttttactaaaagagctggagcaaatgctgcagcaagcactgcaacccacagccacacctgatgaatcagaagaaggacatggagaggaaataaatatgggagaaaagttatctaaatgcagcccagaagctcctgcaggcagtctgtttgaaaaccactatgaagaggactatcttgtaattgatgggataaaattaaaagctggagaatgtattgaggatataactaataaatttaaagaaatagatgctttgatgtctgagttttagaacattatacatttttcaaattaattataaaaatattggcatctttatatttatccaaagttaaaactttaaaaatgtttagtgaaataggtataaattataccaaagtttatatttgcggtaactttctacttcatattttgagaatggccatgatttttagagccagtcaaatggtatttaagttagtgttaaaaatttagaattaaaaaaccctgatatttgtatttatatatttcttgtttgccttaatttttaaatggtttgtgaaatttgcctaacaaacatatgttttacaatgattgtttaggccctttgttcaaaaatggataacttaaaatggctggccaagctattataattctcagaggtaattcaaatctaataaacttagagaatgtatatttgcagtggaatcaaactattacaaaataaaaggaaataattttttaaataa

SEQ ID NO: 204386 - DNA, 816 bp, Homo sapiens
  Payload ID: 20312
  Gene Name: zinc finger, CW type with PWWP domain 2
  ENST ID: ENST00000420223
  CDS Start-End: 437-816
cgcggcgggacggggcggggccgcgggacgccaggaggcggaggcggagtggagttaggactttgtctatatctgagctgtgaagaatatttacagtaaaaagaaacaattcatcccagtagaacgcctgcctctttagtgactacagacctcacttcccttctctggagttttggagtctattttcttcatggaattttgctaggaacaaaagaaaagtctaactccacattgtcagtctggctgctataacaaattaccgtagactgggtggcttcaacaacaaacatgtatttctcacagttctggaggctaaaaagtccaagatcaaggtgacagcaggtcctatatctgatgggggactgcttcctggttttcagatggctatcttctcactgtatcctcacatggtgaagagtcgagattaaatgccttaatggataaagaaaaattggatgttaagattgaatattgtaactatgcaatggattcctcagtggaaaacatgtatgtaaacaaagtgtgggttcaatgtgagaatgaaaattgtttgaaatggagattgttatcaagtgaggattcagccaaggttgatcatgatgaaccatggtactgcttcatgaacactgattcaagatataataactgctcaatttctgaagaagacttccctgaagagtctcagcttcatcagtgtggatttaagattgtctattcacagctccctcttggaagcctggttttggtaaaattacagaattggccaagttggccaggaatactttgccctgaccgttttaaagggaaatatgtaac

SEQ ID NO: 204387 - DNA, 10286 bp, Homo sapiens
  Payload ID: 20313
  Gene Name: zinc finger, DBF-type containing 2
  Uniprot ID: Q9HCK1
  ENST ID: ENST00000374423
  CDS Start-End: 387-7451
aaacctccatcagggttgcaacgccacgttgccttggatgcctgcgtgagtggagtcgcgactcggggcccgcgtcctgagagacgcgctcccgcgccgcttctcgcctccggaccgcaggggccgaagtcgcctatttctggctccgcgggcagcggggccgtggcgctcggacggtctgggattcgggcgccgccgcggaaccggaataagaagggagagcgcccggctcggtcctcggtctccaccgcggcccggaaggaatccgggcagcctccgcggagatacttgccagaactaatacagctgatgaaatacctgaccttttctgctccagcttgagtattcaaagacagtagccatctgacttcagttatttattcaagatgcagaaaagacaaggatattgcagttattgccgtgtgcagtataataacctggaacagcatttgttcagtgctcagcacaggagtttgaccagacagagtagacgtcaaatatgtaccagtagtttgatggaacgtttcttacaggatgtactgcagcaccacccatatcattgtcaagagagcagttcaacacaagatgagacacatgtgaatactgggtcatcgtctgaagtggtgcatttggatgatgctttttctgaagaagaggaagaggatgaggataaggttgaggatgaggatgctaccgaagagagaccatccgaggtttcagaacctattgaagagttacattccagacctcataaatctcaggaaggcacgcaggaggtttcagttcgaccatcagttattcaaaaactggagaagggacagcagcagcccttggagtttgttcataaaattggggccagtgtgagaaaatgtaacctagtagatattggtcaggctacaaataatagaagcaacttggtacgccccccagtgatttgtaatgctcctgctagttgtttacctgaaagctctaacgatagaccagttacagctaatacaactagtttaccaccagcagctcatttggattcagttagcaaatgtgacccaaacaaagttgagaaatatcttgaacagccagatggggcctctagaaatcctgtgccatcatcccatgtagaaactacttcattttcgtatcagaaacataaagaatcaaataggaaatctttacgcatgaattcagataagttggttttgtggaaagatgtaaaatctcagggtaaaactttatcagctggcttgaaattccatgaacgcatgggtactaagggctccttaagagttaaatctccttccaaattagcagtaaacccgaataaaactgacatgccttctaataaaggaatctttgaagatactattgcaaagaaccatgaggaattcttttctaacatggattgtacccaagaagaaaagcatttggtttttaacaagacagccttttgggaacagaagtgctcagtgagttctgaaatgaagtttgattgtatctctcttcagtcagcatctgatcagccccaagagactgcacaagacttaagtctttggaaggaggagcaaattgaccaagaagataactatgagtctagaggttcagaaatgagttttgattgcagttcctcttttcattcactgactgaccaatctaaagtgagtgccaaagaagtaaacctttccaaggaagtacgtactgatgtacagtataagaataataaatcttatgtttctaaaataagttctgattgtgatgacattcttcacttggttaccaaccaatcccaaatgattgttaaagaaataagtcttcagaatgcaaggcatattagcctggttgaccaaagctatgaatctagtagttctgaaacgaattttgattgtgatgcttcacctcagtccactagtgactacccccaacaatctgtaacagaagtaaaccttcctaaggaagtgcacattggtttggttgataagaactatggttccagtagctctgaagtaagtgctgattctgttttcccactgcagtcagtggttgacagacccccagtggctgtcacagaaacaaaacttcggaagaaggctcataccagcttggttgataactatggatcgagttgttctgaaacaagttttgattgtgatgtttctcttgagtcagtagttgatcatccccaactgactgtcaaaggaagaaacctgaaaggtagacaagtccacctaaaacataagaagcgtaaacccagtagtgctaaagcacatcttgattgtgatgtctcacttgggacagttgcagatgaatcccagagggctgttgaaaagataaatcttctgaaggagaagaatgctgaccttatggatatgaactgtgaatcccatggtcctgaaatgggttttcaggctgatgctcaattagctgaccagtctcaagtagccgaaatagagcgtcagaaagtggatgttgaccttgagaataagagtgttcagtctagccgttcttctctgagttctgattctccggcttctctttatcattcagctcatgatgagcctcaagaagctttggatgaagtaaatcttaaagagttaaatattgacatggaagttaggagctatgattgctccagctctgagttgacttttgattctgacccgcctcttctgtcagttactgagcagtctcatctggatgctgaaggaaaagaacggcacattgacctggaagatgagagctgtgagtcagatagttctgaaataacttttgattctgatattcctctttattcagtaattgaccaacctgaagtagctgtttatgaggaagaaactgttgatctggaaagtaaaagtaatgaatcttgtgtctctgaaataacttttgattctgatattcctcttcattcaggaaatgatcaccctgaagtagctgttaaagaagtaattcagaaagaagagtacattcacttagaaaggaagaatgatgaacccagtggttctgaaataagttcggattcccatgcccctcttcattcagtgactaattctcccgaagtagctgttaaaaagctaaatcctcaaaaagaagagcaggtacacttagaaaataaggaaaatgaacctattgattctgaagtaagtttggattataatatcatttttcattcagtgactggacgttctgaagatcccattaaagaaataagccttcacacaaaagagcacatgtacttagaaaataagagtgtttttgaaacaagtttggattctgatgtccctcttcaggcagcgactcacaaacctgaagtaattgtcaaagaaacatggcttcaaagagaaaagcacgctgaattccaaggtagaagtactgaattcagtggttcaaaaacaagtttagattctggtgtccctcattattcagtaactgaacctcaagtagctgttaacaaaataaacagaaagaagcaatatgttctagaaaacaagaatgataaatgtagtggttctgaaataattttggattctaatgttccacctcagtcaatgactgaccaacctcaactagcttttttgaaggaaaaacatgttaatctgaaggacaaaaacagtaaatcaggtgattctaaaataacttttgattctgaacaacttcaggaagcggttaaaaaaatagaccaatggaaggaagaggttattggcctgaaaaataagattaatgaacctagtacttataaattaatacatcatcctgatgtttctgtccaatctgtggctgatcaacccaaagtagctattaaacatgtgaaccttgggaatgaaaaccatatgtacttggaagttaagaacagccaatatagttgttcagaaatgaatttggattctggtttcttgggtcagtcaatagtcaatcgacctcaaataactattttggagcaggagcacattgaactagaaggtaagcacaatcaatgttgtggttctgaagtaagttttgattctgatgaccctcttcagtcagtggctgaccggctgagagaaaccgttaaagaaataagcctttggaaggatgaagaagttgacacggaagataggagaaatgaagctaagggttttgaaattatgtatgattctgatgttcttcagccagtggctggccaacctgaagaagtagttaaggaggtcagtctttggaaagagcatgttgacttggaaaataagattgtcaaacctacagattccagaataaattttgattctcatgaaccccttcagtccgtaactaataaaattccaggggcgaataaagaaataaatcttttgagggaggaacatgtttgtctggatgataagggctatgtgcccagtgattctgaaataatttatgtttcaaatatccctcttcagtcagtgataaaacaaccacacattttggaagaggagcatgccagtctggaagataagagcagtaattcttatagtcctgaagaaagttctgattccaatgactcttttcaggcagcagcagatgagcttcaaaaacctgtcaaagaaataaatctttggaaggaagaccatatttacctggaagataagagctataaattaggtgattttgatgtaagttatgcttctcatattcctgttcagtttgtgactgatcaatcttctgtacctgtcaaagaaataaacttgcaaaagaaggatcataatgatctagaaaataagaactgtgaagtctgtggttctgaaataaaatgtcattcttgtgttcatcttcagtcagaagttgaccaacctcaagtgtcttacaaagaggcagaccttcagaaggaagagcatgttgtcatggaagaaaagaccgatcaacctagtgattcagaaatgatgtatgattctgatgttccttttcaaatagtagttaaccaatttccaggatcagtcaaagaaacccaccttccaaaggtggtacttgtggatctggtgcccggtgatagtgattatgaagtaatttcagatgatattccccttcagttagtgactgacccacctcagttgactgtcaaagatatcagctgtataaatacagaatgtattgatatagaagataagagctgtgacttttttggttctgaagtcagatgtaattgtaaagcctctactccctcaatgacaaaccaatgcaaagagactttcaaaataataaaccggaagaaggactatattattctgggagagccaagttgtcaatcttgtggttctgaaatgaattttaatgttgatgcctctgatcagtccatgacttacgagtcacaaggacctgatgagaaaatggtgaaatatattgattcagaagataagagctgtggatataatggttctaaaggaaaatttaatttggaagacacttctcatcgaacgactcaccgactgcagaaagctcacaaagaagccagtcttcggaaggatccaagaaatgctggcctaaaaggtaagagctgtcagtctagtgcttctgcagtggattttggtgcctcttccaagtcagcgctccatcgaagggctgataaaaaaaaacgttcgaagctaaaacatagagatctagaagtgagctgtgaaccggatggttttgagatgaattttcagtgtgctccccctcttccatctgatactgatcagcctcaagaaactgttaagaaaagacacccttgtaagaaggtatcttctgacttgaaagaaaagaaccatgattcccagtcaagctctgttctcaaggttgattctgtaaggaacctgaaaaaagcaaaggatgtcatagaggataatcctgatgaaccagttcttgaagccttgcctcatgtacctccttcatttgtggggaaaacatggtctcagataatgagagaagatgacataaaaattaatgctctggtgaaggagtttagggaaggtcgtttccactgttactttgatgatgactgtgagaccaaaaaagtttcttcgaaggggaaaaaaaaggttacctgggctgacttgcaaggtaaggaggacactgcaccaactcaagctgtgtcagagagtgatgatattgtctgtggtatttcagatattgatgacttgtcagtggccttagataaaccatgccatcgtcatcctccagcagagaggcctcctaagcaaaaggggcgtgtggcttctcaatgccagacagcgaaaatcagccatagtactcagaccagttgtaagaattacccagtgatgaaaagaaaaataattagacaagaggaagacccaccaaaaagtaagtgttcacgtttacaggatgacagaaaaaccaaaaagaaagtcaaaattgggacagttgaatttcctgcatcatgtactaaagttttgaagcctatgcaacccaaagccttagtctgtgttctttcttctttaaatattaaactgaaagagggtgaaggccttcctttccctaaaatgaggcaccatagttgggataatgatattcggtttatatgcaaatataaacggaatatctttgattattatgagcccttgattaagcaaattgtaattagtcctcccctgagtgtaatagtaccagagtttgagaggcgtaactgggttaaaattcattttaataggagcaaccaaaactccagtgcaggagataatgatgctgatggacaaggctctgcttcagcgcctttaatggcagtgccggcaagatatggatttaattcacatcagggaaccagtgactcttctctgtttctggaagaatcaaaggttctgcatgctcgtgagcttccaaagaaaagaaatttccagctaacatttttaaatcatgatgttgtcaaaatctctccaaaatcagttagaaataagcttttggaaagtcaaagtaaaaagaaaattcatggaaagagggtgacaactagtagtaataagctaggttttcccaaaaaggtttataaaccaattattctccagcaaaaacccagaaaagcttcagagaaacagtcaatttggattcggaccaaaccaagtgatatcattagaaagtatatttcgaaatactctgtctttttacgtcatagatatcagtccaggagcgcttttcttggaaggtatctgaagaagaaaaaatctgttgtcagtaggctaaagaaggcgaagagaacagctaaagtgcttttgaactcttcagttccaccagctggtgccgaagagctgtcaagcgctatggcaaatcctcctccaaagcgacctgtgcgggcttcttgccgcgttgcaagaaggaggaagaagactgatgaaagctaccatggccgacagaaaggtccttctacacctgtgagagcatatgatctgagaagctcatcttgtttacaacaacgtgagagaatgatgactcggctagcaaacaaactgagaggtaatgaggtaaaatagaagttggttttgtgttcaggctagttgaggattcagtacttcagttgaaatatatttggtactttgtgcacacagctttcccagctttggtgagaaaactaatcttgaactattttgctataaatattatttttcagaatttttatattcatttaaaattagtgtttagagtcctttcattttaagattcagaaacagcctttgtccaacattttctgtagaagaacttcatcttaatttatgtcacaaaataatttagcaccgtatatagaattttgttcctcaaatcatatccctcttattttttatgattatctctctcatgccagcaaatttaacattgtgagaatgaatatagcaaacttattaaaaagaaggaattataatgaattatgtcaacttttgaatggggttgacttaaatgaatacaaacaaaatataagttttctttctttttaaagcattccagaaaatgagattccataatctttaatacagtttttaaaaactggtgattttttttatgcatagcacaaactcctcctgcttcatttaaattggatctgcaagtctctaacttttatcatttggacacatgcacacatacagtctctaggttttttgggttagccttattagatcttaaaggggaaaataattttgcccatgtgtttaggcattcccccccttttttttaaccacctttactctcttctacatgaagagttggtggcttaatatgaaaatccaggttattttgtggccttatcccctaaaaatattttaggcattaccatatcagtttttatttttatgtttatttattattattattttttgagacagagtctcactgtcttgcccaggctggagtgcagtggcctgaacttagctcaccgcaacctccacctcccgggttcaagcaattctcctgcctaagcctctcgagtagctgggactacaggcgtgcgccaccatgcccggctaatttttgtatttttagtagagttgggggtttcactatgttggccaggctggtctcaaactcctgaccttgtggtccacccgcctcagcctcccaaagtgctgggattacagtcatgagccaccatgcccagcctaccatatcagtttttaataacttgaactgaaattattggcttggtaatatttgggcaggccattaattctcattagaaaattacttaatatttcaaaaaattgaataaaactggtaatctttgtggaggcccattttgcaagtggaaacctgtatttatacattagtttgtctttaactatttgttaacagattttaacagttcaaatgaaagatgttaacgagatgcagtttgagtctgggatactcagaatagatccagaacctttattcagggacactggttgagttggtacagatgcattcagttgtcattcattcgtgttaagccaagatcctggatcttctatcattaatgttaagaggaaacatgaattacaactatattgtatgactgccatattttattgaaactaaggtcaatgttgaaccatatcttgatttcagaatttaaaatgtgttaccttagaaataatgaaatatagtgtaacagttggtttctaaatgtggttttatttcaggggccattatttaacctgtgtgtatgctatgatggagttcttttgtgatttctttacttctaaatttaaatagtaattatgtttaaaaacaaatgtttttgtctttagttgcaaagcagcatatatctcatttccttcaaccttgcctcctcatacacaaatatattttcatttcttaaaagatcactgggccagtagttcaaaataatcctccaattttaatttaggaacaaagctttgtcctactgactaggaagtaaacaaacagctgatatataagatatttgtgggtattggtgtcttttttccctatggaatagacacatagttcccttaaatattattaatagacattctacagtctttcagtgtaagtttaaaagcaagagatcaaatgaaaatgtgtactatgtacctatgatgtgtcatatcgtgattacatcatgcagagagaacagttcctgtaattcaagtaattaaaatttcaagttgtaaaaatgttaccattttcacattggaagcccttctaagtaccattttcattgggggcagggagaaggtttatatttaaattttatattaccagacataaaagtacagtgcagtactgatgattttgtttaaagtttttgaaatgttttgtttactaagttcttgtaatcattattttagacaagcttgaaaacttgaaattgttgaaacttataatttaaattaaattggaaattactttcagaatttggtagtatacaagatgtgcccctttgtctaaataaatgttggcttaatttgcagaatagataaaacaattgatgtttttgtgtgttcaagaatgcattaaattcttttaatagtaaaaagtcaaattacgaccataatgagtattttaatcttgttcttgttcagtattttgcgtagatttttattgtaattgtcctgagttctacagtatgtgaacaatatcgtgtgaagtgtgtttttgcatttgtgcatttaaattatttatgtaactagggctgtgagtaacactttttttttttttttttggttaaagaaaagctatatttaaatattcaaataattatatatttccatgtaaaactaatgtgaagactaatgtattttttatattgcagtgtaaaagctaaacttgtttttgatgttatcaagataaaatttattaaaccttgaaat

SEQ ID NO: 204388 - DNA, 9890 bp, Homo sapiens
  Payload ID: 20313
  Gene Name: zinc finger, DBF-type containing 2
  ENST ID: ENST00000611847
  CDS Start-End: 1-7059
atgattcccgatggaagctcagagatacaggaagtaatgaagaacagtggaaagcatttgttcagtgctcagcacaggagtttgaccagacagagtagacgtcaaatatgtaccagtagtttgatggaacgtttcttacaggatgtactgcagcaccacccatatcattgtcaagagagcagttcaacacaagatgagacacatgtgaatactgggtcatcgtctgaagtggtgcatttggatgatgctttttctgaagaagaggaagaggatgaggataaggttgaggatgaggatgctaccgaagagagaccatccgaggtttcagaacctattgaagagttacattccagacctcataaatctcaggaaggcacgcaggaggtttcagttcgaccatcagttattcaaaaactggagaagggacagcagcagcccttggagtttgttcataaaattggggccagtgtgagaaaatgtaacctagtagatattggtcaggctacaaataatagaagcaacttggtacgccccccagtgatttgtaatgctcctgctagttgtttacctgaaagctctaacgatagaccagttacagctaatacaactagtttaccaccagcagctcatttggattcagttagcaaatgtgacccaaacaaagttgagaaatatcttgaacagccagatggggcctctagaaatcctgtgccatcatcccatgtagaaactacttcattttcgtatcagaaacataaagaatcaaataggaaatctttacgcatgaattcagataagttggttttgtggaaagatgtaaaatctcagggtaaaactttatcagctggcttgaaattccatgaacgcatgggtactaagggctccttaagagttaaatctccttccaaattagcagtaaacccgaataaaactgacatgccttctaataaaggaatctttgaagatactattgcaaagaaccatgaggaattcttttctaacatggattgtacccaagaagaaaagcatttggtttttaacaagacagccttttgggaacagaagtgctcagtgagttctgaaatgaagtttgattgtatctctcttcagtcagcatctgatcagccccaagagactgcacaagacttaagtctttggaaggaggagcaaattgaccaagaagataactatgagtctagaggttcagaaatgagttttgattgcagttcctcttttcattcactgactgaccaatctaaagtgagtgccaaagaagtaaacctttccaaggaagtacgtactgatgtacagtataagaataataaatcttatgtttctaaaataagttctgattgtgatgacattcttcacttggttaccaaccaatcccaaatgattgttaaagaaataagtcttcagaatgcaaggcatattagcctggttgaccaaagctatgaatctagtagttctgaaacgaattttgattgtgatgcttcacctcagtccactagtgactacccccaacaatctgtaacagaagtaaaccttcctaaggaagtgcacattggtttggttgataagaactatggttccagtagctctgaagtaagtgctgattctgttttcccactgcagtcagtggttgacagacccccagtggctgtcacagaaacaaaacttcggaagaaggctcataccagcttggttgataactatggatcgagttgttctgaaacaagttttgattgtgatgtttctcttgagtcagtagttgatcatccccaactgactgtcaaaggaagaaacctgaaaggtagacaagtccacctaaaacataagaagcgtaaacccagtagtgctaaagcacatcttgattgtgatgtctcacttgggacagttgcagatgaatcccagagggctgttgaaaagataaatcttctgaaggagaagaatgctgaccttatggatatgaactgtgaatcccatggtcctgaaatgggttttcaggctgatgctcaattagctgaccagtctcaagtagccgaaatagagcgtcagaaagtggatgttgaccttgagaataagagtgttcagtctagccgttcttctctgagttctgattctccggcttctctttatcattcagctcatgatgagcctcaagaagctttggatgaagtaaatcttaaagagttaaatattgacatggaagttaggagctatgattgctccagctctgagttgacttttgattctgacccgcctcttctgtcagttactgagcagtctcatctggatgctgaaggaaaagaacggcacattgacctggaagatgagagctgtgagtcagatagttctgaaataacttttgattctgatattcctctttattcagtaattgaccaacctgaagtagctgtttatgaggaagaaactgttgatctggaaagtaaaagtaatgaatcttgtgtctctgaaataacttttgattctgatattcctcttcattcaggaaatgatcaccctgaagtagctgttaaagaagtaattcagaaagaagagtacattcacttagaaaggaagaatgatgaacccagtggttctgaaataagttcggattcccatgcccctcttcattcagtgactaattctcccgaagtagctgttaaaaagctaaatcctcaaaaagaagagcaggtacacttagaaaataaggaaaatgaacctattgattctgaagtaagtttggattataatatcatttttcattcagtgactggacgttctgaagatcccattaaagaaataagccttcacacaaaagagcacatgtacttagaaaataagagtgtttttgaaacaagtttggattctgatgtccctcttcaggcagcgactcacaaacctgaagtaattgtcaaagaaacatggcttcaaagagaaaagcacgctgaattccaaggtagaagtactgaattcagtggttcaaaaacaagtttagattctggtgtccctcattattcagtaactgaacctcaagtagctgttaacaaaataaacagaaagaagcaatatgttctagaaaacaagaatgataaatgtagtggttctgaaataattttggattctaatgttccacctcagtcaatgactgaccaacctcaactagcttttttgaaggaaaaacatgttaatctgaaggacaaaaacagtaaatcaggtgattctaaaataacttttgattctgaacaacttcaggaagcggttaaaaaaatagaccaatggaaggaagaggttattggcctgaaaaataagattaatgaacctagtacttataaattaatacatcatcctgatgtttctgtccaatctgtggctgatcaacccaaagtagctattaaacatgtgaaccttgggaatgaaaaccatatgtacttggaagttaagaacagccaatatagttgttcagaaatgaatttggattctggtttcttgggtcagtcaatagtcaatcgacctcaaataactattttggagcaggagcacattgaactagaaggtaagcacaatcaatgttgtggttctgaagtaagttttgattctgatgaccctcttcagtcagtggctgaccggctgagagaaaccgttaaagaaataagcctttggaaggatgaagaagttgacacggaagataggagaaatgaagctaagggttttgaaattatgtatgattctgatgttcttcagccagtggctggccaacctgaagaagtagttaaggaggtcagtctttggaaagagcatgttgacttggaaaataagattgtcaaacctacagattccagaataaattttgattctcatgaaccccttcagtccgtaactaataaaattccaggggcgaataaagaaataaatcttttgagggaggaacatgtttgtctggatgataagggctatgtgcccagtgattctgaaataatttatgtttcaaatatccctcttcagtcagtgataaaacaaccacacattttggaagaggagcatgccagtctggaagataagagcagtaattcttatagtcctgaagaaagttctgattccaatgactcttttcaggcagcagcagatgagcttcaaaaacctgtcaaagaaataaatctttggaaggaagaccatatttacctggaagataagagctataaattaggtgattttgatgtaagttatgcttctcatattcctgttcagtttgtgactgatcaatcttctgtacctgtcaaagaaataaacttgcaaaagaaggatcataatgatctagaaaataagaactgtgaagtctgtggttctgaaataaaatgtcattcttgtgttcatcttcagtcagaagttgaccaacctcaagtgtcttacaaagaggcagaccttcagaaggaagagcatgttgtcatggaagaaaagaccgatcaacctagtgattcagaaatgatgtatgattctgatgttccttttcaaatagtagttaaccaatttccaggatcagtcaaagaaacccaccttccaaaggtggtacttgtggatctggtgcccggtgatagtgattatgaagtaatttcagatgatattccccttcagttagtgactgacccacctcagttgactgtcaaagatatcagctgtataaatacagaatgtattgatatagaagataagagctgtgacttttttggttctgaagtcagatgtaattgtaaagcctctactccctcaatgacaaaccaatgcaaagagactttcaaaataataaaccggaagaaggactatattattctgggagagccaagttgtcaatcttgtggttctgaaatgaattttaatgttgatgcctctgatcagtccatgacttacgagtcacaaggacctgatgagaaaatggtgaaatatattgattcagaagataagagctgtggatataatggttctaaaggaaaatttaatttggaagacacttctcatcgaacgactcaccgactgcagaaagctcacaaagaagccagtcttcggaaggatccaagaaatgctggcctaaaaggtaagagctgtcagtctagtgcttctgcagtggattttggtgcctcttccaagtcagcgctccatcgaagggctgataaaaaaaaacgttcgaagctaaaacatagagatctagaagtgagctgtgaaccggatggttttgagatgaattttcagtgtgctccccctcttccatctgatactgatcagcctcaagaaactgttaagaaaagacacccttgtaagaaggtatcttctgacttgaaagaaaagaaccatgattcccagtcaagctctgttctcaaggttgattctgtaaggaacctgaaaaaagcaaaggatgtcatagaggataatcctgatgaaccagttcttgaagccttgcctcatgtacctccttcatttgtggggaaaacatggtctcagataatgagagaagatgacataaaaattaatgctctggtgaaggagtttagggaaggtcgtttccactgttactttgatgatgactgtgagaccaaaaaagtttcttcgaaggggaaaaaaaaggttacctgggctgacttgcaaggtaaggaggacactgcaccaactcaagctgtgtcagagagtgatgatattgtctgtggtatttcagatattgatgacttgtcagtggccttagataaaccatgccatcgtcatcctccagcagagaggcctcctaagcaaaaggggcgtgtggcttctcaatgccagacagcgaaaatcagccatagtactcagaccagttgtaagaattacccagtgatgaaaagaaaaataattagacaagaggaagacccaccaaaaagtaagtgttcacgtttacaggatgacagaaaaaccaaaaagaaagtcaaaattgggacagttgaatttcctgcatcatgtactaaagttttgaagcctatgcaacccaaagccttagtctgtgttctttcttctttaaatattaaactgaaagagggtgaaggccttcctttccctaaaatgaggcaccatagttgggataatgatattcggtttatatgcaaatataaacggaatatctttgattattatgagcccttgattaagcaaattgtaattagtcctcccctgagtgtaatagtaccagagtttgagaggcgtaactgggttaaaattcattttaataggagcaaccaaaactccagtgcaggagataatgatgctgatggacaaggctctgcttcagcgcctttaatggcagtgccggcaagatatggatttaattcacatcagggaaccagtgactcttctctgtttctggaagaatcaaaggttctgcatgctcgtgagcttccaaagaaaagaaatttccagctaacatttttaaatcatgatgttgtcaaaatctctccaaaatcagttagaaataagcttttggaaagtcaaagtaaaaagaaaattcatggaaagagggtgacaactagtagtaataagctaggttttcccaaaaaggtttataaaccaattattctccagcaaaaacccagaaaagcttcagagaaacagtcaatttggattcggaccaaaccaagtgatatcattagaaagtatatttcgaaatactctgtctttttacgtcatagatatcagtccaggagcgcttttcttggaaggtatctgaagaagaaaaaatctgttgtcagtaggctaaagaaggcgaagagaacagctaaagtgcttttgaactcttcagttccaccagctggtgccgaagagctgtcaagcgctatggcaaatcctcctccaaagcgacctgtgcgggcttcttgccgcgttgcaagaaggaggaagaagactgatgaaagctaccatggccgacagaaaggtccttctacacctgtgagagcatatgatctgagaagctcatcttgtttacaacaacgtgagagaatgatgactcggctagcaaacaaactgagaggtaatgaggtaaaatagaagttggttttgtgttcaggctagttgaggattcagtacttcagttgaaatatatttggtactttgtgcacacagctttcccagctttggtgagaaaactaatcttgaactattttgctataaatattatttttcagaatttttatattcatttaaaattagtgtttagagtcctttcattttaagattcagaaacagcctttgtccaacattttctgtagaagaacttcatcttaatttatgtcacaaaataatttagcaccgtatatagaattttgttcctcaaatcatatccctcttattttttatgattatctctctcatgccagcaaatttaacattgtgagaatgaatatagcaaacttattaaaaagaaggaattataatgaattatgtcaacttttgaatggggttgacttaaatgaatacaaacaaaatataagttttctttctttttaaagcattccagaaaatgagattccataatctttaatacagtttttaaaaactggtgattttttttatgcatagcacaaactcctcctgcttcatttaaattggatctgcaagtctctaacttttatcatttggacacatgcacacatacagtctctaggttttttgggttagccttattagatcttaaaggggaaaataattttgcccatgtgtttaggcattcccccccttttttttaaccacctttactctcttctacatgaagagttggtggcttaatatgaaaatccaggttattttgtggccttatcccctaaaaatattttaggcattaccatatcagtttttatttttatgtttatttattattattattttttgagacagagtctcactgtcttgcccaggctggagtgcagtggcctgaacttagctcaccgcaacctccacctcccgggttcaagcaattctcctgcctaagcctctcgagtagctgggactacaggcgtgcgccaccatgcccggctaatttttgtatttttagtagagttgggggtttcactatgttggccaggctggtctcaaactcctgaccttgtggtccacccgcctcagcctcccaaagtgctgggattacagtcatgagccaccatgcccagcctaccatatcagtttttaataacttgaactgaaattattggcttggtaatatttgggcaggccattaattctcattagaaaattacttaatatttcaaaaaattgaataaaactggtaatctttgtggaggcccattttgcaagtggaaacctgtatttatacattagtttgtctttaactatttgttaacagattttaacagttcaaatgaaagatgttaacgagatgcagtttgagtctgggatactcagaatagatccagaacctttattcagggacactggttgagttggtacagatgcattcagttgtcattcattcgtgttaagccaagatcctggatcttctatcattaatgttaagaggaaacatgaattacaactatattgtatgactgccatattttattgaaactaaggtcaatgttgaaccatatcttgatttcagaatttaaaatgtgttaccttagaaataatgaaatatagtgtaacagttggtttctaaatgtggttttatttcaggggccattatttaacctgtgtgtatgctatgatggagttcttttgtgatttctttacttctaaatttaaatagtaattatgtttaaaaacaaatgtttttgtctttagttgcaaagcagcatatatctcatttccttcaaccttgcctcctcatacacaaatatattttcatttcttaaaagatcactgggccagtagttcaaaataatcctccaattttaatttaggaacaaagctttgtcctactgactaggaagtaaacaaacagctgatatataagatatttgtgggtattggtgtcttttttccctatggaatagacacatagttcccttaaatattattaatagacattctacagtctttcagtgtaagtttaaaagcaagagatcaaatgaaaatgtgtactatgtacctatgatgtgtcatatcgtgattacatcatgcagagagaacagttcctgtaattcaagtaattaaaatttcaagttgtaaaaatgttaccattttcacattggaagcccttctaagtaccattttcattgggggcagggagaaggtttatatttaaattttatattaccagacataaaagtacagtgcagtactgatgattttgtttaaagtttttgaaatgttttgtttactaagttcttgtaatcattattttagacaagcttgaaaacttgaaattgttgaaacttataatttaaattaaattggaaattactttcagaatttggtagtatacaagatgtgcccctttgtctaaataaatgttggcttaatttgcagaatagataaaacaattgatgtttttgtgtgttcaagaatgcattaaattcttttaatagtaaaaagtcaaattacgaccataatgagtattttaatcttgttcttgttcagtattttgcgtagatttttattgtaattgtcctgagttctacagtatgtgaacaatatcgtgtgaagtgtgtttttgcatttgtgcatttaaattatttatgtaactagggctgtgagtaacactttttttttttttttttggttaaagaaaagctatatttaaatattcaaataattatatatttccatgtaaaactaatgtgaagactaatgtattttttatattgcagtgtaaaagctaaacttgtttttgatgttatcaagataaaatttattaaaccttg

SEQ ID NO: 204389 - DNA, 2047 bp, Homo sapiens
  Payload ID: 20314
  Gene Name: zinc finger, DHHC-type containing 1
  Uniprot ID: Q8WTX9
  ENST ID: ENST00000348579
  CDS Start-End: 343-1800
gccggacgaggcccagccagtctgggtctggcctggccgcccctccagcctgctggagccggagccggagccggagccggagccggagccggagccagagccagagctcgaggactcaccggcccagtctccgtccgggatggggccccgctcccgggcgcgttgccgcccagtcccggggaccgtccctaccgcgagggtctgaggcgcggctgccccggggagggtggaaggccaggcgtggggcccgaacctctggctgactttggcagggcccatctggcacggcctccgcggcgcgcagctgttttcaagtcagcaaacatttactgaggatctactatgtacaagatgaacatctgcaacaagccctccaacaagacggcccctgagaagagtgtgtggacggcaccggcacagcccagcggaccctcccctgagctgcagggccagcgatcccgccggaatgggtggagctggccccctcacccgctccagattgtggcctggctgctgtacctcttctttgctgtgatcggctttgggatccttgttcccctcctgcctcaccactgggtgcccgctggctacgcttgcatgggcgccatctttgctggccaccttgtggtgcacctgaccgccgtctccatcgatccagcagatgccaacgtgcgggacaagagctatgcggggcccctgcccatcttcaaccgaagccagcacgcacatgtcattgaagacctgcactgcaacttgtgcaacgtggatgtgagcgctcgctccaagcactgcagcgcctgcaacaagtgcgtgtgcggtttcgaccaccactgcaagtggctcaacaactgtgtgggcgagcggaactaccggctctttctacacagtgttgcatccgctttactgggcgtcctgctcctggtgctggtggccacatatgtcttcgtggagttctttgtcaaccccatgcgtctgcgcaccaaccgacactttgaagtcctgaagaatcacacggatgtgtggttcgtgttcctgcctgccgcccccgtggagacccaggcccctgccatcctggccctggccgccctgctcatccttctgggcctcctgtccacagccctcctggggcacctgctctgcttccacatttatctcatgtggcacaagctcaccacctatgagtacatcgtgcagcaccgcccaccacaggaggccaagggggttcacagggagctcgagtcatgtcctcccaagatgcggcccattcaggagatggagttctacatgcggaccttcagacatatgcgcccagagccccctggccaggccgggccagcagcagtgaatgccaaacactctcgccctgcctccccggatccgaccccaggtaggagggactgtgctgggcctccggtccaggtggagtgggatagaaagaagcctctaccctggcgctcgcctctgcttcttttggcgatgtggggccctcaggctcccccgtgtctctgcagaaaaagaggaagaggcgcgtgtataaagtgcgaacgtctgagacctcggatccggcgtcggggcctagggcccccagccgccgctccagctcgtcgacggattccgcggacgccagccctgtgcacgccgctggccctgccggcgcctaccactcggcgtcggcagagtccgtggacgagattccagtggcgcagacgcgcctgggcagcgccgctctggccgccccgcggggccggggccgacagcccacgctggcgcggcaggcgcgtgcgcccgccgttttcgtgagcccgagcagcggcgagcccagggcgccgggcggccgggaggctggtctggcttagctgggccgagaggccggagggccgagttagagcggccggcctgactctctatgcaacaccccatccttgccgcaccgagtgcactttaggggcccctacggccggcgggatcggcctccctcccccacgactcagcaatacccgccccaccggctgtgatgctccaataaacttttttatgcttttgcgga

SEQ ID NO: 204390 - DNA, 1145 bp, Homo sapiens
  Payload ID: 20314
  Gene Name: zinc finger, DHHC-type containing 1
  ENST ID: ENST00000565726
  CDS Start-End: 1-1056
gaagacctgcactgcaacttgtgcaacgtggatgtgagcgctcgctccaagcactgcagcgcctgcaacaagtgcgtgtgcggtttcgaccaccactgcaagtggctcaacaactgtgtgggcgagcggaactaccggctctttctacacagtgttgcatccgctttactgggcgtcctgctcctggtgctggtggccacatatgtcttcgtggagttctttgtcaaccccatgcgtctgcgcaccaaccgacactttgaagtcctgaagaatcacacggatgtgtggttcgtgttcctgcctgccgcccccgtggagacccaggcccctgccatcctggccctggccgccctgctcatccttctgggcctcctgtccacagccctcctggggcacctgctctgcttccacatttatctcatgtggcacaagctcaccacctatgagtacatcgtgcagcaccgcccaccacaggaggccaagggggttcacagggagctcgagtcatgtcctcccaagatgcggcccattcaggagatggagttctacatgcggaccttcagacatatgcgcccagagccccctggccaggccgggccagcagcagtgaatgccaatccctcccagtttcttgccacccgtggccaagcggaacctccaccaccctcttccccagacactctcgccctgcctccccggatccgaccccagaaaaagaggaagaggcgcgtgtataaagtgcgaacgtctgagacctcggatccggcgtcggggcctagggcccccagccgccgctccagctcgtcgacggattccgcggacgccagccctgtgcacgccgctggccctgccggcgcctaccactcggcgtcggcagagtccgtggacgagattccagtggcgcagacgcgcctgggcagcgccgctctggccgccccgcggggccggggccgacagcccacgctggcgcggcaggcgcgtgcgcccgccgttttcgtgagcccgagcagcggcgagcccagggcgccgggcggccgggaggctggtctggcttagctgggccgagaggccggagggccgagttagagcggccggcctgactctctatgcaacaccccatccttgccgcaccgagtgcactttag

SEQ ID NO: 204391 - DNA, 2604 bp, Homo sapiens
  Payload ID: 20315
  Gene Name: zinc finger, DHHC-type containing 11
  Uniprot ID: Q9H8X9
  ENST ID: ENST00000283441
  CDS Start-End: 385-1623
gtgaacgggttgtgggacctgtcgctgtgtgggggctgtcgagcactccccagaacgtaacaaatcctcaggggaactgatgggcggtcgcgcgggcactgggtcctccacaccctggagagccgttttccgttgccactcggctctggccggggtcacattctgcagcatgtctgttcattcccctgggcggggccctgcaccgactccagcccagcccctgctccctctgcggggaacgtggccccaggcagtgctgggccattggctgtcagtgctggtcctggcggctgcattcccagtccccttggtctctgtgacagtgggcggggccggccctcccaggatctgacggcgcaggtcctccccttctgtgtcctgcagatggacacccgctccgggagccagtgttccgtcaccccagaagccatactcaataatgaaaagctggtcttgccgccccgcatctccagagtgaacggctggtcgttacccctgcactacttccaggtggtgacctgggctgtcttcgtgggcctttcctcggccaccttcgggatcttcattcccttcctgcctcacgcgtggaaatacattgcctacgtggtgaccggggggatcttctcgttccacctcgtcgtccacctgatcgcgtcctgcatcgacccggccgactccaatgtcagactcatgaagaactattctcagcccatgcccctcttcgacagatcaaaacatgcacacgtgatccagaatcagttctgccacctgtgcaaggtcaccgtgaacaagaaaaccaaacactgcatttcctgcaataagtgtgtgtccggcttcgaccaccactgcaaatggatcaacaactgcgtgggaagccggaattattggttcttcttcagcactgtggcctcggccacagctggcatgctctgcctgatcgccatcctgctgtatgtcctcgtccagtacctcgtgaaccccggggtgctccgcacggaccccaggtatgaagatgtcaagaatatgaacacgtggctgctgttcctccccctgttcccggtgcaggtgcagaccctgatagtcgtgatcatcgggatgctcgtgctcctgctggactttcttggcttggtgcacctgggccagctgctcatcttccacatctacctgaaggccaagaagatgaccacctttgagtatctcattaataaccgcaaagaagagagttcaaaacatcaagcagtgaggaaagatccatacgtgcaaatggacaaaggagttctccagcaaggagctggcgccctgggctcatctgcacagggagtcaaagccaagagctccctgctgattcacaagcacttatgtcacttctgcacttcagtaaaccaggatggggattcgacggcacgggaaggggatgaagacccgtgtccatctgcacttggagccaaggccaggaactcccggctgatttgcaggcgcctgtgtcagttctccactcgtgtacacccagacgggggctcgatggcacaggaagcagatgatgccccgagtatatctacacttgggctgcaacaagaaacaacagagcccatgaaaactgacagtgctgaaagtgaagactgagattcaggagctcaggtgcccctgtgatccaggtcttctaccctgaaaccccaccctccatcaaggtcctgcctgtagagtctaccttgcaaagcctcctgctcctacccatgctacaggccaggaaccagagcccatcatctcagaggcccctggatgtccttcgaaggaaccaggaccctcagagcccagcatccatctctgtcatcatcttcatcacacccaaagaagagccagccttgcaggagggtttacatctccaggaagatgggctgccagcaactgcagaggatgcagccacctgcttaactgtgctgtccagccagccagccagctgcagggcctcttgctgcttaagagctgatgggccgggcatgttggctcacacctgtgagcacagtactgggaaatgggagcacagtactaggaaatgggagcacagtactgggaaatgggagcacagtactgggaaatgggggctcacagcactgcaaaatgggagcacagtattgggaaatgggagcacagtactgggaagtgggagcacagtactgagaagtgggagcacagtactgagaaatgggagtacactactgagaaatgggagcacagtactgggaaatgggcatacagtactgagaaatgggagcacacagtactgggaaatgggagcacagtactgggaaatgggagcccacagtactgggaaaggggagttcacagtactcggaaatgggagcatagtactgggaaatgggagcacagtactgggaaatgggagcatagtactgggaaaccccagacctggattctgagtttttcagcctagcccagacttcttatcttagtagacaaaaagagtcaataccagagaaccagaggcatcctctgtattttaatgaactctgcattttaatctgtttagtagtcattttttaaaagataatcagttttccaaatatatctataagttactacgtg

SEQ ID NO: 204392 - DNA, 943 bp, Homo sapiens
  Payload ID: 20315
  Gene Name: zinc finger, DHHC-type containing 11
  ENST ID: ENST00000424784
  CDS Start-End: 150-791
gagcccatgaaaactgacagtgctgaaagtgaagactgagattcaggagctcaggtgcccctgtgatccaggtcttctaccctgaaaccccaccctccatcaaggtcctgcctgtagagtctaccttgcaaagcctcctgctcctacccatgctacaggccaggaaccagagcccatcatctcagaggcccctggatgtccttcgaaggaaccaggaccctcagagcccagcatccatctctgtcatcatcttcatcacacccaaagaagagccagccttgcaggagggtttacatctccaggaagatgggctgccagcaactgcagaggatgcagccacctgcttaactgtgctgtccagccagccagccagctgcagggcctcttgctgcttaagagctgatgggccgggcatgttggctcaccctgtgagcacagtatgggaaatgggagcacagtacgaaatgggagcacagtactgggaaatgggagcacacagtactgggaagtgggagcacagtactgagaagtgggagcacagtactgagaaatgggagtacactactgagaaatgggagcacagtactgggaaatgggcatacagtactgagaaatgggagcacagtactgggaaatgggagacagtactgggaaatgggagcccacagtactgggaaaggggagttacagtactcggaaatgggagtactgggaaatgggagcacagtactgggaaatgggagcatagtactgggaaaccccagacctggattctgagtttttcagcctagcccagacttcttatcttagtagacaaaaagagtcaataccagagaaccagaggcatcctctgtattttaatgaactctgcattttaatctgtttagtagtcattttttaaaagataatcagttttccaaatatatctataagttactacgtg

SEQ ID NO: 204393 - DNA, 1790 bp, Homo sapiens
  Payload ID: 20315
  Gene Name: zinc finger, DHHC-type containing 11
  ENST ID: ENST00000507800
  CDS Start-End: 1-666
cactgcatttcctgcaataagtgtgtgtccggcttcgaccaccactgcaaatggatcaacaactgcgtgggaagccggaattattggttcttcttcagcactgtggcctcggccacagctggcatgctctgcctgatcgccatcctgctgtatgtcctcgtccagtacctcgtgaaccccggggtgctccgcacggaccccaggtatgaagatgtcaagaatatgaacacgtggctgctgttcctccccctgttcccggtgcaggtgcagaccctgatagtcgtgatcatcgggatgctcgtgctcctgctggactttcttggcttggtgcacctgggccagctgctcatcttccacatctacctgaaggccaagaagatgaccacctttgagtatctcattaataaccgcaaagaagagagttcaaaacatcaagcagtgaggaaagatccatacgtgcaaatggacaaaggagttctccagcaaggagctggcgccctgggctcatctgcacagggagtcaaagccaagagctccctgctgattcacaagcacttatgtcacttctgcacttcagtaaaccaggatggggattcgacggcacggggccacctcaccacacttccccaggatttcagggaacaggctcctgtgacttggaaataaaaagggatcagcccagcctggaggaacagcgacgctggtgtccaagccttgccccttgcctgcacttccagcaaagatttggagacacactcggtggaaatcgattgagcccccagcccaccctggcccagactcagccaccaaagttccctcactgcatgtggcacacgggctcatgggagtttctctgcctgtgtttgtccacgttgacaccttctgcacaggtgcatttgtgagtcccctcagtgtctctgcagcttctatgtgtggatgaatagtgaagccacatgaggcctggtctgaagcagagaagatccgctcagcatcatgttgaatcccaagcccgcgtctccgtgggctccaggacaatcctatgaaagtgacaccgtcgttcattgttcacatcggggaggagaattccatctgaaaatgcacgtgacttcactgacacccgcgtccgtggcacagccctgtgctgagctccacagacctacagtccatcgcctccccttggagtgggcccacagctgcagacagtgttgtccaaagaagatgctctgagtagatgaatggaacaaactggaaactccagaaacaagcccttctttacatttctaatgtttggcttaaatggaaggtgccaaggaaggggatgaagacccgtgtccatctgcacttggagccaaggccaggaactcccggctgatttgcaggcgcctgtgtcagttctccactcgtgtacacccagacgggggctcgatggcacaggaagcagatgatgccccgagtatatctacacttgggctgcaacaagaaacaacagagcccatgaaaactgacagtgctgaaagtgaagactgagattcaggagctcaggtgcccctgtgatccaggtcttctaccctgaaaccccaccctccatcaaggtcctgcctgtagagtctaccttgcaaagcctcctgctcctacccatgctacaggccaggaaccagagcccatcatctcagaggcccctggatgtccttcgaaggaaccaggaccctcagagcccagcatccatctctgtcatcatcttcatcacacccaaagaagagccagccttgcaggagggtttacatctccag

SEQ ID NO: 204394 - DNA, 514 bp, Homo sapiens
  Payload ID: 20315
  Gene Name: zinc finger, DHHC-type containing 11
  ENST ID: ENST00000511193
  CDS Start-End: 361-514
atctgagggcgggagctgacgtcccaggcacggggagcccagcttctcctggctccaggggacaaggatcctctccccagtgcccccgcagccaggctctgagcccagagggcccaagaaagaggcccagggtccctgagaacaagaaaaccaaacactgcatttcctgcaataagtgtgtgtccggcttcgaccaccactgcaaatggatcaacaactgcgtgggaagccggaattattggttcttcttcagcactgtggcctcggccacagctggcatgctctgcctgatcgccatcctgctgtatgtcctcgtccagtacctcgtgaaccccggggtgctccgcacggaccccaggtatgaaggtgcagaccctgatagtcgtgatcatcgggatgctcgtgctcctgctggactttcttggcttggtgcacctgggccagctgctcatcttccacatctacctgaaggccaagaagatgaccacctttgagtatctcattaataaccgca

SEQ ID NO: 204395 - DNA, 1303 bp, Homo sapiens
  Payload ID: 20315
  Gene Name: zinc finger, DHHC-type containing 11
  Uniprot ID: Q9H8X9
  ENST ID: ENST00000511539
  CDS Start-End: 106-534
cggccacagctggcatgctctgcctgatcgccatcctgctgtatgtcctcgtccagtacctcgtgaaccccggggtgctccgcacggaccccagatgtcaagaatatgaacacgtggctgctgttcctccccctgttcccggtgcaggtgcagaccctgatagtcgtgatcatcgggatgctcgtgctcctgctggactttcttggcttggtgcacctgggccagctgctcatcttccacatctacctgagtatgtcccccaccctaagcccccgatccccccaaggctgggtggtcagagctgctcatcttacacctctacttgagtatgtccctaaccctgagccccccacgcctggggccagagtctttgtcccccgtgtgcgcatgtgttcagggtcagcctctcccagaagtgagatcatggacaaaaagggcaaatcacaggaagaaattaaatccatgaggacccagcaggcccagcaagaagctgaactcacgccgagacctgcaggagtggtgccaggtgcttgaagtaacaagtttaaaatgttcagagacaatggaatggaatctattaggcaagaacaggacattatgaaataaggacaggtggacttccaaaaacacaagtagaaattctaacaatgaaatatattacaggcaggtcacccactaaccaaacaactgaagcgagagctggtggtcttgcttggtctcacagtgggcacagcggtaggcggtcagtcatgttgctgaacgacggagggtaaactccccagccccaaggaaacctgtgttggaagtaacaacaacctccctgctcctggcaccagccgttttggtcatggtgggccagctgcaaagcgtcttccattctctgggcagtggtggccccgaggctgtggcctctcagggggtttctgtggacacgggcagcagagtgtgtccaggccagcccccaagaatgccctgctcctgacagcttggccaacccctggtcagggcagagggagttgggtgggtcaggctctgggctcacctccatctccagagcatcccctgcctgcagttgtggcaagaacgcccagctcagaatgaacacaccccaccaagagcctccttgttcataaccacaggttaccctacaaaccactgtccccacacaaccctggggatgttttaaaacacacacctctaacgcatatcttacagtcactgttgtcttgcctgagggttgaattttttttaatgaaagtgcaatgaaaatcactggattaaatcctacggacacagagctgaa

SEQ ID NO: 204396 - DNA, 1631 bp, Homo sapiens
  Payload ID: 20316
  Gene Name: zinc finger, DHHC-type containing 11B
  ENST ID: ENST00000508859
  CDS Start-End: 1-1149
atggcgcaggtcctccccttctgtgtcctgcagatggacacccgctccgggagccagtgttccgtcaccccagaagccatacgcaacaatgaagagctggtcttgccgccccgcatctccagagtgaacggctggtcgttacccctgcactacttccgggtggtgacttgggctgtcttcgttggcctttccttggccaccttcaggatcttcattcccctcctgcctcactcgtggaaatacatcgcctatgtggtgaccggggggatcttctcgttccacctcgtcgtccacctgatcgcgtcctgcatcgacccggccgactccaatgtcagactcatgaagaactattctcagcccatgcccctcttcgacagatcaaaacatgcacacgtgatccagaatcagttctgccacctgtgcaaggtcaccgtgaacaagaaaaccaaacactgcatttcctgcaataagtgtgtgtccggcttcgaccaccactgcaaatggatcaacaactgcgtgggaagccggaattattggttcttcttcagcactgtggcctcggccacagctggcatgctctgcctgatcgccatcctgctgtatgtcctcgtccagtacctcgtgaaccccagggtgctccgcacggaccccaggtatgaagatgtcaagaatatgaacacgtggctgctgttcctccccctgttcccggtgcaggtgcagactctgatagtcgtgatcatcaggatgctcgtgctcctgctggaccttcttggcttggtgcagctgggccagctgctcatcttccacatctacctgaaggccaagaagatgaccacctttgagtatctcattaatacccgcaaagaagagagttcaaaacatcaagcagtgaggaaagatccatacgtgcaaatggacaaaggatttctccagcaaggagctggcgccctgggctcatctgcacagggagtcaaggccaagagctccctgctgatttacaaatgcccatgtcacttctgcacttcagtaaaccaggacggggattcgaaggcacaggaagcagatgatgccccgagtacatctacacttgggctgcaacaagaaacaacagagcccatgaaaactgacagtgctgaaagtgaagactgagattcgggagctcaggtgcccctgtgatccaggtcttctaccctgaaaccccaccctccatcaaggtcctgcctgtagagtctaccttgcaaagcctcctgctcctacccatgctacaggccaggaaccagagcccatcatctcagaggcccctggatgtccttcgaaggaaccaggaccctcagagcccagcatccatctctgtcatcatcttcatcacacccaaagaagagccagccttgcaggagggtttacatctccaggaagatgggctgccagcaactgcagaggatgcagccacctgcttaactgtgctgtccagccagccagccagctgcagggcctcttgctgcttaagagctgatgggccgggcatgttggctcacacctgtgagcacagtactgggaaatgggagcatagtactgggaaatgggagcacagtactgagaaatgggagcacagtactgggaaatggtagcac

SEQ ID NO: 204397 - DNA, 1116 bp, Homo sapiens
  Payload ID: 20316
  Gene Name: zinc finger, DHHC-type containing 11B
  Uniprot ID: P0C7U3
  ENST ID: ENST00000382776
  CDS Start-End: 1-1116
atggacacccgctccgggagccagtgttccgtcaccccagaagccatacgcaacaatgaagagctggtcttgccgccccgcatctccagagtgaacggctggtcgttacccctgcactacttccgggtggtgacttgggctgtcttcgttggcctttccttggccaccttcaggatcttcattcccctcctgcctcactcgtggaaatacatcgcctatgtggtgaccggggggatcttctcgttccacctcgtcgtccacctgatcgcgtcctgcatcgacccggccgactccaatgtcagactcatgaagaactattctcagcccatgcccctcttcgacagatcaaaacatgcacacgtgatccagaatcagttctgccacctgtgcaaggtcaccgtgaacaagaaaaccaaacactgcatttcctgcaataagtgtgtgtccggcttcgaccaccactgcaaatggatcaacaactgcgtgggaagccggaattattggttcttcttcagcactgtggcctcggccacagctggcatgctctgcctgatcgccatcctgctgtatgtcctcgtccagtacctcgtgaaccccagggtgctccgcacggaccccaggtatgaagatgtcaagaatatgaacacgtggctgctgttcctccccctgttcccggtgcaggtgcagactctgatagtcgtgatcatcaggatgctcgtgctcctgctggaccttcttggcttggtgcagctgggccagctgctcatcttccacatctacctgaaggccaagaagatgaccacctttgagtatctcattaatacccgcaaagaagagagttcaaaacatcaagcagtgaggaaagatccatacgtgcaaatggacaaaggatttctccagcaaggagctggcgccctgggctcatctgcacagggagtcaaggccaagagctccctgctgatttacaaatgcccatgtcacttctgcacttcagtaaaccaggacggggattcgaaggcacaggaagcagatgatgccccgagtacatctacacttgggctgcaacaagaaacaacagagcccatgaaaactgacagtgctgaaagtgaagactga

SEQ ID NO: 204398 - DNA, 1301 bp, Homo sapiens
  Payload ID: 20316
  Gene Name: zinc finger, DHHC-type containing 11B
  ENST ID: ENST00000622126
  CDS Start-End: 106-534
cggccacagctggcatgctctgcctgatcgccatcctgctgtatgtcctcgtccagtacctcgtgaaccccagggtgctccgcacggaccccagatgtcaagaatatgaacacgtggctgctgttcctccccctgttcccggtgcaggtgcagactctgatagtcgtgatcatcaggatgctcgtgctcctgctggaccttcttggcttggtgcagctgggccagctgctcatcttccacatctacctgagtatgtcccccaccctaagcccccgatccccccaagcctggttggtcagagctgctcatcttacacctctacttgagtatgtccctaaccctgagccccccacacctggggccagagtctttgtcccccgtgtgcgcatgtgttcagggtcagcctctcccagaagtgagatcatggacaaaaagggcaaatcacaggaagaaattaaatccatgagggcccagcaggcccagcaagaagctgaactcacgctgagacctgcaggagcgctgccgggtgcttgaagtaacaagtttaaaatgttcagagaaaatggaatggaatctattaggcaagaacaggacattatgaaataaggacaggtggacttccaaaagcacaagtagaaattctaacaatgaaaaatattacaggcagatcacccactaaccaaacaactgaagcgagagctggtggtcttgcttggtctcacagtgggcacagcggtaggcggtcagtcatgttgctgaacgacggagggtaaactccccagccccaaggaaacctgtgttggaagtaacaacaacctccctgctcctggcaccagccgttttggtcatggtgggccagctgcaaagcgtcttccattctctgggcagtggtggccccgaggctgtggcctctcagggggtttctgtggacacgggcagcagagtgtgtccaggccagcccccaagaatgccctgctcctgacagcttggccaacgcctagtcagggcagaggggatcgggtgggtcaggctctgggctcacctccatctccagagcatcccctgcctgcagttgtggcaagaacgcccagctcagaatgaacacaccccaccaagagcctccttgttcataaccacaggttaccctacaaaccactgtccccacacaaccctggggatgttttaaaacacacacctctaacgcacatcttacagtcactgttgtcttgcctgagggttgaattttttttaatgaaagtgcaatgaaaatcactggattaaatcctacggacacagagctg

SEQ ID NO: 204399 - DNA, 1129 bp, Homo sapiens
  Payload ID: 20317
  Gene Name: zinc finger, DHHC-type containing 12
  Uniprot ID: Q96GR4
  ENST ID: ENST00000372663
  CDS Start-End: 14-817
ccgggccgaggcgatggcgccctgggcgctcctcagccctggggtcctggtgcggaccgggcacaccgtgctgacctggggaatcacgctggtgctcttcctgcacgataccgagctgcggcaatgggaggagcagggggagctgctcctgcccctcaccttcctgctcctggtgctgggctccctgctgctctacctcgctgtgtcactcatggaccctggctacgtgaatgtgcagccccagcctcaggaggagctcaaagaggagcagacagccatggttcctccagccatccctcttcggcgctgcagatactgcctggtgctgcagcccctgagggctcggcactgccgtgagtgccgccgttgcgtccgccgctacgaccaccactgcccctggatggagaactgtgtgggagagcgcaaccacccactctttgtggtctacctggcgctgcagctggtggtgcttctgtggggcctgtacctggcatggtcaggcctccggttcttccagccctggggtcagtggttgcggtccagcgggctcctgttcgccaccttcctgctgctgtccctcttctcgttggtggccagcctgctcctcgtctcgcacctctacctggtggccagcaacaccaccacctgggaattcatctcctcacaccgcatcgcctatctccgccagcgccccagcaaccccttcgaccgaggcctgacccgcaacctggcccacttcttctgtggatggccctcagggtcctgggagaccctctgggctgaggaggaggaagagggcagcagcccagctgtttagggttgctggaggccgggctaccgtcttgtgcctgaaaaccacggggcctgtccccagctggggtgagcgctcagagggcctggggccctcactcctgcccacgcctcccagaccccagaacggagcttcaagtcagacagatccctgccttggtgggcagttctgccttccaaggaagaaggggaagaaaaggacctgtgggtggctcaggcccaagcagaccccgggctccaccccagccccgcccaggctgctgccagtgcacacttttacaaatttaatataaagcaagtccagtcttaaaaagacaaa

SEQ ID NO: 204400 - DNA, 1187 bp, Homo sapiens
  Payload ID: 20317
  Gene Name: zinc finger, DHHC-type containing 12
  ENST ID: ENST00000372667
  CDS Start-End: 31-876
ttcttccgggtggggccccgggccgaggcgatggcgccctgggcgctcctcagccctggggtcctggtgcggaccgggcacaccgtgctgacctggggaatcacgctggtgctcttcctgcacgataccggtgagccggaccccgagcgaccccggacccacccgatcccgcagctgcggcaatgggaggagcagggggagctgctcctgcccctcaccttcctgctcctggtgctgggctccctgctgctctacctcgctgtgtcactcatggaccctggctacgtgaatgtgcagccccagcctcaggaggagctcaaagaggagcagacagccatggttcctccagccatccctcttcggcgctgcagatactgcctggtgctgcagcccctgagggctcggcactgccgtgagtgccgccgttgcgtccgccgctacgaccaccactgcccctggatggagaactgtgtgggagagcgcaaccacccactctttgtggtctacctggcgctgcagctggtggtgcttctgtggggcctgtacctggcatggtcaggcctccggttcttccagccctggggtcagtggttgcggtccagcgggctcctgttcgccaccttcctgctgctgtccctcttctcgttggtggccagcctgctcctcgtctcgcacctctacctggtggccagcaacaccaccacctgggaattcatctcctcacaccgcatcgcctatctccgccagcgccccagcaaccccttcgaccgaggcctgacccgcaacctggcccacttcttctgtggatggccctcagggtcctgggagaccctctgggctgaggaggaggaagagggcagcagcccagctgtttagggttgctggaggccgggctaccgtcttgtgcctgaaaaccacggggcctgtccccagctggggtgagcgctcagagggcctggggccctcactcctgcccacgcctcccagaccccagaacggagcttcaagtcagacagatccctgccttggtgggcagttctgccttccaaggaagaaggggaagaaaaggacctgtgggtggctcaggcccaagcagaccccgggctccaccccagccccgcccaggctgctgccagtgcacacttttacaaatttaatataaagcaagtccagtcttaaaaagacaa

SEQ ID NO: 204401 - DNA, 646 bp, Homo sapiens
  Payload ID: 20317
  Gene Name: zinc finger, DHHC-type containing 12
  ENST ID: ENST00000406904
  CDS Start-End: 17-646
gccccgggccgaggcgatggcgccctgggcgctcctcagccctggggtcctggtgcggaccgggcacaccgtgctgacctggggaatcacgctggtgctcttcctgcacgataccgataaaagtgcagatgaactgctggccacacacagccactcatggaaccaacatctccaggcctttgctcagccaggaacacacttccccacctccaactgcaccccaaccccacccactcctgttctacccggcccagcctcactgtgctctccggcctctccagagctgcggcaatgggaggagcagggggagctgctcctgcccctcaccttcctgctcctggtgctgggctccctgctgctctacctcgctgtgtcactcatggaccctggctacgtgaatgtgcagccccagcctcaggaggagctcaaagaggagcagacagccatggttcctccagccatccctcttcggcgctgcagatactgcctggtgctgcagcccctgagggctcggcactgccgtgagtgccgccgttgcgtccgccgctacgaccaccactgcccctggatggagaactgtgtgggagagcgcaaccacccactctttgtggtctacctggcgctgcagctggtggtgcttctgtgg

SEQ ID NO: 204402 - DNA, 644 bp, Homo sapiens
  Payload ID: 20317
  Gene Name: zinc finger, DHHC-type containing 12
  ENST ID: ENST00000452105
  CDS Start-End: 29-644
cttccgggtggggccccgggccgaggcgatggcgccctgggcgctcctcagccctggggtcctggtgcggaccgggcacaccgtgctgacctggggaatcacgctggtgctcttcctgcacgataccgagctgcggcaatgggaggagcagggggagctgctcctgcccctcaccttcctgctcctggtgctgggctccctgctgctctacctcgctgtgtcactcatggaccctggctacgtgaatgtgcagccccagcctcaggaggagctcaaagaggagcagacagccatggttcctccagccatccctcttcggcgctgcagatactgcctggtgctgcagcccctgagggctcggcactgccgtgagtgccgccgttgcgtccgccgctacgaccaccactgcccctggatggagaactgtgtgggagagcgcaaccacccactctttgtggtctacctggcgctgcagctggtggtgcttctgtggggcctgtacctggcatgcaccaggcccctgtcccctgcaccgcaggtcaggcctccggttcttccagccctggggtcagtggttgcggtccagcgggctcctgttcgccaccttcctgctgctgtccctcttctcgttggtggccagcctg

SEQ ID NO: 204403 - DNA, 2283 bp, Homo sapiens
  Payload ID: 20318
  Gene Name: zinc finger, DHHC-type containing 13
  Uniprot ID: Q8IUH4
  ENST ID: ENST00000399351
  CDS Start-End: 350-1828
gggcgccagcaggaagtgggagaagaggcgacccaaggcgggctggcgggctggcggcagtcgctacttgcctagtagcctcagccgctgtgggctcctggggagatggaggggccggggctgggctcgcagatacggaatttttgaacgatgtaaagagttggtagaagcaggatatgatgtcaggcaaccagataaagaaaatgtgtcgcttcttcattgggctgctattaacaacagactggatcttgtaaagttttatatttcaaaaggtgctgttgtagatcagttgggtggagatttaaattcaactcctcttcactgggccatccgacaaggacatttacctatggtcatattattactccagcatggtgcagaccccactcttattgatggagagggattcagcagcatccacctggcagtattgtttcaacacatgcctattatagcatatctcatctcaaagggacagagtgtgaatatgacagatgtaaatgggcagacacctctcatgttatcagctcacaaagtaattgggccagaaccaactggatttcttttaaagtttaatccttctctcaatgtggttgataaaatacaccaaaacactccacttcactgggcagttgcagcaggaaatgttaatgcagttgataagcttttggaagctggttctagcctggatatccagaatgttaagggagaaacacctcttgatatggctctacaaaacaaaaatcagctcattattcatatgctaaaaacagaagccaaaatgagagccaaccaaaagttcagactttggaggtggctgcagaaatgcgagctcttcctgctgctgatgctttctgtgattaccatgtgggctattggatacatattggacttcaattcagattcttggcttttaaaaggatgtcttctagtaacactgttttttctgacatctttgtttccaaggttcttggttgggtataagaaccttgtatacttaccaacagcctttctgctaagttctgttttttggatatttatgacttggttcatcttattttttcctgatttagcaggagcccctttctatttcagtttcattttcagcatagtagcctttctatactttttctataagacttgggcaactgatccaggcttcactaaggcttctgaagaagaaaagaaagtgaatatcatcacccttgcagaaactggctctctggacttcagaacattttgtacatcatgtcttataaggaagccattaaggtcactccactgccatgtatgcaactgctgtgtggctcgatatgatcaacactgcctgtggactggacggtgcataggttttggcaaccatcactattacatattcttcttgtttttcctttccatggtatgtggctggattatatatggatctttcatctatttgtccagtcattgtgccacaacattcaaagaagatggattatggacttacctcaatcagattgtggcctgttccccttgggttttatatatcttgatgctagcaactttccatttctcatggtcaacatttttattattaaatcaactctttcagattgcctttctgggcctgacctcccatgagagaatcagcctgcagaagcagagcaagcatatgaaacagacgttgtccctcaggaagacaccatacaatcttggattcatgcagaacctggcagatttctttcagtgtggctgctttggcttggtgaagccctgtgtggtagattggacatcacagtacaccatggtctttcacccagccagggagaaggttcttcgctcagtatgaagaaaagcaacccaaaactctcaatctgatttgtttttgtttatgtcgatgccctgtagtttgaaagtgaagtaaagatttagaattcacctaagtccaaaggaaaacacgtggtttttaaagccattaggtaaaaaaagttctcaataaaggcattacaattttttaggtttagaaagatggacttttctgataaatcttggcagacatctaaaaaaaaaaccatatttttcacaagaaaatgcaagttactttttttggaaataatactcactgattatggataaaatggaatattttcagatactatattggctgtttcaaaatagtactattctttaaacttgtaatttttgctaagttatttgtctttgttgtatctataaatatgtaaaaaatatttaaatagatgtacctgttttgctttcacacttaataaaaaatttttttttgta

SEQ ID NO: 204404 - DNA, 2445 bp, Homo sapiens
  Payload ID: 20318
  Gene Name: zinc finger, DHHC-type containing 13
  Uniprot ID: Q8IUH4
  ENST ID: ENST00000446113
  CDS Start-End: 122-1990
gcagcggcggaggtgagggcgccagcaggaagtgggagaagaggcgacccaaggcgggctggcgggctggcggcagtcgctacttgcctagtagcctcagccgctgtgggctcctggggagatggaggggccggggctgggctcgcagtgcaggaatcacagccatggcccccaccctccaggatttggtcgatatggcatctgtgcacatgaaaacaaagaacttgccaatgcaagagaagctcttcctcttatagaggactctagtaactgtgacattgtcaaagctactcaatacggaatttttgaacgatgtaaagagttggtagaagcaggatatgatgtcaggcaaccagataaagaaaatgtgtcgcttcttcattgggctgctattaacaacagactggatcttgtaaagttttatatttcaaaaggtgctgttgtagatcagttgggtggagatttaaattcaactcctcttcactgggccatccgacaaggacatttacctatggtcatattattactccagcatggtgcagaccccactcttattgatggagagggattcagcagcatccacctggcagtattgtttcaacacatgcctattatagcatatctcatctcaaagggacagagtgtgaatatgacagatgtaaatgggcagacacctctcatgttatcagctcacaaagtaattgggccagaaccaactggatttcttttaaagtttaatccttctctcaatgtggttgataaaatacaccaaaacactccacttcactgggcagttgcagcaggaaatgttaatgcagttgataagcttttggaagctggttctagcctggatatccagaatgttaagggagaaacacctcttgatatggctctacaaaacaaaaatcagctcattattcatatgctaaaaacagaagccaaaatgagagccaaccaaaagttcagactttggaggtggctgcagaaatgcgagctcttcctgctgctgatgctttctgtgattaccatgtgggctattggatacatattggacttcaattcagattcttggcttttaaaaggatgtcttctagtaacactgttttttctgacatctttgtttccaaggttcttggttgggtataagaaccttgtatacttaccaacagcctttctgctaagttctgttttttggatatttatgacttggttcatcttattttttcctgatttagcaggagcccctttctatttcagtttcattttcagcatagtagcctttctatactttttctataagacttgggcaactgatccaggcttcactaaggcttctgaagaagaaaagaaagtgaatatcatcacccttgcagaaactggctctctggacttcagaacattttgtacatcatgtcttataaggaagccattaaggtcactccactgccatgtatgcaactgctgtgtggctcgatatgatcaacactgcctgtggactggacggtgcataggttttggcaaccatcactattacatattcttcttgtttttcctttccatggtatgtggctggattatatatggatctttcatctatttgtccagtcattgtgccacaacattcaaagaagatggattatggacttacctcaatcagattgtggcctgttccccttgggttttatatatcttgatgctagcaactttccatttctcatggtcaacatttttattattaaatcaactctttcagattgcctttctgggcctgacctcccatgagagaatcagcctgcagaagcagagcaagcatatgaaacagacgttgtccctcaggaagacaccatacaatcttggattcatgcagaacctggcagatttctttcagtgtggctgctttggcttggtgaagccctgtgtggtagattggacatcacagtacaccatggtctttcacccagccagggagaaggttcttcgctcagtatgaagaaaagcaacccaaaactctcaatctgatttgtttttgtttatgtcgatgccctgtagtttgaaagtgaagtaaagatttagaattcacctaagtccaaaggaaaacacgtggtttttaaagccattaggtaaaaaaagttctcaataaaggcattacaattttttaggtttagaaagatggacttttctgataaatcttggcagacatctaaaaaaaaaaccatatttttcacaagaaaatgcaagttactttttttggaaataatactcactgattatggataaaatggaatattttcagatactatattggctgtttcaaaatagtactattctttaaacttgtaatttttgctaagttatttgtctttgttgtatctataaatatgtaaaaaatatttaaatagatgtacctgttttgctttcacacttaataaaaaatttttttttgta

SEQ ID NO: 204405 - DNA, 328 bp, Homo sapiens
  Payload ID: 20319
  Gene Name: zinc finger, DHHC-type containing 14
  ENST ID: ENST00000340347
  CDS Start-End: 1-328
caggggggtaccgcccgcctcccagaaccaaagaagtcatcatcaatggccagaccgtgaaacttaaatactgtttcacctgcaagattttccggccccctcgcgcctcccattgcagcctttgtgataactgcgtagtctttatatttgcattcgttatcacccacgtcattcttcgttcacagcaaacaggattcctaaatgcccttaaggacagtcctgcaagcgtcctggaggctgtggtgtgcttcttctctgtctggtccatcgttggcctctcaggattccacacctacttgatcagctccaaccagacaacaaatgagga

SEQ ID NO: 204406 - DNA, 7380 bp, Homo sapiens
  Payload ID: 20319
  Gene Name: zinc finger, DHHC-type containing 14
  Uniprot ID: Q8IZN3
  ENST ID: ENST00000359775
  CDS Start-End: 890-2356
cgcccacccggcccggaggaggcggacccactcggagcgccgcgcgcgcgccgggctgagccttgcaaacaagtgtctgtgctgtgtccccgcggccctcctcgcgccggggccgcttcctccgggtaggagggagcaagggagccctcgccgcgcggcccgcgagccgccgccgccctcggcccgcgcatccccgcgcgggggccgcggattcgactaggctgccaggcgcagcgacaccgggtcgcggtgcgagcggcgccccggctctcgccgagaggctcctgacagaaaaacgtgcgtggttgtccccacccctgggaggggttgccggtgccgcgcgcggccgcccagtcgccagcgctctctcctgggaggatccgctgccggaggaaggagtggacccaacctggccgcgccgcagaagtggctcccgaggaagccggcgccggggccgccgcctcgtgtcccctcggggcgcagtgctcgggggtcggcgggccagagccgaggcgcggccggggagccgggggctgcggggccgagcgggcagccgcgcgagggggcgggcgctcggcgacccgggggccggccgggctgagccccgcgccccgggacgcgggctggaagcgacggaggagtgctgccgcgggctgcggaccagcgccgtcccctcacggagcggggattctgctatgacagttgggctccccggagggttaacctgggtgtcctcggcaaagttgtcgccgagccgggagcccgtgtaggggccgcggcgccgcggctcggggggcggccgggcggccggcggcggtcgtggctcggcggggcccgcgcggccggggggctcctgggggtgtgcgcccccagccggctgccctcgtggatgcctcccggcggcggcgggcccatgaaagactgcgagtacagccagatcagcacccacagctcctcccccatggagtcgccccacaagaagaagaaaatcgcggcccggaggaaatgggaggtgttcccgggaagaaacaagttcttctgtaacgggaggatcatgatggcccggcagacgggcgtcttctacctgacgctcgtcctcatcctggtcactagcggactcttcttcgccttcgactgtccgtacctggcggtgaaaatcacccctgccatccctgcagtcgctggcatcctgttcttctttgtgatggggaccctgctccgcaccagcttcagcgaccccggagtcctcccacgagccacgcctgatgaagccgccgatctggaaaggcaaatagatatcgcaaacggcaccagttcaggggggtaccgcccgcctcccagaaccaaagaagtcatcatcaatggccagaccgtgaaacttaaatactgtttcacctgcaagattttccggccccctcgcgcctcccattgcagcctttgtgataactgcgtagaacggtttgatcaccactgtccctgggtaggcaactgtgtggggaaaagaaactacagatttttttatatgtttattttatctctgtcttttctgacagtctttatatttgcattcgttatcacccacgtcattcttcgttcacagcaaacaggattcctaaatgcccttaaggacagtcctgcaagcgtcctggaggctgtggtgtgcttcttctctgtctggtccatcgttggcctctcaggattccacacctacttgatcagctccaaccagacaacaaatgaggacattaaaggatcctggtcaaataaaagaggtaaagaaaattacaatccctacagctacggaaatatctttaccaactgctgtgttgccctgtgtgggcccatctcaccaagcctgatcgacagaagagggtacatccagcccgacacgccgcagccagcagcaccctccaatggcatcaccatgtacggggccacgcagtcacagagtgacatgtgcgaccaagaccagtgcattcagagcaccaaattcgttttgcaggctgcagccacgcccctgctgcagagcgagcccagcctcaccagcgacgagctgcacctgcccgggaagcctggcctgggcacgccctgcgccagcctcacactgggcccgcccacaccgcccgcctccatgcccaacctcgccgaggccacgctcgcggacgtgatgccccggaaagatgagcacatgggccaccagttcctgacgcccgatgaggcgccctcgccccccaggctactggcggcgggcagccccctggcgcacagccgcaccatgcacgtgctgggcctggccagccaggactccctgcatgaggactctgtgcgcggcctggtgaagctcagctccgtgtgacccacatggccccaggccgggggacaccagaggctcctccatgggcagcaggagtgagcggaggggtgtgtcccacagcgactttcccagccaatgccacggtggagatgacagccccaggtctggggtacagagaccacttaggatggcacagggtggctggccccggatgctgagagcttggtttcatttgaattttcttccccaacctgagtgctttgacaacaatggaaatagagaagtggctgctttcttttggtgaccctccaggggtggaatcggagtgtgtctgcccgcccttgtgacagacacacggaaggcttctgacgcttgtggccagactgcaattgcacttatgtgttatgctactaatatttgaaacagacctgccattccatttgttaattaaaaaaaaaaaaaatcctaaagggaaaaaaccgaccaggtgtggatctgcatgccacgctgccgtctgtgttacagtggtgttgctatttccaaggaagtgctgctttctttttctttttttaattttgtgaattttcaagtgctgttttgttggaagacagtgcaacgaactgagactaatggacagtgtcatcactcagcttactgggctgaggcgtctgtggagaggtggcaccggggctgcagagggcggctggggttccgtcgtgtcgggtgtcacttcaccttctgtttggccgctcgatgaggtctcgtgttgagatattgtgtgccacaacccccacagtcttcacctccgtgtgtgatgaaacttcccgtggacagccaataaaatgacgtcctctgttattttggatctgcgtacggttatccttaatagcataaatgaaaacaaagtcatccagatggggagagtttttcttgaaatgtccctagcgaggaatggtccccagacaaccaaaagtcaaatctttgaactgggagatatttatagaataatttcttagataagaggcaagttttccatcatttattttctttaattatctctttttgacaccatcttagtggaatttgctctacgtttgcagtttgccgtgcaacagttgatcggaagtagggagaggggaggggacgctcagggagaaggttctgtcgggcgtcttctgggcttccttctgtgttaacgtgtcactcaatcccagaagtgcaacttgaggtcctagtaaaggtatcagaaaatgaggaggagaaatcggcttacagtctaagctgagatcatgtaggtcatcatccttcctagacactgatcagaatgaaattaagaaaatgaccactttgttcactttcattggtcacctagaagggaacgaactggctctggacttagggagtgtgtcactatgggggcagccacaggggacacagcaactcctctcctggcttctttccagaccataaatctaacagctaaagctactcaagttcaaagccatggccttgctccttataaccatatgaaagacaagacacattgaccaatgatacaagtaacccaagtgatttgcatttatggaaaaaggctattactcctgagaaagagttgccattttatataaaagaaaagaagataggaaaaagaaaagcacacaagttttatttggaatgaaggcaattcacaggtcacaaaataattcatgctgaaagggcctgcagagttcttgcactgtgatgtcttcgagccatctttattgtcatgctgcatgcacgtatagaaaatggaataggtccattctatgtagccatttttgattttctgaaccacctaactacttgtacccacctgcaatgtgtaattcatggggcagtgccctccttacacaaccgcacacgctcacaggcaccaactcacagggattctccttgtccacgctacctgtgagcccaaagtgacagccccacaaaggagcttccacaacttcccaaaccgtctctgctccttgctttcttccacctgctccccagaggccccaggaaggagttggccctgatgagaacggtgctccatgggtgaccgcgaatccggcttagccctcactccggtcccacgtgtggcccagtccattctcagctcattcccctggaaagcaagatcatggtcttcagaggcctcccgcttctaacatttcctaactcagtggttgccactctcctgtgaccagcccttcttcccacctcactgtgaaaaattcccagaagccaggatcacgactcacttgtcttcacataatggatatttacttaatatttattatcaatttccccacctccaaccctgtccctggcacacacttggcatcatttatccaataggggactgggaattttggtgaagtgaatcaaggctattcagggtcaagagagagattaacttgaatgggccaatttgctagataattaatgtcttaaaaaccaaaaccagagagaagcccacagccctgtcctctgtggcttgaaaaagaaacccagcatcagaggaatgagcgatgatgccccctggggcgcccacttctgtttgtcaggagggatggtcggaggggcagctcacctggcgaggtgatggctctgcatttcccacgaacatatatgtgacatgtacataaatataaatacttatgtttataaatgttgaatggttccttctagctgtggctgagtagacgttggtgtttctaacttctttcagtgtgttagagattgattacatgctagctataaaaagtaaaataaatattttaccatgctattaaagcttggaccattatcaaacacacacaaacacacactcattctgctgtttaaaaattcatctgcgttcgttctcccaggagtgctccagggaaccacaggcttcccggcacttgaaggctgaactgagcgtgagtgccctggtccccaggaagcaggcggatgctgcaggaaggtggcagacagcctgcatccaggagggccccaggaagtggggatgctgcaggaaggcggcacaaagcctgcatccgggagggccccaggaagcagggggatgctgcaggaaggtggcagacagactgcatccaggagggcacagtgacctgtcactccgttctgcagaaattggcccagcagttgcgttatgcccaaccaaaagatgctcgttccagctttcaaatgtgatgatttcagcctgtgaggacaatgccatgtccccaccctaagccagcaaaatgcgaaatctctgttctggcccagaatggcacaagggaggagtctttgcagagttccacgccaccccccagcttactgcggccttcaccggctctgtctaggattgccagctgtggttccaagtgaggagcaaacccattttatgagccatgttcctgcggagacctgatgggccaggccttctgtggctttgaaaacccctaagctcttcacctcctgggcctaggccttcttgtctgactcaacagcaagaaaaatgaacttgccaaaattggcagtaggtgtccttgacacaggggcttctgatggcatcgcccagaaaatgctggaaccagaactggtcagagactttgaagggcacagcctggcgggctactccccaagggtctcaggtctctgcccacctgactaccctgcagcaaacgcttctctgtaacctgacttctcccttcagacctcagcctacaaccatcctcttcatgccaggaaccaactgcttctcagcctcggcttagggtcttaagttcaccagaagggatcggggtttgcgttgatattataaggaatcttcccagaaggagctgcccttcatccatccacaagaatacattgagttcatttagttcttgaccaggtaagaaaagaataaaggagaacaaatattaaatactcttttctaattgatgccttactactgttttgaagctgagccgaaatcaaattgatgtttacattttctatcaagtacacatgagctgtgggagtctagcatattcttgtccaaaagagagagactttcaaatgaattcctattcctcttggtcccctccacctattttggaggtctgcatgtggagttgtatgctattttccaaggtacctcatttaaaaaaaaaaaaaaaaaaaaactgcctctcatttgttcccttaaaacgtctctctctctcataaaactaagttatcattgaaatattaaacgatctgaagcgtctttttttttttcaaataaatgtcaaagatggtaatagtttgtaaatcagtaaatcctctgtccatctgcccattgtccatggtcctgataatagagccaagatggattttcacatgtaaggtgttagtccattaatccagccattaaaagtagttgggagattgaagattagatggtttctggagcaaccgaatttgcagctgccacaaaactagataaatagccacaactggagttattttttgatctcataaaccccaggaattacacacagaatggattgaaaagcagacaagcatcttgtgctattgcagagacttttctacccaggaagtgttgaatttttaaaagaaacttgatattggtgataaaggtatgaatgaacaactctcttacttgccctcgatgtttcaagatgcctggtgaaaccgagaggccacatggcatgtccaaggagacatgctttctgggttctatatgaatagagatggttttagcctgcaattaaaaaaaaaaaaaaaaacggttgaagccttgctaactttttcccagagcattctgggttgatatttcacagtcaaacgttttggcatggaaaaaaaaaaaagcattttaaactcttagtgaattcaaagctctaaatccaaacaatggtgaacacatgtacataacatttcatgttttcagagatacgtatgcttatttaagtgcctttcatgttttaatcaatgtttgcagaatttatcttaaacctgagatgaattaaaaaatttttctccttcaataaaaactgctaatggca

SEQ ID NO: 204407 - DNA, 3134 bp, Homo sapiens
  Payload ID: 20319
  Gene Name: zinc finger, DHHC-type containing 14
  Uniprot ID: Q8IZN3
  ENST ID: ENST00000414563
  CDS Start-End: 890-2311
cgcccacccggcccggaggaggcggacccactcggagcgccgcgcgcgcgccgggctgagccttgcaaacaagtgtctgtgctgtgtccccgcggccctcctcgcgccggggccgcttcctccgggtaggagggagcaagggagccctcgccgcgcggcccgcgagccgccgccgccctcggcccgcgcatccccgcgcgggggccgcggattcgactaggctgccaggcgcagcgacaccgggtcgcggtgcgagcggcgccccggctctcgccgagaggctcctgacagaaaaacgtgcgtggttgtccccacccctgggaggggttgccggtgccgcgcgcggccgcccagtcgccagcgctctctcctgggaggatccgctgccggaggaaggagtggacccaacctggccgcgccgcagaagtggctcccgaggaagccggcgccggggccgccgcctcgtgtcccctcggggcgcagtgctcgggggtcggcgggccagagccgaggcgcggccggggagccgggggctgcggggccgagcgggcagccgcgcgagggggcgggcgctcggcgacccgggggccggccgggctgagccccgcgccccgggacgcgggctggaagcgacggaggagtgctgccgcgggctgcggaccagcgccgtcccctcacggagcggggattctgctatgacagttgggctccccggagggttaacctgggtgtcctcggcaaagttgtcgccgagccgggagcccgtgtaggggccgcggcgccgcggctcggggggcggccgggcggccggcggcggtcgtggctcggcggggcccgcgcggccggggggctcctgggggtgtgcgcccccagccggctgccctcgtggatgcctcccggcggcggcgggcccatgaaagactgcgagtacagccagatcagcacccacagctcctcccccatggagtcgccccacaagaagaagaaaatcgcggcccggaggaaatgggaggtgttcccgggaagaaacaagttcttctgtaacgggaggatcatgatggcccggcagacgggcgtcttctacctgacgctcgtcctcatcctggtcactagcggactcttcttcgccttcgactgtccgtacctggcggtgaaaatcacccctgccatccctgcagtcgctggcatcctgttcttctttgtgatggggaccctgctccgcaccagcttcagcgaccccggagtcctcccacgagccacgcctgatgaagccgccgatctggaaaggcaaatagatatcgcaaacggcaccagttcaggggggtaccgcccgcctcccagaaccaaagaagtcatcatcaatggccagaccgtgaaacttaaatactgtttcacctgcaagattttccggccccctcgcgcctcccattgcagcctttgtgataactgcgtagaacggtttgatcaccactgtccctgggtaggcaactgtgtggggaaaagaaactacagatttttttatatgtttattttatctctgtcttttctgacagtctttatatttgcattcgttatcacccacgtcattcttcgttcacagcaaacaggattcctaaatgcccttaaggacagtcctgcaagcgtcctggaggctgtggtgtgcttcttctctgtctggtccatcgttggcctctcaggattccacacctacttgatcagctccaaccagacaacaaatgaggacattaaaggatcctggtcaaataaaagaggtaaagaaaattacaatccctacagctacggaaatatctttaccaactgctgtgttgccctgtgtgggcccatctcaccaagcctgatcgacagaagagggtacatccagcccgacacgccgcagccagcagcaccctccaatggcatcaccatgtacggggccacgcagtcacagagtgacatggctgcagccacgcccctgctgcagagcgagcccagcctcaccagcgacgagctgcacctgcccgggaagcctggcctgggcacgccctgcgccagcctcacactgggcccgcccacaccgcccgcctccatgcccaacctcgccgaggccacgctcgcggacgtgatgccccggaaagatgagcacatgggccaccagttcctgacgcccgatgaggcgccctcgccccccaggctactggcggcgggcagccccctggcgcacagccgcaccatgcacgtgctgggcctggccagccaggactccctgcatgaggactctgtgcgcggcctggtgaagctcagctccgtgtgacccacatggccccaggccgggggacaccagaggctcctccatgggcagcaggagtgagcggaggggtgtgtcccacagcgactttcccagccaatgccacggtggagatgacagccccaggtctggggtacagagaccacttaggatggcacagggtggctggccccggatgctgagagcttggtttcatttgaattttcttccccaacctgagtgctttgacaacaatggaaatagagaagtggctgctttcttttggtgaccctccaggggtggaatcggagtgtgtctgcccgcccttgtgacagacacacggaaggcttctgacgcttgtggccagactgcaattgcacttatgtgttatgctactaatatttgaaacagacctgccattccatttgttaattaaaaaaaaaaaaaatcctaaagggaaaaaaccgaccaggtgtggatctgcatgccacgctgccgtctgtgttacagtggtgttgctatttccaaggaagtgctgctttctttttctttttttaattttgtgaattttcaagtgctgttttgttggaagacagtgcaacgaactgagactaatggacagtgtcatcactcagcttactgggctgaggcgtctgtggagaggtggcaccggggctgcagagggcggctggggttccgtcgtgtcgggtgtcacttcaccttctgtttggccgctcgatgaggtctcgtgttgagatattgtgtgccacaacccccacagtcttcacctccgtgtgtgatgaaacttcccgtggacagccaataaaatgacgtcctctgttattttgga

SEQ ID NO: 204408 - DNA, 861 bp, Homo sapiens
  Payload ID: 20319
  Gene Name: zinc finger, DHHC-type containing 14
  ENST ID: ENST00000518214
  CDS Start-End: 1-370
ctgtccgtacctggcggtgaaaatcacccctgccatccctgcagtcgctggcatcctgttcttctttgtgatggggaccctgctccgcaccagcttcagcgaccccggagtcctcccacgagccacgcctgatgaagccgccgatctggaaaggcaaatagatatcgcaaacggcaccagttcaggggggtaccgcccgcctcccagaaccaaagaagtcatcatcaatggccagaccgtgaaacttaaatactgtttcacctgcaagattttccggccccctcgcgcctcccattgcagcctttgtgataactgcgtagaacggtttgatcaccactgtccctgggttcacagcaaacaggattcctaaatgcccttaaggacagtcctgcaagcgtcctggaggctgtggtgtgcttcttctctgtctggtccatcgttggcctctcaggattccacacctacttgatcagctccaaccagacaacaaatgaggacattaaaggatcctggtcaaataaaagaggtaaagaaaattacaatccctacagctacggaaatatctttaccaactgctgtgttgccctgtgtgggcccatctcaccaagcctgatcgacagaagagggtacatccagcccgacacgccgcagccagcagcaccctccaatggcatcaccatgtacggggccacgcagtcacagagtgacatgtgcgaccaagaccagtgcattcagagcaccaaattcgttttgcaggctgcagccacgcccctgctgcagagcgagcccagcctcaccagcgacgagctgcacctgcccgggaagcctggcctgggcacgccctgcgccagcctcacactg

SEQ ID NO: 204409 - DNA, 5796 bp, Homo sapiens
  Payload ID: 20320
  Gene Name: zinc finger, DHHC-type containing 15
  Uniprot ID: Q96MV8
  ENST ID: ENST00000373367
  CDS Start-End: 232-1245
cacccttccgctccaacatggctagttcctcaacgccgtgactcaagcctgttgtgccaggcagggcgcactcagcagcgcagccccacaggtggcgaaggctccgcgagagggttcccgccaggctagacagtggagtgccgcacagcgcgccttccagcctcgcagccgccaccctagcggttccgacccggcgccagcaggcctgcttggtcgatcttcgagccaaagatgcggcgaggctggaagatggctctgtctggggggctgcggtgctgccgccgggtactgtcctgggtgccagtgctcgttattgtcctcgtcgtgctctggtcctactatgcctacgtctttgaactctgcctggtgactgttttgagcccagcagaaaaagttatttacctcatactctaccatgccatctttgtgttctttacctggacctactggaagtctatctttacactcccacagcagccaaaccagaagttccacttgtcctacacagacaaggagcgctatgaaaatgaagaaagacctgaggtccagaagcagatgcttgttgatatggccaaaaagctaccggtttacacaagaactggaagtggagctgtacgattctgtgaccggtgtcatctgatcaagccagaccgctgccaccactgctctgtctgtgctatgtgtgtgttaaaaatggatcatcactgcccttgggttaataactgcattggattttccaactacaaattcttccttcaattcttagcttactctgttctctactgcctgtacattgctacgacagtcttcagctatttcatcaaatactggagaggggaattacccagtgttcgctctaagttccatgtcctttttcttctctttgtggcctgcatgttttttgtcagccttgtgattctctttggttaccattgttggcttgtcagcagaaacaaaaccaccttagaggccttctgcactccagtgtttacaagtggcccagagaaaaatgggttcaaccttggcttcatcaagaatatccagcaggtgtttggagataagaagaagttctggttaatacctattggttccagccctggtgatggacactccttccctatgaggtctatgaatgagtcacagaacccactgctagcaaatgaagaaacctgggaagacaacgaggatgacaaccaagattatccagaaggctcatcatctcttgctgtggaaacggaaacatagcagttttcacatttcctgcatctctcagacaggactcaccatctctgcctcccatgaggcttacagagttcaatgttggaaatcattgtaatcttcaaaataagtcaccgtgttggattgaaagcttcaaaatttgaaagaattccatcaaatacttgctgtgtaaatgtttctggactttatgttatttaatttactgactgaaatccaatttggaatttggtagcagttaattcaagccaattttttttgtttcttcatttcccctcccccaatccatgaaagcctaaatgtaaaatatatcttttcattcatcttatcaggtaaaaggaaattcagaaaatttccttagagtctttaattcccccacaaagattattaatcacatatatagggcctttttggtgttgaagggaatcaaactacatttgctgcttgtgtgcgtgtgcatttgtgaacacgtacagcatatctatacaaaattctgctatagtgtgaaaatcagggctaaaaacctgaagcctttgtttaattatgcttttcctctaaatagcaacttaaatatttgctagactttgaatcatcgctatatcaagtatctaaaatttgggagggtgaatcagtacactgtgaccaaggtcctcaaattggaatttgaacaacaatgtaaaacctgttctgtcacaaatgttcctgaaagcaccacagctactcaagaagatcaaattcaggacataaactttattgaacataataaccagtgttttttaaagacttttttgtcagggtgcagtaaaattctccaattacttttattcatttatctgcttcctagttttattttagcctttatgagttattttatgatgaaagaaaatctataagcctaagttatggcccataggttttgttaagggttttcagagtgattttcaggtttaatttcactgcctttcataagggtaaagtttcacagctgacattagcctgaggattagcactaaagagctgtgttttcatagcaggggctattgtacagacagtgataaccaaatagtaatatgccagttctttcttctttttttagcttcagtagtagctaagccattaatacagtttgcatcaatttccccatttatttataatcagcctttcttttagtcctagtgcctgaatcaatgagtgagaatactagtactgattctttacaataataatatcttaagagtattgatatctttcattttttcatccagcagtctagtgcccagctgctgacaataaaagctccaactcttttagagatcagtggaatttagaagcatcttacaggtatcaaggaattgagcttctagagggatggtttggcttactaatttatcttccctgaaatatgtttgagtaaaaaagagttgcctgccacaatttagtgttggggttccagtggagctgagaaagtgaacaatccagctacttaaagcaacaacaaaacctgttcatctggatccctaggtaattttgaccaaggtgagacttttggcataaattaaatggattgtggtcagcattacatttgagagaatactagacatgactacacttattagggctagtgactttctcaaactcagaagctaaaaagcagcctagatgactatgcacacactgggtttcaagatgaaatcttcttatatattcagatggaaaaaaatttccccttacactctttctcaaaatactctcatttcggtttttcctgaaaccttatttggccattcccatggttttatgacagacaagccttgtcttctattcatatagatatgcacctttttctacatgtatggcctttacttactacacagcaagtaggcctcaaagtaatcttcctctttcccatcaatcatcttctgccaagcattcaggcagagcagctgttaactgtgattcaaagtcagaaaaacatcaagaacttctttgatgcatagggtgtatcagcactcagctcccacagaagtcaagtcacaaaatatagtgtcagttaactataaggaagttccggagaggtaaagctcaggaaagatgtaatgcaaagctgattgtttaatgtcttacagatttacactgtctttaaaaggccaaataaggctgggcgcagtggctcacacctgtaatcccaacattttgggagcccaaggcggccggaccacctgaggtcgggagttcaagaccagcctgaccaacatggagaaaccctgtctctactaaaaatacaaaaattagccaggagtgttggtgcatgactgtaatcccagctactcaggaggctgaggcaggagaatcgcttgaacctgggaggtagaggttgtggtgagctgagatcgtgccattgcactccggcctgggcaataagagtgaaactctgtctcaaaaaaaaaaaaaaaaaaaaaaaaagccaaataaatcagggttttaccaggggctcagagataaaaagaaaacctattcctatcttagcattttggtctcattggtttatagactctgataatatccctatccatggatcatttgagtattgactaatgtacataggtacccaactggttgattattaatcaagaatacagaactttatttaataattagcacaccctgatctggcttctttgcttgcttttctttggatccctgtccaataacctctgtggaatctcattccctaattgttgatactcattttctccgtttgcaaaatgaagatactcattgttaggatcctactgctgaagggtgctatgtcactttctagtgctcttatatgtctttaattataggactggaatgaaaagcttaaccatacagtatttctaagcaaaataatgtactccattcttttgtccatgctctcattgctgatttgttcttgcaggacttagagcactttgttaatgttcttccattcactccaacagcgtcctcagaaagagacagaataaaaaaattgttccccatggtacagctggaaaaattaaggggaaaagagattaagtggtccccaatggaacacagctgtcttatgcagggctcacagttaccatgttcagtacattgttaaagtaacttggcttcccaggactggaattatcatggagcagttagaattttgagagtaattacaacaggatcacattctgaaagagtcacattttgtcaaaaatctgaaaagtatgcaatttgtacaactcttactttctatgtgataagaatgcaatatgtgcctctttcccctactagccccatgtgacacatatttttcacactatgtggcatcaaccagtgccattacctcctgtggcaccatagagcccaatctcagggcagacattgccaaggtaaagaatgcactccatgtttataccaaattgcacaaagtatagacattgaggttaatggagatttaagcacaatcctagcaagtaagttttaagaatactgaatattatacattattgtaacatgaacctaaaattaatttaacagggcccaaattcataggaatgtaacagtcattgaaagcctattcttttcacctctcatcacacatatctacatacatgtatgcacatgtacacacacacacacacacacacacacacacatacacattttctccaaagcaggctgcctcttcagcaggagcaaatactttaatttaaaagaatgattatctgttttctccttttagaaaaagagtctaagaaacacagcatgtgaagaacattagatttatacattccagaatctctgctctcagagtagctaagagattcggtacagaagacgttctatggagaagcacagggggcatctaatgagattgtcaggcccttggacaagatccatattcttagaaaattaatgagttccatctcgttaggaattggttgatgaggtatggtacatctgcatttctttaaccatagctgtaatgtaccatattaaattgtagccttttgcatgcgggtattatataataatgaatgggtggctcctagtagcatgcaacccatgactgtttacttccctaaaagggttaggtctgtgtcctgcacagtgttcaaaaccattaaatgtgttctttgtagcaggatggtacacagccatcagcagaatgagttaaaaccaacaatgaattcaatataccaggaaatagattgttagtagggaatggcattaaaggaaaaaaaaattagataagatgcattcaaggaataattactttcactctgctggcttaatcagtgaaggaacataaaaggaaagctggcagtgggtcttggtaatatatgaactatattagagtgccagaaaaggagacctcagaagttaagcataggttgccaatctgctacaattatttttcccaccaatctgctcaaaatgattgtatatagtattcttaaaaccatgtgtcttggtgcagaaatattgacaaatgctggccagctttatcttcctatatccttcattaaaagtatatgcatataa

SEQ ID NO: 204410 - DNA, 6012 bp, Homo sapiens
  Payload ID: 20320
  Gene Name: zinc finger, DHHC-type containing 15
  Uniprot ID: Q96MV8
  ENST ID: ENST00000541184
  CDS Start-End: 479-1465
gtgtgtaactgtgggggggggtagcagggggagagaaagagaacgaagggagacagagagactgagacagaaacaaagagggcggacgcagtgcagtaagagcagatgggcggacccaaatttcttcggcttcacgattttgcggaggtctagccctgcatccagccttgaaacagggtggggaggaggcagaaaggggagggactgcactccctctgagcgtgctagctccgactgcctgacggatcacccttccgctccaacatggctagttcctcaacgccgtgactcaagcctgttgtgccaggcagggcgcactcagcagcgcagccccacaggtggcgaaggctccgcgagagggttcccgccaggctagacagtggagtgccgcacagcgcgccttccagcctcgcagccgccaccctagcggttccgacccggcgccagcaggcctgcttggtcgatcttcgagccaaagatgcggcgaggctggaagatggctctgtctggggggctgcggtgctgccgccgggtactgtcctgggtgccagtgctcgttattgtcctcgtcgtgctctggtcctactatgcctacgtctttgaactctgcctggttatttacctcatactctaccatgccatctttgtgttctttacctggacctactggaagtctatctttacactcccacagcagccaaaccagaagttccacttgtcctacacagacaaggagcgctatgaaaatgaagaaagacctgaggtccagaagcagatgcttgttgatatggccaaaaagctaccggtttacacaagaactggaagtggagctgtacgattctgtgaccggtgtcatctgatcaagccagaccgctgccaccactgctctgtctgtgctatgtgtgtgttaaaaatggatcatcactgcccttgggttaataactgcattggattttccaactacaaattcttccttcaattcttagcttactctgttctctactgcctgtacattgctacgacagtcttcagctatttcatcaaatactggagaggggaattacccagtgttcgctctaagttccatgtcctttttcttctctttgtggcctgcatgttttttgtcagccttgtgattctctttggttaccattgttggcttgtcagcagaaacaaaaccaccttagaggccttctgcactccagtgtttacaagtggcccagagaaaaatgggttcaaccttggcttcatcaagaatatccagcaggtgtttggagataagaagaagttctggttaatacctattggttccagccctggtgatggacactccttccctatgaggtctatgaatgagtcacagaacccactgctagcaaatgaagaaacctgggaagacaacgaggatgacaaccaagattatccagaaggctcatcatctcttgctgtggaaacggaaacatagcagttttcacatttcctgcatctctcagacaggactcaccatctctgcctcccatgaggcttacagagttcaatgttggaaatcattgtaatcttcaaaataagtcaccgtgttggattgaaagcttcaaaatttgaaagaattccatcaaatacttgctgtgtaaatgtttctggactttatgttatttaatttactgactgaaatccaatttggaatttggtagcagttaattcaagccaattttttttgtttcttcatttcccctcccccaatccatgaaagcctaaatgtaaaatatatcttttcattcatcttatcaggtaaaaggaaattcagaaaatttccttagagtctttaattcccccacaaagattattaatcacatatatagggcctttttggtgttgaagggaatcaaactacatttgctgcttgtgtgcgtgtgcatttgtgaacacgtacagcatatctatacaaaattctgctatagtgtgaaaatcagggctaaaaacctgaagcctttgtttaattatgcttttcctctaaatagcaacttaaatatttgctagactttgaatcatcgctatatcaagtatctaaaatttgggagggtgaatcagtacactgtgaccaaggtcctcaaattggaatttgaacaacaatgtaaaacctgttctgtcacaaatgttcctgaaagcaccacagctactcaagaagatcaaattcaggacataaactttattgaacataataaccagtgttttttaaagacttttttgtcagggtgcagtaaaattctccaattacttttattcatttatctgcttcctagttttattttagcctttatgagttattttatgatgaaagaaaatctataagcctaagttatggcccataggttttgttaagggttttcagagtgattttcaggtttaatttcactgcctttcataagggtaaagtttcacagctgacattagcctgaggattagcactaaagagctgtgttttcatagcaggggctattgtacagacagtgataaccaaatagtaatatgccagttctttcttctttttttagcttcagtagtagctaagccattaatacagtttgcatcaatttccccatttatttataatcagcctttcttttagtcctagtgcctgaatcaatgagtgagaatactagtactgattctttacaataataatatcttaagagtattgatatctttcattttttcatccagcagtctagtgcccagctgctgacaataaaagctccaactcttttagagatcagtggaatttagaagcatcttacaggtatcaaggaattgagcttctagagggatggtttggcttactaatttatcttccctgaaatatgtttgagtaaaaaagagttgcctgccacaatttagtgttggggttccagtggagctgagaaagtgaacaatccagctacttaaagcaacaacaaaacctgttcatctggatccctaggtaattttgaccaaggtgagacttttggcataaattaaatggattgtggtcagcattacatttgagagaatactagacatgactacacttattagggctagtgactttctcaaactcagaagctaaaaagcagcctagatgactatgcacacactgggtttcaagatgaaatcttcttatatattcagatggaaaaaaatttccccttacactctttctcaaaatactctcatttcggtttttcctgaaaccttatttggccattcccatggttttatgacagacaagccttgtcttctattcatatagatatgcacctttttctacatgtatggcctttacttactacacagcaagtaggcctcaaagtaatcttcctctttcccatcaatcatcttctgccaagcattcaggcagagcagctgttaactgtgattcaaagtcagaaaaacatcaagaacttctttgatgcatagggtgtatcagcactcagctcccacagaagtcaagtcacaaaatatagtgtcagttaactataaggaagttccggagaggtaaagctcaggaaagatgtaatgcaaagctgattgtttaatgtcttacagatttacactgtctttaaaaggccaaataaggctgggcgcagtggctcacacctgtaatcccaacattttgggagcccaaggcggccggaccacctgaggtcgggagttcaagaccagcctgaccaacatggagaaaccctgtctctactaaaaatacaaaaattagccaggagtgttggtgcatgactgtaatcccagctactcaggaggctgaggcaggagaatcgcttgaacctgggaggtagaggttgtggtgagctgagatcgtgccattgcactccggcctgggcaataagagtgaaactctgtctcaaaaaaaaaaaaaaaaaaaaaaaaagccaaataaatcagggttttaccaggggctcagagataaaaagaaaacctattcctatcttagcattttggtctcattggtttatagactctgataatatccctatccatggatcatttgagtattgactaatgtacataggtacccaactggttgattattaatcaagaatacagaactttatttaataattagcacaccctgatctggcttctttgcttgcttttctttggatccctgtccaataacctctgtggaatctcattccctaattgttgatactcattttctccgtttgcaaaatgaagatactcattgttaggatcctactgctgaagggtgctatgtcactttctagtgctcttatatgtctttaattataggactggaatgaaaagcttaaccatacagtatttctaagcaaaataatgtactccattcttttgtccatgctctcattgctgatttgttcttgcaggacttagagcactttgttaatgttcttccattcactccaacagcgtcctcagaaagagacagaataaaaaaattgttccccatggtacagctggaaaaattaaggggaaaagagattaagtggtccccaatggaacacagctgtcttatgcagggctcacagttaccatgttcagtacattgttaaagtaacttggcttcccaggactggaattatcatggagcagttagaattttgagagtaattacaacaggatcacattctgaaagagtcacattttgtcaaaaatctgaaaagtatgcaatttgtacaactcttactttctatgtgataagaatgcaatatgtgcctctttcccctactagccccatgtgacacatatttttcacactatgtggcatcaaccagtgccattacctcctgtggcaccatagagcccaatctcagggcagacattgccaaggtaaagaatgcactccatgtttataccaaattgcacaaagtatagacattgaggttaatggagatttaagcacaatcctagcaagtaagttttaagaatactgaatattatacattattgtaacatgaacctaaaattaatttaacagggcccaaattcataggaatgtaacagtcattgaaagcctattcttttcacctctcatcacacatatctacatacatgtatgcacatgtacacacacacacacacacacacacacacacatacacattttctccaaagcaggctgcctcttcagcaggagcaaatactttaatttaaaagaatgattatctgttttctccttttagaaaaagagtctaagaaacacagcatgtgaagaacattagatttatacattccagaatctctgctctcagagtagctaagagattcggtacagaagacgttctatggagaagcacagggggcatctaatgagattgtcaggcccttggacaagatccatattcttagaaaattaatgagttccatctcgttaggaattggttgatgaggtatggtacatctgcatttctttaaccatagctgtaatgtaccatattaaattgtagccttttgcatgcgggtattatataataatgaatgggtggctcctagtagcatgcaacccatgactgtttacttccctaaaagggttaggtctgtgtcctgcacagtgttcaaaaccattaaatgtgttctttgtagcaggatggtacacagccatcagcagaatgagttaaaaccaacaatgaattcaatataccaggaaatagattgttagtagggaatggcattaaaggaaaaaaaaattagataagatgcattcaaggaataattactttcactctgctggcttaatcagtgaaggaacataaaaggaaagctggcagtgggtcttggtaatatatgaactatattagagtgccagaaaaggagacctcagaagttaagcataggttgccaatctgctacaattatttttcccaccaatctgctcaaaatgattgtatatagtattcttaaaaccatgtgtcttggtgcagaaatattgacaaatgctggccagctttatcttcctatatccttcattaaaagtatatgcat

SEQ ID NO: 204411 - DNA, 1519 bp, Homo sapiens
  Payload ID: 20321
  Gene Name: zinc finger, DHHC-type containing 16
  Uniprot ID: Q969W1
  ENST ID: ENST00000345745
  CDS Start-End: 150-1040
gctgcctggcgctgcgggcggcgggccatggtggtttggattgagccgggcccggccggggcgccgagtcggagggggtggcagtgagcggcggcagaggctacggggctcggtttggctgactggggagtcggcaggcggcaggaaccatgcgaggccagcggagcctgctgctgggcccggcccgcctctgcctccgcctccttctgctgctgggttacaggcgccgctgtccacctctactccggggtctagtacagcgctggcgctacggcaaggtctgcctgcgctccctgctctacaactcctttgggggcagtgacaccgctgttgatgctgcctttgagcctgtctactggctggtagacaacgtgatccgctggtttggagtgggcaggaatgatatcgccaccgtctccatctgtaagaagtgcatttaccccaagccagcccgaacacaccactgcagcatctgcaacaggtgtgtgctgaagatggatcaccactgcccctggctaaacaattgtgtgggccactataaccatcggtacttcttctctttctgctttttcatgactctgggctgtgtctactgcagctatggaagttgggaccttttccgggaggcttatgctgccattgagacttatcaccagaccccaccacccaccttctcctttcgagaaaggatgactcacaagagtcttgtctacctctggttcctgtgcagttctgtggcacttgccctgggtgccctaactgtatggcatgctgttctcatcagtcgaggtgagactagcatcgaaaggcacatcaacaagaaggagagacgtcggctacaggccaagggcagagtatttaggaatccttacaactacggctgcttggacaactggaaggtattcctgggtgtggatacaggaaggcactggcttactcgggtgctcttaccttctagtcacttgccccatgggaatggaatgagctgggagccccctccctgggtgactgctcactcagcctctgtgatggcagtgtgagctggactgtgtcagccacgactcgagcactcattctgctccctatgttatttcaagggcctccaagggcagcttttctcagaatccttgatcaaaaagagccagtgggcctgccttagggtaccatgcaggacaattcaaggaccagcctttttaccactgcagaagaaagacacaatgtggagaaatcttaggactgacatccctttactcaggcaaacagaagttccaaccccagactaggggtcaggcagctagctacctaccttgcccagtgctgacccggacctcctccaggatacagcactggagttggccaccacctcttctacttgctgtctgaaaaaacacctgactagtacagctgagatcttggcttctcaacagggcaaagataccaggcctgctgctgaggtcactgccacttctcacatgctgcttaagggagcacaaataaaggtattcgatttttaaagata

SEQ ID NO: 204412 - DNA, 1647 bp, Homo sapiens
  Payload ID: 20321
  Gene Name: zinc finger, DHHC-type containing 16
  Uniprot ID: Q969W1
  ENST ID: ENST00000353979
  CDS Start-End: 156-1172
gggtccgctgcctggcgctgcgggcggcgggccatggtggtttggattgagccgggcccggccggggcgccgagtcggagggggtggcagtgagcggcggcagaggctacggggctcggtttggctgactggggagtcggcaggcggcaggaaccatgcgaggccagcggagcctgctgctgggcccggcccgcctctgcctccgcctccttctgctgctgggttacaggcgccgctgtccacctctactccggggtctagtacagcgctggcgctacggcaaggtctgcctgcgctccctgctctacaactcctttgggggcagtgacaccgctgttgatgctgcctttgagcctgtctactggctggtagacaacgtgatccgctggtttggagtggtgttcgtggtcctggtgatcgtgctgacaggctccattgtagctatcgcctacctgtgtgtcctgcctctcatcctccgaacctactcagtgccacgactctgctggcatttcttctatagccactggaatctgatcctgattgtcttccactactaccaggccatcaccactccgcctgggtacccaccccagggcaggaatgatatcgccaccgtctccatctgtaagaagtgcatttaccccaagccagcccgaacacaccactgcagcatctgcaacagctatggaagttgggaccttttccgggaggcttatgctgccattgagaaaatgaaacagctcgacaagaacaaactacaggcggttgccaaccagacttatcaccagaccccaccacccaccttctcctttcgagaaaggatgactcacaagagtcttgtctacctctggttcctgtgcagttctgtggcacttgccctgggtgccctaactgtatggcatgctgttctcatcagtcgaggtgagactagcatcgaaaggcacatcaacaagaaggagagacgtcggctacaggccaagggcagagtatttaggaatccttacaactacggctgcttggacaactggaaggtattcctgggtgtggatacaggaaggcactggcttactcgggtgctcttaccttctagtcacttgccccatgggaatggaatgagctgggagccccctccctgggtgactgctcactcagcctctgtgatggcagtgtgagctggactgtgtcagccacgactcgagcactcattctgctccctatgttatttcaagggcctccaagggcagcttttctcagaatccttgatcaaaaagagccagtgggcctgccttagggtaccatgcaggacaattcaaggaccagcctttttaccactgcagaagaaagacacaatgtggagaaatcttaggactgacatccctttactcaggcaaacagaagttccaaccccagactaggggtcaggcagctagctacctaccttgcccagtgctgacccggacctcctccaggatacagcactggagttggccaccacctcttctacttgctgtctgaaaaaacacctgactagtacagctgagatcttggcttctcaacagggcaaagataccaggcctgctgctgaggtcactgccacttctcacatgctgcttaagggagcacaaataaaggtattcgatttttaaa

SEQ ID NO: 204413 - DNA, 1718 bp, Homo sapiens
  Payload ID: 20321
  Gene Name: zinc finger, DHHC-type containing 16
  Uniprot ID: Q969W1
  ENST ID: ENST00000352634
  CDS Start-End: 158-1243
ccgggtccgctgcctggcgctgcgggcggcgggccatggtggtttggattgagccgggcccggccggggcgccgagtcggagggggtggcagtgagcggcggcagaggctacggggctcggtttggctgactggggagtcggcaggcggcaggaaccatgcgaggccagcggagcctgctgctgggcccggcccgcctctgcctccgcctccttctgctgctgggttacaggcgccgctgtccacctctactccggggtctagtacagcgctggcgctacggcaaggtctgcctgcgctccctgctctacaactcctttgggggcagtgacaccgctgttgatgctgcctttgagcctgtctactggctggtagacaacgtgatccgctggtttggagtggtgttcgtggtcctggtgatcgtgctgacaggctccattgtagctatcgcctacctgtgtgtcctgcctctcatcctccgaacctactcagtgccacgactctgctggcatttcttctatagccactggaatctgatcctgattgtcttccactactaccaggccatcaccactccgcctgggtacccaccccagggcaggaatgatatcgccaccgtctccatctgtaagaagtgcatttaccccaagccagcccgaacacaccactgcagcatctgcaacaggtgtgtgctgaagatggatcaccactgcccctggctaaacaattgtgtgggccactataaccatcggtacttcttctctttctgctttttcatgactctgggctgtgtctactgcagctatggaagttgggaccttttccgggaggcttatgctgccattgagacttatcaccagaccccaccacccaccttctcctttcgagaaaggatgactcacaagagtcttgtctacctctggttcctgtgcagttctgtggcacttgccctgggtgccctaactgtatggcatgctgttctcatcagtcgaggtgagactagcatcgaaaggcacatcaacaagaaggagagacgtcggctacaggccaagggcagagtatttaggaatccttacaactacggctgcttggacaactggaaggtattcctgggtgtggatacaggaaggcactggcttactcgggtgctcttaccttctagtcacttgccccatgggaatggaatgagctgggagccccctccctgggtgactgctcactcagcctctgtgatggcagtgtgagctggactgtgtcagccacgactcgagcactcattctgctccctatgttatttcaagggcctccaagggcagcttttctcagaatccttgatcaaaaagagccagtgggcctgccttagggtaccatgcaggacaattcaaggaccagcctttttaccactgcagaagaaagacacaatgtggagaaatcttaggactgacatccctttactcaggcaaacagaagttccaaccccagactaggggtcaggcagctagctacctaccttgcccagtgctgacccggacctcctccaggatacagcactggagttggccaccacctcttctacttgctgtctgaaaaaacacctgactagtacagctgagatcttggcttctcaacagggcaaagataccaggcctgctgctgaggtcactgccacttctcacatgctgcttaagggagcacaaataaaggtattcgatttttaaa

SEQ ID NO: 204414 - DNA, 1877 bp, Homo sapiens
  Payload ID: 20321
  Gene Name: zinc finger, DHHC-type containing 16
  Uniprot ID: Q969W1
  ENST ID: ENST00000370842
  CDS Start-End: 317-1402
gggtccgctgcctggcgctgcgggcggcgggccatggtggtttggattgagccgggcccggccggggcgccgagtcggagggggtggcagtgagcggcggcagaggctacggggctcggtttggctgactggggagtcggcaggcggcaggaagaatgataacagcagacacttatttagtgttaccacattggcaggagtgtccttgctggtatttgtaggacagatagacatctggccaggctttccacttctgcatccctccaggtcattcattcaacaaatatttattgagtacttccatgagccgggaaccatgcgaggccagcggagcctgctgctgggcccggcccgcctctgcctccgcctccttctgctgctgggttacaggcgccgctgtccacctctactccggggtctagtacagcgctggcgctacggcaaggtctgcctgcgctccctgctctacaactcctttgggggcagtgacaccgctgttgatgctgcctttgagcctgtctactggctggtagacaacgtgatccgctggtttggagtggtgttcgtggtcctggtgatcgtgctgacaggctccattgtagctatcgcctacctgtgtgtcctgcctctcatcctccgaacctactcagtgccacgactctgctggcatttcttctatagccactggaatctgatcctgattgtcttccactactaccaggccatcaccactccgcctgggtacccaccccagggcaggaatgatatcgccaccgtctccatctgtaagaagtgcatttaccccaagccagcccgaacacaccactgcagcatctgcaacaggtgtgtgctgaagatggatcaccactgcccctggctaaacaattgtgtgggccactataaccatcggtacttcttctctttctgctttttcatgactctgggctgtgtctactgcagctatggaagttgggaccttttccgggaggcttatgctgccattgagacttatcaccagaccccaccacccaccttctcctttcgagaaaggatgactcacaagagtcttgtctacctctggttcctgtgcagttctgtggcacttgccctgggtgccctaactgtatggcatgctgttctcatcagtcgaggtgagactagcatcgaaaggcacatcaacaagaaggagagacgtcggctacaggccaagggcagagtatttaggaatccttacaactacggctgcttggacaactggaaggtattcctgggtgtggatacaggaaggcactggcttactcgggtgctcttaccttctagtcacttgccccatgggaatggaatgagctgggagccccctccctgggtgactgctcactcagcctctgtgatggcagtgtgagctggactgtgtcagccacgactcgagcactcattctgctccctatgttatttcaagggcctccaagggcagcttttctcagaatccttgatcaaaaagagccagtgggcctgccttagggtaccatgcaggacaattcaaggaccagcctttttaccactgcagaagaaagacacaatgtggagaaatcttaggactgacatccctttactcaggcaaacagaagttccaaccccagactaggggtcaggcagctagctacctaccttgcccagtgctgacccggacctcctccaggatacagcactggagttggccaccacctcttctacttgctgtctgaaaaaacacctgactagtacagctgagatcttggcttctcaacagggcaaagataccaggcctgctgctgaggtcactgccacttctcacatgctgcttaagggagcacaaataaaggtattcgatttttaaa

SEQ ID NO: 204415 - DNA, 1280 bp, Homo sapiens
  Payload ID: 20321
  Gene Name: zinc finger, DHHC-type containing 16
  ENST ID: ENST00000370846
  CDS Start-End: 163-1086
cgggtccgggtccgctgcctggcgctgcgggcggcgggccatggtggtttggattgagccgggcccggccggggcgccgagtcggagggggtggcagtgagcggcggcagaggctacggggctcggtttggctgactggggagtcggcaggcggcaggaaccatgcgaggccagcggagcctgctgctgggcccggcccgcctctgcctccgcctccttctgctgctgggttacaggcgccgctgtccacctctactccggggtctagtacagcgctggcgctacggcaaggtctgcctgcgctccctgctctacaactcctttgggggcagtgacaccgctgttgatgctgcctttgagcctgtctactggctggtagacaacgtgatccgctggtttggagtggtgttcgtggtcctggtgatcgtgctgacaggctccattgtagctatcgcctacctgtgtgtcctgcctctcatcctccgaacctactcagtgccacgactctgctggcatttcttctatagccactggaatctgatcctgattgtcttccactactaccaggccatcaccactccgcctgggtacccaccccagggcaggaatgatatcgccaccgtctccatctgtaagaagtgcatttaccccaagccagcccgaacacaccactgcagcatctgcaacaggtgtgtgctgaagatggatcaccactgccacatacttcctccagccctctctaaactacccaccagtcttcgcccctcttttcttagttctgtggcacttgccctgggtgccctaactgtatggcatgctgttctcatcagtcgaggtgagactagcatcgaaaggcacatcaacaagaaggagagacgtcggctacaggccaagggcagagtatttaggaatccttacaactacggctgcttggacaactggaaggtattcctgggtgtggatacaggaaggcactggcttactcgggtgctcttaccttctagtcacttgccccatgggaatggaatgagctgggagccccctccctgggtgactgctcactcagcctctgtgatggcagtgtgagctggactgtgtcagccacgactcgagcactcattctgctccctatgttatttcaagggcctccaagggcagcttttctcagaatccttgatcaaaaagagccagtgggcctgccttagggtaccatgcaggacaattcaaggaccagcctttttaccactgcagaagaaagacacaatgtggagaaatcttag

SEQ ID NO: 204416 - DNA, 1798 bp, Homo sapiens
  Payload ID: 20321
  Gene Name: zinc finger, DHHC-type containing 16
  Uniprot ID: Q969W1
  ENST ID: ENST00000370854
  CDS Start-End: 190-1323
cgcgtgtggttgaggatgggctggcggcgggtccgggtccgctgcctggcgctgcgggcggcgggccatggtggtttggattgagccgggcccggccggggcgccgagtcggagggggtggcagtgagcggcggcagaggctacggggctcggtttggctgactggggagtcggcaggcggcaggaaccatgcgaggccagcggagcctgctgctgggcccggcccgcctctgcctccgcctccttctgctgctgggttacaggcgccgctgtccacctctactccggggtctagtacagcgctggcgctacggcaaggtctgcctgcgctccctgctctacaactcctttgggggcagtgacaccgctgttgatgctgcctttgagcctgtctactggctggtagacaacgtgatccgctggtttggagtggtgttcgtggtcctggtgatcgtgctgacaggctccattgtagctatcgcctacctgtgtgtcctgcctctcatcctccgaacctactcagtgccacgactctgctggcatttcttctatagccactggaatctgatcctgattgtcttccactactaccaggccatcaccactccgcctgggtacccaccccagggcaggaatgatatcgccaccgtctccatctgtaagaagtgcatttaccccaagccagcccgaacacaccactgcagcatctgcaacaggtgtgtgctgaagatggatcaccactgcccctggctaaacaattgtgtgggccactataaccatcggtacttcttctctttctgctttttcatgactctgggctgtgtctactgcagctatggaagttgggaccttttccgggaggcttatgctgccattgagaaaatgaaacagctcgacaagaacaaactacaggcggttgccaaccagacttatcaccagaccccaccacccaccttctcctttcgagaaaggatgactcacaagagtcttgtctacctctggttcctgtgcagttctgtggcacttgccctgggtgccctaactgtatggcatgctgttctcatcagtcgaggtgagactagcatcgaaaggcacatcaacaagaaggagagacgtcggctacaggccaagggcagagtatttaggaatccttacaactacggctgcttggacaactggaaggtattcctgggtgtggatacaggaaggcactggcttactcgggtgctcttaccttctagtcacttgccccatgggaatggaatgagctgggagccccctccctgggtgactgctcactcagcctctgtgatggcagtgtgagctggactgtgtcagccacgactcgagcactcattctgctccctatgttatttcaagggcctccaagggcagcttttctcagaatccttgatcaaaaagagccagtgggcctgccttagggtaccatgcaggacaattcaaggaccagcctttttaccactgcagaagaaagacacaatgtggagaaatcttaggactgacatccctttactcaggcaaacagaagttccaaccccagactaggggtcaggcagctagctacctaccttgcccagtgctgacccggacctcctccaggatacagcactggagttggccaccacctcttctacttgctgtctgaaaaaacacctgactagtacagctgagatcttggcttctcaacagggcaaagataccaggcctgctgctgaggtcactgccacttctcacatgctgcttaagggagcacaaataaaggtattcgatttttaaa

SEQ ID NO: 204417 - DNA, 2014 bp, Homo sapiens
  Payload ID: 20321
  Gene Name: zinc finger, DHHC-type containing 16
  Uniprot ID: Q969W1
  ENST ID: ENST00000393760
  CDS Start-End: 409-1542
atccgggggcggaacttcagaggtccacgctggcgcctgcgcgtgtggttgaggatgggctggcggcgggtccgggtccgctgcctggcgctgcgggcggcgggccatggtggtttggattgagccgggcccggccggggcgccgagtcggagggggtggcagtgagcggcggcagaggctacggggctcggtttggctgactggggagtcggcaggcggcaggtcttttgtggggatgagccagggtgcaaggagagtacaatactccagttaccgaattgaaaccatccctgcagtggagcagcctcctccagtttctgttgggttttgagctacctgttaaataagtcagtgggattgtcaaggacaaagccctccctggctgcctcagggcaaaatcaggaaccatgcgaggccagcggagcctgctgctgggcccggcccgcctctgcctccgcctccttctgctgctgggttacaggcgccgctgtccacctctactccggggtctagtacagcgctggcgctacggcaaggtctgcctgcgctccctgctctacaactcctttgggggcagtgacaccgctgttgatgctgcctttgagcctgtctactggctggtagacaacgtgatccgctggtttggagtggtgttcgtggtcctggtgatcgtgctgacaggctccattgtagctatcgcctacctgtgtgtcctgcctctcatcctccgaacctactcagtgccacgactctgctggcatttcttctatagccactggaatctgatcctgattgtcttccactactaccaggccatcaccactccgcctgggtacccaccccagggcaggaatgatatcgccaccgtctccatctgtaagaagtgcatttaccccaagccagcccgaacacaccactgcagcatctgcaacaggtgtgtgctgaagatggatcaccactgcccctggctaaacaattgtgtgggccactataaccatcggtacttcttctctttctgctttttcatgactctgggctgtgtctactgcagctatggaagttgggaccttttccgggaggcttatgctgccattgagaaaatgaaacagctcgacaagaacaaactacaggcggttgccaaccagacttatcaccagaccccaccacccaccttctcctttcgagaaaggatgactcacaagagtcttgtctacctctggttcctgtgcagttctgtggcacttgccctgggtgccctaactgtatggcatgctgttctcatcagtcgaggtgagactagcatcgaaaggcacatcaacaagaaggagagacgtcggctacaggccaagggcagagtatttaggaatccttacaactacggctgcttggacaactggaaggtattcctgggtgtggatacaggaaggcactggcttactcgggtgctcttaccttctagtcacttgccccatgggaatggaatgagctgggagccccctccctgggtgactgctcactcagcctctgtgatggcagtgtgagctggactgtgtcagccacgactcgagcactcattctgctccctatgttatttcaagggcctccaagggcagcttttctcagaatccttgatcaaaaagagccagtgggcctgccttagggtaccatgcaggacaattcaaggaccagcctttttaccactgcagaagaaagacacaatgtggagaaatcttaggactgacatccctttactcaggcaaacagaagttccaaccccagactaggggtcaggcagctagctacctaccttgcccagtgctgacccggacctcctccaggatacagcactggagttggccaccacctcttctacttgctgtctgaaaaaacacctgactagtacagctgagatcttggcttctcaacagggcaaagataccaggcctgctgctgaggtcactgccacttctcacatgctgcttaagggagcacaaataaaggtattcgattttt

SEQ ID NO: 204418 - DNA, 1325 bp, Homo sapiens
  Payload ID: 20321
  Gene Name: zinc finger, DHHC-type containing 16
  ENST ID: ENST00000417044
  CDS Start-End: 1-905
ccgctgttgatgctgcctttgagcctgtctactggctggtagacaacgtgatccgctggtttggagtggtgttcgtggtcctggtgatcgtgctgacaggctccattgtagctatcgcctacctgtgtgtcctgcctctcatcctccgaacctactcagtgccacgactctgctggcatttcttctatagccactggaatctgatcctgattgtcttccactactaccaggccatcaccactccgcctgggtacccaccccagggcaggaatgatatcgccaccgtctccatctgtaagaagtgcatttaccccaagccagcccgaacacaccactgcagcatctgcaacaggtgtgtgctgaagatggatcaccactgcccctggctaaacaattgtgtgggccactataaccatcggtacttcttctctttctgctttttcatgactctgggctgtgtctactgcagctatggaagttgggaccttttccgggaggcttatgctgccattgagaaaatgaaacagctcgacaagaacaaactacaggcggttgccaaccagacttatcaccagaccccaccacccaccttctcctttcgagaaaggatgactcacaagagtcttgtctacctctggttcctgtgcagtcgaggtgagactagcatcgaaaggcacatcaacaagaaggagagacgtcggctacaggccaagggcagagtatttaggaatccttacaactacggctgcttggacaactggaaggtattcctgggtgtggatacaggaaggcactggcttactcgggtgctcttaccttctagtcacttgccccatgggaatggaatgagctgggagccccctccctgggtgactgctcactcagcctctgtgatggcagtgtgagctggactgtgtcagccacgactcgagcactcattctgctccctatgttatttcaagggcctccaagggcagcttttctcagaatccttgatcaaaaagagccagtgggcctgccttagggtaccatgcaggacaattcaaggaccagcctttttaccactgcagaagaaagacacaatgtggagaaatcttaggactgacatccctttactcaggcaaacagaagttccaaccccagactaggggtcaggcagctagctacctaccttgcccagtgctgacccggacctcctccaggatacagcactggagttggccaccacctcttctacttgctgtctgaaaaaacacctgactagtacagctgagatcttggcttctcaacagggcaaagataccaggcctgctgctgaggtcact

SEQ ID NO: 204419 - DNA, 888 bp, Homo sapiens
  Payload ID: 20321
  Gene Name: zinc finger, DHHC-type containing 16
  ENST ID: ENST00000433086
  CDS Start-End: 162-888
tgcaaggagagtacaatactccagttaccgaattgaaaccatccctgcagtggagcagcctcctccagtttctgttgggttttgagctacctgttaaataagtcagtgggattgtcaaggacaaagccctccctggctgcctcagggcaaaatcaggaaccatgcgaggccagcggagcctgctgctgggcccggcccgcctctgcctccgcctccttctgctgctgggttacaggcgccgctgtccacctctactccggggtctagtacagcgctggcgctacggcaaggtctgcctgcgctccctgctctacaactcctttgggggcagtgacaccgctgttgatgctgcctttgagcctgtctactggctggtagacaacgtgatccgctggtttggagtgggcaggaatgatatcgccaccgtctccatctgtaagaagtgcatttaccccaagccagcccgaacacaccactgcagcatctgcaacaggtgtgtgctgaagatggatcaccactgcccctggctaaacaattgtgtgggccactataaccatcggtacttcttctctttctgctttttcatgactctgggctgtgtctactgcagctatggaagttgggaccttttccgggaggcttatgctgccattgagaaaatgaaacagctcgacaagaacaaactacaggcggttgccaaccagacttatcaccagaccccaccacccaccttctcctttcgagaaaggatgactcacaagagtcttgtctacctctggttcctgtgcagttctgtggcacttgccctgggtgccctaactgtatggcatgctgttctcatcagtcgaggtgagactagcatcgaaaggcacatcaacaagaaggaga

SEQ ID NO: 204420 - DNA, 989 bp, Homo sapiens
  Payload ID: 20321
  Gene Name: zinc finger, DHHC-type containing 16
  ENST ID: ENST00000414567
  CDS Start-End: 349-989
tggcggcgggtccgggtccgctgcctggcgctgcgggcggcgggccatggtggtttggattgagccgggcccggccggggcgccgagtcggagggggtggcagtgagcggcggcagaggctacggggctcggtttggctgactggggagtcggcaggcggcaggtcttttgtggggatgagccagggtgcaaggagagtacaatactccagttaccgaattgaaaccatccctgcagtggagcagcctcctccagtttctgttgggttttgagctacctgttaaataagtcagtgggattgtcaaggacaaagccctccctggctgcctcagggcaaaatcaggaaccatgcgaggccagcggagcctgctgctgggcccggcccgcctctgcctccgcctccttctgctgctgggttacaggcgccgctgtccacctctactccggggtctagtacagcgctggcgctacggcaaggtctgcctgcgctccctgctctacaactcctttgggggcagtgacaccgctgttgatgctgcctttgagcctgtctactggctggtagacaacgtgatccgctggtttggagtggtgttcgtggtcctggtgatcgtgctgacaggctccattgtagctatcgcctacctgtgtgtcctgcctctcatcctccgaacctactcagtgccacgactctgctggcatttcttctatagccactggaatctgatcctgattgtcttccactactaccaggccatcaccactccgcctgggtacccaccccagggcaggaatgatatcgccaccgtctccatctgtaagaagtgcatttaccccaagccagcccgaacacaccactgcagcatctgcaacaggtgtgtgctgaagatggatcaccactgcccctggctaaacaattgtgtgggccactataaccatcggtacttcttctctttctgctttttcatgactctgggctgtgtctactg

SEQ ID NO: 204421 - DNA, 1362 bp, Homo sapiens
  Payload ID: 20321
  Gene Name: zinc finger, DHHC-type containing 16
  ENST ID: ENST00000420089
  CDS Start-End: 1-959
ggcgccgctgtccacctctactccggggtctagtacagcgctggcgctacggcaaggtctgcctgcgctccctgctctacaactcctttgggggcagtgacaccgctgttgatgctgcctttgagcctgtctactggctggtagacaacgtgatccgctggtttggagtggtgttcgtggtcctggtgatcgtgctgacaggctccattgtagctatcgcctacctgtgtgtcctgcctctcatcctccgaacctactcagtgccacgactctgctggcatttcttctatagccactggaatctgatcctgattgtcttccactactaccaggccatcaccactccgcctgggtacccaccccagggcaggaatgatatcgccaccgtctccatctgtaagaagtgcatttaccccaagccagcccgaacacaccactgcagcatctgcaacaggtgtgtgctgaagatggatcaccactgcccctggctaaacaattgtgtgggccactataaccatcggtacttcttctctttctgctttttcatgactctgggctgtgtctactgcagctatggaagttgggaccttttccgggaggcttatgctgccattgagacttatcaccagaccccaccacccaccttctcctttcgagaaaggatgactcacaagagtcttgtctacctctggttcctgtgcagtcgaggtgagactagcatcgaaaggcacatcaacaagaaggagagacgtcggctacaggccaagggcagagtatttaggaatccttacaactacggctgcttggacaactggaaggtattcctgggtgtggatacaggaaggcactggcttactcgggtgctcttaccttctagtcacttgccccatgggaatggaatgagctgggagccccctccctgggtgactgctcactcagcctctgtgatggcagtgtgagctggactgtgtcagccacgactcgagcactcattctgctccctatgttatttcaagggcctccaagggcagcttttctcagaatccttgatcaaaaagagccagtgggcctgccttagggtaccatgcaggacaattcaaggaccagcctttttaccactgcagaagaaagacacaatgtggagaaatcttaggactgacatccctttactcaggcaaacagaagttccaaccccagactaggggtcaggcagctagctacctaccttgcccagtgctgacccggacctcctccaggatacagcactggagttggccaccacctcttctacttgctgtctgaaaaaacacctgactagtacagctgagatcttggcttctcaacagggcaaagataccaggc

SEQ ID NO: 204422 - DNA, 5259 bp, Homo sapiens
  Payload ID: 20322
  Gene Name: zinc finger, DHHC-type containing 17
  Uniprot ID: Q8IUH5
  ENST ID: ENST00000426126
  CDS Start-End: 650-2548
ttgtatccatgtttttccgggcgtcccccggagggacaggttgcgggtgaccttttcaagtgtggaggaaagggaagctgcttttgtcttcaggaatgatgcaggtctcgactcaagcctgacgggcccaaacctccctggagctggctgacgactctgcccgagttcctgaagaggggtcccgggggtcccggagcggaagtgggagcgcgtgggcgtgggctcctcggctgcctggggctccagacttgtgctgcgtgcggctccggagctctgttctcgctcctgagcagctgctaggtttcccaagcgactgtctcaaccgcccggccgcctcccccgggcagccagagcttcacatctacctccagccgggacccgcccccgagccgcggggcccacgcccagagccctccgccgtccccagcgcagtgcagcagagcgcgatccagtctggggccgggccgcgcttccgcgcacgcgcggagaaacccgcgccctccgaggggggaggggacagagggggcgtcacgggggcaggagaagaaggaggaggaggcccgcgtcgcctccggcggggctcgcgctcgccccgcgctcgccctccgcctcgcccgagccccgggagggtgaaacgctttctcccagcatgcagcgggaggagggatttaacaccaagatggcggacggcccggatgagtacgataccgaagcgggctgtgtgccccttctccacccagaggaaatcaaaccccaaagccattataaccatggatatggtgaacctcttggacggaaaactcatattgatgattacagcacatgggacatagtcaaggctacacaatatggaatatatgaacgctgtcgagaattggtggaagcaggttatgatgtacggcaaccggacaaagaaaatgttaccctcctccattgggctgccatcaataacagaatagatttagtcaaatactatatttcgaaaggtgctattgtggatcaacttggaggggacctgaattcaactccattgcactgggccacaagacaaggccatctatccatggttgtgcaactaatgaaatatggtgcagatccttcattaattgatggagaaggatgtagctgtattcatctggctgctcagttcggacatacctcaattgttgcttatctcatagcaaaaggacaggatgtagatatgatggatcagaatggaatgacgcctttaatgtgggcagcatatagaacacatagtgtggatccaactagattgcttttaacattcaatgtttcagttaaccttggtgacaagtatcacaaaaacactgctctgcattgggcagtgctagcagggaataccacagtcattagccttcttctggaagctggagctaatgttgatgcccagaatatcaagggcgaatcagcgcttgatttggcaaaacagagaaaaaatgtgtggatgatcaaccacttacaagaggcaaggcaagcaaaaggatatgacaatccgtccttccttagaaagctgaaagctgataaggaatttcggcagaaagtaatgttaggaactcctttcctagttatttggctggttgggtttatagcagacctaaatattgattcttggctcattaaagggctaatgtatggtggtgtttgggctacagtacagtttctttcaaaatcctttttcgatcattcaatgcatagtgcattgccccttgggatatatttggcaaccaaattctggatgtatgtgacgtggttcttctggttttggaatgatctcaactttttatttatccatcttccattccttgccaatagtgttgcacttttctacaattttggaaaatcttggaaatcagatccagggattattaaagcaacagaagagcaaaagaaaaagacaatagttgaacttgcagagacaggaagtctggacctcagtatattctgcagtacctgtttgatacgaaaaccggtgaggtccaaacattgtggtgtgtgcaaccgctgtatagcaaaatttgatcatcattgcccatgggtgggtaactgtgtaggtgcaggcaaccatagatattttatgggctacctattcttcttgctttttatgatctgctggatgatttatggttgtatatcttactggggactccactgtgagaccacttacaccaaggatggattttggacatacattactcagattgccacgtgttcaccttggatgttttggatgttcctgaacagtgttttccacttcatgtgggtggctgtattactcatgtgtcagatgtaccagatatcatgtttaggtattactacaaatgaaagaatgaatgccaggagatacaagcactttaaagtcacaacaacgtctattgaaagcccattcaaccatggatgtgtaagaaatattatagacttctttgaatttcgatgctgtggcctctttcgtcctgttatcgtggactggaccaggcagtatacaatagaatatgaccaaatatcaggatctgggtaccagctggtgtagcgacatcttatcctatgaagcatattgctgagtggtgcctgaaaattgtgtctgtccgtgtctttctcacactcgaatccacatcctttgaacaagagcatgctatgtgtagggctaatggtgaattttacagtctttttttcaacacttttattaacaaaagtaaacatggacagaacacactgccatttctgggaagagtaaagatgataaaaaataattttaatggttcttaatgtggaaattcacaacatactcaacttttgggttttgttctcacagtatttttcacaaaaaaagggtaaacttattctattgacagacatggtgtactgatcagaaatgttcagttttaactaaaactaaatttatgttatttggctaaatgttatgatgcagtctagtacgagtattgcatctaattccaggagcattgttttaagttgattgactagttattatgtacatttcagaatgtacacataaatactgtgatgaaaatcatgtgattgggatctactgtgatgttgtcttcaaaggcaggagaaaataatgttcacaataaaatgtgctaacaatgttttgtttctatcagctgttgcaatgctgatatatttctagttcagtgaaataatttgtagtaaccttactctgaggttttacggtctgataatgaagcacttgcatgagtatagtaagtcatgtttttttgttcaaatttaaaagccctgctaattgcatgacacaccacatagaatgtatactagcagatactatccagtgaagcataaattagaatttaatttgatgttcaaaaacagttccatttttaagggttaaggtggtattttcaagaaaaggcagaacaaataatgcaaaattctcagtaatagtgatacatggatatacttccttttaaattctcagctgcaaaataattgtagacaaaataatggcatttaactaaagatggagcatgatctaagtacatagcacatgtgaataaaagaaaagctgacagtatattctggtttcaataaaatgacctatcagaaagtagaatttcatccccaagagtatttcagtttatccaatattgagtaagttctgaaacagttttagaaaaaattttctttttgttaaatgtgatgcactgatcaatttttgtcacagcattttcataccttcatggtggactactagtcactgcttccataaatattgtttacagggtgagatttggtttattcatcttaagtgctgtagcaaactgtggttcgagcaacctgtgggaaatctgtgagagggaatggggtgggagatgtgggggaatggtggtcagactgatgacagatcctagaccaatgtaaagaatgtgtatctgtatataaataatttatcaaatagttttctctttgtgtctgtgttagtgtttttaaagctgctcatttcattttgtccaaccaaaaagaaaagggagataactaatgagcttctagtgatgttcaaaattgctgttaataggcattataccctgcaagttcactgcatgtctgatgcttggtaaaactagtcttccctgtaaaatgcagattacaggtattaaagcaatctagtggtatacccgccccttgccttagtaagaggagcagtgaaatgtatatagttgatgttcagtatttccaagtaccatttttatatagtagcttatttgaccataagtcacacatcaaaaaaagattacccttagtgtatgtgttttaatattagaaaattggcatatgtactttatttttgaaaagggaagagatgggtgtggggtggcaatagcattgtgccattttgtcatagaatgtaaaaattggttaactttacaaatgtcagctagttttgactactaattgggggaaattttagataatttttaaattcaaagttatttataaaatgctagaatttgttttaattttttgtattttgagccacttcacatgaagactcagttgcatttttatcgaatacatttttatcaacagttaaagactatggtggttttttcagagtttggctaagaatgttgttaccatcttctttgtttgtggtacaatattttcagtgcaaaagagatgtcattcagttaaaaagacaaacctctagatgtgtaattacatggaaaatactagcaatgtgaatgcttttgtagtaaccatcttgtagtacctgtgaaatctataactcagaaatggtcagatggtcaggagccagctatgcagcagtataccatctgtttaattattttgtaggtcctgtgtgtggaaccaactataaacccagttctaaagttgtgtatgatggtgaacctttgggaatagttcttatcaacttaattggatacttttagcaaataggaacttaattctcagcactgaacatgaattacttccttggagttttttttcattcatatttttgttgtttccaggaatttatttgatattaatgggcgtaaaacagcatcattgtacttaagctatggatgtttttattttatattttctttatttataactgtgccaagtattattttgctacttaccgtgttattctgtggaaagaaaaacctgtaaagtgtttaataaattagccctccttacataaattaaatgtcaaaattttgtaaaatattaatcagaataaatactgactcttaa

SEQ ID NO: 204423 - DNA, 567 bp, Homo sapiens
  Payload ID: 20322
  Gene Name: zinc finger, DHHC-type containing 17
  ENST ID: ENST00000547620
  CDS Start-End: 1-134
gatttaacaccaagatggcggacggcccggatgagtacgataccgaagcgggctgtgtgccccttctccacccagagaatggccttgccagatgtgggccccttcaccttggactactcagccttcagaactgaaatcaaaccccaaagccattataaccatggatatggtgaacctcttggacggaaaactcatattgatgattacagcacatgggacatagtcaaggctacacaatatggaatatatgaacgctgtcgagaattggtggaagcaggttatgatgtacggcaaccggacaaagaaaatgttaccctcctccattgggctgccatcaataacagaatagatttagtcaaatactatatttcgaaaggtgctattgtggatcaacttggaggggacctgaattcaactccattgcactgggccacaagacaaggccatctatccatggttgtgcaactaatgaaatatggtgcagatccttcattaattgatggagaaggatgtagctgtattcatctggctgctcagttcggacatacctcaattgttgcttatctc

SEQ ID NO: 204424 - DNA, 1146 bp, Homo sapiens
  Payload ID: 20322
  Gene Name: zinc finger, DHHC-type containing 17
  ENST ID: ENST00000546778
  CDS Start-End: 135-242
gacagagggggcgtcacgggggcaggagaagaaggaggaggaggcccgcgtcgcctccggcggggctcgcgctcgccccgcgctcgccctccgcctcgcccgagccccgggagggtgaaacgctttctcccagcatgcagcgggaggagggatttaacaccaagatggcggacggcccggatgagtacgataccgaagcgggctgtgtgccccttctccacccagagatatggaatatatgaacgctgtcgagaattggtggaagcaggttatgatgtacggcaaccggacaaagaaaatgttaccctcctccattgggctgccatcaataacagaatagatttagtcaaatactatatttcgaaaggtgctattgtggatcaacttggaggggacctgaattcaactccattgcactgggccacaagacaaggccatctatccatggttgtgcaactaatgaaatatggtgcagatccttcattaattgatggagaaggatgtagctgtattcatctggctgctcagttcggacatacctcaattgttgcttatctcatagcaaaaggacaggatgtagatatgatggatcagaatggaatgacgcctttaatgtgggcagcatatagaacacatagtgtggatccaactagattgcttttaacattcaatgtttcagttaaccttggtgacaagtatcacaaaaacactgctctgcattgggcagtgctagcagggaataccacagtcattagccttcttctggaagctggagctaatgttgatgcccagaatatcaaggcaatccttaggtgtcacatggccctctagtggaagggatgctcagctggaccgaggcaactgcaggatattcccggggagttgttacccaagggattgcttttattcagggcgaatcagcgcttgatttggcaaaacagagaaaaaatgtgtggatgatcaaccacttacaagaggcaaggcaagcaaaaggatatgacaatccgtccttccttagaaagctgaaagctgataaggaatttcggcagaaagtaatgttaggaactcctttcctagttatttggctggttgggtttatagcagacctaaatattgattcttggctcattaaagggctaatgtatg

SEQ ID NO: 204425 - DNA, 544 bp, Homo sapiens
  Payload ID: 20322
  Gene Name: zinc finger, DHHC-type containing 17
  ENST ID: ENST00000551407
  CDS Start-End: 1-108
aacaccaagatggcggacggcccggatgagtacgataccgaagcgggctgtgtgccccttctccacccagagtttgagatggagttgcgctcttgttgcccaggctgaagtgcaatgacgtgatctcggcttactgcaacctcagcctcctgcgttcaagcgattctcctgcatcagcctcccgagtagctgggattacaggaaatcaaaccccaaagccattataaccatggatatggtgaacctcttggacggaaaactcatattgatgattacagcacatgggacatagtcaaggctacacaatatggaatatatgaacgctgtcgagaattggtggaagcaggttatgatgtacggcaaccggacaaagaaaatgttaccctcctccattgggctgccatcaataacagaatagatttagtcaaatactatatttcgaaaggtgctattgtggatcaacttggaggggacctgaattcaactccattgcactgggccacaagacaaggccatctatccatggttgtgcaactaatgaaat

SEQ ID NO: 204426 - DNA, 815 bp, Homo sapiens
  Payload ID: 20322
  Gene Name: zinc finger, DHHC-type containing 17
  ENST ID: ENST00000549944
  CDS Start-End: 1-467
acatagtcaaggctacacaatatggaatatatgaacgctgtcgagaattggtggaagcaggttatgatgtacggcaaccggacaaagaaaatgttaccctcctccattgggctgccatcaataacagaatagatttagtcaaatactatatttcgaaaggtgctattgtggatcaacttggaggggacctgaattcaactccattgcactgggccacaagacaaggccatctatccatggttgtgcaactaatgaaatatggtgcagatccttcattaattgatggagaaggatgtagctgtattcatctggctgctcagttcggacatacctcaattgttgcttatctcatagcaaaaggacaggattattttaaaaaatgtacttgcatattggaaatgttgagtgaggttgcagaagatattcctgacaacactattaaagtaaatccagaaatggatttgtaatggataaggcataacattctatgacagtatgcatggatgtagatatgatggatcagaatggaatgacgcctttaatgtgggcagcatatagaacacatagtgtggatccaactagattgcttttaacattcaatgtttcagttaaccttggtgacaagtatcacaaaaacactgctctgcattgggcagtgctagcagggaataccacagtcattagccttcttctggaagctggagctaatgttgatgcccagaatatcaagggcgaatcagcgcttgatttggcaaaacagagaaaaaatgtgtggatgatcaaccacttacaagaggcaaggcaagcaaaaggat

SEQ ID NO: 204427 - DNA, 856 bp, Homo sapiens
  Payload ID: 20322
  Gene Name: zinc finger, DHHC-type containing 17
  ENST ID: ENST00000552453
  CDS Start-End: 1-605
gggaggagggatttaacaccaagatggcggacggcccggatgagtacgataccgaagcgggctgtgtgccccttctccacccagaggaaatcaaaccccaaagccattataaccatggatatggtgaacctcttggacggaaaactcatattgatgattacagcacatgggacatagtcaaggctacacaatatggaatatatgaacgctgtcgagaattggtggaagcaggttatgatgtacggcaaccggacaaagaaaatgttaccctcctccattgggctgccatcaataacagaatagatttagtcaaatactatatttcgaaaggtgctattgtggatcaacttggaggggacctgaattcaactccattgcactgggccacaagacaaggccatctatccatggttgtgcaactaatgaaatatggtgcagatccttcattaattgatggagaaggatgtagctgtattcatctggctgctcagttcggacatacctcaattgttgcttatctcatagcaaaaggacaggatgtagatatgatggatcagaatggaatgacgcctttaatgtgggcagcatatagaacacatagttaaccttggtgacaagtatcacaaaaacactgctctgcattgggcagtgctagcagggaataccacagtcattagccttcttctggaagctggagctaatgttgatgcccagaatatcaagggcgaatcagcgcttgatttggcaaaacagagaaaaaatgtgtggatgatcaaccacttacaagaggcaaggcaagcaaaaggatatgacaatccgtccttccttagaaagctgaaagctgataaggaatttc

SEQ ID NO: 204428 - DNA, 276 bp, Homo sapiens
  Payload ID: 20322
  Gene Name: zinc finger, DHHC-type containing 17
  ENST ID: ENST00000547604
  CDS Start-End: 1-87
aacaccaagatggcggacggcccggatgagtacgataccgaagcgggctgtgtgccccttctccacccagagatatggaatatatgaacgctgtcgagaattggtggaagcaggttatgatgtacggcaaccggacaaagaaaatgttaccctcctccattgggctgccatcaataacagaatagatttagtcaaacaaggccatctatccatggttgtgcaactaatgaaatatggtgcagatccttcattaattgatggagaaggatgtagctg

SEQ ID NO: 204429 - DNA, 564 bp, Homo sapiens
  Payload ID: 20322
  Gene Name: zinc finger, DHHC-type containing 17
  ENST ID: ENST00000550876
  CDS Start-End: 82-564
atttaacaccaagatggcggacggcccggatgagtacgataccgaagcgggctgtgtgccccttctccacccagagcaagaatggccttgccagatgtgggccccttcaccttggactactcagccttcagaactgatgtagatatgatggatcagaatggaatgacgcctttaatgtgggcagcatatagaacacatagtgtggatccaactagattgcttttaacattcaatgtttcagttaaccttggtgacaagtatcacaaaaacactgctctgcattgggcagtgctagcagggaataccacagtcattagccttcttctggaagctggagctaatgttgatgcccagaatatcaagggcgaatcagcgcttgatttggcaaaacagagaaaaaatgtgtggatgatcaaccacttacaagaggcaaggcaagcaaaaggatatgacaatccgtccttccttagaaagctgaaagctgataaggaatttcggcagaaagtaatgttaggaactcctttcctagttatttggctggttgggtttatagcagacctaaat

SEQ ID NO: 204430 - DNA, 730 bp, Homo sapiens
  Payload ID: 20322
  Gene Name: zinc finger, DHHC-type containing 17
  ENST ID: ENST00000550163
  CDS Start-End: 1-145
aagcgggctgtgtgccccttctccacccagagatatggaatatatgaacgctgtcgagaattggtggaagcaggttatgatgtacggcaaccggacaaagaaaatgttaccctcctccattgggctgccatcaataacagaatagatttagtcaaatactatatttcgaaaggtgctattgtggatcaacttggaggggacctgaattcaactccattgcactgggccacaagacaaggccatctatccatggttgtgcaactaatgaaatatggtgcagatccttcattaattgatggagaaggatgtagctgtattcatctggctgctcagttcggacatacctcaattgttgcttatctcatagcaaaaggacaggatgtagatatgatggatcagaatggaatgacgcctttaatgtgggcagcatatagaacacatagtgtggatccaactagattgcttttaacattcaatgtttcagttaaccttggtgacaagtatcacaaaaacactgctctgcattgggcagtgctagcagggaataccacagtcattagccttcttctggaagctggagctaatgttgatgcccagaatatcaagggcgaatcagcgcttgatttggcaaaacagagaaaaaatgtgtggatgatcaaccacttacaagaggcaaggcaagcaaaaggatatgacaatccgtccttccttagaaagctgaaagctgata

SEQ ID NO: 204431 - DNA, 596 bp, Homo sapiens
  Payload ID: 20322
  Gene Name: zinc finger, DHHC-type containing 17
  ENST ID: ENST00000549682
  CDS Start-End: 217-596
ggaggtgttgatggttctgctgtgtcgccgcgctgcgtttgagagcagaggcggaggggcctggtgtggtttttgaaccgcagcttagaccctagtcttgctccaagcctcttggggccaggtggaagcgcgtctggttttgatttctttttccttcgccagggtgaatgacggtatctattgcttccttttagtccactgtgaggggacagtttcatgggcatagtgatgtccttccaggaaatcaaaccccaaagccattataaccatggatatggtgaacctcttggacggaaaactcatattgatgattacagcacatgggacatagtcaaggctacacaatatggaatatatgaacgctgtcgagaattggtggaagcaggttatgatgtacggcaaccggacaaagaaaatgttaccctcctccattgggctgccatcaataacagaatagatttagtcaaatactatatttcgaaaggtgctattgtggatcaacttggaggggacctgaattcaactccattgcactgggccacaagacaaggccatctatccatggttgtgcaactaatgaaatatggtgcagatcc

SEQ ID NO: 204432 - DNA, 1002 bp, Homo sapiens
  Payload ID: 20323
  Gene Name: zinc finger, DHHC-type containing 18
  Uniprot ID: Q9NUE0
  ENST ID: ENST00000374141
  CDS Start-End: 121-882
attattcctgctgcttattgaaggtgttgcctgccacagagaagacctcactgtccctacctggctcgcaagctgacccttgccatccccatcatcgctgccatcctcttcttcttcgtcatgagctgcctgctgcagacaagcttcaccgaccctgggatcctgccccgggccactgtctgtgaagcagccgccctggagaaacagatcgacaacacaggcagttctacataccggccaccccctcggacccgggaggtgctgatcaacgggcagatggtgaagctgaagtactgcttcacctgcaagatgttccggccaccccgaacctcacactgcagtgtctgcgacaactgtgtggaacgatttgaccatcactgcccctgggtgggcaactgtgtggggagacggaactatcgcttcttctacgcgtttattctctccctctcattcctgacggccttcatcttcgcctgtgtggtcacccacctgacgttgcgcgctcagggaagcaacttcctctccactctgaaggagacaccagcaagcgtgctggagttggtgatctgcttcttctccatctggtccattctgggcctctcagggtttcacacgtacctcgtcgcctccaacctgactactaatgaagacatcaaaggctcgtggtccagcaagaggggcggtgaggcctctgtcaacccctacagccataaaagtattatcaccaactgctgtgctgtgctctgtggccccctacctcccagcctaattgaccggaggggatttgtgcagtccgacaccgtgttgccctcacccatcagaagcgatgagccagcctgcagagccaagcctgatgccagcatggtaggaggccacccctgaccacggctcagtacttgccacctgctggcctgtctgaccctccgcactcacctgccgggaccctccctattccatccaagggaagcagaactgccaaagactcaagtcttttcatattta

SEQ ID NO: 204433 - DNA, 5020 bp, Homo sapiens
  Payload ID: 20323
  Gene Name: zinc finger, DHHC-type containing 18
  Uniprot ID: Q9NUE0
  ENST ID: ENST00000374142
  CDS Start-End: 96-1262
gcgcgcgccgccgctgccacctccgctgctcggcccggtcccggagtggcccggccggcccgcggggcgcggagccgaggcccgcggctggctgcatgaaggactgcgagtaccagcagatcagccccggggccgccccgctgcccgcctccccgggggcgcgccgtcccggccccgccgcgtccccgactccgggccccgggcccgcgccgcccgccgcccccgccccgccgcgctggagcagcagcggcagcggcagcggcagcgggagcgggagcctcggccgccgcccacggcgcaagtgggaggtgttcccgggtcgcaatcgcttctactgcggcggccgcctcatgctggccggccacggcggcgtcttcgcgctcacgctgctgctcatcctcaccaccaccggcctcttcttcgtctttgactgtccctacctggctcgcaagctgacccttgccatccccatcatcgctgccatcctcttcttcttcgtcatgagctgcctgctgcagacaagcttcaccgaccctgggatcctgccccgggccactgtctgtgaagcagccgccctggagaaacagatcgacaacacaggcagttctacataccggccaccccctcggacccgggaggtgctgatcaacgggcagatggtgaagctgaagtactgcttcacctgcaagatgttccggccaccccgaacctcacactgcagtgtctgcgacaactgtgtggaacgatttgaccatcactgcccctgggtgggcaactgtgtggggagacggaactatcgcttcttctacgcgtttattctctccctctcattcctgacggccttcatcttcgcctgtgtggtcacccacctgacgttgcgcgctcagggaagcaacttcctctccactctgaaggagacaccagcaagcgtgctggagttggtgatctgcttcttctccatctggtccattctgggcctctcagggtttcacacgtacctcgtcgcctccaacctgactactaatgaagacatcaaaggctcgtggtccagcaagaggggcggtgaggcctctgtcaacccctacagccataaaagtattatcaccaactgctgtgctgtgctctgtggccccctacctcccagcctaattgaccggaggggatttgtgcagtccgacaccgtgttgccctcacccatcagaagcgatgagccagcctgcagagccaagcctgatgccagcatggtaggaggccacccctgaccacggctcagtacttgccacctgctggcctgtctgaccctccgcactcacctgccgggaccctccctattccatccaagggaagcagaactgccaaagactcaagtcttttcatatttatttcccatcctgcgtggctttccctgaactgttccgtggctgtgccctctgctccccaaacccaggttcccacagccttgggccctaggtaccccagctgatcagtgccaggagagaccagagcctctggaggctacccaggggaccacaccaagtccttgcctgtgccgggcgagccctgtgtgagtgaggctgtgaactgagcgtgaggcctcccaggtgggggaactgcttgggccttgctgagccagggtcctcagggtgaagcaggactgaggagtggccagctctggatagctggctgtggagaggaagcctccatgggctgctttggtctgtgggctccttcattcccttggtgataatttccctttattctgtgggatttttggtggggttttccccccttttttatggagttggccaataggattgagttggggctccagtagagaaggcagggttggtggtgggtgggggcagcctgtatcagacaaaggtaaatcagccagccaggcacccacagcctcagctcctgtgcagttcctgggcagcacagtggaagtgggagcctggtccttcccctgcccatggagagctctttaagggatcccagcctgcccctccacttctctcccaagccaggtcccggcatgggtgggttatgctcatgctggcaatacttgaaacgggtttattaatgctgggtattttgcacaattttatagacctcttttctacatagtcttttttaaatggaaggagaaaatgtcagccacattactgtctgtgtagtgccaggtgaagggttatcagaaggctggttggttttaataagtttattccaagagaccttctggctggaatgagtgagagtgtgtgtgcatgtgtgtgtgtgttcatgtgtgccctgtatgaatgtggctggctcccatatcccctgggctgccccctgccccatcccctttgagtgtcagaagcactctgagccaaggggacagggggcacgtgcactggtcacgagaaaaccctgggctcccactggggctcagcccagcctcctatctttccttcttctatggacttcagacagccagtgtctggggactctgccactctacccccagccctacccaccagcccccaggtgaggcttccagctgggacctgcccagacaggctgagcctgggcgtggtgggtggggtgatggctctggggagcggctgccatcctacaagccacaccccctcctctgagctctgaatatgggacccagtgccaggagctggaagacaaggtgtttctgccaaacggggacctccatccagagaaaaggaagaaggtgcagggtgggccaagaggcaagtgaaggttggcctgagtctgggccggaaactcagaggatgtttctcctctgctgggagctgtagtttcttatcaaaatagatattgttccaccatccccctccttggcccttcaagtgggctgaagcccttggaaagtgacataggaagtccccagatcttgcccttctcactccagaggctagtggtcacagacagctgggaatggcagccacagagggtcccctctgggagaaacagcttcaccccagcctcagggccctgggccatcactgcagtggccctgggaggtgaggaagaagctggctagaggagggggctcccacctaccttttatttaagccagtattctttgttcctgcttgtaataaaacttcagtttataagagttgctttgctttggtttggtttttgtttgcttttcctttgctgaggccccaactgggagccctctgttctttcagacaaatttggttctttcctggggagactgtgagaaggcaggcagcccagtgatctggctacattttccctcacctggctggagctctgtccgctggaggaagagcagagagggctgcggctgagcccccatgggcacgtgaaaagaggccatcctgtcccctctttgtcccctccaccttcccctgcctcaggggcttggagacccccaaattcttcttccctactgcctttccactccgatccccaatgagtgcccagctaagaaaatgtttgagacagtagattccagtttgagagccggagcttccctggctaccacctccaacctgggcaccagggcccagccagacaactcataacactggcccacctctctggtatctccctcaggaggacacctgtcaggattttgccatctcctgcacagcctgaggggagctaacaggcctctttgcagagggttagctggtaagaccgtttcttccctgtcggccagcactgcccgctcccctcacacaccatctcatcctcatcgcatgcctcgccaaccccatggagcccgtccatctgtctggtgtgtggtgcggtgtgtgtgctggtggtggtagggtctccagggactccccgctaagcagaaggatcgggatatagggcaaggctaaaagcccagccccattgtggactgaggaagtagcttctcgcagagcagctctccagctggaagaggaggtggagggtgaggctggggagaggatggcgaacctgccctgaggtgcttgggtctgtgctggtggggtcctggtatgcaggggccaccggtcactaacactcttatgtcctggctttctgtccccgctgagctttctctcacccgcccgttttctctcctgcttcattgcctgctgcctaagccttggcccttctctcgggcagaggcaggtgctgtggcagcacctctccccaccaccggggcccctgcaggccgcctccctcctcccaggcctgctaaccctctctcttctccttctttgctgtcctgccggggatctccagtgtgtgcgggggcttaaggacctcctgaggaccgctgctctctgcctctccaggaatggcctggggggagccaggcacccggcacctccacctgcctaacctgtggcccatctgccaccatctgtgcctacagggtctgccccccagcctgcccggcctgtgtgctctctaggacccccatagggggcaggggctggcctctttgccccattcccgctccatgccggccagagtgtagaaagccataacgcagccatcagcacaataatgtgactctacgctgatatgctccctctctcctccactgacttccccttcccggatttgtgaggtgtcaagactaggaatctggccttagagcctgcccctccaccccctcagatcaggcatagccatagtcaagcccagcaggtttcctcaggagctgtctggggtgttgatggtggatgacgctgctgaacaagtttggtgactgttctaagcacaactggcttgatactgttcccacggcctgtccacctcccacccccaaccctccaccagagtaggtaggatgtagggagggtgcgtgcctcctttgctctaggcactgagggaccaagctagccgtgcacagccccatacacttcaggggactaaaggaaagagctgagccaaggaaaatcagctgagcccagggctgggggctgcttgtctgctatcctgtaccttttttttttttaaccaaaataaagattcccctcttcttgccata

SEQ ID NO: 204434 - DNA, 597 bp, Homo sapiens
  Payload ID: 20323
  Gene Name: zinc finger, DHHC-type containing 18
  ENST ID: ENST00000534643
  CDS Start-End: 124-597
attgaaggtgttgcctgccacagagaagacctcagtaaatatttgtggactgactgtccctacctggctcgcaagctgacccttgccatccccatcatcgctgccatcctcttcttcttcgtcatgagctgcctgctgcagacaagcttcaccgaccctgggatcctgccccgggccactgtctgtgaagcagccgccctggagaaacagatcgacaacacaggcagttctacataccggccaccccctcggacccgggaggtgctgatcaacgggcagatggtgaagctgaagtactgcttcacctgcaagatgttccggccaccccgaacctcacactgcagtgtctgcgacaactgtgtggaacgatttgaccatcactgcccctgggtgggcaactgtgtggggagacggaactatcgcttcttctacgcgtttattctctccctctcattcctgacggccttcatcttcgcctgtgtggtcacccacctgacgttgcgcgctcagggaagcaacttcctctccactctgaaggagacaccagcaagcgtgctggagttggtgatctgcttcttctccatctggtccattctg

SEQ ID NO: 204435 - DNA, 1275 bp, Homo sapiens
  Payload ID: 20323
  Gene Name: zinc finger, DHHC-type containing 18
  ENST ID: ENST00000488397
  CDS Start-End: 1-484
cttctacgcgtttattctctccctctcattcctgacggccttcatcttcgcctgtgtggtcacccacctgacgttgcgcgctcagggaagcaacttcctctccactctgaaggagacaccagcaagcgtgctggagttggtgatctgcttcttctccatctggtccattctgggcctctcagggtttcacacgtacctcgtcgcctccaacctgactactaatgaagacatcaaaggctcgtggtccagcaagaggggcggtgaggcctctgtcaacccctacagccataaaagtattatcaccaactgctgtgctgtgctctgtggccccctacctcccagcctaattgaccggaggggatttgtgcagtccgacaccgtgttgccctcacccatcagaagcgatgagccagcctgcagagccaagcctgatgccagcatggaggacacctgtcaggattttgccatctcctgcacagcctgaggggagctaacaggcctctttgcagagggttagctgtgtgtgcgggggcttaaggacctcctgaggaccgctgctctctgcctctccaggaatggcctggggggagccaggcacccggcacctccacctgcctaacctgtggcccatctgccaccatctgtgcctacagggtctgccccccagcctgcccggcctgtgtgctctctaggacccccatagggggcaggggctggcctctttgccccattcccgctccatgccggccagagtgtagaaagccataacgcagccatcagcacaataatgtgactctacgctgatatgctccctctctcctccactgacttccccttcccggatttgtgaggtgtcaagactaggaatctggccttagagcctgcccctccaccccctcagatcaggcatagccatagtcaagcccagcaggtttcctcaggagctgtctggggtgttgatggtggatgacgctgctgaacaagtttggtgactgttctaagcacaactggcttgatactgttcccacggcctgtccacctcccacccccaaccctccaccagagtaggtaggatgtagggagggtgcgtgcctcctttgctctaggcactgagggaccaagctagccgtgcacagccccatacacttcaggggactaaaggaaagagctgagccaaggaaaatcagctgagcccagggctgggggctgcttgtctgctatcctgtaccttttttttttttaaccaaaataaagattcccctcttcttgccatac

SEQ ID NO: 204436 - DNA, 1306 bp, Homo sapiens
  Payload ID: 20324
  Gene Name: zinc finger, DHHC-type containing 19
  Uniprot ID: Q8WVZ1
  ENST ID: ENST00000296326
  CDS Start-End: 81-1010
ggccatggagctctggaagctgggctgggggaggaagcctggtggctctgacctcccctggaggcgaaggaggcccagccatgacactcttaacggatgccacgccgctggtgaaggagccccatcccctgcctctggtcccacgtccctggttcctccctagcctctttgctgccttcaatgtggtgctgctggtctttttcagtggcctcttcttcgcattcccttgcaggtggctggctcagaacggggagtgggcctttcctgttatcacaggctccctctttgtccttaccttcttcagtcttgtttcactcaacttctcagaccctggcatcttacatcaaggctccgctgagcagggccccttgacggtgcacgtggtgtgggtgaaccacggggccttccgcctgcaatggtgtccaaagtgctgcttccaccgcccgccccggacttaccactgcccctggtgcaacatctgtgtggaggactttgaccaccactgcaagtgggtcaataactgcatcggtcaccgcaacttccgcttcttcatgctgcttgtcctgtccctgtgcctctactcgggcgccatgctggtcacctgtctcatcttcctggtgcgcacaacccacctgcccttctccaccgacaaggccatcgccatcgtggtggccgtgtccgccgcgggcctcctggtgccgctgtccctcctgctgctgatccaggcactgtccgtgagctcggccgaccgcacctacaagggcaagtgcagacaccttcagggatacaaccccttcgaccagggctgtgccagcaactggtatttaacaatttgtgcaccactgggacccaagtacatggctgaagctgtccagctgcagagagtggtggggcctgactggacatccatgccgaatctgcaccctccaatgtccccctctgctctcaaccccccagccccaacctctgggtccctacaaagcagggaagggacccccggggcgtggtgaggctgcagctctccaggagttccacacgggcccagtgctgcccctgctgctgcaggagcccccaggcgaggttcggccttcctctcgcccctgtgcacccggagatgcccacagcaccagcacctgagctcacctccgaacccgcctcctgaacccgcctcctgaacctgcctccttacctcccacttcctgagccctgagtggaagcctttctgtgccttgccctttgcccactcccctggtgggactgccaagaccctcaatgcccattaaatactcttgcctgcctcttacaa

SEQ ID NO: 204437 - DNA, 1308 bp, Homo sapiens
  Payload ID: 20324
  Gene Name: zinc finger, DHHC-type containing 19
  ENST ID: ENST00000397544
  CDS Start-End: 123-971
cttctttcctttcaccctgggctgcggctctgaggctgccgtggccatggagctctggaagctgggctgggggaggaagcctggtggctctgacctcccctggaggcgaaggaggcccagccatgacactcttaacggatgccacgccgctggtgaaggagccccatcccctgcctctggtcccacgtccctggttcctccctagcctctttgctgccttcaatgtggtgctgctggtctttttcagtggcctcttcttcgcattcccttgcaggtggctggctcagaacggggagtgggcctttcctgttatcacaggctccctctttgtccttaccttcttcagtcttgtttcactcaacttctcagaccctggcatcttacatcaaggctccgctgagcagggccccttgacggtgcacgtggtgtgggtgaaccacggggccttccgcctgcaatggtgtccaaagtgctgcttccaccgcccgccccggacttaccactgcccctggtgcaacatctgtgtggaggactttgaccaccactgcaagtgggtcaataactgcatcggtcaccgcaacttccgcttcttcatgctgcttgtcctgtccctgtgcctctactcgggcgccatgctggtcacctgtctcatcttcctggtgcgcacaacccacctgcccttctccaccgacaaggccatcgccatcgtggtggccgtgtccgccgcgggcctcctggtgccgctgtccctcctgctgctgatccaggcactgtccgtgagctcggccgaccgcacctacaagggcaagtgcagacaccttcagggatacaaccccttcgaccagggctgtgccagcaactggtatttaacaatttgtgcaccactgggacccaaggctgctgcatcctggatgaggctggcctcagcttcctgcagagctaagccctgggccgtgtgcttcccaagctgaggcgggcaggggagccggaccagggaggacggtggcccctgcatctggcctgctgctccccagttccacacgggcccagtgctgcccctgctgctgcaggagcccccaggcgaggttcggccttcctctcgcccctgtgcacccggagatgcccacagcaccagcacctgagctcacctccgaacccgcctcctgaacccgcctcctgaacctgcctccttacctcccacttcctgagccctgagtggaagcctttctgtgccttgccctttgcccactcccctggtgggactgccaagaccctcaatgcccattaaatactcttgcctgcctctta

SEQ ID NO: 204438 - DNA, 1521 bp, Homo sapiens
  Payload ID: 20324
  Gene Name: zinc finger, DHHC-type containing 19
  Uniprot ID: Q8WVZ1
  ENST ID: ENST00000438232
  CDS Start-End: 123-812
cttctttcctttcaccctgggctgcggctctgaggctgccgtggccatggagctctggaagctgggctgggggaggaagcctggtggctctgacctcccctggaggcgaaggaggcccagccatgacactcttaacggatgccacgccgctggtgaaggagccccatcccctgcctctggtcccacgtccctggttcctccctagcctctttgctgccttcaatgtggtgctgctggtctttttcagtggcctcttcttcgcattcccttgcaggtggctggctcagaacggggagtgggcctttcctgttatcacaggctccctctttgtccttaccttcttcagtcttgtttcactcaacttctcagaccctggcatcttacatcaaggctccgctgagcagggccccttgacggtgcacgtggtgtgggtgaaccacggggccttccgcctgcaatggtgtccaaagtgctgcttccaccgcccgccccggacttaccactgcccctggtgcaacatctgtgtggaggactttgaccaccactgcaagtgggtcaataactgcatcggtcaccgcaacttccgcttcttcatgctgcttgtcctgtccctgtgcctctactcgggcgccatgctggtcacctgtctcatcttcctggtgcgcacaacccacctgcccttctccaccgacaaggccatcgccatcgtggtggccgtgtccgccgcgggcctcctggtgccgctgtccctcctgctgctgatccaggcactgtccgtgagctcggccgaccgcacctacaagggcaagtgagtgccagctgtccttgcatggagtcctggttcctttggtggagaatggtgttgaaaatctcagcctttgcggcggagagcggggacatgggacacaggggagttggtggtgggcagagatgctgctgggccactttcagtgacaaaacatgacagcaaaggctcttgaagtcagtgcagacaccttcagggatacaaccccttcgaccagggctgtgccagcaactggtatttaacaatttgtgcaccactgggacccaagtacatggctgaagctgtccagctgcagagagtggtggggcctgactggacatccatgccgaatctgcaccctccaatgtccccctctgctctcaaccccccagccccaacctctgggtccctacaaagcagggaagggacccccggggcgtggtgaggctgcagctctccaggagttccacacgggcccagtgctgcccctgctgctgcaggagcccccaggcgaggttcggccttcctctcgcccctgtgcacccggagatgcccacagcaccagcacctgagctcacctccgaacccgcctcctgaacccgcctcctgaacctgcctccttacctcccacttcctgagccctgagtggaagcctttctgtgccttgccctttgcccactcccctggtgggactgccaagaccctcaatgcccattaaatactcttgcctgcctctt

SEQ ID NO: 204439 - DNA, 6377 bp, Homo sapiens
  Payload ID: 20325
  Gene Name: zinc finger, DHHC-type containing 2
  Uniprot ID: Q9UIJ5
  ENST ID: ENST00000262096
  CDS Start-End: 696-1799
cgcaagttgaagcgcgagggttccacgcgggctgcggggacgcgggcctcggtgctgcagactttctcagggcgcctgggtcgcggcaggcgcggagtcccgagcgcagcagctgctccgccggcctcgcctccgacccccgccctgcgccaagcgcggaagcgctcgcgacctaactgccccgggtgccgggcgcctagggaggggccgccaccgcccgctccgccccgggggcctgcgcccagcagcccccgcctccccggaatccagaggccgagccggaggcggcggggccacggtgggagcccgcgaggtggcccgagcgagggccccgcatccccgcagagcccgcccgagggcgcagcctgccacgccaggggaggcggccgggcggcggggaacggcgggggcggagcgcagcctcccgacgccgccgcctcaccgcccccctccgcctcctcggcctccgctcgcagccgccgcctccgcctccgccgggctgaggagccgggagtccgccgcgccggctcggggctgcgggatggggagttagcgccacggcggcggcagtggccgcagcgcaccccgccgccgcccaggagcccgtccagccaggggtgccgggcccgcccagcccgccccggagccaggcccgcgggcggcggcggagctgggcaggtggatgcggctggaagatggcgccctcgggcccgggcagcagcgccaggcggcggtgccggcgggtgctgtactggatcccggtggtgttcatcaccctcctgctcggctggtcctactacgcctacgccatccagctgtgcatagtgtccatggaaaacactggcgaacaagttgtgtgcctgatggcctatcatctactttttgcaatgtttgtctggtcatactggaaaactatctttacattaccaatgaatccttcaaaagaattccatctctcttatgcagagaaagatttgttggagagagagccaagaggagaagcccatcaggaagttcttaggcgagcagccaaggatcttcccatctataccaggaccatgtctggagccatccgatactgtgacagatgccaacttataaaaccagatcgctgccatcactgctccgtctgtgataaatgtattttgaagatggatcatcattgtccatgggtgaacaattgtgttggattttcaaattataagttctttctccttttcttggcttattctctgctctactgcctttttattgcggcaacagatttacagtattttatcaaattttggacaaatggcctacctgatactcaagccaagttccatattatgtttttattctttgctgcagctatgttttctgtcagcttgtcttctctgtttggctatcattgttggctagtcagcaaaaataaatctacattagaggcattcagaagtccagtatttcgacatggaacagataagaatggattcagcttgggtttcagtaaaaacatgcgacaagtttttggtgatgagaagaagtactggttgctacccattttttcaagtctaggtgatggctgctcctttccaacttgccttgttaaccaggatcctgaacaagcatctactcctgcagggctgaattccacagctaaaaatctcgaaaaccatcagtttcctgcaaagccattgagagagtcccagagccaccttcttactgattctcagtcttggacggagagcagcataaacccaggaaaatgcaaagctggtatgagcaatcctgcattaaccatggaaaatgagacttaactcttcaagcaagataaattcatactttataaaagtatcaatgctgtagatggatggaagaggcttcccacaggaaggtgccaccagtcagttgtgcctatgtccctttggctggaaatgcagaatatgaattgattagttctctccaagccattgcttaaaatataacatgttttggatccaatacacacattgttacaactaacacaaattcctattaaatattaaaagtagttctggtttattaatcaacggggaaaacatcttctccaaaaaacttggaataaatccaaggaccagtttttacccaaatatatgggtagcacagtttatcacatagaaactccattaatcatctgattttccgaatctgaaaattgagactattaagatattaggatttcagagatttcaagtcacattataatgataagcattattcataaaacttgttacctttaagaaggtggaagtggcaaaccatacttcttttttttcctctgatgtgaatccagcctcagactgagtgaactgtaataattatgaattcattacagagtccaggtggcctgcagttgaagatcatcaaccatttttgcctcacttaattccagccttttgttttctgctggaaaataagtgtggacattgaagcttgagctctcaaagcagttggctggaatacttttgtcagaatacggtacatttctattacatcagaaatatattttcatctcttcttgttaaattgggaggaaatttatgatagcaattatgaagattgttttatgacattcttttgtcagtttggctttctaaaaatctctttttagattatttctcctgttgaacatagtaaaactattgaatttctcttaagaattcctaataggtcaatagatttaccctccagtgatatctatattatttctttctcgtctcatcaaaatgatgacaggtaaactatatttttccttaaacacctattacagttaaattatgcaaatcattaaataaaaatcatacaacttttggaaagttagttcaacatgaactaaaatggcatgctatttggaaatttagtttgagataaactaaagtgtgttgatgccagaatgttcagcttcagtaaatataataagctcttgtgccttgtatgcactatttaaaaaaagttttttttatttgagtccagtataattcatgtaaatgttaacaattagaataatactctgtatgcttttttgatactgattttgagaatttaaagcagattaccttttaaaactggaccaactaagtaattggtatttaatcaaagagaaaatggtaataaacttttcaaaatctttgttaaaccaaacattcaacacaaaataaactagaaggccagaggataatggaataaaagatcattgcaattacttatccttcctaaaaatatagttttatattaattgtgcttatggaagaaacaatgtcagccaagtccattttatagtttgagtgcaattctttgaacaatagaaatatctgcagtctttcacagatttgtattatgctgaagagtttcatctgacaatctgcttcaagaaatctcagaaaatatgataacattttaactttcattttagagcacgttttggtcatttttaaaaatacctaaagtgccagaccggaacctatagctactgctagaagtcttaaaaaaaccaacagcagcacaggatgtattaagaattatatgaagtcaggtttgtttttttttttttttttttttcaaagcacagtactgttagctgtttttgtggacaggattcgattaagtattccctcttgtcaaactggaagctaggggaaaaagagggatttttatcctttactcttctagagtactgttaatgcccctttcccacagtcttttatataattaaatatatgtcaatacacattagaatcagatttgaaaaagttaaaacaatttcattgttgtaattgttccctttctgttttcatatagtgaataacctttaaagggttgttttgttttgttttgaattataggagttataatctttggagatgattgcatatctcattagatatgcaatataaatttatctgagtgaacaaagtgctaaataaatagatctacattttgtacatatttatataaaatttacctttaagtatttactttaaaaaatttaatggcttaactcgaacttgaagacacatacttcaactgtccttattgtccattaaactgataattttgatttttcttgcttttatagattttactatataggaatcaagatttaagaaattttgcattaaaaatagtgtaccaatgcttcatatacgttagttatttgctattatgtagggaagaggattgttatttcaaagatatattaaagaacagttgcatctgaatataatcatgatgcattcaatgaagttcatatccatgaattcactcctaatataccctaataaagtggttgatcacctacattatctgtctataagaaactgcctttgcactgacaatgtaaattattttaagcataaattttcctaatagtttattagagctactaatggcaaaattcatgtcttcaatgtggccataacataggtcttgggaggggtggtgagaaaataaggtatttactttgtagtagttaagtgattctgaggacaattagaaacagactataaaactcaactacactgtaatcaatagacaactattggaaatatggcatatgttgacaaacacttaactagggaaatcaaagatataaatcatgtttataaaaaattaggcacgcaatcatgtgattcatgcttcaagaaaatatatgaaaaaagtgttactccattatgttataaactagcagattttccctattttgaaatgcatgtaaacgggctcggctgattctgaaattgtactgtatcatttggtatttacttatatggtcaaatacttgtttgtaaaagtgatggttctgatacctttgatcaaacatagatacaaacctcagaaaatggtaaatgcaaagcagtttacgttgtaaatcatgatggtgtcctccagcacaaccatcccacccacacacctagactacagattctgatctgtgaatattttcaccaaagtgacatttaaacaagtggatttttcacaaataacacgtgtttaatatctttctgcagaaacgtgttcttctaaagcagaaaaccacgtggcttaatcccaaatgttttacacttcttttccacatacttagccagttcagcaccgatttcctcttatatgtggaaggagactatgttacatacctgaagtattactcttttacaaagataccattagaattttctcactgtcttggtaaaaattcctagattctactttttattgcaagtgttagcaatatgatcttgtaacgccatgaaaagcattaagtagaagccaacattaacctagattttacaactgagcaatctgttccccaccagatttcctttagaatttattaccaaaggatcttattttgttacagaacacaggaaattgttaaaccttataatgttgcaaaccatgcattttccttttctcttttccataagatttttttattgtagtagtgccctggcttgtaaacagtggacatcactgaaaggatgaaatcaagtaggcttgtttcaaagagactcctgtgaatcaactatgaatatgaagtatctcccagaacaatgttgagtgtttcaggagactctgaaacagggcacccattttttttttccttcctcaaaatagtctccttgaaatgtgagcaaagaactatgatgatgcagtccaggtatctaatagctcaatcaccaacaccgctgagaattgttcttataccagcaaaaagttcaaatacaataacctgggcaatgccaacagaagacacttttaatcatttgcagacctttcttgttgcaggaaagtgagggcaaaaacaaactggtgaaaaatgttcaaaaatagatctttttgatgttcatagccagtattcagtatttctgtattgtttacaattgggggaaaatgtctgttaaggctaatcatctgagtgatttgagtagcaattaaaccaaagggaaacttttaataagttattttaagccctggtttatggctagttcccttttgctcaggaaaaatagtactactttatggtttatgaaaacctatgatttatgttgcatcttccggggaaggtttaacagtacaaggagctgaatcctacctgaaattattaatgcttaatatattgcttctgtttgattgataaaggtgcttaatcaattgaaaaaaaaacgcataatgcttcaaggtaaaattccgttgattctgaatttaaaaagatactacagaatgcgtcagttctcctgttgtatttttctcagttatgagagcaaggctattttgtcagtttagattttgtgtctttttctgtcagtatgtatggctccctaattgaaaacatcttaaatgaactaatcaaacactta

SEQ ID NO: 204440 - DNA, 487 bp, Homo sapiens
  Payload ID: 20325
  Gene Name: zinc finger, DHHC-type containing 2
  ENST ID: ENST00000522184
  CDS Start-End: 97-487
aaacgtctcactcctagacatgtgagttggcttcctggccaatggaaaaggataaacaatgaggcaggtaaaaagagcttttggggagcactgtccatggaaaacactggcgaacaagttgtgtgcctgatggcctatcatctactttttgcaatgtttgtctggtcatactggaaaactatctttacattaccaatgaatccttcaaaagaattccatctctcttatgcagagaaagatttgttggagagagagccaagaggagaagcccatcaggaagttcttaggcgagcagccaaggatcttcccatctataccaggaccatgtctggagccatccgatactgtgacagatgccaacttataaaaccagatcgctgccatcactgctccgtctgtgataaatgtattttgaagatggatcatcattgtccatgggtgaacaattgtgttggattttcaaattataagttctttctccttttct

SEQ ID NO: 204441 - DNA, 167 bp, Homo sapiens
  Payload ID: 20325
  Gene Name: zinc finger, DHHC-type containing 2
  ENST ID: ENST00000523132
  CDS Start-End: 146-167
atttttgaggacatgtgcaacacactaaaccataatttaggtgtttgaacagtagggagagaaaaaaagaggtgatcgtctgaggtttttacatccagagagcgaagtggctccagtccgagttcgaggttcctgaattgtgtccatggaaaacactggcgaacaag

SEQ ID NO: 204442 - DNA, 1351 bp, Homo sapiens
  Payload ID: 20326
  Gene Name: zinc finger, DHHC-type containing 20
  Uniprot ID: Q5W0Z9
  ENST ID: ENST00000320220
  CDS Start-End: 78-1040
cgtccgagtcaccgtcgccggggctcccgcgctccccagaacggtgggacgcggggctcggcagccgccagcggaacatggcgccctggacgctgtggcgctgctgccagcgcgtcgtgggctgggtgccggtgctcttcatcaccttcgtggtcgtctggtcctactacgcgtacgtggtggagctctgcgtgtttactatttttggaaatgaagaaaatggaaagaccgttgtttaccttgtggctttccatctgttctttgttatgtttgtatggtcctattggatgacaattttcacatctcccgcttccccctccaaagagttctacttgtccaattctgaaaaggaacgttatgaaaaagaattcagccaagaaagacaacaagaaattttgagaagagcagcaagagctttacctatctataccacatcagcttcaaaaactatcagatattgtgaaaaatgtcagctgattaaacctgatcgggcgcatcactgctcagcctgtgactcatgtattcttaagatggatcatcactgtccttgggtgaataactgtgtgggattttctaattacaaattcttcctgctgtttttattgtattccctattatattgccttttcgtggctgcaacagttttagagtactttataaaattttggacgaatgaactgacagatacacgtgcaaaattccacgtactttttcttttctttgtgtctgcaatgttcttcatcagcgtcctctcacttttcagctaccactgctggctagttggaaaaaatagaacaacaatagaatcattccgcgcacccacgttttcatacggacctgatggaaatggtttctctcttggatgcagtaaaaattggagacaagtctttggtgatgaaaagaaatattggctacttccaatattttcaagcttgggtgatggttgcagttttccaactcgccttgtggggatggatccagaacaagcttctgttacaaaccagaatgagtatgccagaagatctaaactgcagaggtagaaagcagaaaacttggcaaatgacagtagtggctcaaatcaaccttttcctatcaaaccacttagtgaatcaaaaaaccgcttgttggacagtgaatctcagtggctggagaatggagctgaagaaggcatcgtcaaatcaggtgtatgaaaacattatagactggtattttcaattttcatttgcaagaaaatgatcagtggaatgaaataactgaagtataacagaagatatattttttaaaacggaaagcctttgtacagttcctgggattcacagaagcactactccagagcagaatgatgccttaa

SEQ ID NO: 204443 - DNA, 5338 bp, Homo sapiens
  Payload ID: 20326
  Gene Name: zinc finger, DHHC-type containing 20
  Uniprot ID: Q5W0Z9
  ENST ID: ENST00000382466
  CDS Start-End: 199-1263
tggggtgggggcggggcctggctgggcgccgggacgggaggagtcccggcggcgcctcggacttttgctcccacaagtcctgcctcggaggcgggggagctggaccagcagccgcctggagcgtccgagtcaccgtcgccggggctcccgcgctccccagaacggtgggacgcggggctcggcagccgccagcggaacatggcgccctggacgctgtggcgctgctgccagcgcgtcgtgggctgggtgccggtgctcttcatcaccttcgtggtcgtctggtcctactacgcgtacgtggtggagctctgcgtgtttactatttttggaaatgaagaaaatggaaagaccgttgtttaccttgtggctttccatctgttctttgttatgtttgtatggtcctattggatgacaattttcacatctcccgcttccccctccaaagagttctacttgtccaattctgaaaaggaacgttatgaaaaagaattcagccaagaaagacaacaagaaattttgagaagagcagcaagagctttacctatctataccacatcagcttcaaaaactatcagatattgtgaaaaatgtcagctgattaaacctgatcgggcgcatcactgctcagcctgtgactcatgtattcttaagatggatcatcactgtccttgggtgaataactgtgtgggattttctaattacaaattcttcctgctgtttttattgtattccctattatattgccttttcgtggctgcaacagttttagagtactttataaaattttggacgaatgaactgacagatacacgtgcaaaattccacgtactttttcttttctttgtgtctgcaatgttcttcatcagcgtcctctcacttttcagctaccactgctggctagttggaaaaaatagaacaacaatagaatcattccgcgcacccacgttttcatacggacctgatggaaatggtttctctcttggatgcagtaaaaattggagacaagtctttggtgatgaaaagaaatattggctacttccaatattttcaagcttgggtgatggttgcagttttccaactcgccttgtggggatggatccagaacaagcttctgttacaaaccagaatgagtatgccagaagtggctcaaatcaaccttttcctatcaaaccacttagtgaatcaaaaaaccgcttgttggacagtgaatctcagtggctggagaatggagctgaagaaggcatcgtcaaatcaggtgtatgaaaacattatagactggtattttcaattttcatttgcaagaaaatgatcagtggaatgaaataactgaagtataacagaagatatattttttaaaacggaaagcctttgtacagttcctgggattcacagaagcactactccagagcagaatgatgccttaatcttaagtgtccatttgtgcagcattgacttagagctacaaaagtgacttaatgttattctggaaataatacttacctgttatgagttgctataatatgagctgtcatcacattttaacatgcatatgtattttttgatacctgaattacattattagaataagtatccatatacattttcactccaaaaacacaagcttaaaaactttaaagtacatctagggcaaatggtggctgaaagtgaataatattcaaattactgttgcttgtactgtataaggaaaactgcttttttaaattgggtatttgctaatttataattactattttatacttttcaacatttttaataactttttttattgttggctataacagaaggattcagatatctaaatatcatttagaacatagaacacattggtctaattcatcgaaagcttagttatgagcattaatacaaccatgtagtagagcaagtgcccaaggtttaaagggaacttggcagtataagaaatattttgggttctctctgctattttatagctttttttgttgaactttcaggggtatgtacatgggcagagaaacacaaaggtacatgtgctggagaatactggacacagtaggaagaagtataggtgtccagaagaaaatctaagaggaatattgtaatttgttaaaaaaaatagttttgagttttaacagcagttagaataaagcatgctgttgacttcactttcaaatttcagtgtaggtaatgactaaaaattactttgaaactttttacagtaatactgtaatagcttaaacagtgatttaaaatgcaatttaaactaggcaaaaaaaactttagagtaagttttcctcctggctgtcagttggaaattctaacctgagtggtcattttacattcccagtctcttgagaagtggattctactcttagacgcacagtctgaagtctgacttcctaacggcaacccctttatgactagacacatttctcctttttccttttaaaatctaagcgacaggaggtgttgcattaactccaaggaaaagtacagaataaacaatgtagaaatgtcactcctcatttacaccttttagacagacagacacacacacacacacaccccccccaaaataattgattgcttccagtgagtgggtggagatgaatctcagcagcatctgtgagtactacaggttggagcttcctgtctgtaaaatgggactgcaggggagggggtgttgtgaataagttggactggatgacttctaacattctgtgatgcctaattttgcaaaatcacttttcattcacccaataaatttttttcttcttttttccacagagttttgctctgtctcccaggcaggagtgcagtggcgggatcttggctcgctgcaacctctgccttccaggttcaatagagtctcctgcctcagcctcccaagtagctgggattacaggctcatgccaccatgcccggctaattttcacatttttagaagagacgaggtttcaccatgttgaccaggctgatcactaactcctgacctcaaataatccacccacctcagcttcccaaagtgctgggattacaggcgtgagccaccacgccccgccccggtaaattttttggagtaccttctgtatgctaaataataaactaggaatagctctgtcatttcctagtacagcataaattttatggttgctactgtaggtttataatttgtttataatttggcctaatttccatcagccatactaatattggattttaaaaggaggcaactttttttctttttgaaccaaaggaatgagttagctttgaaaacataatttgggatattatagtatggattcttctacctttgtttcaactccttagtaatcttgattctagcaaactagaatgagatttaagagataccaattattgctgggtgtggtggctcatgcctgtaatcccagcactttgggaggccaaggctggcggatcacctgaggtcaggggttcgagattagcctggtcaaaatggcaaaaccctgtctccactaaaaatacaaaaaaaccccaaaactgtccaggcatggtggcacacgcctgtagtcccaactactcgggaggtggaggcaggagaatcacttgaacccaggaggtggaggtcgcagtgagccgagatcgtgccactgcactccagcctgggcgacgagtgaaactccatctcaaaaatatatatatatatcaattaccaactaaaaacataactccagtttggcagtttgcatattataaggagataaatgttaaaacatacttgactactttcagaaatgttctcctggtactttttgcatttctacattcagataaaaagatttgcatgcacctggctaacgccaagggaacttcatttttttcttcactattatgcactttcatggtatagtctttctcagttcttttaatttttgttatttaacatctttaatagcacagcaaacatcttttcagaaattttcagttaaagcctttgaattacttatctttgatttaatttacagccagcattttgccacgttctaaataatatttagctcaactgattcatacgtattaatgaccattctagcaaaggcctacaagtggtgtgggaatcagggaaaggctgcctctttggtatctcaactggtattgattattgctatcaactatttggggagaaaaaatcaaaatgaagccctgtcaaattttagaagtactatctttggtccttcaaacactttgtgatgacaccttaagaaaaataaagttgaagttcaggtcttgccattgccattacagacaaattaggagacttggtttacctgggaacaaatttacttgaatattcagtacctgaaactatgccaaaccaaagagcagctgcagtacattcgttattttaaatgaacaagtttacaaagtttattttcatctatacgtaaggatgatttttttaaaactttttacatattagtggttatgatccaatgtgtcatgagtgaatttaactgtaaggtggtttaaatcaaatatgcaatgtttacttgaattgtatttctattagcagattttgactatgtttacaggacggtttaaattaaggattatcaggcatgtgagatctttcagttatctttaaagtagatgtatattaagggcttagatttaggatctacatattctgggcattgaataggcagtaacttacaaataagttttgcttaccttttgttctagggactagcactgctatcaatggaaagtatttttaactaatctgttattaagaaagtcatatttttgcatttcagccaaaataaagaccgcctgtaataatctgttagaaacagataatacatgtctgaaatccatatgtttcatatgatctaaactgtattttccaatttaaattaaaaatgtaatatagattcagaaaggttcatatttttctaatgacttcattctatattattttgttaggttgcataaagaagcaaggaattgtacttgtattaaaagatgaagaaagctattaggtatatttgtacatgactgcaaatgagtctatgcccgtttaaaagaaaagatggacactattttaaagtgagctttaatatgcttttatataaacaaatttgaagtacagtttagtttggttgtgtttacctaacaagtaccataagccttgtgtttgttcttatttgtataatcctagcctgtgacttaatgttgatgctttgctttgtcttttggctggcctaacctacattgacatgtacacagaacattttaaaactttttttttcaaaagtcataatgaattactttattaataaacaaagtcttgtatttg

SEQ ID NO: 204444 - DNA, 1869 bp, Homo sapiens
  Payload ID: 20326
  Gene Name: zinc finger, DHHC-type containing 20
  Uniprot ID: Q5W0Z9
  ENST ID: ENST00000400590
  CDS Start-End: 200-1297
gtggggtgggggcggggcctggctgggcgccgggacgggaggagtcccggcggcgcctcggacttttgctcccacaagtcctgcctcggaggcgggggagctggaccagcagccgcctggagcgtccgagtcaccgtcgccggggctcccgcgctccccagaacggtgggacgcggggctcggcagccgccagcggaacatggcgccctggacgctgtggcgctgctgccagcgcgtcgtgggctgggtgccggtgctcttcatcaccttcgtggtcgtctggtcctactacgcgtacgtggtggagctctgcgtgtttactatttttggaaatgaagaaaatggaaagaccgttgtttaccttgtggctttccatctgttctttgttatgtttgtatggtcctattggatgacaattttcacatctcccgcttccccctccaaagagttctacttgtccaattctgaaaaggaacgttatgaaaaagaattcagccaagaaagacaacaagaaattttgagaagagcagcaagagctttacctatctataccacatcagcttcaaaaactatcagatattgtgaaaaatgtcagctgattaaacctgatcgggcgcatcactgctcagcctgtgactcatgtattcttaagatggatcatcactgtccttgggtgaataactgtgtgggattttctaattacaaattcttcctgctgtttttattgtattccctattatattgccttttcgtggctgcaacagttttagagtactttataaaattttggacgaatgaactgacagatacacgtgcaaaattccacgtactttttcttttctttgtgtctgcaatgttcttcatcagcgtcctctcacttttcagctaccactgctggctagttggaaaaaatagaacaacaatagaatcattccgcgcacccacgttttcatacggacctgatggaaatggtttctctcttggatgcagtaaaaattggagacaagtctttggtgatgaaaagaaatattggctacttccaatattttcaagcttgggtgatggttgcagttttccaactcgccttgtggggatggatccagaacaagcttctgttacaaaccagaatgagtatgccagaagtagtggctcaaatcaaccttttcctatcaaaccacttagtgaatcaaaaaaccgcttgttggacagtgaatctcagtggctggagaatggagctgaagaaggcatcgtcaaatcagggacaaataaccatgtaacagtggcaatagaaaattgagtaccacttgttcataactaaccatttgaataagagcaaggtgtatgaaaacattatagactggtattttcaattttcatttgcaagaaaatgatcagtggaatgaaataactgaagtataacagaagatatattttttaaaacggaaagcctttgtacagttcctgggattcacagaagcactactccagagcagaatgatgccttaatcttaagtgtccatttgtgcagcattgacttagagctacaaaagtgacttaatgttattctggaaataatacttacctgttatgagttgctataatatgagctgtcatcacattttaacatgcatatgtattttttgatacctgaattacattattagaataagtatccatatacattttcactccaaaaacacaagcttaaaaactttaaagtacatctagggcaaatggtggctgaaagtgaataatattcaaattactgttgcttgtactgtataaggaaaactgcttttttaaattgggtatttgctaatttataattactattttatacttttcaacatttttaataactttttttat

SEQ ID NO: 204445 - DNA, 1296 bp, Homo sapiens
  Payload ID: 20326
  Gene Name: zinc finger, DHHC-type containing 20
  Uniprot ID: Q5W0Z9
  ENST ID: ENST00000415724
  CDS Start-End: 199-1296
tggggtgggggcggggcctggctgggcgccgggacgggaggagtcccggcggcgcctcggacttttgctcccacaagtcctgcctcggaggcgggggagctggaccagcagccgcctggagcgtccgagtcaccgtcgccggggctcccgcgctccccagaacggtgggacgcggggctcggcagccgccagcggaacatggcgccctggacgctgtggcgctgctgccagcgcgtcgtgggctgggtgccggtgctcttcatcaccttcgtggtcgtctggtcctactacgcgtacgtggtggagctctgcgtgtttactatttttggaaatgaagaaaatggaaagaccgttgtttaccttgtggctttccatctgttctttgttatgtttgtatggtcctattggatgacaattttcacatctcccgcttccccctccaaagagttctacttgtccaattctgaaaaggaacgttatgaaaaagaattcagccaagaaagacaacaagaaattttgagaagagcagcaagagctttacctatctataccacatcagcttcaaaaactatcagatattgtgaaaaatgtcagctgattaaacctgatcgggcgcatcactgctcagcctgtgactcatgtattcttaagatggatcatcactgtccttgggtgaataactgtgtgggattttctaattacaaattcttcctgctgtttttattgtattccctattatattgccttttcgtggctgcaacagttttagagtactttataaaattttggacgaatgaactgacagatacacgtgcaaaattccacgtactttttcttttctttgtgtctgcaatgttcttcatcagcgtcctctcacttttcagctaccactgctggctagttggaaaaaatagaacaacaatagaatcattccgcgcacccacgttttcatacggacctgatggaaatggtttctctcttggatgcagtaaaaattggagacaagtctttggtgatgaaaagaaatattggctacttccaatattttcaagcttgggtgatggttgcagttttccaactcgccttgtggggatggatccagaacaagcttctgttacaaaccagaatgagtatgccagaagtagtggctcaaatcaaccttttcctatcaaaccacttagtgaatcaaaaaaccgcttgttggacagtgaatctcagtggctggagaatggagctgaagaaggcatcgtcaaatcagggacaaataaccatgtaacagtggcaatagaaaattga

SEQ ID NO: 204446 - DNA, 5315 bp, Homo sapiens
  Payload ID: 20326
  Gene Name: zinc finger, DHHC-type containing 20
  ENST ID: ENST00000542645
  CDS Start-End: 362-1240
gtggggtgggggcggggcctggctgggcgccgggacgggaggagtcccggcggcgcctcggacttttgctcccacaagtcctgcctcggaggcgggggagctggaccagcagccgcctggagcgtccgagtcaccgtcgccggggctcccgcgctccccagaacggtgggacgcggggctcggcagccgccagcggaacatggcgccctggacgctgtggcgctgctgccagcgcgtcgtgggctgggtgccggtgctcttcatcaccttcgtggtcgtctggtcctactacgcgtacgtggtggagctctgcgtgtgaaagaccgttgtttaccttgtggctttccatctgttctttgttatgtttgtatggtcctattggatgacaattttcacatctcccgcttccccctccaaagagttctacttgtccaattctgaaaaggaacgttatgaaaaagaattcagccaagaaagacaacaagaaattttgagaagagcagcaagagctttacctatctataccacatcagcttcaaaaactatcagatattgtgaaaaatgtcagctgattaaacctgatcgggcgcatcactgctcagcctgtgactcatgtattcttaagatggatcatcactgtccttgggtgaataactgtgtgggattttctaattacaaattcttcctgctgtttttattgtattccctattatattgccttttcgtggctgcaacagttttagagtactttataaaattttggacgaatgaactgacagatacacgtgcaaaattccacgtactttttcttttctttgtgtctgcaatgttcttcatcagcgtcctctcacttttcagctaccactgctggctagttggaaaaaatagaacaacaatagaatcattccgcgcacccacgttttcatacggacctgatggaaatggtttctctcttggatgcagtaaaaattggagacaagtctttggtgatgaaaagaaatattggctacttccaatattttcaagcttgggtgatggttgcagttttccaactcgccttgtggggatggatccagaacaagcttctgttacaaaccagaatgagtatgccagaagtagtggctcaaatcaaccttttcctatcaaaccacttagtgaatcaaaaaaccgcttgttggacagtgaatctcagtggctggagaatggagctgaagaaggcatcgtcaaatcaggtgtatgaaaacattatagactggtattttcaattttcatttgcaagaaaatgatcagtggaatgaaataactgaagtataacagaagatatattttttaaaacggaaagcctttgtacagttcctgggattcacagaagcactactccagagcagaatgatgccttaatcttaagtgtccatttgtgcagcattgacttagagctacaaaagtgacttaatgttattctggaaataatacttacctgttatgagttgctataatatgagctgtcatcacattttaacatgcatatgtattttttgatacctgaattacattattagaataagtatccatatacattttcactccaaaaacacaagcttaaaaactttaaagtacatctagggcaaatggtggctgaaagtgaataatattcaaattactgttgcttgtactgtataaggaaaactgcttttttaaattgggtatttgctaatttataattactattttatacttttcaacatttttaataactttttttattgttggctataacagaaggattcagatatctaaatatcatttagaacatagaacacattggtctaattcatcgaaagcttagttatgagcattaatacaaccatgtagtagagcaagtgcccaaggtttaaagggaacttggcagtataagaaatattttgggttctctctgctattttatagctttttttgttgaactttcaggggtatgtacatgggcagagaaacacaaaggtacatgtgctggagaatactggacacagtaggaagaagtataggtgtccagaagaaaatctaagaggaatattgtaatttgttaaaaaaaatagttttgagttttaacagcagttagaataaagcatgctgttgacttcactttcaaatttcagtgtaggtaatgactaaaaattactttgaaactttttacagtaatactgtaatagcttaaacagtgatttaaaatgcaatttaaactaggcaaaaaaaactttagagtaagttttcctcctggctgtcagttggaaattctaacctgagtggtcattttacattcccagtctcttgagaagtggattctactcttagacgcacagtctgaagtctgacttcctaacggcaacccctttatgactagacacatttctcctttttccttttaaaatctaagcgacaggaggtgttgcattaactccaaggaaaagtacagaataaacaatgtagaaatgtcactcctcatttacaccttttagacagacagacacacacacacacacaccccccccaaaataattgattgcttccagtgagtgggtggagatgaatctcagcagcatctgtgagtactacaggttggagcttcctgtctgtaaaatgggactgcaggggagggggtgttgtgaataagttggactggatgacttctaacattctgtgatgcctaattttgcaaaatcacttttcattcacccaataaatttttttcttcttttttccacagagttttgctctgtctcccaggcaggagtgcagtggcgggatcttggctcgctgcaacctctgccttccaggttcaatagagtctcctgcctcagcctcccaagtagctgggattacaggctcatgccaccatgcccggctaattttcacatttttagaagagacgaggtttcaccatgttgaccaggctgatcactaactcctgacctcaaataatccacccacctcagcttcccaaagtgctgggattacaggcgtgagccaccacgccccgccccggtaaattttttggagtaccttctgtatgctaaataataaactaggaatagctctgtcatttcctagtacagcataaattttatggttgctactgtaggtttataatttgtttataatttggcctaatttccatcagccatactaatattggattttaaaaggaggcaactttttttctttttgaaccaaaggaatgagttagctttgaaaacataatttgggatattatagtatggattcttctacctttgtttcaactccttagtaatcttgattctagcaaactagaatgagatttaagagataccaattattgctgggtgtggtggctcatgcctgtaatcccagcactttgggaggccaaggctggcggatcacctgaggtcaggggttcgagattagcctggtcaaaatggcaaaaccctgtctccactaaaaatacaaaaaaaccccaaaactgtccaggcatggtggcacacgcctgtagtcccaactactcgggaggtggaggcaggagaatcacttgaacccaggaggtggaggtcgcagtgagccgagatcgtgccactgcactccagcctgggcgacgagtgaaactccatctcaaaaatatatatatatatcaattaccaactaaaaacataactccagtttggcagtttgcatattataaggagataaatgttaaaacatacttgactactttcagaaatgttctcctggtactttttgcatttctacattcagataaaaagatttgcatgcacctggctaacgccaagggaacttcatttttttcttcactattatgcactttcatggtatagtctttctcagttcttttaatttttgttatttaacatctttaatagcacagcaaacatcttttcagaaattttcagttaaagcctttgaattacttatctttgatttaatttacagccagcattttgccacgttctaaataatatttagctcaactgattcatacgtattaatgaccattctagcaaaggcctacaagtggtgtgggaatcagggaaaggctgcctctttggtatctcaactggtattgattattgctatcaactatttggggagaaaaaatcaaaatgaagccctgtcaaattttagaagtactatctttggtccttcaaacactttgtgatgacaccttaagaaaaataaagttgaagttcaggtcttgccattgccattacagacaaattaggagacttggtttacctgggaacaaatttacttgaatattcagtacctgaaactatgccaaaccaaagagcagctgcagtacattcgttattttaaatgaacaagtttacaaagtttattttcatctatacgtaaggatgatttttttaaaactttttacatattagtggttatgatccaatgtgtcatgagtgaatttaactgtaaggtggtttaaatcaaatatgcaatgtttacttgaattgtatttctattagcagattttgactatgtttacaggacggtttaaattaaggattatcaggcatgtgagatctttcagttatctttaaagtagatgtatattaagggcttagatttaggatctacatattctgggcattgaataggcagtaacttacaaataagttttgcttaccttttgttctagggactagcactgctatcaatggaaagtatttttaactaatctgttattaagaaagtcatatttttgcatttcagccaaaataaagaccgcctgtaataatctgttagaaacagataatacatgtctgaaatccatatgtttcatatgatctaaactgtattttccaatttaaattaaaaatgtaatatagattcagaaaggttcatatttttctaatgacttcattctatattattttgttaggttgcataaagaagcaaggaattgtacttgtattaaaagatgaagaaagctattaggtatatttgtacatgactgcaaatgagtctatgcccgtttaaaagaaaagatggacactattttaaagtgagctttaatatgcttttatataaacaaatttgaagtacagtttagtttggttgtgtttacctaacaagtaccataagccttgtgtttgttcttatttgtataatcctagcctgtgacttaatgttgatgctttgctttgtcttttggctggcctaacctacattgacatgtacacagaacattttaaaactttttttttcaaaagtcataatgaattactttattaataaacaaagtcttgtatttg

SEQ ID NO: 204447 - DNA, 3343 bp, Homo sapiens
  Payload ID: 20326
  Gene Name: zinc finger, DHHC-type containing 20
  ENST ID: ENST00000626464
  CDS Start-End: 1-60
gaagaaggcatcgtcaaatcagggacaaataaccatgtaacagtggcaatagaaaattgagtaccacttgttcataactaaccatttgaataagagcaaggtgtatgaaaacattatagactggtattttcaattttcatttgcaagaaaatgatcagtggaatgaaataactgaagtataacagaagatatattttttaaaacggaaagcctttgtacagttcctgggattcacagaagcactactccagagcagaatgatgccttaatcttaagtgtccatttgtgcagcattgacttagagctacaaaagtgacttaatgttattctggaaataatacttacctgttatgagttgctataatatgagctgtcatcacattttaacatgcatatgtattttttgatacctgaattacattattagaataagtatccatatacattttcactccaaaaacacaagcttaaaaactttaaagtacatctagggcaaatggtggctgaaagtgaataatattcaaattactgttgcttgtactgtataaggaaaactgcttttttaaattgggtatttgctaatttataattactattttatacttttcaacatttttaataactttttttattgttggctataacagaaggattcagatatctaaatatcatttagaacatagaacacattggtctaattcatcgaaagcttagttatgagcattaatacaaccatgtagtagagcaagtgcccaaggtttaaagggaacttggcagtataagaaatattttgggttctctctgctattttatagctttttttgttgaactttcaggggtatgtacatgggcagagaaacacaaaggtacatgtgctggagaatactggacacagtaggaagaagtataggtgtccagaagaaaatctaagaggaatattgtaatttgttaaaaaaaatagttttgagttttaacagcagttagaataaagcatgctgttgacttcactttcaaatttcagtgtaggtaatgactaaaaattactttgaaactttttacagtaatactgtaatagcttaaacagtgatttaaaatgcaatttaaactaggcaaaaaaaactttagagtaagttttcctcctggctgtcagttggaaattctaacctgagtggtcattttacattcccagtctcttgagaagtggattctactcttagacgcacagtctgaagtctgacttcctaacggcaacccctttatgactagacacatttctcctttttccttttaaaatctaagcgacaggaggtgttgcattaactccaaggaaaagtacagaataaacaatgtagaaatgtcactcctcatttacaccttttagacagacagacacacacacacacacaccccccccaaaataattgattgcttccagtgagtgggtggagatgaatctcagcagcatctgtgagtactacaggttggagcttcctgtctgtaaaatgggactgcaggggagggggtgttgtgaataagttggactggatgacttctaacattctgtgatgcctaattttgcaaaatcacttttcattcacccaataaatttttttcttcttttttccacagagttttgctctgtctcccagcctgggcgacgagtgaaactccatctcaaaaatatatatatatatcaattaccaactaaaaacataactccagtttggcagtttgcatattataaggagataaatgttaaaacatacttgactactttcagaaatgttctcctggtactttttgcatttctacattcagataaaaagatttgcatgcacctggctaacgccaagggaacttcatttttttcttcactattatgcactttcatggtatagtctttctcagttcttttaatttttgttatttaacatctttaatagcacagcaaacatcttttcagaaattttcagttaaagcctttgaattacttatctttgatttaatttacagccagcattttgccacgttctaaataatatttagctcaactgattcatacgtattaatgaccattctagcaaaggcctacaagtggtgtgggaatcagggaaaggctgcctctttggtatctcaactggtattgattattgctatcaactatttggggagaaaaaatcaaaatgaagccctgtcaaattttagaagtactatctttggtccttcaaacactttgtgatgacaccttaagaaaaataaagttgaagttcaggtcttgccattgccattacagacaaattaggagacttggtttacctgggaacaaatttacttgaatattcagtacctgaaactatgccaaaccaaagagcagctgcagtacattcgttattttaaatgaacaagtttacaaagtttattttcatctatacgtaaggatgatttttttaaaactttttacatattagtggttatgatccaatgtgtcatgagtgaatttaactgtaaggtggtttaaatcaaatatgcaatgtttacttgaattgtatttctattagcagattttgactatgtttacaggacggtttaaattaaggattatcaggcatgtgagatctttcagttatctttaaagtagatgtatattaagggcttagatttaggatctacatattctgggcattgaataggcagtaacttacaaataagttttgcttaccttttgttctagggactagcactgctatcaatggaaagtatttttaactaatctgttattaagaaagtcatatttttgcatttcagccaaaataaagaccgcctgtaataatctgttagaaacagataatacatgtctgaaatccatatgtttcatatgatctaaactgtattttccaatttaaattaaaaatgtaatatagattcagaaaggttcatatttttctaatgacttcattctatattattttgttaggttgcataaagaagcaaggaattgtacttgtattaaaagatgaagaaagctattaggtatatttgtacatgactgcaaatgagtctatgcccgtttaaaagaaaagatggacactattttaaagtgagctttaatatgcttttatataaacaaatttgaagtacagtttagtttggttgtgtttacctaacaagtaccataagccttgtgtttgttcttatttgtataatcctagcctgtgacttaatgttgatgctttgctttgtcttttggctggcctaacctacattgacatgtacacagaacattttaaaactttttttttcaaaagtcataatgaattactttattaataaacaaagtcttgta

SEQ ID NO: 204448 - DNA, 9160 bp, Homo sapiens
  Payload ID: 20327
  Gene Name: zinc finger, DHHC-type containing 21
  Uniprot ID: Q8IVQ6
  ENST ID: ENST00000380916
  CDS Start-End: 468-1265
tcgcggctcccgggagctaagcgagacggcgacggcggcagtcgtccctccccacgcgggcgcgcgggcatgcggacacccactcggccggtccaggccctcaggctcccggaagcggaaggggagagcggcccggcctgggcggcggcgccggaggaggcggaggtggcgcggcaggaggaggggaaagagctgctggcggtcgggagagcggcggcagcgagaggcgagccagcggcgacgaatgaagaactttttcacttactgcaggattttcagcttcagcaagcaggttctcatggagaactgttattgaagagagatccatttggtgggatataattaaaaaaaatgaatcaaaagaaaatctctaaatgcagattccagaaaaattacagcacatctcagtgaatttgcaagtggatcatccttccttgtgggttagcaggcagttataagattgcaaaatgggtctccggattcactttgttgttgacccacatggttggtgctgcatgggtttgattgtctttgtttggttatacaatattgttttaattcccaaaattgtcctctttcctcactatgaagaaggacatattccaggcatattaataataatattctatggcatttccatattctgtctggttgccttagtgagggcctccataactgatccaggaagactccctgagaaccccaagatcccacatggagaaagggagttctgggaattatgtaacaagtgtaatttgatgagaccaaagcgttcccatcactgtagccgctgcggccactgtgtgaggagaatggatcatcactgtccatggattaacaattgtgttggtgaagataatcattggctctttctgcagttgtgtttctacactgaacttcttacttgctacgcactgatgttttctttctgccactattactattttcttccactaaaaaagcgtaatttggacctctttgtttttagacatgaattggccataatgagactagcagcctttatgggcattactatgttagttggaataactggactcttttacactcaactaattggcatcatcacagatacaacatctattgaaaagatgtcaaactgttgtgaagatatatcgaggccccgaaagccatggcagcagaccttctcagaagtttttggcactcgttggaagatcctgtggttcattcctttcaggcagaggcaaccactgcgagttccctaccactttgccaatcatgtctaaacagatggatggtgggcacagatgggtcctccatgctggcaatgcgttacaggttttatgataatagaactatgacagtcttcaagtcaattaaaatccacccaccagtcttaggcatcataatgtgccccaggctttattttaatagtgatcttgatcctgttgtgggactaatacaagatctatatttaagttttaaagcatgtttactttcaaattagctttccacagggatttcttgaaatgcttttgttattaaactcaaaaggcagtgattaggatgaaataattgtacataatttattttagtactgacagtgttacagattctaatttatggtaaatttcagatgtttatttaaaattttcacttttaaacagtaaccaaatctaaatttaattattcaggttttacaaaagttgatacaccttcttatagtataggtaaattttctttttcaaatccaatttaaaataacctttccttttaaatgtgctgcaacgtttttaaaaatgcagcagcataggagtgaacaacagcaacacaaaacgggcattggtttcttaggagtggcttgcttacgttttcttcttttttcttcaccaaaaccaacatgaaagtaccactgaagtaaaacaccaactacctaccttactataaaggaaatgttaaaatttttttcacaataattttttcaattttcactattactgttgtaattattgattgtgattaaaatatttgctcccaggagaactcctgaccagtgggcatgtattcctattttatcctaagattttaatgagcaaaaaggggagagaatttgcaataacttcacaattaccttttctagtgcagttatattagaatgcatatgtttttaaaatgctagtataactagatagtatataatgtacagtataaagaggaatattgtgcttttgaaaagagtatactttttacttttatttatgtactagtagatgtaaaatttcacattgaaggtttatatatattggccaactcatatagaaattttatttataggaagctactactaaaaaaagtcactaactttgtgtacctataatccctaaattaaaattaaattttaattggctggctgtaatttgcattgagagaccttttactagtagctagtgttaggaagtgaacctaaaataagaaaatataatgatctgtgtttatcattagccttgtacaaatgtaaattactaatagtgatgttcttttgcaaggcatagaacatttgtatgaaaagacatttagtatgctttgaaaaaaactcagcttttagtttttttccattagaatactgcaaaacccatatatctttttaaaaaatttatgtactcacagtctttcccttgaagagaagattgaaaaagtctactgttcataaaccatgctaacattttccttttagctagttttgaaagtaaggaacaatacctgggaaataattaaacagaaggttaccattgtcagccagttggctatactgtggttagttctttcagaaattgtaaatatcttgtagcatattctgaaataatagagtaagttcttctcagagatgttaatatcatgtttttcatgttctaattagaatactttattacttacaaactcagaaatacgaacagaaatacagcagacgaacatatttattggtactgaaaagagacgtagtaaattaaatagaagaaatatatttataaagcttagtgaaacacaaaattagaatgttcatgtcaggcacaagggtttggattttgtgcaagctaatttggccacatttggcctggtgacagaactgttcataaggaagtaatatatagataaggtaggtagatatcagttgaatgccttatattgtatacattcctttcaaataaagaccttgagaaaacagcagagccaagtgaagatcacctaaagaactttgtggctaatttatacttcatgtagtagcagtgggtactgggcagggtctctttcccactctgatgatttgtgctcttatttttcctagatttacctcatctagggcatattcttttccctcttcctctttacctttcctggtcctgatccctctgtactcagttcccctaaattattggactacaaactaatatactagaaaagcatacacttattttatttgaatgcagaaatgctatctatcagtatatatacataagaatgtatattacagtatatctatatatacttaacactgtaactttcagtattccccagttagcgtacctaactctcctgtgggttttgttaattcttattagactactagagaaaaaccaactggcagtttgctaagcatatctactggtgttgtttctgcgccctcttttggctaattgatgtaattatactggctctaaagatttactgccccataagtaaatagtatagccacattctgaacatatcaaaagtacaaacttaggaggagtgtatgtacaaaaatgtaaaattttatgaaaatgaacatgtttttatgatgttatttctagttcataagaatgtgatgactgctttgcttcatttatgtacgttcccattatattcttgctgtcaatcaatcacaaatttatatcagattaggataaactaagccattttatgtattttattttaaaccttattttggcagagtaattccttagaattggaaaagctgttactttgaaattaccaatttattacaaaacatagaaatgtattgtagctacaaagacaaccaagcattttctgtgttttaatgaatatctaaaaaactacatttagtttattttactcagttttgaaatgatttttttactggctctattgccttaaaataactaagagattaatgattctttgtataattttccttttctttgttcttttttttacatttcgcagagttatatctatagttttagtaacaatttcttatgtattctggataactgaaaacaactaaaggtgttgggcattagaaaataattgtgagcagtaagattactgatgtaatatgtatgttggactgaagtatttctttataaacattctatttgattttaagcaaaatgtatgttaaagcatgtttttacatcagtaaagtcatttgtcgaccttctggaaatgaaaggtttttacctagatactgtaagttacacctccttaacaatcatatttgtcattgttgttttctgcaaacaaaaatgtttatgggcttcatgtaggcttaagattgtaggcaaaaatggactgagttcaggacccttcaagcagtaggcattcagttacagagcagttggtactttgtaacccagacttacagtttaaaaatatcaagttagctgatgtttcattataataaaaatactattttgcttaagagttgtattacaaatatttgtgcttaacattagaaatagctgttttaaattgtagttaacatattaactttttcagaaaaaaagcatggtttatttttaataatgaaatagagaacataatacgtaatgttcagtataacagctgagttaaaacatctgccaggattaacatcagtgcgtttttgccaatgcatagaggcatttttctctaagtatgatggctaatgataactattctttgttacacattcaagtcactcccatacaagtaactagtgggtgatatgtttcactccaaagggtgtattaattctgaatgctaatcatgaagacttaagttaggacaacacttcaaaccaggaagtgtgaactgatttagattatagctacacaattttctgtgtgttagatcatggggtagtttgagtgttttcacatgtattgctataaaatcacaatgtaccaagctctggtttaatatgccattaatactaattaatagagctgctagtctctctctggacttttctctagtctctgcttctcttgcgcttcctgtatcaatagattacttagctcaagtttaccaagtttaataacctatagttactttattgaataagtttctgacatgacctctaatatacatagatatatctagaatttatttgataaaattcacacatacaaacattgagtagtttgctaatagatacaaatattagattttcacacaactctactactgctttaaaaatataagtattggtaagtgtagcaaataagccatgtacatttaatgtgttctacttgctagtattaactgtatgattaatgaatgtgttatttaatgcccaagtttgttaacttttattctagaaatcatcctctgaatttattataaatcacagatttcattgtgctctatatttagtcattctcagttgaattctagaatattccacagtacagtataagaaagtattagaaccaacttgcttgaactattttgaaccagtgttgtaattctatatgttaatcagtatttagcatttctgctccttttgagatgatgatggtttaacttcaggaaagtgacttttctgacttcttttattatcattgtgcaatttttagcaacaaaactcactatatctttgtcagttcttcagatgttacaatactgcctgctaatttgaaacagaaataacaatggtattttaaaaagtcattgatattactgatactttccattatcattatattttttactattattatgttctttttgccttgtccaccctagagaataggtacaaatgagtagtgagtatccacaaacttactaagatggagagaaggctagatggtgcatgaataatcagcatctcagcaacagagttgactggagccagtttctgacatcagagaatctctttgctgtaatcattttagccttatctcttatttataccatttttatgggaagagttgttagtgcatataagcatttagtttgaattatttaacttaaagaatttatattgcggtttctcttcagttggtcagatgccttttataaatattttagttttaaatataattgtgtagagtatgatcatgtgaagtgttaaaaataatgtggaaaactcagctatttaatgcagaggagaaatgaataggttgaccaaagtttgaaaaaactggcaccttttctggaaatctcttattgcaaagaaaagatactgagtgtatagaaaattttgtcaccagaggaaaaataaacaatatataagggtggctttcactttaacatttgggatattttggagttcttgatacctcgaaggtctccatttctattggtattttgaatatctgtaacatgtaatgtcgttcttataacagttcaacactgatttttttggtatcgatagctttatatataaacaaagatgcggacaaaatagcttaacagaagttgtgggcttttttgtggctttgcctgcctgtttgaccaaatacagggtttaattgtttgcaggctgttaactaaagggaaagcttacctgcgtattgcaagctatatattcttgccagtatacattggatgatattttaacctactggtgcctgaagttcgtgttttataacctcaacaactataaaacatcctggtgctattcactttagcattgagtgacatttttaattcctgtaccaaagagttaattttctttttggttgactgagttttcttctcacatcgttgtgtatttataaagtagaatttaatgttactaagaacagtttgattaacagatcttattttttgcatgctgctctggcaatttaatggattttaaatgtttctcatttggatttttttttaggtaggcatgtatggattttaattttgtattttaatatagcttggctactttaaaaggtagtttgataggctgaaattacaaaagataattgaagcacttttcacaagttgttttatttctgcaacaatgaataaaaaggtaagaactctaatttatataaatgaactatatagcttattgggcactttagtgaatactgaaacaaaatactaagatgaagagttaaggttcgttctcattacaaatcgagttcagcgtgtgtgtgtgtgtgtgtgtgtgtgtgtgtgtgtgtgtaatctttagtggctttaaagaataatattgccatttgtctactttgcaaataaagataacagaacacctttaaaatatatgtatgtgtacatatgtgtgtgtagatatatagagagagagatacggagagacagacagacagagagagagacagagagagagatgctttcccaagaggaaatgcatatgtaccttgatttaagcaaaactgataacagaaaattgaacttaatgaaagaaaaaagtctggatatggttactcactttacatagagtaagatttttaaaactaattttgcttagtagttaattttacaaaaatgaagagaaacaccctttaagtgtactcgtaatttaaaacacctttgaaatgtaattgtccaaatgtaatgctgctatgtatattatttgggttccagatttttccctttaaaattctcaaaacactcagtgtccttacaactgcagctaaaatggttaatcattctggcaagaaggtgacagtgtgtatattggaaaggcagacattcacatttgaaaatattttgcattattgttagctaaaatcaacctctccttgaatgtagatacaatatatggttttgcagtcaattctgaatggaaaaaaagaatcaagtctgaaatttatgtgaaatgtggcttcagatcatttgaacgatatgtagaaatctagatgaacatatcattagaggtgaaagcaaaatttgaaagcctaatgagatgaagcaacattatctctctctaatctgccaacaatattccctagattgtgttgccactgtattgattctgagtaatttggcttgtttatgcgtgatttaaatgcatgtggctgaatgcagtaatttttcaagttattgagtagtagagaattcaccactattcactgtctcccagagatgaacatataaaagaaaaaaaattctacttcatatatgtaagaataaagcaactaaatgatacaaaagtaaaaacttccaccagaatcagagatattccgacaagtgaattgtgagtctaacacgggaggacaaagctaggctcttgcaaggacagagcacacgtggatcatgctgtatgagctcactttgtgtccctggaattagtgtttttttgtgtgtgatctaactggcaagtttaatgaatagccaaaatctatgttattcttgaggctcctaaaattatgtgtgaaccccaagttctgtctagtattatatccctaaaatgcttttaatagtggtatgttacaagtggcataagaagatcctgtttttaaatttgtcaggcattttattattcagtacataatatgtatagatctgagtgctgttttccttgcattgtctattatttttaccttgtctttcccctaagagaatttgaagaaaatcttcaccaatatttctagtgttgatggtaattaggaaaatagtagttgagagatgtaagaatagtttgagaagagtgagtaaaatgggtgaaatgacaagtgggaaccatgtagctgagatgtatttgtttagatgaaaagtctacactggttcttaatgtgaaaatcaaaccatgtatctaccttaagaacaatgttgttgtttttaatttattgtagcgatttagtttttttcacgtaatatttctattttctttgcagattgtttttaatttaaattgtggaatttttacttctcaaaatgtattaagtactgtattttttgaaatcttatttttaaataaatattttttaaaaacgta

SEQ ID NO: 204449 - DNA, 3408 bp, Homo sapiens
  Payload ID: 20328
  Gene Name: zinc finger, DHHC-type containing 22
  Uniprot ID: Q8N966
  ENST ID: ENST00000319374
  CDS Start-End: 204-995
ccttactcgctggcgcccaagtgggaagccagcagctgcccgctccctcctccccacatccccgctacttgcccagttcccgaagcgaagcgcaggctgcgagccagccgggccgagtccacaactttgcagcctcgggcagggcgagagccggcgtccggggctcctcttgtcggcgaccagagctcggaatgtaatcgaggatgctggccctgcggctgctcaacgtggtggcccccgcctacttcttgtgcatctccctggtgaccttcgtgctgcagctcttcctcttcctgcccagcatgcgcgaggaccccgcggccgcccggctcttctcgcccgccctgctccacggggcgctcttcctattcctctcggccaacgccctgggcaattacgtccttgtcatccagaactccccagacgacctgggggcctgccagggggcctcggccaggaagactccatgcccctcacctagcacccacttctgccgagtgtgcgccagagtcaccctgaggcacgaccatcactgtttcttcaccggcaactgcatcggcagcaggaacatgcgcaacttcgtcctgttctgcctctacacctccctggcctgcctctactccatggtggccggcgtggcctacatctccgctgtcctttccatctccttcgcccaccccttggccttcctcacgctcctgcccacctccatcagccagttcttctccggagctgtcctgggttctgaaatgttcgtcatcctcatgctctacctctggttcgccatcggcctggcctgcgccggcttctgctgccaccagctgctgttgatcctccgcgggcagacccgccaccaggtgcggaagggggtggcagtgagggcccggccctggcgcaagaacttacaagaggtcttcggaaagaggtggctgctgggcctgctggtccccatgttcaatgtcggaagtgagagctccaagcagcaggataagtagtagacactcccgtcatttatctctctgtctctgtcttgactcctcctgagcataaaaccatggcagccttgtctccacccatgactcactacaaccttgtgctggtaaggtcctagcatcttcccctcaccttccacccatgagaacagcgtgagctggtggatcatgacaaggaggaaaaatgtccccccaggcatttctaggctcctcacgagccagccaggtggctgctagctgttaggctgcctctgctttctttccgtccccttgggatccctgctttccccctcttcctggctcatccattctccaccgtgtctcattcatcactgctgtctgctagagcccttcctctcagcccccatgttgggagaggggagtggattcttgctgctggtatgagactccctgggacctagaggctggcaaatgtttaaaatcaccacgtgtaagaggcagccaagtcagctctgccaactgctaggggagttgggaaagagtgggtgtgtgtccgcatcccctctgtaggaaaaagaacttagtagcttgctgctccctcaccaccccccaccaggttcaagaccctttttctgggagacagcaatcaatggcctgctttttccaaatgttattccctgtccaccctgccccatctggccggcccagcccagtccaggacctggctggatgcttcctgtccctggaactcttccagcctttctacttgatctccagcccccaggtctttgccagatgatgggaaggcaaggaagaagggacagggaaagataattactgataaatgaaggggatattcgactgtataaccatatggaagtgtgtgtgtgtgtgtgtgtgtgtgtgtgagagagagagagagagagatgggtggtggtgagaagtgttgttagaaacatataggaataatgcctaggggaaagggagaagtgagagggacaattgggttcatttatgccctatacaaagggcattccagcagctgaaactcttcaatgtttgaatggctgcctgtgaaggtagtgagtgccccatcactggaggtattccagcagagtctaggcagtcgtctgccaggcatgctgtggaagggatttctgtacagggtcattctaggtgagcttacacattccttccaaccccaaggttctgatgtcctggttgtgattgctggacccagaggcaagatctgcagagatgcctgtgagatatttgctttcctagaggggagtgtgggcatgggaggggtctgaaaatcaggacccaacccagccactgaagagagagtctctgcagagacagggctacctgggtggttgaggggactgacatttgaggacagggagatggagcagtgtcattgtcagtggcagggcatggggggcagtggtgagctaaggctgaggagtggagatgaccagaatataagggtgcaattcccagaccatccctgcgcatctgactgactccggtggaggcactgctgtgtgttttctgaaacctagaggaccagacctctggggcatataagggagtagggacaacacaagtgccccctcctgactgggtcccaaagccaatatgacatccatgcaggcagcagtgctgaatccatgccctgcaatgtccaaccgccaactgcagtgacccgctgatagctgcgcaacagcctgggttcttgagcagagattgggaggactttactgtggttctgccttcacaccccctagagagctaatgtagtattggctccacctgctcacatttctccctcccatactcattccttcactcatccatcctacgtatatttattgagtgccaactacgttcccagcctcttccaggcactggcaatgcagtgatgaacaggatgacaagattcatgccatcaggggcaccttgtcactgccgtctgtgcactgattcacactccctgcaaaatggtcactctgccatcttggtggttggtggggcaggtcatttggaaataaagaatgtgatagagatggctgaagaggggaagcctaggctgcctcaatggaggagtcgctgggggcattttcacccacaattctggccatacttaagcaatgggagggagagggaggaggggaagatctgggcaattttggccttgactctttcctggctccagagctcaagcttagaagccagccctgctatttccagcctcctgaaggctcagcacggtgaggcctgacatcctggggaagggcaacagggagacctacaggatgttggctgcttgcagactggtcaatgggggatgacggtggggaggttgccagatgtgagacttgagtagcatttgtacacatggccctgtattgtccttgaagaacatcaataaaatatatggttttaaattgga

SEQ ID NO: 204450 - DNA, 388 bp, Homo sapiens
  Payload ID: 20328
  Gene Name: zinc finger, DHHC-type containing 22
  ENST ID: ENST00000555327
  CDS Start-End: 267-388
ggggtgaggctcaaagaagaagctccaagttcaagctctgtgtctggataaactcccattgtctttccttctctcaaatcagagctgcccgtgggtcccagggtgatgctgggctgtgtagaggctgagtgcaggagcattaatgctagaaccagatgaggaaactggaatctaagatcacactggaatttacagacgaagaaactggaatctgagatctcacagtagtgaatggtgaatattcaaacccaggaatgtaatcgaggatgctggccctgcggctgctcaacgtggtggcccccgcctacttcttgtgcatctccctggtgaccttcgtgctgcagctcttcctcttcctgcccagcatgcgcgaggaccccgcggccgc

SEQ ID NO: 204451 - DNA, 545 bp, Homo sapiens
  Payload ID: 20328
  Gene Name: zinc finger, DHHC-type containing 22
  ENST ID: ENST00000555389
  CDS Start-End: 217-545
actcgtgcgcccagggcgggcttgtcggcatggaaaggatttcggcgccatgagggttgtttgggtttctctcagcaggagggcgggaggcgggcgcgaaggggggattttaatttcgcctcaaatgaaaacgctcttcgcaaagaaatagcccgggcagccagcgttggagagatgtgctggccaggacccgctgacacaggaatgtaatcgaggatgctggccctgcggctgctcaacgtggtggcccccgcctacttcttgtgcatctccctggtgaccttcgtgctgcagctcttcctcttcctgcccagcatgcgcgaggaccccgcggccgcccggctcttctcgcccgccctgctccacggggcgctcttcctattcctctcggccaacgccctgggcaattacgtccttgtcatccagaactccccagacgacctgggggcctgccagggggcctcggccaggaagactccatgcccctcacctagcacccacttctgccgagtgtgcgccagagtcaccctgaggcacgaccatca

SEQ ID NO: 204452 - DNA, 3778 bp, Homo sapiens
  Payload ID: 20329
  Gene Name: zinc finger, DHHC-type containing 23
  Uniprot ID: Q8IYP9
  ENST ID: ENST00000330212
  CDS Start-End: 300-1529
ggggcacccggaagcgcgcgtggacctggcgcaccgagccgggcgggcggaggggcggttgggacggcgcggggaggcgggcgcgccgcccgggccgcggcgggctgtggtcacaggtgggcggctgcggcgagggagcggccgagcggagcccgggtcccggagactcctgccgtcacgcccggggctccgcgtagcagagatcgggagacgcgtctgtgcctccggggaagccgacccatctcccctccgcctctttggctgcagttgcacctccggccagagggcaggtgcaaatcatgacacagaagggcagtatgaagcctgtgaagaaaaagaaaaccgaagaacctgaattggagcccctgtgctgctgcgagtacatagatcggaatggggaaaagaaccacgtggctacttgtttgtgtgattgtcaagatctggatgaagggtgtgatcgatggattacatgtaaatctttacagccagagacttgtgaaagaatcatggatacaatttctgatcgcctccgaattccttggcttaggggagccaaaaaagtgaacatcagcatcatccctccgcttgtcctgctgcctgtcttccttcatgtggcttcctggcatttcctcctgggggtggtggttttgacctcccttcctgtgctggcactgtggtactactacctcactcacagaaggaaagaacagaccctgtttttcctgagccttggactgttctctctgggctacatgtactatgtgttcctgcaggaagtggtccccaaagggcgtgtgggtcccgttcagctggcggttcttacctgcgggttatttctgatactcttagccttgcacagagccaagaagaatccaggctacctcagcaatccagcaagcggtgacagatctctaagcagcagccagctggagtgcctgagcagaaaagggcaggagaagaccaaagggttccctggggcagacatgtcgggcagtctcaacaatcgcacaacaaaggatgaccccaagggctcttccaagatgccagctggaagccccaccaaagcgaaggaggactggtgtgccaagtgccagctggtgcgaccagcccgggcatggcactgccggatatgtggcatctgtgtgaggagaatggatcatcattgtgtctggataaatagctgcgttggagaatcaaatcatcaagcatttatacttgcccttttgatcttcttgctcacctcggtgtatgggatcacactgaccttggacaccatttgtagagacagaagtgtcttcacagctcttttctattgtcctggagtttatgcaaattacagctcggctctgtccttcacctgcgtgtggtactctgtgatcatcacagcaggcatggcctacatcttcctgatccagctgatcaacatcagctacaatgtgactgagcgggaagtccagcaggccctccgacagaagactgggcgccggctcctctgcgggctcatcgtggacacagggttacttggatgagccaactccgcttccttcccatggataggaagggactctgtgtattattcaggtttattggcacgaagatacttgttttaagttccttgagaacccatgatggacagttgacagaatgcttaaacctgtcaaaagatgagtgatcttgtgtgggaaaagccttcccaggcgtctgtaccgaaaggagcagcaaacaaggggctaatccatgagcagtgttctgtaggctctgtgacatctttggtttataggattttggagccttttatgatctggaactatttgaggggtttcattataggccttggttctctccaggggccagatgagtttattgtggaatctttgaaaggacaaggcctctgtgaatgaatcagtcccagggaagcatttggtggtggcggcagtggaggattgcccggtgaacctataaatcagcagtctcttgggcagaggagcaagcccctcgaacatgatttcaaacaagcaggtcctcttctctcatctcacgtccttagtctctgttaatgaacatactggatgtggagtttaataaattacctactatcatctggccacttagattattatcacaccactgtggactgttcctggggggagaagaacagaccgatttgaaagattcaagggagaaagattaaggatcaggattgcatgaaagaagaaaatccttcaatatttaaaatgtttcttacaatacccacggagcacttttatggttccagccgagcgttcctgaaatgaactgaccattaacagcgcctctttgataggttaccctgatgctgctaaagtaaagccttaagtgtgtttttgggacaacgtgctgcttattccacctcagccacatatgtgtttgtgtttaggatattgtaaatctttgctaagtagtgttttccttggtgaatgaagtcattgttgtcttcaagtgtaccatctgcctagcaaaaaattgctacaaactttctcttatgcaatagtccttggtacttctaatatttttagcaagagacaattttctgtactagaatcttccactgccagaaaacacagtgccagtaaggttctacataccactgaccatctgcttaatagacatgtatttcctttgagtaggacattagcttttgattataaagctcaactagtataagcaaaaatataacatctagaagcacagttttagccaggatgtttaaaaattacagttttgtgagacttaagggtctttttaacctaggtaagtttatatgacctaacttaattgtagccatattctggtaccttccattttgaaaagtagaggttgcttaagcaagcaatggataataagagacttttcctgaggcacctgtttggaatctggttttctcagcggcagcttgacatgtgcacccttttgtattaaacactgcaagggtgatgcaggggagcaggaaagccatcctaaactcactactgagtacgattcagtatgttcctgtggatgtctgctgtgactaatataaatttcttgcagaatcagctacacttaattatgttgctgatagacaagcatccacgcttcagctggcactaagtgttttcattgtaggatcagcagcaggttaaagactgaacggttagtgaagacaaatgtcttaagaggctgcgatgtctaggttgggcttgtgacttcttagtggcctagccttcttgatggcaccttgaaagtgaacttctagaaatctacatttaaaaggcaaagctttaaaagcagagctagtctattctagttactgatgcaactaaaattctgtatttcttaagatggagccactgacgagatgtcacagtatagagcctgcagtctcaactcattgtgatcctaatggtctgggtgattggatggtttgagttgttagggattttgagtttttcattttattgcatatctgggttggatgttagactaaaggaaacccaggaatatttacctggtgttacatttaatatttaatgtaactggtctagcaacattaagggggatttctgaagccaactccggaggctgtgggctgcacattttgcactgtttttatatacttgtattcatatcctcttatcacctcagactcagacacaaggccttttacatggaaattttacaaattacttccatttatgtaaaataacgtcctgtgaccaagttgtttaaatggaaaataaagtgctttctttaaggaaaa

SEQ ID NO: 204453 - DNA, 317 bp, Homo sapiens
  Payload ID: 20329
  Gene Name: zinc finger, DHHC-type containing 23
  ENST ID: ENST00000496083
  CDS Start-End: 1-228
tacaatgtgactgagcgggaagtccagcaggccctccgacagaagactgggcgccggctcctctgcgggctcatcgtggacacagacttgtcttactcaaggaccaagtatctgattgctgatatagctcgtggtaccttccaggtacctggaagtctggaagaatttcaactaccttcctacgaagttgctgtcgcctttcttcttttactctttcctctttcataaattttacaaacttcttccatgtccgaagggtgatccagaggatcctcctttaagaataaagaaggaaaaaagtgaaatgttgagaaaaa

SEQ ID NO: 204454 - DNA, 2055 bp, Homo sapiens
  Payload ID: 20329
  Gene Name: zinc finger, DHHC-type containing 23
  ENST ID: ENST00000498275
  CDS Start-End: 263-1474
aggcgggcgcgccgcccgggccgcggcgggctgtggtcacaggtgggcggctgcggcgagggagcggccgagcggagcccgggtcccggagactcctgccgtcacgcccggggctccgcgtagcagagatcgggagacgcgtctgtgcctccggggaagccgacccatctcccctccgcctctttggctgcagttgcacctccggccagagggcgttggaggttaagcagagagagagaggcgtggacctatttacgagattatgaagcctgtgaagaaaaagaaaaccgaagaacctgaattggagcccctgtgctgctgcgagtacatagatcggaatggggaaaagaaccacgtggctacttgtttgtgtgattgtcaagatctggatgaagggtgtgatcgatggattacatgtaaatctttacagccagagacttgtgaaagaatcatggatacaatttctgatcgcctccgaattccttggcttaggggagccaaaaaagtgaacatcagcatcatccctccgcttgtcctgctgcctgtcttccttcatgtggcttcctggcatttcctcctgggggtggtggttttgacctcccttcctgtgctggcactgtggtactactacctcactcacagaaggaaagaacagaccctgtttttcctgagccttggactgttctctctgggctacatgtactatgtgttcctgcaggaagtggtccccaaagggcgtgtgggtcccgttcagctggcggttcttacctgcgggttatttctgatactcttagccttgcacagagccaagaagaatccaggctacctcagcaatccagcaagcggtgacagatctctaagcagcagccagctggagtgcctgagcagaaaagggcaggagaagaccaaagggttccctggggcagacatgtcgggcagtctcaacaatcgcacaacaaaggatgaccccaagggctcttccaagatgccagctggaagccccaccaaagcgaaggaggactggtgtgccaagtgccagctggtgcgaccagcccgggcatggcactgccggatatgtggcatctgtgtgaggagaatggatcatcattgtgtctggataaatagctgcgttggagaatcaaatcatcaagcatttatacttgcccttttgatcttcttgctcacctcggtgtatgggatcacactgaccttggacaccatttgtagagacagaagtgtcttcacagctcttttctattgtcctggagtttatgcaaattacagctcggctctgtccttcacctgcgtgtggtactctgtgatcatcacagcaggcatggcctacatcttcctgatccagctgatcaacatcagctacaatgtgactgagcgggaagtccagcaggccctccgacagaagactgggcgccggctcctctgcgggctcatcgtggacacagggttacttggatgagccaactccgcttccttcccatggataggaagggactctgtgtattattcaggtttattggcacgaagatacttgttttaagttccttgagaacccatgatggacagttgacagaatgcttaaacctgtcaaaagatgagtgatcttgtgtgggaaaagccttcccaggcgtctgtaccgaaaggagcagcaaacaaggggctaatccatgagcagtgttctgtaggctctgtgacatctttggtttataggattttggagccttttatgatctggaactatttgaggggtttcattataggccttggttctctccaggggccagatgagtttattgtggaatctttgaaaggacaaggcctctgtgaatgaatcagtcccagggaagcatttggtggtggcggcagtggaggattgcccggtgaacctataaatcagcagtctcttgggcagaggagcaagcccctcgaacatgatttcaaacaagcaggtcctcttctctcatctcacgtccttagtctctgttaatgaacatactggatgtggagtttaataaattacctactatcatctggccactt

SEQ ID NO: 204455 - DNA, 3466 bp, Homo sapiens
  Payload ID: 20329
  Gene Name: zinc finger, DHHC-type containing 23
  ENST ID: ENST00000478793
  CDS Start-End: 244-1482
gactcctgccgtcacgcccggggctccgcgtagcagagatcgggagacgcgtctgtgcctccggggaagccgacccatctcccctccgcctctttggctgcagttgcacctccggccagagggcaggcgttggaggttaagcagagagagagaggcgtggacctatttacgagatgtaagttgtgttctttccacctttaccttctgagggcttcttacgcctcatggtgacaggtgcaaatcatgacacagaagggcagtatgaagcctgtgaagaaaaagaaaaccgaagaacctgaattggagcccctgtgctgctgcgagtacatagatcggaatggggaaaagaaccacgtggctacttgtttgtgtgattgtcaagatctggatgaagggtgtgatcgatggattacatgtaaatctttacagccagagacttgtgaaagaatcatggatacaatttctgatcgcctccgaattccttggcttaggggagccaaaaaagtgaacatcagcatcatccctccgcttgtcctgctgcctgtcttccttcatgtggcttcctggcatttcctcctgggggtggtggttttgacctcccttcctgtgctggcactgtggtactactacctcactcacagaaggaaagaacagaccctgtttttcctgagccttggactgttctctctgggctacatgtactatgtgttcctgcaggaagtggtccccaaagggcgtgtgggtcccgttcagctggcggttcttacctgcgggttatttctgatactcttagccttgcacagagccaagaagaatccaggctacctcagcaatccagcaagcggtgacagatctctaagcagcagccagctggagtgcctgagcagaaaagggcaggagaagaccaaagggttccctggggcagacatgtcgggcagtctcaacaatcgcacaacaaaggatgaccccaagggctcttccaagatgccagctggaagccccaccaaagcgaaggaggactggtgtgccaagtgccagctggtgcgaccagcccgggcatggcactgccggatatgtggcatctgtgtgaggagaatggatcatcattgtgtctggataaatagctgcgttggagaatcaaatcatcaagcatttatacttgcccttttgatcttcttgctcacctcggtgtatgggatcacactgaccttggacaccatttgtagagacagaagtgtcttcacagctcttttctattgtcctggagtttatgcaaattacagctcggctctgtccttcacctgcgtgtggtactctgtgatcatcacagcaggcatggcctacatcttcctgatccagctgatcaacatcagctacaatgtgactgagcgggaagtccagcaggccctccgacagaagactgggcgccggctcctctgcgggctcatcgtggacacaggtaaggtgctagcacacttgtgactgtggctggaagaggagaacagacactcctgtggggatgctttactctcttttctggggccagatgagtttattgtggaatctttgaaaggacaaggcctctgtgaatgaatcagtcccagggaagcatttggtggtggcggcagtggaggattgcccggtgaacctataaatcagcagtctcttgggcagaggagcaagcccctcgaacatgatttcaaacaagcaggtcctcttctctcatctcacgtccttagtctctgttaatgaacatactggatgtggagtttaataaattacctactatcatctggccacttagattattatcacaccactgtggactgttcctggggggagaagaacagaccgatttgaaagattcaagggagaaagattaaggatcaggattgcatgaaagaagaaaatccttcaatatttaaaatgtttcttacaatacccacggagcacttttatggttccagccgagcgttcctgaaatgaactgaccattaacagcgcctctttgataggttaccctgatgctgctaaagtaaagccttaagtgtgtttttgggacaacgtgctgcttattccacctcagccacatatgtgtttgtgtttaggatattgtaaatctttgctaagtagtgttttccttggtgaatgaagtcattgttgtcttcaagtgtaccatctgcctagcaaaaaattgctacaaactttctcttatgcaatagtccttggtacttctaatatttttagcaagagacaattttctgtactagaatcttccactgccagaaaacacagtgccagtaaggttctacataccactgaccatctgcttaatagacatgtatttcctttgagtaggacattagcttttgattataaagctcaactagtataagcaaaaatataacatctagaagcacagttttagccaggatgtttaaaaattacagttttgtgagacttaagggtctttttaacctaggtaagtttatatgacctaacttaattgtagccatattctggtaccttccattttgaaaagtagaggttgcttaagcaagcaatggataataagagacttttcctgaggcacctgtttggaatctggttttctcagcggcagcttgacatgtgcacccttttgtattaaacactgcaagggtgatgcaggggagcaggaaagccatcctaaactcactactgagtacgattcagtatgttcctgtggatgtctgctgtgactaatataaatttcttgcagaatcagctacacttaattatgttgctgatagacaagcatccacgcttcagctggcactaagtgttttcattgtaggatcagcagcaggttaaagactgaacggttagtgaagacaaatgtcttaagaggctgcgatgtctaggttgggcttgtgacttcttagtggcctagccttcttgatggcaccttgaaagtgaacttctagaaatctacatttaaaaggcaaagctttaaaagcagagctagtctattctagttactgatgcaactaaaattctgtatttcttaagatggagccactgacgagatgtcacagtatagagcctgcagtctcaactcattgtgatcctaatggtctgggtgattggatggtttgagttgttagggattttgagtttttcattttattgcatatctgggttggatgttagactaaaggaaacccaggaatatttacctggtgttacatttaatatttaatgtaactggtctagcaacattaagggggatttctgaagccaactccggaggctgtgggctgcacattttgcactgtttttatatacttgtattcatatcctcttatcacctcagactcagacacaaggccttttacatggaaattttacaaattacttccatttatgtaaaataacgtcctgtgaccaagttgtttaaatggaaaataaagtgctttctttaagg

SEQ ID NO: 204456 - DNA, 740 bp, Homo sapiens
  Payload ID: 20329
  Gene Name: zinc finger, DHHC-type containing 23
  ENST ID: ENST00000491556
  CDS Start-End: 297-740
ggctgtcgccataggaacggctggtgcccagacggcgcctgcccaggctgggaaggggcggtgaaggcagctcagacctccaagaaccctggagccccctgtgtggccaggcggagccacagaagcctgatgaaaacgggaccccctccccctctctcttctcatttttgattgctcaggcgttggaggttaagcagagagagagaggcgtggacctatttacgagatgtaagttgtgttctttccacctttaccttctgagggcttcttacgcctcatggtgacaggtgcaaatcatgacacagaagggcagtatgaagcctgtgaagaaaaagaaaaccgaagaacctgaattggagcccctgtgctgctgcgagtacatagatcggaatggggaaaagaaccacgtggctacttgtttgtgtgattgtcaagatctggatgaagggtgtgatcgatggattacatgtaaatctttacagccagagacttgtgaaagaatcatggatacaatttctgatcgcctccgaattccttggcttaggggagccaaaaaagtgaacatcagcatcatccctccgcttgtcctgctgcctgtcttccttcatgtggcttcctggcatttcctcctgggggtggtggttttgacctcccttcctgtgctggcactgtggtactactacctcactcacagaaggaaagaacagaccctgtttttcctgagccttggactgttctct

SEQ ID NO: 204457 - DNA, 4721 bp, Homo sapiens
  Payload ID: 20330
  Gene Name: zinc finger, DHHC-type containing 24
  Uniprot ID: Q6UX98
  ENST ID: ENST00000310442
  CDS Start-End: 236-1090
aatcactccgcggcgttatccgggctccagcgccgcgggattccgagcgcctccactgctggtccgttggccagatcaactcgccgcgtgggccggccgttccctgagagtctgagcgctcgccgcacccccttccgagcttctattggccgtagcagacgtccgtctgccgctatctccgccccaatacggaagcggcctagtcctccggctccgacagctgggtgtccaggccatggggcagccctgggcggctgggagcacggacggggcgcccgcgcagctgcctctcgtgctcaccgcgctgtgggccgcggccgtgggcctggagctggcttacgtgctggtgctcggtcccgggccgccgccgctgggacccctggcccgggccttgcagctggcgctggccgccttccagctgctcaacctgctgggcaacgtggggctcttcctgcgctcggatcccagcatccgtggcgtgatgctggccggccgcggtctgggccagggctgggcttactgctaccaatgccaaagccaggtgccgccacgcagcggacactgctctgcctgccgcgtctgcatcctgcgtcgggaccaccactgccgcctgctgggccgctgcgtgggcttcggcaactaccggcccttcctgtgcctgctgcttcatgccgccggcgtcctgctccacgtctctgtgctgctgggccctgcactgtcggccctgctgcgagcccacacgcccctccacatggctgccctcctcctgcttccctggctcatgttgctcacaggcagagtgtctctggcacagtttgccttggccttcgtgacggacacgtgcgtggcgggtgcgctgctgtgcggggctgggctgctcttccatgggatgctgctgctgcggggccagaccacatgggagtgggctcggggccagcactcctatgacctgggtccctgccacaacctgcaggcagccctggggccccgctgggccctcgtctggctctggcccttcctggcctccccattgcctggggatgggatcaccttccagaccacagcagatgtgggacacacagcctcctgactccaggaagagccagagctgtgcagggaggaaggggtgagaggggggcccccacacctagactcagtaaggaagtcgggttggaccttaacatctgcattggacaactccaccccttccttggccttgcccctgcccgcctacactcctacgtgtccagggcttgggccgtgacttaggcagaggagtgcagaggagggtctggcaggggctgctcaggccgcctagctgcccctttgccaggttaataaagcactgacttgtttctcagcctccctccatctttgcatagtttctggcccctcactttgttgctggggctgtttctgggaccctctgtagggcctggaaactgcaggatgcctgagggtctcaggggctggggctctacctcccctggcctgggtgagttgggggtggggcaccagcacgccaaggcagtgtcctactgatccaggctatgagaatccaaacattctttcccaggtttggcattttatagttagaagcatttctgcaacagcagtttcatggaacctctcttagctaacctggtccatggggcagcagttacgctctaagaatccatgtggtaagatcatggtgcggcaaatggaggcagggtccaacccaggtctttgtgcttttgcctttacccttgcacagctggaggaaatgagtaggaaagaaatcaaggtaaagaaatgcgctggggctgtttgggcatctgtggagggtggtgctgacagggctaggcctgcacctctctggcctcctcaagagctgcttgttaaatgtttccgtgtaaatagaatgaatagagaccgccatttccacatggcaggcctaaacacatgtgttcgtctcagttttctcttaggatctctctaagatgatagtaaagaaaatcaaaaataatacaaagggaaagaaaacaggagggaagacagtagaacacagagcctgaccacattttcttttttctctctgttgccggggctggagtgcagtggcacgatctcggttcactgtaacctccacctcccgggttcaagtgattcggcctcccgagttgctgggattacagacacccgccactatgcccggctgatttttttttttttcttttttgagacggagttttgctcttgttgctcaggcaggagtgcaatggcgtgatctcggctcactgcaacctccgcctcctgggttcaagcgattctcctgcctcagcctcccgagtagctgggattacaggtgcccgccaccattcctggctaatttttgtatttttagtagagacgggggtttcaccatgttggccaggcaggtctcaaactcgtgaccttgtgatccgcccgccttggcctcccgaagtgctggaattacaggtgtgagccattgcgcctggccatgcccagctaatttttttgtatttttagtatagacagggtttcaccatgttggccaggctgaacttgaattcctggcacctgcctccacctccgtctcccaaagtgctaggattacaggcgtgagctaccgtgcctggctgacaattttttattattttattttattttattttattttattttatttgagacagactcttgttctgttgccaggctggagtgcagtggcacgatctcggctcactgcaagctccgccttctgggttcacgccattctcctgcctcagcctctcaagtagctgggactacaggtgcctgccaccacgccaagctaattttttgtatttttagtagagacgaggtttcaccgtgttagccaggatggtctcgatctcctgaccttgtgatccacctgcctcggcctcccaaagtgctgggattacaggtgtgagccaccactcctggccggccaggatggtcttgatctactgacctcgtgatctgcccgccttggcctcccaaagtgctgggattacaggtgtgagccaccgtgcccggccgcctggctgacattttcaaagatggaaagtggatggagaattaagagctgaaattatgtgttcccaaaaggtggggccaaaaggcaagtggaattacctgccagagccccggaggggctcaggaactccaccaggaccatggagggtgaggtgaggcttcggccaacaatggggaccgatggaaagtctatgtaaggatcagtggggtgccgctcccccacatcccacccacaccccacccacatcatgcagccagcagctacacctctgggtggggtggtgtgacgtgaggattatttgaaggataaatggaaccagagaagcttcgggtcttaggcgtactggggaggggtgggtgagaggctagaccaaaaaatggggttaagtgaaagtccatagatactgctggggggcctcccatgaaagaacatgcttgacccccaagaaccttcagagaaacccaccctctgacaggctctgcccatgcccacaaagatctgagctgcttggctggttgtttttgtaacaggcatgctctgttgctattttttaatgacaggaggaacttggtgtacctggcactttgggctgcacagacgcattagcagactcaccttgtcctgtttcatccctcgccctccacaatttcttattttctttctttctctttttattttttgagacagagtttcactcttgttacccaggctggagtgcaatgatgcgatcttggttcaccgaaacctccgcctcccgggttcaagcgattctcctgctgcagcctctcggtagctgggattacaggcatgtgccaccatgcccggctaattgtttttgtatttttagtagagacggggtttctccatgttggtcaggctggtctggaactcctgacctcaggtgatccacctgcctcggcctcccaaagtgccgggattacaggtatgagccactgcgcccagcccacaatatcttattttcatgtttttttgtgtgttttgttttatttttcgagatggagtctctctgttgcccaagctggagtgcaatggcgcgatcttggctcacttcctgggttcaagcgattctcctgccttagcctcccaagtaactgggattgcaggcacccaccatcatgccctgctaaattttgtacttttgtagagatggagtttcaccatgttggtcaggctggtcttgaactgctgacctcaggtgatctgcccaccttggcctcccaaagtgctgggattacaggtgtgagccaccatgcctggactcgttgttgttgttgtttttaattagtgaggagctacaagaacacatttataaaaattaagaggaaacagccccactgcatttgagaaggttaccatttccttcgaagttcctgctgttgccccttcctggtgggggagacactgtcctgtttcagtcattccgttgctttgctttatagttttattaatgtgtttgtgttggctttgcatgttttcaaatatatgaatgaaatcatgcagagtttattcttttacagtttgccttttcacttgattatgttcctgagatgtatccggattattgtgtgtagctgtatggcattccttttccctgctgcctagtgatccattgaaaatacaataattgatttttcta

SEQ ID NO: 204458 - DNA, 1424 bp, Homo sapiens
  Payload ID: 20330
  Gene Name: zinc finger, DHHC-type containing 24
  ENST ID: ENST00000526986
  CDS Start-End: 233-1018
cactccgcggcgttatccgggctccagcgccgcgggattccgagcgcctccactgctggtccgttggccagatcaactcgccgcgtgggccggccgttccctgagagtctgagcgctcgccgcacccccttccgagcttctattggccgtagcagacgtccgtctgccgctatctccgccccaatacggaagcggcctagtcctccggctccgacagctgggtgtccaggccatggggcagccctgggcggctgggagcacggacggggcgcccgcgcagctgcctctcgtgctcaccgcgctgtgggccgcggccgtgggcctggagctggcttacgtgctggtgctcggtcccgggccgccgccgctgggacccctggcccgggccttgcagctggcgctggccgccttccagctgctcaacctgctgggcaacgtggggctcttcctgcgctcggatcccagcatccgtggcgtgatgctggccggccgcggtctgggccagggctgggcttactgctaccaatgccaaagccaggtgccgccacgcagcggacactgctctgcctgccgcgtctgcatcctgcgtcgggaccaccactgccgcctgctgggccgctgcgtgggcttcggcaactaccggcccttcctgtgcctgctgcttcatgccgccggcgtcctgctccacgtctctgtgctgctgggccctgcactgtcggccctgctgcgagcccacacgcccctccacatggctgccctcctcctgcttccctggctcatgttgctcacagacaatccatgtcctgccacagctctgaccaccacaaagaggagtccttggtgtccacgctcgatattgtgcatgtgtctccagcagcttagtgagcaccctcgcctgcctcctgctcatctccacagggaggtcccatcaacacctcaggctcaatgctgcggaaaccagcctcatgcaccttccagcctgaggaacagtgatttgcaggcaacgtgtacctcctaggctgtccctggatttgcagagccttaaagcccactctcatcttgcaagcctctgaagccaccagttttctgagatgttcctcccggccccggagaccacggatgtggctaccttctcagaatatagatgtttccattgcggcaggccgcggcaagccggaactcaacatcaaactggccagaaacctctaggaagacggggacgctgggaaggctcatctgcaaacaagaagcgcaaacactccaatttctctggagcccccgtccctccctgccctgtcagtaactcctctgagtgagtgcctggtctaaagtcccaatctcctcacttacacccagtttaaactcatacagtttttcaggagggaaacttggggcaacatttagcaaaagccttttagtctgtg

SEQ ID NO: 204459 - DNA, 1615 bp, Homo sapiens
  Payload ID: 20330
  Gene Name: zinc finger, DHHC-type containing 24
  ENST ID: ENST00000534073
  CDS Start-End: 34-642
gtcctccggctccgacagctgggtgtccaggccatggggcagccctgggcggctgggagcacggacggggcgcccgcgcagctgcctctcgtgctcaccgcgctgtgggccgcggccgtgggcctggagctggcttacgtgctggtgctcggtcccgggccgccgccgctgggacccctggcccgggccttgcagctggcgctggccgccttccagctgctcaacctgctgggcaacgtggggctcttcctgcgctcggatcccagcatccgtggcgtgatgctggccggccgcggtctgggccagggctgggcttactgctaccaatgccaaagccaggtgccgccacgcagcggacactgctctgcctgccgcgtctgcatcctgcgtcgggaccaccactgccgcctgctgggccgctgcgtgggcttcggcaactaccggcccttcctgtgcctgctgcttcatgccgccggcgtcctgctccacgtctctgtgctgctgggccctgcactgtcggccctgctgcgagcccacacgcccctccacatggctgccctcctcctgcttccctggctcatgttgctcacagcaccttccagcctgaggaacagtgatttgcaggcaacgtgtacctcctaggctgtccctggatttgcagagatggagtctcgctctgttgtccaggctgaagtgccatggtttgatcttggctcactgcaacctccgcctcccaggctcaagcgattctcctacctcaacctcctgagtagctgggattacagccttaaagcccactctcatcttgcaagcctctgaagccaccagttttctgagatgttcctcccggccccggagaccacggatgtggctaccttctcagaatatagatgtttccattgcggcaggccgcggcaagccggaactcaacatcaaactggccagaaacctctaggaagacggggacgctgggaaggctcatctgcaaacaagaagcgcaaacactccaatttctctggagcccccgtccctccctgccctgtcagtaactcctctgagtgagtgcctggtctaaagtcccaatctcctcacttacacccagtttaaactcatacagtttttcaggagggaaacttggggcaacatttagcaaaagccttttagtctgtgccttttgactaaacgatgccacttctaggactgcatcctaaggatgtacttaaacaaccgtgcagctgggtgtggtggcccacacctgtaatcccaacactttgagaggctgaggcgggtggatcgcttgagctcaggagttcaagaccagcctgtccaacatggcaaaactttgtctctaccaaaagtacaaaacttagctgggcgtggtggtcccacagatgagaagatgaggtgagaggactgtttgagcccaggtggcataggttgcagtaagctgagattgtaccactgcacttcagcctgggcaagagaacaagattgtctcaaaaacaaacaaacaagcatgcaaggatatttgggtaaaaaggtctatagcattggtattaatagcaaaaaatgaaaaacagtttaaatgtacaataggtgacagggtaaataaatt

SEQ ID NO: 204460 - DNA, 3101 bp, Homo sapiens; identical to SEQ ID NO: 163541
  Payload ID: 20331
  Gene Name: zinc finger, DHHC-type containing 3
  Uniprot ID: Q9NYG2
  ENST ID: ENST00000296127
  CDS Start-End: 275-1258

SEQ ID NO: 204461 - DNA, 1336 bp, Homo sapiens; identical to SEQ ID NO: 163544
  Payload ID: 20331
  Gene Name: zinc finger, DHHC-type containing 3
  ENST ID: ENST00000342790
  CDS Start-End: 259-1260

SEQ ID NO: 204462 - DNA, 2687 bp, Homo sapiens; identical to SEQ ID NO: 163547
  Payload ID: 20331
  Gene Name: zinc finger, DHHC-type containing 3
  Uniprot ID: Q9NYG2
  ENST ID: ENST00000424952
  CDS Start-End: 270-1169

SEQ ID NO: 204463 - DNA, 407 bp, Homo sapiens; identical to SEQ ID NO: 163542
  Payload ID: 20331
  Gene Name: zinc finger, DHHC-type containing 3
  ENST ID: ENST00000443879
  CDS Start-End: 1-182

SEQ ID NO: 204464 - DNA, 3226 bp, Homo sapiens; identical to SEQ ID NO: 163546
  Payload ID: 20331
  Gene Name: zinc finger, DHHC-type containing 3
  ENST ID: ENST00000339420
  CDS Start-End: 1-588

SEQ ID NO: 204465 - DNA, 537 bp, Homo sapiens; identical to SEQ ID NO: 163548
  Payload ID: 20331
  Gene Name: zinc finger, DHHC-type containing 3
  ENST ID: ENST00000455235
  CDS Start-End: 404-537

SEQ ID NO: 204466 - DNA, 540 bp, Homo sapiens; identical to SEQ ID NO: 163545
  Payload ID: 20331
  Gene Name: zinc finger, DHHC-type containing 3
  ENST ID: ENST00000419642
  CDS Start-End: 1-335

SEQ ID NO: 204467 - DNA, 472 bp, Homo sapiens; identical to SEQ ID NO: 163543
  Payload ID: 20331
  Gene Name: zinc finger, DHHC-type containing 3
  ENST ID: ENST00000433512
  CDS Start-End: 188-472

SEQ ID NO: 204468 - DNA, 1259 bp, Homo sapiens
  Payload ID: 20332
  Gene Name: zinc finger, DHHC-type containing 4
  Uniprot ID: Q9NPG8
  ENST ID: ENST00000335965
  CDS Start-End: 209-1243
aagtctcgtatcgcgcccgggaggcgccggagcccagcggctggcgccagatccaggctcctggaagaaccatgtccggcagctactggtcatgccaggcacacactgctgcccaagaggagctgctgtttgaattatctgtgaatgttgggaagaggaatgccagagctgccggctgaaaattacccaaccaagagaaatctgcaggatggactttctggtcctcttcttgttctacctggcttcggtgctgatgggtcttgttcttatctgcgtctgctcgaaaacccatagcttgaaaggcctggccaggggaggagcacagatattttcctgtataattccagaatgtcttcagagagccgtgcatggattgcttcattaccttttccatacgagaaaccacaccttcattgtcctgcacctggtcttgcaagggatggtttatactgagtacacctgggaagtatttggctactgtcaggagctggagttgtccttgcattaccttcttctgccctatctgctgctaggtgtaaacctgttttttttcaccctgacttgtggaaccaatcctggcattataacaaaagcaaatgaattattatttcttcatgtttatgaatttgatgaagtgatgtttccaaagaacgtgaggtgctctacttgtgatttaaggaaaccagctcgatccaagcactgcagtgtgtgtaactggtgtgtgcaccgtttcgaccatcactgtgtttgggtgaacaactgcatcggggcctggaacatcaggtacttcctcatctacgtcttgaccttgacggcctcggctgccaccgtcgccattgtgagcaccacttttctggtccacttggtggtgatgtcagatttataccaggagacttacatcgatgaccttggacacctccatgttatggacacggtctttcttattcagtacctgttcctgacttttccacggattgtcttcatgctgggctttgtcgtggttctgagcttcctcctgggtggctacctgttgtttgtcctgtatctggcggccaccaaccagactactaacgagtggtacagaggtgactgggcctggtgccagcgttgtccccttgtggcctggcctccgtcagcagagccccaagtccaccggaacattcactcccatgggcttcggagcaaccttcaagagatctttctacctgcctttccatgtcatgagaggaagaaacaagaatgacaagtgtatgactgcc

SEQ ID NO: 204469 - DNA, 1942 bp, Homo sapiens
  Payload ID: 20332
  Gene Name: zinc finger, DHHC-type containing 4
  Uniprot ID: Q9NPG8
  ENST ID: ENST00000396706
  CDS Start-End: 444-1478
ccgcctccgcggggctgtgggaagcttgggctgtcccaggaccgtcagtctcctcctctgaccctccctttccccttgtgtgtagggccgccgtcccacccccacctcgcccgagtccggggcggccccggtgtcccctccgagcctgctgcactccacgtccccctaccagggctccagcccccagggaaatctccgaccaggcccgcccaggaggtattctgcctttgactgcaactcttgtcgtcttatgtgggtgttgaattgatctgtctctgcagccagatccaggctcctggaagaaccatgtccggcagctactggtcatgccaggcacacactgctgcccaagaggagctgctgtttgaattatctgtgaatgttgggaagaggaatgccagagctgccggctgaaaattacccaaccaagagaaatctgcaggatggactttctggtcctcttcttgttctacctggcttcggtgctgatgggtcttgttcttatctgcgtctgctcgaaaacccatagcttgaaaggcctggccaggggaggagcacagatattttcctgtataattccagaatgtcttcagagagccgtgcatggattgcttcattaccttttccatacgagaaaccacaccttcattgtcctgcacctggtcttgcaagggatggtttatactgagtacacctgggaagtatttggctactgtcaggagctggagttgtccttgcattaccttcttctgccctatctgctgctaggtgtaaacctgttttttttcaccctgacttgtggaaccaatcctggcattataacaaaagcaaatgaattattatttcttcatgtttatgaatttgatgaagtgatgtttccaaagaacgtgaggtgctctacttgtgatttaaggaaaccagctcgatccaagcactgcagtgtgtgtaactggtgtgtgcaccgtttcgaccatcactgtgtttgggtgaacaactgcatcggggcctggaacatcaggtacttcctcatctacgtcttgaccttgacggcctcggctgccaccgtcgccattgtgagcaccacttttctggtccacttggtggtgatgtcagatttataccaggagacttacatcgatgaccttggacacctccatgttatggacacggtctttcttattcagtacctgttcctgacttttccacggattgtcttcatgctgggctttgtcgtggttctgagcttcctcctgggtggctacctgttgtttgtcctgtatctggcggccaccaaccagactactaacgagtggtacagaggtgactgggcctggtgccagcgttgtccccttgtggcctggcctccgtcagcagagccccaagtccaccggaacattcactcccatgggcttcggagcaaccttcaagagatctttctacctgcctttccatgtcatgagaggaagaaacaagaatgacaagtgtatgactgcctttgagctgtagttcccgtttatttacacatgtggatcctcgttttccaagcatggcttgtttgttttgatttctgctgtgcttataaatcactttcggtgggcaagggagagaggggaaaatgggtgttgactgaggaatcccccttgcttgtcttcttttgaaaccgggcatctctgaagtcctggtgtcaaggggatcaagagatgacttctcagaggttctaggtgatgctgagaccttggtgtctctaaactctgggcatgtggacaggaggggcttgcggccgtgtctctgacctgtgtgatgtgcaggagggtctcattgactcagcgcctgcgcgttgtgcctggctgtgctctcttttatgccccctctattctcctctctcccccaggggattttcatctcaacaacagagtgtcctcacccaggcctgccttccggc

SEQ ID NO: 204470 - DNA, 1461 bp, Homo sapiens
  Payload ID: 20332
  Gene Name: zinc finger, DHHC-type containing 4
  Uniprot ID: Q9NPG8
  ENST ID: ENST00000396707
  CDS Start-End: 359-1393
gatgtcacgagcccgcaggaagtctcgtatcgcgcccgggaggcgccggagcccagcggctggcgggccgccgtcccacccccacctcgcccgagtccggggcggccccggtgtcccctccgagcctgctgcactccacgtccccctaccagggctccagcccccagggaaatctccgaccaggcccgcccaggagccagatccaggctcctggaagaaccatgtccggcagctactggtcatgccaggcacacactgctgcccaagaggagctgctgtttgaattatctgtgaatgttgggaagaggaatgccagagctgccggctgaaaattacccaaccaagagaaatctgcaggatggactttctggtcctcttcttgttctacctggcttcggtgctgatgggtcttgttcttatctgcgtctgctcgaaaacccatagcttgaaaggcctggccaggggaggagcacagatattttcctgtataattccagaatgtcttcagagagccgtgcatggattgcttcattaccttttccatacgagaaaccacaccttcattgtcctgcacctggtcttgcaagggatggtttatactgagtacacctgggaagtatttggctactgtcaggagctggagttgtccttgcattaccttcttctgccctatctgctgctaggtgtaaacctgttttttttcaccctgacttgtggaaccaatcctggcattataacaaaagcaaatgaattattatttcttcatgtttatgaatttgatgaagtgatgtttccaaagaacgtgaggtgctctacttgtgatttaaggaaaccagctcgatccaagcactgcagtgtgtgtaactggtgtgtgcaccgtttcgaccatcactgtgtttgggtgaacaactgcatcggggcctggaacatcaggtacttcctcatctacgtcttgaccttgacggcctcggctgccaccgtcgccattgtgagcaccacttttctggtccacttggtggtgatgtcagatttataccaggagacttacatcgatgaccttggacacctccatgttatggacacggtctttcttattcagtacctgttcctgacttttccacggattgtcttcatgctgggctttgtcgtggttctgagcttcctcctgggtggctacctgttgtttgtcctgtatctggcggccaccaaccagactactaacgagtggtacagaggtgactgggcctggtgccagcgttgtccccttgtggcctggcctccgtcagcagagccccaagtccaccggaacattcactcccatgggcttcggagcaaccttcaagagatctttctacctgcctttccatgtcatgagaggaagaaacaagaatgacaagtgtatgactgcctttgagctgtagttcccgtttatttacacatgtggatcctcgttttccaagc

SEQ ID NO: 204471 - DNA, 1485 bp, Homo sapiens
  Payload ID: 20332
  Gene Name: zinc finger, DHHC-type containing 4
  Uniprot ID: Q9NPG8
  ENST ID: ENST00000396709
  CDS Start-End: 442-1476
cccgggaggcgccggagcccagcggctggcggtaaggccgcctccgcggggctgtgggaagcttgggctgtcccaggaccgtcagtctcctcctctgaccctccctttccccttgtgtgtagggccgccgtcccacccccacctcgcccgagtccggggcggccccggtgtcccctccgagcctgctgcactccacgtccccctaccagggctccagcccccagggaaatctccgaccaggcccgcccaggagccagatccaggctcctggaagaaccatgtccggcagctactggtcatgccaggcacacactgctgcccaagaggagctgctgtttgaattatctgtgaatgttgggaagaggaatgccagagctgccggctgaaaattacccaaccaagagaaatgtaggctgggtaccctgaatcaccccctgcaggatggactttctggtcctcttcttgttctacctggcttcggtgctgatgggtcttgttcttatctgcgtctgctcgaaaacccatagcttgaaaggcctggccaggggaggagcacagatattttcctgtataattccagaatgtcttcagagagccgtgcatggattgcttcattaccttttccatacgagaaaccacaccttcattgtcctgcacctggtcttgcaagggatggtttatactgagtacacctgggaagtatttggctactgtcaggagctggagttgtccttgcattaccttcttctgccctatctgctgctaggtgtaaacctgttttttttcaccctgacttgtggaaccaatcctggcattataacaaaagcaaatgaattattatttcttcatgtttatgaatttgatgaagtgatgtttccaaagaacgtgaggtgctctacttgtgatttaaggaaaccagctcgatccaagcactgcagtgtgtgtaactggtgtgtgcaccgtttcgaccatcactgtgtttgggtgaacaactgcatcggggcctggaacatcaggtacttcctcatctacgtcttgaccttgacggcctcggctgccaccgtcgccattgtgagcaccacttttctggtccacttggtggtgatgtcagatttataccaggagacttacatcgatgaccttggacacctccatgttatggacacggtctttcttattcagtacctgttcctgacttttccacggattgtcttcatgctgggctttgtcgtggttctgagcttcctcctgggtggctacctgttgtttgtcctgtatctggcggccaccaaccagactactaacgagtggtacagaggtgactgggcctggtgccagcgttgtccccttgtggcctggcctccgtcagcagagccccaagtccaccggaacattcactcccatgggcttcggagcaaccttcaagagatctttctacctgcctttccatgtcatgagaggaagaaacaagaatgacaagtgtat

SEQ ID NO: 204472 - DNA, 1552 bp, Homo sapiens
  Payload ID: 20332
  Gene Name: zinc finger, DHHC-type containing 4
  Uniprot ID: Q9NPG8
  ENST ID: ENST00000396713
  CDS Start-End: 450-1484
gatgtcacgagcccgcaggaagtctcgtatcgcgcccgggaggcgccggagcccagcggctggcggtaaggccgcctccgcggggctgtgggaagcttgggctgtcccaggaccgtcagtctcctcctctgaccctccctttccccttgtgtgtagggccgccgtcccacccccacctcgcccgagtccggggcggccccggtgtcccctccgagcctgctgcactccacgtccccctaccagggctccagcccccagggaaatctccgaccaggcccgcccaggagccagatccaggctcctggaagaaccatgtccggcagctactggtcatgccaggcacacactgctgcccaagaggagctgctgtttgaattatctgtgaatgttgggaagaggaatgccagagctgccggctgaaaattacccaaccaagagaaatctgcaggatggactttctggtcctcttcttgttctacctggcttcggtgctgatgggtcttgttcttatctgcgtctgctcgaaaacccatagcttgaaaggcctggccaggggaggagcacagatattttcctgtataattccagaatgtcttcagagagccgtgcatggattgcttcattaccttttccatacgagaaaccacaccttcattgtcctgcacctggtcttgcaagggatggtttatactgagtacacctgggaagtatttggctactgtcaggagctggagttgtccttgcattaccttcttctgccctatctgctgctaggtgtaaacctgttttttttcaccctgacttgtggaaccaatcctggcattataacaaaagcaaatgaattattatttcttcatgtttatgaatttgatgaagtgatgtttccaaagaacgtgaggtgctctacttgtgatttaaggaaaccagctcgatccaagcactgcagtgtgtgtaactggtgtgtgcaccgtttcgaccatcactgtgtttgggtgaacaactgcatcggggcctggaacatcaggtacttcctcatctacgtcttgaccttgacggcctcggctgccaccgtcgccattgtgagcaccacttttctggtccacttggtggtgatgtcagatttataccaggagacttacatcgatgaccttggacacctccatgttatggacacggtctttcttattcagtacctgttcctgacttttccacggattgtcttcatgctgggctttgtcgtggttctgagcttcctcctgggtggctacctgttgtttgtcctgtatctggcggccaccaaccagactactaacgagtggtacagaggtgactgggcctggtgccagcgttgtccccttgtggcctggcctccgtcagcagagccccaagtccaccggaacattcactcccatgggcttcggagcaaccttcaagagatctttctacctgcctttccatgtcatgagaggaagaaacaagaatgacaagtgtatgactgcctttgagctgtagttcccgtttatttacacatgtggatcctcgttttccaagc

SEQ ID NO: 204473 - DNA, 1348 bp, Homo sapiens
  Payload ID: 20332
  Gene Name: zinc finger, DHHC-type containing 4
  Uniprot ID: Q9NPG8
  ENST ID: ENST00000405731
  CDS Start-End: 293-1327
gatgtcacgagcccgcaggaagtctcgtatcgcgcccgggaggcgccggagcccagcggctggcggtattctgcctttgactgcaactcttgtcgtcttatgtgggtgttgaattgatctgtctctgcagccagatccaggctcctggaagaaccatgtccggcagctactggtcatgccaggcacacactgctgcccaagaggagctgctgtttgaattatctgtgaatgttgggaagaggaatgccagagctgccggctgaaaattacccaaccaagagaaatctgcaggatggactttctggtcctcttcttgttctacctggcttcggtgctgatgggtcttgttcttatctgcgtctgctcgaaaacccatagcttgaaaggcctggccaggggaggagcacagatattttcctgtataattccagaatgtcttcagagagccgtgcatggattgcttcattaccttttccatacgagaaaccacaccttcattgtcctgcacctggtcttgcaagggatggtttatactgagtacacctgggaagtatttggctactgtcaggagctggagttgtccttgcattaccttcttctgccctatctgctgctaggtgtaaacctgttttttttcaccctgacttgtggaaccaatcctggcattataacaaaagcaaatgaattattatttcttcatgtttatgaatttgatgaagtgatgtttccaaagaacgtgaggtgctctacttgtgatttaaggaaaccagctcgatccaagcactgcagtgtgtgtaactggtgtgtgcaccgtttcgaccatcactgtgtttgggtgaacaactgcatcggggcctggaacatcaggtacttcctcatctacgtcttgaccttgacggcctcggctgccaccgtcgccattgtgagcaccacttttctggtccacttggtggtgatgtcagatttataccaggagacttacatcgatgaccttggacacctccatgttatggacacggtctttcttattcagtacctgttcctgacttttccacggattgtcttcatgctgggctttgtcgtggttctgagcttcctcctgggtggctacctgttgtttgtcctgtatctggcggccaccaaccagactactaacgagtggtacagaggtgactgggcctggtgccagcgttgtccccttgtggcctggcctccgtcagcagagccccaagtccaccggaacattcactcccatgggcttcggagcaaccttcaagagatctttctacctgcctttccatgtcatgagaggaagaaacaagaatgacaagtgtatgactgcctttga

SEQ ID NO: 204474 - DNA, 807 bp, Homo sapiens
  Payload ID: 20332
  Gene Name: zinc finger, DHHC-type containing 4
  ENST ID: ENST00000483589
  CDS Start-End: 312-807
ggagcccagcggctggcgggccgccgtcccacccccacctcgcccgagtccggggcggccccggtgtcccctccgagcctgctgcactccacgtccccctaccagggctccagcccccagggaaatctccgaccaggcccgcccaggagccagatccaggctcctggaagaaccatgtccggcagctactggtcatgccaggcacacactgctgcccaagaggagctgctgtttgaattatctgtgaatgttgggaagaggaatgccagagctgccggctgaaaattacccaaccaagagaaatctgcaggatggactttctggtcctcttcttgttctacctggcttcggtgctgatgggtcttgttcttatctgcgtctgctcgaaaacccatagcttgaaaggcctggccaggggaggagcacagatattttcctgtataattccagaatgtcttcagagagccgtgcatggattgcttcattaccttttccatacgagaaaccacaccttcattgtcctgcacctggtcttgcaagggatggtttatactgagtacacctgggaagtatttggctactgtcaggagctggagttgtccttgcattaccttcttctgccctatctgctgctaggtgtaaacctgttttttttcaccctgacttgtggaaccaatcctggcattataacaaaagcaaatgaattattatttcttcatgtttatgaatttgatgaagtgatgtttccaaagaacgtgaggtgctctacttgtgatttaaggaaaccagctcgatccaagcactgca

SEQ ID NO: 204475 - DNA, 4666 bp, Homo sapiens
  Payload ID: 20333
  Gene Name: zinc finger, DHHC-type containing 5
  Uniprot ID: Q9C0B5
  ENST ID: ENST00000287169
  CDS Start-End: 1363-3510
ggggttgggcgcggcagcgcgagccgcatgaatgagacaaacgtgcgccgcgcgagacgtcgcgcgagcccggactagggagccaatgggaacgctggaagggttcgagacccggcactgagggcaacggccgcgcgccggctccgagacgagcgacgcctggcgggagcgcgcggcagcggggcgggcgtggagcgtgcgggggccgcgcgctgcttctctgaggcaggacggcactgccgggaggcggcggtgacaacgacggcggtggtgacgggcaccgggctcgcgggtgagacacagtaacctggttgaactctgcatctggaaagctgaagactgaagaaagataagagacattgactagtctggaaacagggacatctttggaacttcgttttcatccacagtaaacttttgaagtgtcatcaattggaattgatttcttcatcttattctgcctattgggaagaacatggcttcaaggattttaagtttccctttagttttacatgaactttgtaggaaacagagcccttaaagggcttgggaataacaagaagagattgaagacagagaagcttgccctgttttccttgccccttcaaagaaaaggatttacagctcaaacttagaacagctgttgtccagctttagccatcaagagagaaataaattaaaccaccattgccagactacaagccctggtgaagtcagggtgtgggagtggtggcattgagaagactacctaaaagagacaaagactgcagtaaacaaagctcctctttaaagttggaaggggcctcaggttccttcttggattgaaatagaaatagaaacacagggcacacctcttttaggtgcagctcacattttatggaactgtagtcgtggaggtactatagtatctcagaagaatttttctttgcccaaagtttttttgccataccctgatattctctccttcttttgaagacctgcctccatccatgagctgtatcttgatctgtctgactgtccatgttttccacctgcaaccatttgcatgtgtacagcctactgtttgtctccagtttttaaactgtacaagttgtgtttcttaatcttcccttctgccttgttctggggaggtggttattcatcatttggaatcacctttccccctcccatgtgctttccttcatttgagatcttttgacctttggctttatttgggagggggaagggtgataaagttttctgtttccctggttttcttttgtactcctctctgttgcttccctcctcccattttcttgtctgttctgccgctgtgtgggcctgggctatgcggcagggcagatttcccatcagagctccaacatgcccgcagagtctggaaagagattcaaacccagcaagtatgtcccggtctctgcagccgccatcttcctagtgggagctacgacactcttctttgcctttacgtgtccaggactaagcctgtatgtgtcacctgcagtgcccatctacaatgcaattatgtttctctttgtgttggccaacttcagcatggccaccttcatggacccagggattttccctcgagctgaggaggatgaggacaaggaagatgatttccgagctcccctttacaaaacagtggagataaagggcatccaggtgcgcatgaaatggtgtgccacctgccgcttttaccgtccccctcgatgttcccactgcagtgtctgtgacaactgtgtggaggaatttgatcatcactgcccctgggtgaataactgtattggtcgccggaactaccgttattttttccttttcctcctttccctgacagcccacattatgggtgtgtttggctttggcctcctttatgtcctctaccacatagaggaactctcaggggtccgcacggctgtcacaatggcagtaatgtgtgtggctggcttattcttcatccctgtagctggcctcacgggatttcacgtggttctggtggccaggggacgcacaaccaatgaacaggttacgggtaaattccggggaggtgtgaaccccttcaccaatggctgctgtaacaatgtcagccgtgttctctgcagttctccagcacccaggtatttggggagaccaaagaaagagaagacaattgtaatcagacctcccttccttcgaccagaagtttcagatgggcagataactgtgaagatcatggataatggcatccagggagagctgaggagaacaaagtctaagggaagcctggagataacagagagccagtctgcagatgctgaacctccacctcctcctaagccagacctgagccgttacacagggttgcgaacacacctcggcttggctactaatgaggatagtagcttattggccaaggacagccccccgacacctaccatgtacaagtatcggccgggttacagtagcagcagtacgtcagctgccatgccgcattcctccagcgccaagttgagtcgtggggacagcttgaaggagccaacctcaattgcagagagcagccgtcaccccagctaccgctcagagcccagcttggaaccagagagcttccgttctcctacctttggcaaaagttttcacttcgatccactatccagtggctcacgctcctccagcctcaagtcagcccagggcacaggctttgagctgggccagttgcaatccattcgttcagagggcaccacctccacctcctataagagcctggccaaccagacacgcaatggaagcctatcttatgacagcttgctcacaccttcagacagccctgattttgagtcagtgcaggcagggcctgagccagacccacctttaggctatacctctcccttcctgtcagccaggctggcccagcaacgggaagctgagaggcacccacgtttggtgccaactggcccaacacaccgagagccctcaccagtccgttacgacaatctgtcgcgccacattgtggcctctctccaggaacgagagaagttgctgcgccagtcacccccactcccgggccgtgaggaagaaccaggcttgggggactcaggcattcagtcaacaccaggctcgggccatgcccctcgtactagttcctcctcagatgattcaaagagatcacctttgggcaagactccactgggacgcccagctgtcccccgttttggcaagccagatgggctaaggggccggggagtagggtcccctgaaccaggcccaacagccccatacctgggccgatcgatgtcttacagcagccaaaaagcccaacctggtgtctctgagacagaagaagtggccttgcagccattactgacacccaaagatgaagtacagctgaagaccacctacagcaaatccaacgggcagcccaagagcttaggctcagcctcccctggcccaggccagccacctctcagtagccccacgaggggaggagtcaagaaggtgtcaggggttggtggtaccacctatgagatttcggtgtgagccttcggcacctcccctccccaacgcctctgcgcctacaccaaagggccccaggtggccaccttccttccctcaaggggctcccctcccgtgcatggacattttttaaaccaccgattccaagaggatgaggagtgttttctaaaatgcagtaggcttggggagtcggagagttggggccctgagactggggtagcaacccccccttttatcttttaagaccttcccttccttgatccctggaccagactcagtggacatttgtgcaattgctcgccctggagggaaccagatcatttttaaaccagaaataattttttttattattgttacggattctatttttttcctcttctgcgttaccaggtgtgtgtgtacatataatatatatatatatatattataaatatcaaagaaattatatatctatcctgggatgggaaaatgagggagggatacatatacggagggggatcttactcttcccattcctcagaccagcaggaaaagaggggagacgtcagtctttttcctgtggttccctctcatttgtcccagttactaactacggaaatagcatcctctgctggtgctaagtgtgattaggaagaagcctggggagaggtgagtctggaattttggtcacaagagggaaggacttggagaggagaattagttttctaggctcattggcatttagtttccctaggaaaggggtcaaaacttcaagacactggtggtggtgggagatcaggaaaataacttggcctagctcaaacaatattggataatcccctccttgggggagagggattagagtgtgctcctactggccccttggagcctcccctagcttacacagttaacttgattttaaaatccaaggccaggagagaagaatccaaaaagcaatatttttcatcacatgccaaaaacgggggatagagagaaggagtggcaggcctaggcccctccgattgtcccttgggggttacccctcagcccacctcactatggtgctgggtagaggggatacctgggttctaacctctaaataggggagatcccagcctccacaaagaggcccttttattttttattctgattagccattttaaaccaacgaggaataaaaagaaatcctgatctaaccagc

SEQ ID NO: 204476 - DNA, 577 bp, Homo sapiens
  Payload ID: 20333
  Gene Name: zinc finger, DHHC-type containing 5
  ENST ID: ENST00000528177
  CDS Start-End: 164-577
gcgctgcttctctgaggcaggacggcactgccgggaggcggcggtgacaacgacggcggtggtgacgggcaccgggctcgcggctgaggaggatgaggacaaggaagatgatttccgagctcccctttacaaaacagtggagataaagggcatccaggtgcgcatgaaatggtgtgccacctgccgcttttaccgtccccctcgatgttcccactgcagtgtctgtgacaactgtgtggaggaatttgatcatcactgcccctgggtgaataactgtattggtcgccggaactaccgttattttttccttttcctcctttccctgacagcccacattatgggtgtgtttggctttggcctcctttatgtcctctaccacatagaggaactctcaggggtccgcacggctgtcacaatggcagtaatgtgtgtggctggcttattcttcatccctgtagctggcctcacgggatttcacgtggttctggtggccaggggacgcacaaccaatgaacaggttacgggtaaattccggggaggtgtgaaccccttcaccaatggctgctgtaacaatgtc

SEQ ID NO: 204477 - DNA, 2817 bp, Homo sapiens
  Payload ID: 20333
  Gene Name: zinc finger, DHHC-type containing 5
  Uniprot ID: Q9C0B5
  ENST ID: ENST00000527985
  CDS Start-End: 497-2485
cttacgtgcgcgctctcgtcttctcgcgtgcgtacgtcgttgtgttgctgcagccaatcaggccgcgaggtcgccgcggtcgccagggttcgcgcgcacgccccagatcggagtcggggtgggggctatgggtgaatgggagagtgagcggggttgggcgcggcagcgcgagccgcatgaatgagacaaacgtgcgccgcgcgagacgtcgcgcgagcccggactagggagccaatgggaacgctggaagggttcgagacccggcactgagggcaacggccgcgcgccggctccgagacgagcgacgcctggcgggagcgcgcggcagcggggcgggcgtggagcgtgcgggggccgcgcgctgcttctctgaggcaggacggcactgccgggaggcggcggtgacaacgacggcggtggtgacgggcaccgggctcgcgggtgtccaggactaagcctgtatgtgtcacctgcagtgcccatctacaatgcaattatgtttctctttgtgttggccaacttcagcatggccaccttcatggacccagggattttccctcgagctgaggaggatgaggacaaggaagatgatttccgagctcccctttacaaaacagtggagataaagggcatccaggtgcgcatgaaatggtgtgccacctgccgcttttaccgtccccctcgatgttcccactgcagtgtctgtgacaactgtgtggaggaatttgatcatcactgcccctgggtgaataactgtattggtcgccggaactaccgttattttttccttttcctcctttccctgacagcccacattatgggtgtgtttggctttggcctcctttatgtcctctaccacatagaggaactctcaggggtccgcacggctgtcacaatggcagtaatgtgtgtggctggcttattcttcatccctgtagctggcctcacgggatttcacgtggttctggtggccaggggacgcacaaccaatgaacaggttacgggtaaattccggggaggtgtgaaccccttcaccaatggctgctgtaacaatgtcagccgtgttctctgcagttctccagcacccaggtatttggggagaccaaagaaagagaagacaattgtaatcagacctcccttccttcgaccagaagtttcagatgggcagataactgtgaagatcatggataatggcatccagggagagctgaggagaacaaagtctaagggaagcctggagataacagagagccagtctgcagatgctgaacctccacctcctcctaagccagacctgagccgttacacagggttgcgaacacacctcggcttggctactaatgaggatagtagcttattggccaaggacagccccccgacacctaccatgtacaagtatcggccgggttacagtagcagcagtacgtcagctgccatgccgcattcctccagcgccaagttgagtcgtggggacagcttgaaggagccaacctcaattgcagagagcagccgtcaccccagctaccgctcagagcccagcttggaaccagagagcttccgttctcctacctttggcaaaagttttcacttcgatccactatccagtggctcacgctcctccagcctcaagtcagcccagggcacaggctttgagctgggccagttgcaatccattcgttcagagggcaccacctccacctcctataagagcctggccaaccagacacgcaatggaagcctatcttatgacagcttgctcacaccttcagacagccctgattttgagtcagtgcaggcagggcctgagccagacccacctttaggctatacctctcccttcctgtcagccaggctggcccagcaacgggaagctgagaggcacccacgtttggtgccaactggcccaacacaccgagagccctcaccagtccgttacgacaatctgtcgcgccacattgtggcctctctccaggaacgagagaagttgctgcgccagtcacccccactcccgggccgtgaggaagaaccaggcttgggggactcaggcattcagtcaacaccaggctcgggccatgcccctcgtactagttcctcctcagatgattcaaagagatcacctttgggcaagactccactgggacgcccagctgtcccccgttttggcaagccagatgggctaaggggccggggagtagggtcccctgaaccaggcccaacagccccatacctgggccgatcgatgtcttacagcagccaaaaagcccaacctggtgtctctgagacagaagaagtggccttgcagccattactgacacccaaagatgaagtacagctgaagaccacctacagcaaatccaacgggcagcccaagagcttaggctcagcctcccctggcccaggccagccacctctcagtagccccacgaggggaggagtcaagaaggtgtcaggggttggtggtaccacctatgagatttcggtgtgagccttcggcacctcccctccccaacgcctctgcgcctacaccaaagggccccaggtggccaccttccttccctcaaggggctcccctcccgtgcatggacattttttaaaccaccgattccaagaggatgaggagtgttttctaaaatgcagtaggcttggggagtcggagagttggggccctgagactggggtagcaacccccccttttatcttttaagaccttcccttccttgatccctggaccagactcagtggacatttgtgcaattgctcgccctggagggaaccagatcatttttaaaccagaaataattttttttattattgtta

SEQ ID NO: 204478 - DNA, 440 bp, Homo sapiens
  Payload ID: 20333
  Gene Name: zinc finger, DHHC-type containing 5
  ENST ID: ENST00000532842
  CDS Start-End: 132-440
tgcagccgccatcttcctagtgggagctacgacactcttctttgcctttacctgaggaggatgaggacaaggaagatgatttccgagctcccctttacaaaacagtggagataaagggcatccaggtgcgcatgaaatggtgtgccacctgccgcttttaccgtccccctcgatgttcccactgcagtgtctgtgacaactgtgtggaggaatttgatcatcactgcccctgggtgaataactgtattggtcgccggaactaccgttattttttccttttcctcctttccctgacagcccacattatgggtgtgtttggctttggcctcctttatgtcctctaccacatagaggaactctcaggggtccgcacggctgtcacaatggcagtaatgtgtgtggctggcttattcttcatccctgtagctggcctcacggga

SEQ ID NO: 204479 - DNA, 901 bp, Homo sapiens
  Payload ID: 20333
  Gene Name: zinc finger, DHHC-type containing 5
  ENST ID: ENST00000529447
  CDS Start-End: 1-901
cgagctgaggaggatgaggacaaggaagatgatttccgagctcccctttacaaaacagtggagataaagggcatccaggtgcgcatgaaatggtgtgccacctgccgcttttaccgtccccctcgatgttcccactgcagtgtctgtgacaactgtgtggaggttacgggtaaattccggggaggtgtgaaccccttcaccaatggctgctgtaacaatgtcagccgtgttctctgcagttctccagcacccaggtatttggggagaccaaagaaagagaagacaattgtaatcagacctcccttccttcgaccagaagtttcagatgggcagataactgtgaagatcatggataatggcatccagggagagctgaggagaacaaagtctaagggaagcctggagataacagagagccagtctgcagatgctgaacctccacctcctcctaagccagacctgagccgttacacagggttgcgaacacacctcggcttggctactaatgaggatagtagcttattggccaaggacagccccccgacacctaccatgtacaagtatcggccgggttacagtagcagcagtacgtcagctgccatgccgcattcctccagcgccaagttgagtcgtggggacagcttgaaggagccaacctcaattgcagagagcagccgtcaccccagctaccgctcagagcccagcttggaaccagagagcttccgttctcctacctttggcaaaagttttcacttcgatccactatccagtggctcacgctcctccagcctcaagtcagcccagggcacaggctttgagctgggccagttgcaatccattcgttcagagggcaccacctccacctcctataagagcctggccaaccagacacgcaatggaa

SEQ ID NO: 204480 - DNA, 1721 bp, Homo sapiens
  Payload ID: 20334
  Gene Name: zinc finger, DHHC-type containing 6
  Uniprot ID: Q9H6R6
  ENST ID: ENST00000369404
  CDS Start-End: 412-1641
gggcgctggccgagaggtgctcggcttgtagcaggtcccgcactccagcctctcgctgccagggtttgctctctgcttgtcctgggctgaggtgtccatgacggagtcatccaaggaggaaaaaatctgttccgggtgagcccaggccgccccggatatgcgatggctgaggagcagacaccagggaccacactgaggttgggtttcagaccaagacactggattctcctagttaagataaagagctttgggtgcctgacagtgaaaatggtgtaatctgcgttaacagttcacagcttgaaggcatgacaattaaagaacacacatggacttgtggcacatggaaatgtgcgcacagaaaaaggaaatctataattcttttaaagtaggaaggcattcttccttgccaaaatgggtacattctgttcggttatcaagtttgaaaatctacaagaattaaagagactgtgtcactggggtcccatcatagcccttggtgttatagcaatatgttctaccatggccatgattgactctgtgttgtggtattggcccttacatacaactggaggaagtgtgaatttcatcatgttgataaattggactgtcatgattctttataattacttcaatgccatgtttgtcggtccgggctttgtccctctggggtggaaaccggataccatgtatctccagtattgtaaagtctgccaagcatacaaggcaccacgttcacatcactgcagaaagtgtaacagatgtgtgatgaagatggaccatcactgtccttggatcaacaactgttgtggttaccaaaatcatgcttcgttcacactgtttctccttttagcaccactgggttgtatccatgctgctttcatttttgtgatgactatgtacacacagctttatcatcggctctcctttgggtggaacacagtgaagatcgacatgagtgcagcccggagagatcctcttccaattgttccatttggattagctgcatttgctaccaccttgtttgccttgggattagctttaggaacaaccatagctgttgggatgttgttttttatccagatgaaaataattctcagaaacaaaacttctattgagtcatggattgaagagaaggctaaagatcgaattcagtattatcaactagatgaagtctttgtttttccatatgatatgggaagtagatggaggaactttaaacaggtatttacgtggtcaggggtccctgaaggagatggacttgagtggccagtaagagaaggctgtcaccaatacagcttaacaatagaacagttgaaacaaaaagcagataagagagtcagaagtgttcgctataaagtaatagaagattatagtggtgcctgctgccctctgaataaaggaatcaaaaccttcttcacaagtccctgcaccgaagagcctcgaatacagctgcaaaaaggggaattcattttagccacaagaggtttacgatactggttatatggagacaaaattcttgatgattcctttatagaaggtgtttcaagaataaggggttggttccctagaaaatgtgtggaaaagtgtccctgtgatgctgaaacagatcaagccccagagggggagaagaaaaatagatagctgctgttaaaacaaaattatcctttaagtctgcttaattacttgaaaattgtacatattactaaagaattatgcaatga

SEQ ID NO: 204481 - DNA, 2170 bp, Homo sapiens
  Payload ID: 20334
  Gene Name: zinc finger, DHHC-type containing 6
  Uniprot ID: Q9H6R6
  ENST ID: ENST00000369405
  CDS Start-End: 425-1666
agagtcctggcgagggcgctggccgagaggtgctcggcttgtagcaggtcccgcactccagcctctcgctgccagggtttgctctctgcttgtcctgggctgaggtgtccatgacggagtcatccaaggaggaaaaaatctgttccgggtgagcccaggccgccccggatatgcgatggctgaggagcagacaccagggaccacactgaggttgggtttcagaccaagacactggattctcctagttaagataaagagctttgggtgcctgacagtgaaaatggtgtaatctgcgttaacagttcacagcttgaaggcatgacaattaaagaacacacatggacttgtggcacatggaaatgtgcgcacagaaaaaggaaatctataattcttttaaagtaggaaggcattcttccttgccaaaatgggtacattctgttcggttatcaagtttgaaaatctacaagaattaaagagactgtgtcactggggtcccatcatagcccttggtgttatagcaatatgttctaccatggccatgattgactctgtgttgtggtattggcccttacatacaactggaggaagtgtgaatttcatcatgttgataaattggactgtcatgattctttataattacttcaatgccatgtttgtcggtccgggctttgtccctctggggtggaaaccggaaatttctcaggataccatgtatctccagtattgtaaagtctgccaagcatacaaggcaccacgttcacatcactgcagaaagtgtaacagatgtgtgatgaagatggaccatcactgtccttggatcaacaactgttgtggttaccaaaatcatgcttcgttcacactgtttctccttttagcaccactgggttgtatccatgctgctttcatttttgtgatgactatgtacacacagctttatcatcggctctcctttgggtggaacacagtgaagatcgacatgagtgcagcccggagagatcctcttccaattgttccatttggattagctgcatttgctaccaccttgtttgccttgggattagctttaggaacaaccatagctgttgggatgttgttttttatccagatgaaaataattctcagaaacaaaacttctattgagtcatggattgaagagaaggctaaagatcgaattcagtattatcaactagatgaagtctttgtttttccatatgatatgggaagtagatggaggaactttaaacaggtatttacgtggtcaggggtccctgaaggagatggacttgagtggccagtaagagaaggctgtcaccaatacagcttaacaatagaacagttgaaacaaaaagcagataagagagtcagaagtgttcgctataaagtaatagaagattatagtggtgcctgctgccctctgaataaaggaatcaaaaccttcttcacaagtccctgcaccgaagagcctcgaatacagctgcaaaaaggggaattcattttagccacaagaggtttacgatactggttatatggagacaaaattcttgatgattcctttatagaaggtgtttcaagaataaggggttggttccctagaaaatgtgtggaaaagtgtccctgtgatgctgaaacagatcaagccccagagggggagaagaaaaatagatagctgctgttaaaacaaaattatcctttaagtctgcttaattacttgaaaattgtacatattactaaagaattatgcaatgagcctactctggttaagatgttcttttcctcaaaggtgccctagtgccatgatttaaatatttttattaccattttgaaatggagaagccattctgcatatgcctttgaattcctgcccctctttaccacctcttcctccccctcaaaggaaaaacatttcatccaagtaagttaacggcattttctgtaggattttcttatgcactgcacactctggacctcacctgcagatacagttccccccttgccaggagcatctgcatgtggtacttctcttttccctcagttgatatttcttatatgatattctagatactatagaactcaatttgtcagattcagtataacctcagattttgttacctgtcttttaaaaatgcagattttgtcaaatcaaataaagatcaatggatgttgggtataa

SEQ ID NO: 204482 - DNA, 2906 bp, Homo sapiens
  Payload ID: 20334
  Gene Name: zinc finger, DHHC-type containing 6
  ENST ID: ENST00000626395
  CDS Start-End: 546-1697
gggagagtcctggcgagggcgctggccgagaggtgctcggcttgtagcaggtcccgcactccagcctctcgctgccagggtttgctctctgcttgtcctgggctgaggtgtccatgacggagtcatccaaggaggaaaaaatctgttccgggtgagcccaggccgccccggatatgcgatggctgaggagcagacaccagggaccacactgaggtgggagtcaaggcagggaatataagcacgattttggtggtctttgtcccaccagagtgggagcaggctctcctgaatgttgagaccaacctggcttaccaggatatttcttccttgggttgggtttcagaccaagacactggattctcctagttaagataaagagctttgggtgcctgacagtgaaaatggtgtaatctgcgttaacagttcacagcttgaaggcatgacaattaaagaacacacatggacttgtggcacatggaaatgtgcgcacagaaaaaggaaatctataattcttttaaagtaggaaggcattcttccttgccaaaatgggtacattctgttcggttatcaagtttgaaaatctacaagaattaaagagactgtgtcactggggtcccatcatagcccttggtgttatagcaatatgttctaccatggccatgattgactctgtgttgtggtattggcccttacatacaactggaggaagtgtgaatttcatcatgttgataaattggactgtcatgattctttataattacttcaatgccatgtttgtcggtccgggctttgtccctctggggtggaaaccggaaatttctcaggataccatgtatctccagtattgtaaagtctgccaagcatacaaggcaccacgttcacatcactgcagaaagtgtaacagatgtgtgatgaagatggaccatcactgtccttggatcaacaactgttgtggttaccaaaatcatgcttcgttcacactgtttctccttttagcaccactgggttgtatccatgctgctttcatttttgtgatgactatgtacacacagctttatcatcggctctcctttgggtggaacacagtgaagatcgacatgagtgcagcccggagagatcctcttccaattgttccatttggattagctgcatttgctaccaccttgtttgccttgggattagctttaggaacaaccatagctgttgggatgttgttttttatccagatgaaaataattctcagaaacaaaacttctattgagtcatggattgaagagaaggctaaagatcgaattcagtattatcaactagatgaagtctttgtttttccatatgatatgggaagtagatggaggaactttaaacaggtatttacgtggtcaggggtccctgaaggagatggacttgagtggccagtaagagaaggctgtcaccaatacagcttaacaatagaacagttgaaacaaaaagcagataagagagtcagaagtgttcgctataaagtaatagaagattatagtggtgcctgctgccctctgaataaaggaatcaaaaccttcttcacaagtccctgcaccgaagagcctcgaatacagctgcaaaaaggggaattcattttagccacaagaggtttacgatactggttatatggagacaaaattcttgatgattcctttatagaaggggtccttgtttaagactgattttcatcatggtccatgaggaaagaaacaccacaacttttataagcttggatcttctcattctgaacccaactatacaaatttcctgtagctacaagaaccagcatggtttgtgactgaaatgggctattgttaaaatgatatattacccgtaagctctccccgtgtacaaaaatttgtaacactggttgactcctgttgtagatattttctatcttctctggtgcaatgtattctccttgggccagcttgaaaatgttctttttacggtcgatgatcttcagagttccattctacatgagacagataaaagtatcagtatttttgagccacagagatgatatcagtggggagagtggtgaagtcacagtcatctttcttctctaaagctgatttctccagagacttttgagctgtctttcatttctctttcttggctttggtgaaaggggagggaagcatcgtgcagcaagaacctgtctttactgtatatctatgtggagagtcaatgcgcagccttagagaaagtctcctggatctactggagttatgcaaattgatgcctcatccaaggaagaaattgcacagctctcaatttccaatcactaatttccaattagttcattttcagaactctcagaaatagaggtgttgtcttttgtttagacttttgatttgatttgaatagttctcccaccacttgactccctgttatgttttcctccttgttagatccgggagcaggctcaaacagctccactgtgctaatcaagcaactcaattactgggcttgttaggacagcaacagggctgagaggactctgaccagccaccaaaggtcatttgcagcttcatttctctgaactaattggtctgaggagcttaggtctttagggatttgaattgtagaattgggacaaatggcaaataaaatccacatgctaacaccctaagtagggcgactaactaaaccaacactggaactatcacaaggccgacttgataaattagccatcaattcagcctaacgttcattatctgaaagtgattaataaggtgcagccttctataaccctggtgtggggacatatctgttgcttacatcctaggcttattagagtgttatttaattctgttactagacagaaacaaatatattagcaagatactaccaaacccaaatcaataaaatgcatcgttagg

SEQ ID NO: 204483 - DNA, 3442 bp, Homo sapiens
  Payload ID: 20335
  Gene Name: zinc finger, DHHC-type containing 7
  Uniprot ID: Q9NXF8
  ENST ID: ENST00000313732
  CDS Start-End: 354-1280
acttccggcgctcgcaccgccccgctctccagccaaggctccgggctgaggcatttgcttggctgcagcctccttccgacctgcccggcgggacccaggggaccaagccgagccgagccgcggggcccgctccagcccggccatgagcgcggccgcatgatgcgtccctgcctcggccgctgcagtcgccgccgccgccgccgcaggccgggaggagccgcagcgccgggcgaccccgcccgggcctcggatccgatcacataggacagtatgcaccttaagatcctgaagaaacggcacaaaatgttcaagtgatgtttagaaataacttgtgagggtgcgtcagggaaatcatgcagccatcaggacacaggctccgggacgtcgagcatcatcctctcctggctgaaaatgacaactatgactcttcatcgtcctcctcctccgaggctgacgtggctgaccgggtctggttcatccgtgacggctgcggcatgatctgtgctgtcatgacgtggcttctggtcgcctatgcagacttcgtggtgactttcgtcatgctgctgccttccaaagacttctggtactctgtggtcaacggggtcatctttaactgcttggccgtgcttgccctgtcatcccacctgagaaccatgctcaccgaccctggggcagtacccaaaggaaacgctacgaaagaatacatggagagcttgcagctgaagcccggggaagtcatctacaagtgccccaagtgctgctgtattaaacccgagcgcgcccaccactgcagtatttgcaaaagatgtattcggaaaatggatcatcactgcccgtgggtgaacaattgtgtaggagaaaagaatcaaagattttttgtgctcttcactatgtatatagctctgtcttcagtccatgctctgatcctttgtggatttcagttcatctcctgtgtccgagggcagtggactgaatgcagtgatttttcacctccgataactgtaatcctgttgatcttcctgtgccttgagggtcttctgtttttcactttcactgcagttatgtttggcacccaaatccactccatatgcaacgacgagacggagatcgagcgattgaaaagtgagaagcccacatgggagcggaggctgcgatgggaagggatgaagtccgtctttggggggcccccctcactcctctggatgaatccctttgtgggcttccgatttaggcgactgcccacgagacccagaaaaggtggcccggagttctcagtgtgaggcgtggctcatcagactgaaacttgctcacagacttccagttatttatttggggtctgaaggatatcaacagctcatctgtgaccaacagggcaactggaacctacacaaaccaattgcttgcagcaagcagagttttatatatttatagtcacagatggcagaggaagaggctctcagtccccacctgtacaacaacggaaaggtgtgtggccacacgaagaagccaaacgccgtggcctcctgcagagctggggcttctgtggagaatacttcgggttattacatgggttattcaaatcctgggtcctgagctgctgtttccaatcatgaagaaaaacagtgaatccagtgaacagggattctccaagcagtcatttcagggggctcctgctgaccccgccactcagcagtgcactccccggatcacagcagggcgtttacatagaaagacgttttggtctcgattagctccgatgctttgcactgaagttgcaaaagatctgtgcactgaacagtgaaggtggcttccggcacactccccgctgccccggaagagacatcctttgaccctctcagcaagtctgtgtgtgtgcgtgtctgtgcgtgtgcgcgcgtgtgtgcatgtgtgtcaaaattgccagtgttgtttaggcaatgtaacatttaccggctgtgtacagcaaacaagctattttttagaaaccgacgtttcagggaagaggggagagagccgcggggtcctgcccgtggttactatgaatgtattgctgttggaggacatctcgatccaaagaacagccgttcctgtgcggcccttcgttgccctcctgctttcattttttaaagaaatcttgagtgcttgagggccttggaactgattttttttttttgttccagccaaattagcagtgtataaatggcacctaggtaagagcagagctgcggctcggtgacttgatacttggggcagcccgatgctgtgtgtggggcaggggaggcatccttactggagaggcagggcccagccattgggcacctctgggaaggggaggggaccatgaggcagccagcccctggcaggggcgactgtgccaccgcaggcagcgctccagtcgggaatggccaggatggcgccctcttgttggagtttttggttagcttttacgttttcttctccacccacggcacaggtgataaaataggatccttggtgcggagcttaaaattatgccagaaagccaacagctcccctcgtggggccttgccttaaacttgcctggtttgtacattttttgccggacgcatcaagaagcaatctgtgacaaagtctgagggtcttcctttatgcttgccctccacactaagagaagttggcgtctccctcctgggaattgttttgcctttctgttcatctgtgaactgttttttgtttttaattactctgtaccccatccgaatcagggcttctaccactgctgatgcaaaaccacaaagggacctacctgagccaccgtcctagccaagcgagcaaacctgcagggggtttggaagtggacttggtcaccgcagaagcgtgtgcgccgttgggggaagagctgcgtcacagccagagggacaaagtgtgggtgatcctggagacgccagtttccgagattgttctgcatattcatttgcacattgttgtctgggttggacatgcgtgtgggcttcagtgtgaggcttttaatatgtatatcctgttatcaataaaacaattatccaagtggttgaatcctgtgagacttggcaagtgtgtgcaaatcaagtatacttgacttttcaacctcttctttcaatgtaacttttatatgaaataaagtaatcaattaacagttctcaaatggcttccaaagcgcccgttcttcctggatggtggtgttttcagggggtgcctttccgtgcttcgtgggcccagccccaggctgttaaggtcactcccaaacagtttccagaaactctaaatgcttttgtgcccatgacaagtgacctgggcactcaagcgcgactcacaaatgttgcccagtgagtactgttgcttgttgaatgtttaattcgactcccatcgttttacttagtcctttttttagtgcacgttgaaataaaaacaatgtttcaaaatc

SEQ ID NO: 204484 - DNA, 2727 bp, Homo sapiens
  Payload ID: 20335
  Gene Name: zinc finger, DHHC-type containing 7
  Uniprot ID: Q9NXF8
  ENST ID: ENST00000344861
  CDS Start-End: 341-1378
gcaccgccccgctctccagccaaggctccgggctgaggcatttgcttggctgcagcctccttccgacctgcccggcgggacccaggggaccaagccgagccgagccgcggggcccgctccagcccggccatgagcgcggccgcatgatgcgtccctgcctcggccgctgcagtcgccgccgccgccgccgcaggccgggaggagccgcagcgccgggcgaccccgcccgggcctcggatccgatcacataggacagtatgcaccttaagatcctgaagaaacggcacaaaatgttcaagtgatgtttagaaataacttgtgagggtgcgtcagggaaatcatgcagccatcaggacacaggctccgggacgtcgagcatcatcctctcctggctgaaaatgacaactatgactcttcatcgtcctcctcctccgaggctgacgtggctgaccgggtctggttcatccgtgacggctgcggcatgatctgtgctgtcatgacgtggcttctggtcgcctatgcagacttcgtggtgactttcgtcatgctgctgccttccaaagacttctggtactctgtggtcaacggggtcatctttaactgcttggccgtgcttgccctgtcatcccacctgagaaccatgctcaccgaccctgaaaaatccagtgactgccgaccatctgcctgcacagtgaaaactgggctggacccaacccttgtgggcatttgtggtgagggaaccgagtctgtgcaaagcctcctgcttggggcagtacccaaaggaaacgctacgaaagaatacatggagagcttgcagctgaagcccggggaagtcatctacaagtgccccaagtgctgctgtattaaacccgagcgcgcccaccactgcagtatttgcaaaagatgtattcggaaaatggatcatcactgcccgtgggtgaacaattgtgtaggagaaaagaatcaaagattttttgtgctcttcactatgtatatagctctgtcttcagtccatgctctgatcctttgtggatttcagttcatctcctgtgtccgagggcagtggactgaatgcagtgatttttcacctccgataactgtaatcctgttgatcttcctgtgccttgagggtcttctgtttttcactttcactgcagttatgtttggcacccaaatccactccatatgcaacgacgagacggagatcgagcgattgaaaagtgagaagcccacatgggagcggaggctgcgatgggaagggatgaagtccgtctttggggggcccccctcactcctctggatgaatccctttgtgggcttccgatttaggcgactgcccacgagacccagaaaaggtggcccggagttctcagtgtgaggcgtggctcatcagactgaaacttgctcacagacttccagttatttatttggggtctgaaggatatcaacagctcatctgtgaccaacagggcaactggaacctacacaaaccaattgcttgcagcaagcagagttttatatatttatagtcacagatggcagaggaagaggctctcagtccccacctgtacaacaacggaaaggtgtgtggccacacgaagaagccaaacgccgtggcctcctgcagagctggggcttctgtggagaatacttcgggttattacatgggttattcaaatcctgggtcctgagctgctgtttccaatcatgaagaaaaacagtgaatccagtgaacagggattctccaagcagtcatttcagggggctcctgctgaccccgccactcagcagtgcactccccggatcacagcagggcgtttacatagaaagacgttttggtctcgattagctccgatgctttgcactgaagttgcaaaagatctgtgcactgaacagtgaaggtggcttccggcacactccccgctgccccggaagagacatcctttgaccctctcagcaagtctgtgtgtgtgcgtgtctgtgcgtgtgcgcgcgtgtgtgcatgtgtgtcaaaattgccagtgttgtttaggcaatgtaacatttaccggctgtgtacagcaaacaagctattttttagaaaccgacgtttcagggaagaggggagagagccgcggggtcctgcccgtggttactatgaatgtattgctgttggaggacatctcgatccaaagaacagccgttcctgtgcggcccttcgttgccctcctgctttcattttttaaagaaatcttgagtgcttgagggccttggaactgattttttttttttgttccagccaaattagcagtgtataaatggcacctagggcttctaccactgctgatgcaaaaccacaaagggacctacctgagccaccgtcctagccaagcgagcaaacctgcagggggtttggaagtggacttggtcaccgcagaagcgtgtgcgccgttgggggaagagctgcgtcacagccagagggacaaagtgtgggtgatcctggagacgccagtttccgagattgttctgcatattcatttgcacattgttgtctgggttggacatgcgtgtgggcttcagtgtgaggcttttaatatgtatatcctgttatcaataaaacaattatccaagtggttgaatcctgtgagacttggcaagtgtgtgcaaatcaagtatacttgacttttcaacctcttctttcaatgtaacttttatatgaaataaagtaatcaattaacagttctcaaa

SEQ ID NO: 204485 - DNA, 483 bp, Homo sapiens
  Payload ID: 20335
  Gene Name: zinc finger, DHHC-type containing 7
  ENST ID: ENST00000569017
  CDS Start-End: 198-483
aagcattccttggaggccacctcatctggcctgcgtgctctagtgaggtcccgcgcacatgttttctggacctgaagttgtgacttgcctacagatccgatcacataggacagtatgcaccttaagatcctgaagaaacggcacaaaatgttcaagtgatgtttagaaataacttgtgagggtgcgtcagggaaatcatgcagccatcaggacacaggctccgggacgtcgagcatcatcctctcctggctgaaaatgacaactatgactcttcatcgtcctcctcctccgaggctgacgtggctgaccgggtctggttcatccgtgacggctgcggcatgatctgtgctgtcatgacgtggcttctggtcgcctatgcagacttcgtggtgactttcgtcatgctgctgccttccaaagacttctggtactctgtggtcaacggggtcatctttaactgcttggccgtgcttgccctgtcat

SEQ ID NO: 204486 - DNA, 582 bp, Homo sapiens
  Payload ID: 20335
  Gene Name: zinc finger, DHHC-type containing 7
  ENST ID: ENST00000566909
  CDS Start-End: 160-582
ccccgtgatccacccgcctcagcctcccaaagtgctgggattacaggtgtgacccactgcgcccggcctgatgtttttaactttcattctccccaactaaagtacattcttcttatatggtagggggcagtacccaaaggaaacgctacgaaagaatacatggagagcttgcagctgaagcccggggaagtcatctacaagtgccccaagtgctgctgtattaaacccgagcgcgcccaccactgcagtatttgcaaaagatgtattcggaaaatggatcatcactgcccgtgggtgaacaattgtgtaggagaaaagaatcaaagattttttgtgctcttcactatgtatatagctctgtcttcagtccatgctctgatcctttgtggatttcagttcatctcctgtgtccgagggcagtggactgaatgcagtgatttttcacctccgataactgtaatcctgttgatcttcctgtgccttgagggtcttctgtttttcactttcactgcagttatgtttggcacccaaatccactccatatgcaacgacgagacggagatcgagcgattgaaaagtgag

SEQ ID NO: 204487 - DNA, 1488 bp, Homo sapiens
  Payload ID: 20335
  Gene Name: zinc finger, DHHC-type containing 7
  Uniprot ID: Q9NXF8
  ENST ID: ENST00000564466
  CDS Start-End: 321-1358
caaggctccgggctgaggcatttgcttggctgcagcctccttccgacctgcccggcgggacccaggggaccaagccgagccgagccgcggggcccgctccagcccggccatgagcgcggccgcatgatgcgtccctgcctcggccgctgcagtcgccgccgccgccgccgcaggccgggaggagccgcagcgccgggcgaccccgcccgggcctcggatccgatcacataggacagtatgcaccttaagatcctgaagaaacggcacaaaatgttcaagtgatgtttagaaataacttgtgagggtgcgtcagggaaatcatgcagccatcaggacacaggctccgggacgtcgagcatcatcctctcctggctgaaaatgacaactatgactcttcatcgtcctcctcctccgaggctgacgtggctgaccgggtctggttcatccgtgacggctgcggcatgatctgtgctgtcatgacgtggcttctggtcgcctatgcagacttcgtggtgactttcgtcatgctgctgccttccaaagacttctggtactctgtggtcaacggggtcatctttaactgcttggccgtgcttgccctgtcatcccacctgagaaccatgctcaccgaccctgaaaaatccagtgactgccgaccatctgcctgcacagtgaaaactgggctggacccaacccttgtgggcatttgtggtgagggaaccgagtctgtgcaaagcctcctgcttggggcagtacccaaaggaaacgctacgaaagaatacatggagagcttgcagctgaagcccggggaagtcatctacaagtgccccaagtgctgctgtattaaacccgagcgcgcccaccactgcagtatttgcaaaagatgtattcggaaaatggatcatcactgcccgtgggtgaacaattgtgtaggagaaaagaatcaaagattttttgtgctcttcactatgtatatagctctgtcttcagtccatgctctgatcctttgtggatttcagttcatctcctgtgtccgagggcagtggactgaatgcagtgatttttcacctccgataactgtaatcctgttgatcttcctgtgccttgagggtcttctgtttttcactttcactgcagttatgtttggcacccaaatccactccatatgcaacgacgagacggagatcgagcgattgaaaagtgagaagcccacatgggagcggaggctgcgatgggaagggatgaagtccgtctttggggggcccccctcactcctctggatgaatccctttgtgggcttccgatttaggcgactgcccacgagacccagaaaaggtggcccggagttctcagtgtgaggcgtggctcatcagactgaaacttgctcacagacttccagttatttatttggggtctgaaggatatcaacagctcatctgtgaccaacagggcaactggaacctacacaaaccaattgcttgcagcaag

SEQ ID NO: 204488 - DNA, 3072 bp, Homo sapiens
  Payload ID: 20336
  Gene Name: zinc finger, DHHC-type containing 8
  Uniprot ID: Q9ULC8
  ENST ID: ENST00000320602
  CDS Start-End: 1-2022
atgccccgcagccccgggacgcgcctcaaacccgccaagtacatcccggtggccacggccgccgcgctgctggtcggctccagcaccctcttcttcgtgttcacgtgcccgtggttgacacgagctgtgtccccagctgttcccgtctacaatggcatcatcttcctctttgtcctggccaacttcagcatggccactttcatggaccctggtgttttcccccgagcggatgaggatgaggacaaggaggacgacttccgggctccgctgtacaagaacgtggatgtgcgaggtatccaggtccgcatgaagtggtgtgccacgtgccacttctaccgcccgccgcgctgctcccactgcagcgtctgtgacaactgtgtagaggtgactgggaagttccgcgggggtgtgaaccctttcacccgaggctgctgtgggaatgtggagcacgtgctgtgtagccccctggcgccccggtacgtggtggagccaccccggctgccgctcgcggtgagtttgaagccgcctttccttaggcctgaactcctggaccgagctgcaccgctcaaggtcaagcttagtgacaacgggctgaaggctggcctgggccgtagcaagtccaagggcagcctggaccggctggatgagaagccactggacttggggccaccactgccccccaagatagaggctggcacgttcagcagtgacctgcagaccccgcgcccaggcagtgctgagagtgccctgtcggtgcagaggaccagccccccgacacctgccatgtacaagtttaggccggctttccccacgggtcccaaggtgcccttctgtggaccaggcgagcaggttccaggccctgattccctgaccctgggggacgacagcatccgtagcctggactttgtgtccgagccgagcctggacctccctgactatgggccagggggcctgcatgcagcctacccgccatccccaccgctcagcgcctctgatgccttctcgggcgctttgcgctccctgagcctcaaggcctcgagccggcggggcggggatcatgtggccctgcagcccctgcgctctgagggggggccccccacgccccaccgtagcatttttgccccccatgcactgcccaaccgcaacggcagcctgtcctatgacagcctgctcaatcctggctcgcctggtggccacgcctgccctgcccacccagcagttggcgtggccggataccactcaccctacctgcatcctggggcaacgggcgacccgccacggcccctaccccgcagcttcagccccgtgctgggcccccgcccccgggagccctcgcctgtgcgctacgacaacctgtccaggaccatcatggcatccatccaggagcgcaaggacagggaggagcgtgagcgcctgctgcgctcccaggccgactcactcttcggcgactcaggcgtctatgacgctcccagctcctacagcctgcagcaggccagtgtgctgtccgagggcccccgaggtcccgcgctgcgctatggctccagagacgaccttgtggctgggcccggcttcggtggcgcccgcaaccctgccctgcagacgtcactgtcctcgctgtccagctccgtgagccgtgcaccgcggacgtcgtcctcctccctgcaggctgatcaggccagcagcaacgccccggggccccggcccagcagtggctcacacaggtcacctgcacgccagggcctgccctccccgcccggcactccccactcaccatcctacgcgggccccaaagctgtcgccttcatccacacggacctcccagagccaccgccctcgctgaccgtgcagagggaccaccctcagctgaagactcccccaagtaagcttaatgggcagtccccgggcctggcccggctgggacctgccaccggccccccagggccctctgccagccctacacggcacacgctggttaagaaggtgtccggcgtgggtgggaccacctacgagatctcggtgtgaggactgactgccacacatccgccatggtgccacggggaccaggaccccacagcgcaccccccctccccaccaacttctctgccccagggacccgaggccaccccagcctggtgtggacccatcggcgggagagagtgccacgcctccacagcttgccccaagcgctctgcctgcccgtccactcatctgcccatggggaagtcggctcactgggacaagggccactgggctggtctgtgtctgggcctgtcccatggctggggcagtgagggggcccagtcagcctctttggggcaccctctctcagccaggcttggcccactgccatcacccagcaccccagatcaccgccaggccagcccccaatggtccccttacggacaggtcccagagatggacagaggcacccagggcccccaccgtccttctgacacagcctgtgggctcccggaccgagtgtcccccgccaggctactcctaactaacgcgttgcctttcacggaccccgctggaagcttgtagcttggcaaggctgatgcttctgccctggcctgctctgggtggtggtggataggtggacagacggccagccagccagctgtggccgggggcccggctccatgtgtcccgtgtctgtgtgctgtgctgccgcgccgtgtctgatgtgtcagtgctccggccgccgctgtccctttcatcaaagccttaacctttgctttatgctcttgtgggaggcgacgggggggcaggcgggagcaggcacgggggtgatgctgccacagggggctggtgacacccagagccccctccccagccctcaggccctccctgccaaactggagaaccccaccccaaggcatgccacgtccgcagccccggcctggctgcggtgctcgcgccgtgggaaagcacactggggaggggtcagtgcttcccttggtgtcagggacctgagagtaagcacatgacagcgtctgcttgcgttgtgtctgttttatgtttttatatctacatctatatatctataattttattaaaaaaaagaaaaag

SEQ ID NO: 204489 - DNA, 5046 bp, Homo sapiens
  Payload ID: 20336
  Gene Name: zinc finger, DHHC-type containing 8
  Uniprot ID: Q9ULC8
  ENST ID: ENST00000334554
  CDS Start-End: 142-2439
gggtgggatttcctccgccgccgccgccgccgccgccgcgggtcctgcgccgcgtccagcccgcccgcccgaccccggcccgaccccggccggccctgcccgcccggccccggggagggatgcggcggcgcggcgcccaggatgccccgcagccccgggacgcgcctcaaacccgccaagtacatcccggtggccacggccgccgcgctgctggtcggctccagcaccctcttcttcgtgttcacgtgcccgtggttgacacgagctgtgtccccagctgttcccgtctacaatggcatcatcttcctctttgtcctggccaacttcagcatggccactttcatggaccctggtgttttcccccgagcggatgaggatgaggacaaggaggacgacttccgggctccgctgtacaagaacgtggatgtgcgaggtatccaggtccgcatgaagtggtgtgccacgtgccacttctaccgcccgccgcgctgctcccactgcagcgtctgtgacaactgtgtagaggactttgaccaccactgcccctgggtcaacaactgcatcgggcgtcgaaactatcgctacttcttcctgttcctgctgtcactcagtgcacacatggtgggcgtcgtggccttcggcctggtctacgtgctgaaccacgctgaggggctgggagccgcgcacaccaccatcaccatggctgtcatgtgtgtggccggcctcttcttcatccctgtcattggcctcactggcttccatgtggtgctggtcactcgggggcgcaccaccaacgagcaggtgactgggaagttccgcgggggtgtgaaccctttcacccgaggctgctgtgggaatgtggagcacgtgctgtgtagccccctggcgccccggtacgtggtggagccaccccggctgccgctcgcggtgagtttgaagccgcctttccttaggcctgaactcctggaccgagctgcaccgctcaaggtcaagcttagtgacaacgggctgaaggctggcctgggccgtagcaagtccaagggcagcctggaccggctggatgagaagccactggacttggggccaccactgccccccaagatagaggctggcacgttcagcagtgacctgcagaccccgcgcccaggcagtgctgagagtgccctgtcggtgcagaggaccagccccccgacacctgccatgtacaagtttaggccggctttccccacgggtcccaaggtgcccttctgtggaccaggcgagcaggttccaggccctgattccctgaccctgggggacgacagcatccgtagcctggactttgtgtccgagccgagcctggacctccctgactatgggccagggggcctgcatgcagcctacccgccatccccaccgctcagcgcctctgatgccttctcgggcgctttgcgctccctgagcctcaaggcctcgagccggcggggcggggatcatgtggccctgcagcccctgcgctctgagggggggccccccacgccccaccgtagcatttttgccccccatgcactgcccaaccgcaacggcagcctgtcctatgacagcctgctcaatcctggctcgcctggtggccacgcctgccctgcccacccagcagttggcgtggccggataccactcaccctacctgcatcctggggcaacgggcgacccgccacggcccctaccccgcagcttcagccccgtgctgggcccccgcccccgggagccctcgcctgtgcgctacgacaacctgtccaggaccatcatggcatccatccaggagcgcaaggacagggaggagcgtgagcgcctgctgcgctcccaggccgactcactcttcggcgactcaggcgtctatgacgctcccagctcctacagcctgcagcaggccagtgtgctgtccgagggcccccgaggtcccgcgctgcgctatggctccagagacgaccttgtggctgggcccggcttcggtggcgcccgcaaccctgccctgcagacgtcactgtcctcgctgtccagctccgtgagccgtgcaccgcggacgtcgtcctcctccctgcaggctgatcaggccagcagcaacgccccggggccccggcccagcagtggctcacacaggtcacctgcacgccagggcctgccctccccgcccggcactccccactcaccatcctacgcgggccccaaagctgtcgccttcatccacacggacctcccagagccaccgccctcgctgaccgtgcagagggaccaccctcagctgaagactcccccaagtaagcttaatgggcagtccccgggcctggcccggctgggacctgccaccggccccccagggccctctgccagccctacacggcacacgctggttaagaaggtgtccggcgtgggtgggaccacctacgagatctcggtgtgaggactgactgccacacatccgccatggtgccacggggaccaggaccccacagcgcaccccccctccccaccaacttctctgccccagggacccgaggccaccccagcctggtgtggacccatcggcgggagagagtgccacgcctccacagcttgccccaagcgctctgcctgcccgtccactcatctgcccatggggaagtcggctcactgggacaagggccactgggctggtctgtgtctgggcctgtcccatggctggggcagtgagggggcccagtcagcctctttggggcaccctctctcagccaggcttggcccactgccatcacccagcaccccagatcaccgccaggccagcccccaatggtccccttacggacaggtcccagagatggacagaggcacccagggcccccaccgtccttctgacacagcctgtgggctcccggaccgagtgtcccccgccaggctactcctaactaacgcgttgcctttcacggaccccgctggaagcttgtagcttggcaaggctgatgcttctgccctggcctgctctgggtggtggtggataggtggacagacggccagccagccagctgtggccgggggcccggctccatgtgtcccgtgtctgtgtgctgtgctgccgcgccgtgtctgatgtgtcagtgctccggccgccgctgtccctttcatcaaagccttaacctttgctttatgctcttgtgggaggcgacgggggggcaggcgggagcaggcacgggggtgatgctgccacagggggctggtgacacccagagccccctccccagccctcaggccctccctgccaaactggagaaccccaccccaaggcatgccacgtccgcagccccggcctggctgcggtgctcgcgccgtgggaaagcacactggggaggggtcagtgcttcccttggtgtcagggacctgagagtaagcacatgacagcgtctgcttgcgttgtgtctgttttatgtttttatatctacatctatatatctataattttattaaaaaaaagaaaaagagttattttgattctttccttgggcaaggccagggctattgctgcaggatcccgagttaggggagggcaggggccgggccccagaagagggagtggctgctgtctggtgtgcaggggtcggtgggttcctcaggggcatttctgccgacttgggctgagtcagaggcttgggaagagggggcggccgatggtctgtggctgggaagtgtgagggtctctcgccttgggtctgtgtcagttctggcagtgacagggtgtttgggggaaagacttgggtctgccgctacccacaggggactctcaggaacccgagagcttggggagatgaaatgggggtgcataggggccacctgttggctcagggccctgtgggggccgctgaacctgctggaactctcctgcctgccacatgccaggggcagggctgagggagtgtgagggatgcacagctgttcagggctgagacattctgggctggggctgtcccagcgtgggaggcgtgcgggctgtagggccccgaagctgacctccacctttctgcttctctctcacggacgccgcggcccgcagggggcggattggcacctgcacccgtggatgggggcggcgtggccagccttgggtgcctcctgggctgcacctgtgccaccttggccgcccggaggaccgcccaccactgcgggccccctggagccaggccgccggggcacccccacgcggggccatgtgccgcctgcacttggctgcctccagtcttttccccagcctctcggggccctagcaggatgacaagtaggcggctctggggcccaggacagcccagctggggacccaggaggtcagactgcagtggaccctggggcagggctgggggtgggctgggctctctgctccaccagccacagcttgacagattcccagcctgccagggcctgagaccctgtgtccacatgacctcagggagtcccccacctgctgcagggggtccagcaccccacaggggggcagtcccagagctgtggggaccggcacgacctttgcccagcctccctacccaaccaagcactttagactaagccacttcctcctcggggagcccaggcctccgtgggttgggctgggtggggggggggtctcaggttgcccctgaaggtctctgcactcctcctgcccttcccctgacacatgaacagatgccttaacttcctggagccaccagcctggtgagccattggcctctgcctgccaccaaggtcctgtggtcttggccagctccgcctgggccccactggggctgcctgcacccagagacgatgccggcgggatctcagagggcctgaggcccaagccctgtgtcctccagcagtggtacggcctgcggcagggtggcactccggccagcccttctccgtcacagggtccctgtccctgggtccaccctgggctgtggctctacatctcccatttggggacgagaaagccacaaaaccattctctattgttcttaagggtacccctgctaattaattccccaaataaaatttttggtgttgatca

SEQ ID NO: 204490 - DNA, 3112 bp, Homo sapiens
  Payload ID: 20336
  Gene Name: zinc finger, DHHC-type containing 8
  Uniprot ID: Q9ULC8
  ENST ID: ENST00000405930
  CDS Start-End: 1-2337
atgccccgcagccccgggacgcgcctcaaacccgccaagtacatcccggtggccacggccgccgcgctgctggtcggctccagcaccctcttcttcgtgttcacgtgcccgtggttgacacgagctgtgtccccagctgttcccgtctacaatggcatcatcttcctctttgtcctggccaacttcagcatggccactttcatggaccctggtgttttcccccgagcggatgaggatgaggacaaggaggacgacttccgggctccgctgtacaagaacgtggatgtgcgaggtatccaggtccgcatgaagtggtgtgccacgtgccacttctaccgcccgccgcgctgctcccactgcagcgtctgtgacaactgtgtagaggactttgaccaccactgcccctgggtcaacaactgcatcgggcgtcgaaactatcgctacttcttcctgttcctgctgtcactcagtgcacacatggtgggcgtcgtggccttcggcctggtctacgtgctgaaccacgctgaggggctgggagccgcgcacaccaccatcaccatggctgtcatgtgtgtggccggcctcttcttcatccctgtcattggcctcactggcttccatgtggtgctggtcactcgggggcgcaccaccaacgagcaggtgactgggaagttccgcgggggtgtgaaccctttcacccgaggctgctgtgggaatgtggagcacgtgctgtgtagccccctggcgccccggtacgtggtggagccaccccggctgccgctcgcggtgagtttgaagccgcctttccttaggcctgaactcctggaccgagctgcaccgctcaaggtcaagcttagtgacaacgggctgaaggctggcctgggccgtagcaagtccaagggcagcctggaccggctggatgagaagccactggacttggggccaccactgccccccaagatagaggctggcacgttcagcagtgacctgcagaccccgcgcccaggcagtgctgagagtgccctgtcggtgcagaggaccagccccccgacacctgccatgtacaagtttaggccggctttccccacgggtcccaaggtgcccttctgtggaccaggcgagcaggttccaggccctgattccctgaccctgggggacgacagcatccgtagcctggactttgtgtccgagccgagcctggacctccctgactatgggccagggggcctgcatgcagcctacccgccatccccaccgctcagcgcctctgatgccttctcgggcgctttgcgctccctgagcctcaaggcctcgagccggcggggcggggatcatgtggccctgcagcccctgcgctctgagggggggccccccacgccccaccgtagcatttttgccccccatgcactgcccaaccgcaacggcagcctgtcctatgacagcctgctcaatcctggctcgcctggtggccacgcctgccctgcccacccagcagttggcgtggccggataccactcaccctacctgcatcctggggcaacgggcgacccgccacggcccctaccccgcagcttcagccccgtgctgggcccccgcccccgggagccctcgcctgtgcgctacgacaacctgtccaggaccatcatggcatccatccaggagcgcaaggacagggaggagcgtgagcgcctgctgcgctcccaggccgactcactcttcggcgactcaggcgtctatgacgctcccagctcctacagcctgcagcaggccagtgtgctgtccgagggcccccgaggtcccgcgctgcgctatggctccagagacgaccttgtggctgggcccggcttcggtggcgcccgcaaccctgccctgcagacgtcactgtcctcgctgtccagctccgtgagccgtgcaccgcggacgtcgtcctcctccctgcaggctgatcaggccagcagcaacgccccggggccccggcccagcagtggctcacacaggtcacctgcacgccagggcctgccctccccgcccggcactccccactcaccatcctacgcgggccccaaagctgtcgccttcatccacacggacctcccagagccaccgccctcgctgaccgtgcagagggggcggattggcacctgcacccgtggatgggggcggcgtggccagccttgggtgcctcctgggctgcacctgtgccaccttggccgcccggaggaccgcccaccactgcgggccccctggagccaggccgccggggcacccccacgcggggccatgtgccgcctgcacttggctgcctccagtcttttccccagcctctcggggccctagcaggatgacaagtaggcggctctggggcccaggacagcccagctggggacccaggaggtcagactgcagtggaccctggggcagggctgggggtgggctgggctctctgctccaccagccacagcttgacagattcccagcctgccagggcctgagaccctgtgtccacatgacctcagggagtcccccacctgctgcagggggtccagcaccccacaggggggcagtcccagagctgtggggaccggcacgacctttgcccagcctccctacccaaccaagcactttagactaagccacttcctcctcggggagcccaggcctccgtgggttgggctgggtggggggggggtctcaggttgcccctgaaggtctctgcactcctcctgcccttcccctgacacatgaacagatgccttaacttcctggagccaccagcctggtgagccattggcctctgcctgccaccaaggtcctgtggtcttggccagctccgcctgggccccactggggctgcctgcacccagagacgatgccggcgggatctcagagggcctgaggcccaagccctgtgtcctccagcagtggtacggcctgcggcagggtggcactccggccagcccttctccgtcacagggtccctgtccctgggtccaccctgggctgtggctctacatctcccatttggggacgagaaagccacaaaaccattctctattgttcttaagggtacccctgctaattaattccccaaataaaatttttggtgttgatc

SEQ ID NO: 204491 - DNA, 557 bp, Homo sapiens
  Payload ID: 20336
  Gene Name: zinc finger, DHHC-type containing 8
  ENST ID: ENST00000436518
  CDS Start-End: 17-557
gacactgcaggatgcgatggtgctgcgggaagggagctgtgctgggagacagaatgcgtccgcgtgctggccccacgggaccacagggtgcccgtggttgacacgagctgtgtccccagctgttcccgtctacaatggcatcatcttcctctttgtcctggccaacttcagcatggccactttcatggaccctggtgttttcccccgagcggatgaggatgaggacaaggaggacgacttccgggctccgctgtacaagaacgtggatgtgcgaggtatccaggtccgcatgaagtggtgtgccacgtgccacttctaccgcccgccgcgctgctcccactgcagcgtctgtgacaactgtgtagaggactttgaccaccactgcccctgggtcaacaactgcatcgggcgtcgaaactatcgctacttcttcctgttcctgctgtcactcagtgcacacatggtgggcgtcgtggccttcggcctggtctacgtgctgaaccacgctgaggggctgggagccgcgcacaccaccatcacgtatccttggttcctgt

SEQ ID NO: 204492 - DNA, 4569 bp, Homo sapiens
  Payload ID: 20337
  Gene Name: zinc finger, DHHC-type containing 9
  Uniprot ID: Q9Y397
  ENST ID: ENST00000357166
  CDS Start-End: 393-1487
atttggccagtggtgggcggttgccacagctggtttagggccccgaccactggggccccttgtcaggaggagacagcctcccggcccggggaggacaagtcgctgccacctttggctgccgacgtgattccctgggacggtccgtttcctgccgtcagctgccggccgagttgggtctccgtggttcaggccggctcccccttcctggtctcccttctcccgctgggccggtttatcgggaggagattgtcttccagggctagcaattggacttttgatgatgtttgacccagcggcaggaatagcaggcaacgtgatttcaaagctgggctcagcctctgtttcttctctcgtgtaatcgcaaaacccattttggagcaggaattccaatcatgtctgtgatggtggtgagaaagaaggtgacacggaaatgggagaaactcccaggcaggaacaccttttgctgtgatggccgcgtcatgatggcccggcaaaagggcattttctacctgacccttttcctcatcctggggacatgtacactcttcttcgcctttgagtgccgctacctggctgttcagctgtctcctgccatccctgtatttgctgccatgctcttccttttctccatggctacactgttgaggaccagcttcagtgaccctggagtgattcctcgggcgctaccagatgaagcagctttcatagaaatggagatagaagctaccaatggtgcggtgccccagggccagcgaccaccgcctcgtatcaagaatttccagataaacaaccagattgtgaaactgaaatactgttacacatgcaagatcttccggcctccccgggcctcccattgcagcatctgtgacaactgtgtggagcgcttcgaccatcactgcccctgggtggggaattgtgttggaaagaggaactaccgctacttctacctcttcatcctttctctctccctcctcacaatctatgtcttcgccttcaacatcgtctatgtggccctcaaatctttgaaaattggcttcttggagacattgaaagaaactcctggaactgttctagaagtcctcatttgcttctttacactctggtccgtcgtgggactgactggatttcatactttcctcgtggctctcaaccagacaaccaatgaagacatcaaaggatcatggacagggaagaatcgcgtccagaatccctacagccatggcaatattgtgaagaactgctgtgaagtgctgtgtggccccttgccccccagtgtgctggatcgaaggggtattttgccactggaggaaagtggaagtcgacctcccagtactcaagagaccagtagcagcctcttgccacagagcccagcccccacagaacacctgaactcaaatgagatgccggaggacagcagcactcccgaagagatgccacctccagagcccccagagccaccacaggaggcagctgaagctgagaagtagcctatctatggaagagacttttgtttgtgtttaattagggctatgagagatttcaggtgagaagttaaacctgagacagagagcaagtaagctgtcccttttaactgtttttctttggtctttagtcacccagttgcacactggcattttcttgctgcaagcttttttaaatttctgaactcaaggcagtggcagaagatgtcagtcacctctgataactggaaaaatgggtctcttgggccctggcactggttctccatggcctcagccacagggtccccttggaccccctctcttccctccagatcccagccctcctgcttggggtcactggtctcattctggggctaaaagtttttgagactggctcaaatcctcccaagctgctgcacgtgctgagtccagaggcagtcacagagacctctggccaggggatcctaactgggttcttggggtcttcaggactgaagaggagggagagtggggtcagaagattctcctggccaccaagtgccagcattgcccacaaatccttttaggaatgggacaggtaccttccacttgttgtatttattagtgtagcttctcctttgtctcccatccactctgacacctaagccccactcttttcccattagatatatgtaagtagttgtagtagagataataattgacatttctcgtagactacccagaaacttttttaatacctgtgccattctcaataagaatttatgagatgccagcggcatagcccttcacactctctgtctcatctctcctcctttctcattagccccttttaatttgtttttccttttgactcctgctcccattaggagcaggaatggcagtaataaaagtctgcactttggtcatttcttttcctcagaggaagcctgagtgctcacttaaacactatcccctcagactccctgtgtgaggcctgcagaggccctgaatgcacaaatgggaaaccaaggcacagagaggctctcctctcctctcctctcccccgatgtaccctcaaaaaaaaaaaaatgctaaccagttcttccattaagcctcggctgagtgagggaaagcccagcactgctgccctctcgggtaactcaccctaaggcctcggcccacctctggctatggtaaccacactgggggcttcctccaagccccgctcttccagcacttccaccggcagagtcccagagccacttcaccctgggggtgggctgtggcccccagtcagctctgctcaggacctgctctatttcagggaagaagatttatgtattatatgtggctatatttcctagagcacctgtgttttcctctttctaagccagggtcctgtctggatgacttatgcggtgggggagtgtaaaccagaacttttcatctatttgaaggcgattaaactgtgtctaatgcaaacttcctgcctcctccttcccccttccatttcaagaatatgtttgtgtgtagggtgggggtgggggttggaaggggttgcttgttactccccaaacttccattaaccagggcacccttgggttggagaggtagttccaaactctccattgatctatactacattctgggctgaaggttttcttattctggactatgaagaaaggactttcaaggagatatagtgtgaacaggatcaggaaggtagagggattatatttacttaagagaacaagctctatattaggatattgttttgaagcagatggatgccgttaattgctaataagtcttagttattaacgcaggctcatcagggcccccccttggaaatatttgatcagtggtcttttacaagtgatggtatatatttctttctaggtggtgtataatcaagactccctatcaattcccatctcatacttcccagttaattggaattaatgaaatttggctgctcccagacctttttccatgtcttcctttttccttttaacaggatttaagttgagcattcttgagagagagagagagagagagattggaagagagatggggagagactgactcagatccctctcctgtctgcttctttttctggttctctcagttttttttcttgaagttataaagccaaacctggagaatttgtaagttgttaggtttccccaggtaacttggcactcatatgaaccccattttaataagtactcagcccatctcctctcctgggctcagatggctctctctcctccctcaccttacctcaagtgttctcctgaggacccttaggtcagacagagaagctttctctttctgatgggaagggtcaaagtggaaatctcttatctctagtgtgaaatgattttctgctttttcatactccctgccctctttcttttccttaataaatcttccatgtttaagatgttggcctgaagatctgtcccattcataccatgcaccagctgggactgtccctatctgatcagaggggagattaaagaatcaatgttcccaggggaaaagggccttaaattgtttggtcttttcaatggctgacactgtctccaactctccccttcctccttcttcctcaagcttcctatgcaccctactttcccaggccaggatggttggcactgatcccaaacctctgggggcaggtggaaattggctgtggtgagccatttcttcatgtccattcagctctgaggccttcctggccctagctgagatcatcatctcctcctttgcttttaccccaggagtgaggttgggttagaggtggattctgattccgtagcagctaaattccattctccctgtcctgaccatcctgcctttacccataaagcacccgttcctactgaccaaatctctttactttgttggagaaaaaaagtattttgtttttaaatctattttctaatttaaatgcaatttaatatgtaaatctctgcacttttgtgtgagcctacaaatgtgtatgtgttgggggtttttcactctctggtatttcttaataaagaaatctttcttttggggggaagccaattaatgaaggagccttgaatggttttagaaatacagggctgtctgtttctttgtg

SEQ ID NO: 204493 - DNA, 2473 bp, Homo sapiens
  Payload ID: 20337
  Gene Name: zinc finger, DHHC-type containing 9
  Uniprot ID: Q9Y397
  ENST ID: ENST00000371064
  CDS Start-End: 338-1432
ggcgtggcggagtcagggcgggcctcgagaggccgcgcccgcggctcggccccggactccggcctccggcctccggccccccgctggggagccggtcgctgcttcccgacggattttgatctttgttcttccaggccggctcccccttcctggtctcccttctcccgctgggccggtttatcgggaggagattgtcttccagggctagcaattggacttttgatgatgtttgacccagcggcaggaatagcaggcaacgtgatttcaaagctgggctcagcctctgtttcttctctcgtgtaatcgcaaaacccattttggagcaggaattccaatcatgtctgtgatggtggtgagaaagaaggtgacacggaaatgggagaaactcccaggcaggaacaccttttgctgtgatggccgcgtcatgatggcccggcaaaagggcattttctacctgacccttttcctcatcctggggacatgtacactcttcttcgcctttgagtgccgctacctggctgttcagctgtctcctgccatccctgtatttgctgccatgctcttccttttctccatggctacactgttgaggaccagcttcagtgaccctggagtgattcctcgggcgctaccagatgaagcagctttcatagaaatggagatagaagctaccaatggtgcggtgccccagggccagcgaccaccgcctcgtatcaagaatttccagataaacaaccagattgtgaaactgaaatactgttacacatgcaagatcttccggcctccccgggcctcccattgcagcatctgtgacaactgtgtggagcgcttcgaccatcactgcccctgggtggggaattgtgttggaaagaggaactaccgctacttctacctcttcatcctttctctctccctcctcacaatctatgtcttcgccttcaacatcgtctatgtggccctcaaatctttgaaaattggcttcttggagacattgaaagaaactcctggaactgttctagaagtcctcatttgcttctttacactctggtccgtcgtgggactgactggatttcatactttcctcgtggctctcaaccagacaaccaatgaagacatcaaaggatcatggacagggaagaatcgcgtccagaatccctacagccatggcaatattgtgaagaactgctgtgaagtgctgtgtggccccttgccccccagtgtgctggatcgaaggggtattttgccactggaggaaagtggaagtcgacctcccagtactcaagagaccagtagcagcctcttgccacagagcccagcccccacagaacacctgaactcaaatgagatgccggaggacagcagcactcccgaagagatgccacctccagagcccccagagccaccacaggaggcagctgaagctgagaagtagcctatctatggaagagacttttgtttgtgtttaattagggctatgagagatttcaggtgagaagttaaacctgagacagagagcaagtaagctgtcccttttaactgtttttctttggtctttagtcacccagttgcacactggcattttcttgctgcaagcttttttaaatttctgaactcaaggcagtggcagaagatgtcagtcacctctgataactggaaaaatgggtctcttgggccctggcactggttctccatggcctcagccacagggtccccttggaccccctctcttccctccagatcccagccctcctgcttggggtcactggtctcattctggggctaaaagtttttgagactggctcaaatcctcccaagctgctgcacgtgctgagtccagaggcagtcacagagacctctggccaggggatcctaactgggttcttggggtcttcaggactgaagaggagggagagtggggtcagaagattctcctggccaccaagtgccagcattgcccacaaatccttttaggaatgggacaggtaccttccacttgttgtatttattagtgtagcttctcctttgtctcccatccactctgacacctaagccccactcttttcccattagatatatgtaagtagttgtagtagagataataattgacatttctcgtagactacccagaaacttttttaatacctgtgccattctcaataagaatttatgagatgccagcggcatagcccttcacactctctgtctcatctctcctcctttctcattagccccttttaatttgtttttccttttgactcctgctcccattaggagcaggaatggcagtaataaaagtctgcactttggtcatttcttttcctcagaggaagcctgagtgctcacttaaacactatcccctcagactccctgtgtgaggcctgcagaggccctgaatgcacaaatgggaaaccaaggcacagagaggctctcctctcctctcctctcccccgatgtaccctcaaaaaaaaaaaaa

SEQ ID NO: 204494 - DNA, 737 bp, Homo sapiens
  Payload ID: 20337
  Gene Name: zinc finger, DHHC-type containing 9
  ENST ID: ENST00000406492
  CDS Start-End: 226-737
gacctggtgacgtgaggagcgttccatttggccagtggtgggcggttgccacagctggtttagggccccgaccactggggccccttgtcaggaggagacagcctcccggcccggggaggacaagtcgctgccacctttggctgccgacgtgattccctgggacggtccgtttcctgccgtcagctgccggccgagttgggtctccgtggttcaggaattccaatcatgtctgtgatggtggtgagaaagaaggtgacacggaaatgggagaaactcccaggcaggaacaccttttgctgtgatggccgcgtcatgatggcccggcaaaagggcattttctacctgacccttttcctcatcctggggacatgtacactcttcttcgcctttgagtgccgctacctggctgttcagctgtctcctgccatccctgtatttgctgccatgctcttccttttctccatggctacactgttgaggaccagcttcagtgaccctggagtgattcctcgggcgctaccagatgaagcagctttcatagaaatggagatagaagctaccaatggtgcggtgccccagggccagcgaccaccgcctcgtatcaagaatttccagataaacaaccagattgtgaaactgaaatactgttacacatgcaagatcttccggcctccccgggcctcccattgcagcatctgtgacaactgtgtggagcgcttcgaccatcactgcccctg

SEQ ID NO: 204495 - DNA, 581 bp, Homo sapiens
  Payload ID: 20337
  Gene Name: zinc finger, DHHC-type containing 9
  ENST ID: ENST00000433917
  CDS Start-End: 1-581
cccttttcctcatcctggggacatgtacactcttcttcgcctttgagtgccgctacctggctgttcagctgtctcctgccatccctgtatttgctgccatgctcttccttttctccatggctacactgttgaggaccagcttcagtgaccctggagtgattcctcgggcgctaccagatgaagcagctttcatagaaatggagatagaagctaccaatggtgcggtgccccagggccagcgaccaccgcctcgtatcaagaatttccagataaacaaccagattgtgaaactgaaatactgttacacatgcaagatcttccggcctccccgggcctcccattgcagcatctgtgacaactgtgtggaatctttgaaaattggcttcttggagacattgaaagaaactcctggaactgttctagaagtcctcatttgcttctttacactctggtccgtcgtgggactgactggatttcatactttcctcgtggctctcaaccagacaaccaatgaagacatcaaaggatcatggacagggaagaatcgcgtccagaatccctacagccatggcaatattgtg

SEQ ID NO: 204496 - DNA, 4362 bp, Homo sapiens
  Payload ID: 20338
  Gene Name: zinc finger, FYVE domain containing 1
  Uniprot ID: Q9HBF4
  ENST ID: ENST00000318876
  CDS Start-End: 641-2932
tgttagtccgagctgggagaagttcactccgatcagctgatcccaactgacaacaggagaggaggaagcccgggaggcaacgaaggaggagggtggcggagatggagatgaggatggatctgccggtgtcctgaggaatagcctctgcccccactggcgccctgcggccccccgacgccgccttgctgcggccgagcttctcagtggtatcccctgaaatactgacttcaggtcgaattatattgaaaagctcctgaccactttctttcattaccaaaactttgtagctgatgtccaaccgatgaacccaccaccgtgaacccatcagacctctctcagatagccataaaagacccttccaagtcaattttgaccacatctttgcttgcactttatggaggatgaaaccatcaaaccaaatcaacgttgctgctaatacaagagtcttagaggcagcaaattaaaaatttgaacatttgtttgtgaagaactataacaggacatgaaaggtgttcttttttaaagtgttcagaaccctgtggaagtttcgtgcagtcttcagactcaaatcttcgtcttcacccccggggcaagctcagtgactattatatggtgggtgtgtttccttaccagcgtgagtatgagtgcccagacttccccagcagagaagggcctgaatccggggctgatgtgccaggaaagttacgcttgcagcgggactgatgaagctatctttgagtgtgatgagtgctgcagtctgcagtgtctccgctgcgaggaggagctccatcggcaggagcgcctgagaaaccatgagcggataagactcaaacctggccatgtcccttactgtgacctctgcaagggtctcagtgggcatttaccaggtgttaggcagagggcaatagtgaggtgccagacctgcaaaattaacttgtgcctggagtgccagaagaggactcattctgggggtaacaaaaggagacaccctgttactgtgtacaatgtcagtaatctccaggagtcactggaggcagaagagatggatgaggagaccaagaggaagaagatgactgagaaggttgtgagtttcctcctagtagacgaaaatgaagaaattcaggtaacaaatgaagaagactttattagaaaattggactgcaaacctgatcagcatctgaaagtggtttccatttttggaaatactggtgatggaaagtctcatactctcaaccacactttcttttatggtcgtgaagtctttaaaacctccccgacccaggagtcctgcactgtgggagtgtgggcagcctatgacccagttcacaaagtagcagtgatcgatacggaagggctcctgggggccaccgtgaatctaagccagagaacacggctgctgcttaaggtcctggccatctcagacctcgtcatctatcgaactcatgcagaccggctgcataacgacctcttcaaattccttggggatgcctcagaagcttatctgaagcacttcaccaaggagctcaaggccaccactgctcgctgtggcctggatgtccctttatccacactgggccctgcagttatcatcttccatgagaccgtgcacacccagctactgggctctgatcatccctcagaggtgccagagaagctcatccaggaccggttccggaagctgggccgtttccctgaagcctttagttccattcactacaagggaacgaggacttacaaccctcccacggacttttctgggcttcggcgtgctttggagcagctactagagaataacaccacccgttctccccggcacccgggagtcatcttcaaagccctgaaggcactaagtgaccgcttcagcggtgagatccccgatgaccagatggcgcacagctccttttttccagatgagtatttcacctgctcctccttgtgcctcagctgtggggttggatgtaagaaaagcatgaatcatgggaaggaaggagtgcctcatgaagccaagagccgctgcagatactcccaccagtatgacaaccgagtgtatacctgcaaggcctgctatgagagaggcgaggaagtcagtgtagtgcccaaaacatctgcttccactgactccccctggatgggtctcgcaaaatatgcctggtctggtcggcagtactggtttggaaaccaagatcctgtggatacggtggtgcggacagagattgtgcatgtgtggcctggaactgatgggtttctgaaggacaacaacaatgctgcccagcgcctgttggacgggatgaacttcatggctcagtcggtgtccgagcttagccttggacccaccaaggctgtgacttcctggctgacagaccagatcgcccctgcctactggaggcccaactcccagattctgagctgcaacaagtgtgcgacgtcctttaaagataacgacactaagcatcactgccgagcctgtggggagggcttctgtgacagctgttcatcaaagactcggccagtgcctgagcggggctggggccctgcgccagtgcgggtctgtgacaactgctacgaagccaggaacgtccagttagctgttaccgaggcacaagtggacgatgaaggtggaacgctcattgctcggaaggtgggcgaggccgtgcagaacactctgggagccgtggtgacagccattgacataccactaggtctggtaaaggacgcggccaggcctgcgtactgggtgcctgaccacgaaatcctccactgccacaactgccggaaggagttcagcatcaagctctccaagcaccactgccgggcctgcggacagggcttctgtgatgagtgctcccatgaccgccgggctgttccttctcgtggctgggaccatcccgtccgagtctgcttcaactgcaataaaaagcccggtgacctttaaccccagccccctctccgagtccttcacaattccttaggttctcagggttagaaacagtcttgcgaggtaggccctcctcccagtcacctgctgtggtgtgtgtcctctcctctccgcatccagggccactttccctcagtgggggtgagcctggcggcaggcccgaaggtgtggacccctcagggcaggggaccttgcaacttatcgcaaaggggaatgaacctgaatccgttgcatttatttcagttaaaaataatgaatatatatgtgtatatctctctctcatatatacatatgaaaggcactcggggcgtatcgaggctgctgctggctgtgaagacttcgcacagtctcctccgcacagggtgaggtggcagtggcagcacgtcttcctcatgagccgagccaggtccatggccaccacgtggctggccccttcctctgctgctcttggagccttggaagcctctcctgtccttggctcttccctccatgcctgtcagctgcctggggagtgagcctccctggtccttcctgcctgaaacagcctgaagggaattctccctaggtctcctgggagtcgagtcccaattcttggcttaagcctgttttagtcagagaccacccaacttagcgtgcaggtcaccggagtgggtggagggtcagaggtcgggtcttcggccctgagaagtagaaatgcaggggccgtgctgtccctggtcccccagggaacagcaaggaaggaactgagccttctccagcagggcttcctgtcccgatgcttctgtctccactcggctttcccaaaaggcggcacccagctcctcaatcgaagcatctgcctcccacccctcggccccctcaagcccaccatctgcttctgagtgtcgcactaggattttcattgcttattttaaagtgtcttaatcctttgttcccagacacacaacccctctagctctcggaggggcgatcatgagaaaccttccagggaaactgagcacaggatgaactgttagttgtttttaaaagtctatataaatatttcaacagatcgtaaagaaaaaatttatctctttggtccttgcaagagaagtcaaaggaacttttgtttctcctcaagagcctggacatctctgtctgtcatgactggaaagggcccgttgtgctgaaatcctatcatcatggtggatttgatcttcagtggccaaacacgaattaaagtataattcttaactgaactggtgggtgggttgagctttagggaagtatatggcggtcattcctggtgcgcctatcggtgtgacatgagccctggagtgtgtcgtccctctcagccctgctcctcctgcctcctggggtccagtgactgggaccctactctagaactgtgtaccatccaattcgccatcataaaggaatcttcctgc

SEQ ID NO: 204497 - DNA, 1183 bp, Homo sapiens
  Payload ID: 20338
  Gene Name: zinc finger, FYVE domain containing 1
  Uniprot ID: Q9HBF4
  ENST ID: ENST00000394207
  CDS Start-End: 91-1179
agctttgggatctcaggaggaggagaacccaagaaactgtggaatgatgcactaagtgaccgcttcagcggtgagatccccgatgaccagatggcgcacagctccttttttccagatgagtatttcacctgctcctccttgtgcctcagctgtggggttggatgtaagaaaagcatgaatcatgggaaggaaggagtgcctcatgaagccaagagccgctgcagatactcccaccagtatgacaaccgagtgtatacctgcaaggcctgctatgagagaggcgaggaagtcagtgtagtgcccaaaacatctgcttccactgactccccctggatgggtctcgcaaaatatgcctggtctgggtatgtgatcgaatgtcctaactgtggcgtggtctatcgtagtcggcagtactggtttggaaaccaagatcctgtggatacggtggtgcggacagagattgtgcatgtgtggcctggaactgatgggtttctgaaggacaacaacaatgctgcccagcgcctgttggacgggatgaacttcatggctcagtcggtgtccgagcttagccttggacccaccaaggctgtgacttcctggctgacagaccagatcgcccctgcctactggaggcccaactcccagattctgagctgcaacaagtgtgcgacgtcctttaaagataacgacactaagcatcactgccgagcctgtggggagggcttctgtgacagctgttcatcaaagactcggccagtgcctgagcggggctggggccctgcgccagtgcgggtctgtgacaactgctacgaagccaggaacgtccagttagctgttaccgaggcacaagtggacgatgaaggtggaacgctcattgctcggaaggtgggcgaggccgtgcagaacactctgggagccgtggtgacagccattgacataccactaggtctggtaaaggacgcggccaggcctgcgtactgggtgcctgaccacgaaatcctccactgccacaactgccggaaggagttcagcatcaagctctccaagcaccactgccgggcctgcggacagggcttctgtgatgagtgctcccatgaccgccgggctgttccttctcgtggctgggaccatcccgtccgagtctgcttcaactgcaataaaaagcccggtgacctttaacccc

SEQ ID NO: 204498 - DNA, 4485 bp, Homo sapiens
  Payload ID: 20338
  Gene Name: zinc finger, FYVE domain containing 1
  Uniprot ID: Q9HBF4
  ENST ID: ENST00000556143
  CDS Start-End: 722-3055
agtgcgcactacgcccttgctggcgccgggatcctccctctctcgctcctccctttctgggctgcaccgctcacgccttcctgttagtccgagctgggagaagttcactccgatcagctgatcccaactgacaacaggagaggaggaagcccgggaggcaacgaaggaggagggtggcggagatggagatgaggatggatctgccggtgtcctgaggaatagcctctgcccccactggcgccctgcggccccccgacgccgccttgctgcggccgagcttctcagtggtatcccctgaaatactgacttcaggtcgaattatattgaaaagctcctgaccactttctttcattaccaaaactttgtagctgatgtccaaccgatgaacccaccaccgtgaacccatcagacctctctcagatagccataaaagacccttccaagtcaattttgaccacatctttgcttgcactttatggaggatgaaaccatcaaaccaaatcaacgttgctgctaatacaagagtcttagaggcagcaaattaaaaatttgaacatttgtttgtgaagaactataacaggacatgaaaggtgttcttttttaaagtgttcagaaccctgtggaagtttcgtgcagtcttcagactcaaatcttcgtcttcacccccggggcaagctcagtgactattatatggtgggtgtgtttccttaccagcgtgagtatgagtgcccagacttccccagcagagaagggcctgaatccggggctgatgtgccaggaaagttacgcttgcagcgggactgatgaagctatctttgagtgtgatgagtgctgcagtctgcagtgtctccgctgcgaggaggagctccatcggcaggagcgcctgagaaaccatgagcggataagactcaaacctggccatgtcccttactgtgacctctgcaagggtctcagtgggcatttaccaggtgttaggcagagggcaatagtgaggtgccagacctgcaaaattaacttgtgcctggagtgccagaagaggactcattctgggggtaacaaaaggagacaccctgttactgtgtacaatgtcagtaatctccaggagtcactggaggcagaagagatggatgaggagaccaagaggaagaagatgactgagaaggttgtgagtttcctcctagtagacgaaaatgaagaaattcaggtaacaaatgaagaagactttattagaaaattggactgcaaacctgatcagcatctgaaagtggtttccatttttggaaatactggtgatggaaagtctcatactctcaaccacactttcttttatggtcgtgaagtctttaaaacctccccgacccaggagtcctgcactgtgggagtgtgggcagcctatgacccagttcacaaagtagcagtgatcgatacggaagggctcctgggggccaccgtgaatctaagccagagaacacggctgctgcttaaggtcctggccatctcagacctcgtcatctatcgaactcatgcagaccggctgcataacgacctcttcaaattccttggggatgcctcagaagcttatctgaagcacttcaccaaggagctcaaggccaccactgctcgctgtggcctggatgtccctttatccacactgggccctgcagttatcatcttccatgagaccgtgcacacccagctactgggctctgatcatccctcagaggtgccagagaagctcatccaggaccggttccggaagctgggccgtttccctgaagcctttagttccattcactacaagggaacgaggacttacaaccctcccacggacttttctgggcttcggcgtgctttggagcagctactagagaataacaccacccgttctccccggcacccgggagtcatcttcaaagccctgaaggcactaagtgaccgcttcagcggtgagatccccgatgaccagatggcgcacagctccttttttccagatgagtatttcacctgctcctccttgtgcctcagctgtggggttggatgtaagaaaagcatgaatcatgggaaggaaggagtgcctcatgaagccaagagccgctgcagatactcccaccagtatgacaaccgagtgtatacctgcaaggcctgctatgagagaggcgaggaagtcagtgtagtgcccaaaacatctgcttccactgactccccctggatgggtctcgcaaaatatgcctggtctgggtatgtgatcgaatgtcctaactgtggcgtggtctatcgtagtcggcagtactggtttggaaaccaagatcctgtggatacggtggtgcggacagagattgtgcatgtgtggcctggaactgatgggtttctgaaggacaacaacaatgctgcccagcgcctgttggacgggatgaacttcatggctcagtcggtgtccgagcttagccttggacccaccaaggctgtgacttcctggctgacagaccagatcgcccctgcctactggaggcccaactcccagattctgagctgcaacaagtgtgcgacgtcctttaaagataacgacactaagcatcactgccgagcctgtggggagggcttctgtgacagctgttcatcaaagactcggccagtgcctgagcggggctggggccctgcgccagtgcgggtctgtgacaactgctacgaagccaggaacgtccagttagctgttaccgaggcacaagtggacgatgaaggtggaacgctcattgctcggaaggtgggcgaggccgtgcagaacactctgggagccgtggtgacagccattgacataccactaggtctggtaaaggacgcggccaggcctgcgtactgggtgcctgaccacgaaatcctccactgccacaactgccggaaggagttcagcatcaagctctccaagcaccactgccgggcctgcggacagggcttctgtgatgagtgctcccatgaccgccgggctgttccttctcgtggctgggaccatcccgtccgagtctgcttcaactgcaataaaaagcccggtgacctttaaccccagccccctctccgagtccttcacaattccttaggttctcagggttagaaacagtcttgcgaggtaggccctcctcccagtcacctgctgtggtgtgtgtcctctcctctccgcatccagggccactttccctcagtgggggtgagcctggcggcaggcccgaaggtgtggacccctcagggcaggggaccttgcaacttatcgcaaaggggaatgaacctgaatccgttgcatttatttcagttaaaaataatgaatatatatgtgtatatctctctctcatatatacatatgaaaggcactcggggcgtatcgaggctgctgctggctgtgaagacttcgcacagtctcctccgcacagggtgaggtggcagtggcagcacgtcttcctcatgagccgagccaggtccatggccaccacgtggctggccccttcctctgctgctcttggagccttggaagcctctcctgtccttggctcttccctccatgcctgtcagctgcctggggagtgagcctccctggtccttcctgcctgaaacagcctgaagggaattctccctaggtctcctgggagtcgagtcccaattcttggcttaagcctgttttagtcagagaccacccaacttagcgtgcaggtcaccggagtgggtggagggtcagaggtcgggtcttcggccctgagaagtagaaatgcaggggccgtgctgtccctggtcccccagggaacagcaaggaaggaactgagccttctccagcagggcttcctgtcccgatgcttctgtctccactcggctttcccaaaaggcggcacccagctcctcaatcgaagcatctgcctcccacccctcggccccctcaagcccaccatctgcttctgagtgtcgcactaggattttcattgcttattttaaagtgtcttaatcctttgttcccagacacacaacccctctagctctcggaggggcgatcatgagaaaccttccagggaaactgagcacaggatgaactgttagttgtttttaaaagtctatataaatatttcaacagatcgtaaagaaaaaatttatctctttggtccttgcaagagaagtcaaaggaacttttgtttctcctcaagagcctggacatctctgtctgtcatgactggaaagggcccgttgtgctgaaatcctatcatcatggtggatttgatcttcagtggccaaacacgaattaaagtataattcttaactgaactggtgggtgggttgagctttagggaagtatatggcggtcattcctggtgcgcctatcggtgtgacatgagccctggagtgtgtcgtccctctcagccctgctcctcctgcctcctggggtccagtgactgggaccctactctagaactgtgtaccatccaattcgccatcataaaggaatcttcctgc

SEQ ID NO: 204499 - DNA, 1225 bp, Homo sapiens
  Payload ID: 20338
  Gene Name: zinc finger, FYVE domain containing 1
  Uniprot ID: Q9HBF4
  ENST ID: ENST00000555072
  CDS Start-End: 137-1225
ctttcttggggtaggtgggcccttccctgcctttctcttctagctttgggatctcaggaggaggagaacccaagaaactgtggaatgatgtgaggcactaagtgaccgcttcagcggtgagatccccgatgaccagatggcgcacagctccttttttccagatgagtatttcacctgctcctccttgtgcctcagctgtggggttggatgtaagaaaagcatgaatcatgggaaggaaggagtgcctcatgaagccaagagccgctgcagatactcccaccagtatgacaaccgagtgtatacctgcaaggcctgctatgagagaggcgaggaagtcagtgtagtgcccaaaacatctgcttccactgactccccctggatgggtctcgcaaaatatgcctggtctgggtatgtgatcgaatgtcctaactgtggcgtggtctatcgtagtcggcagtactggtttggaaaccaagatcctgtggatacggtggtgcggacagagattgtgcatgtgtggcctggaactgatgggtttctgaaggacaacaacaatgctgcccagcgcctgttggacgggatgaacttcatggctcagtcggtgtccgagcttagccttggacccaccaaggctgtgacttcctggctgacagaccagatcgcccctgcctactggaggcccaactcccagattctgagctgcaacaagtgtgcgacgtcctttaaagataacgacactaagcatcactgccgagcctgtggggagggcttctgtgacagctgttcatcaaagactcggccagtgcctgagcggggctggggccctgcgccagtgcgggtctgtgacaactgctacgaagccaggaacgtccagttagctgttaccgaggcacaagtggacgatgaaggtggaacgctcattgctcggaaggtgggcgaggccgtgcagaacactctgggagccgtggtgacagccattgacataccactaggtctggtaaaggacgcggccaggcctgcgtactgggtgcctgaccacgaaatcctccactgccacaactgccggaaggagttcagcatcaagctctccaagcaccactgccgggcctgcggacagggcttctgtgatgagtgctcccatgaccgccgggctgttccttctcgtggctgggaccatcccgtccgagtctgcttcaactgcaataaaaagcccggtgacctttaa

SEQ ID NO: 204500 - DNA, 3244 bp, Homo sapiens
  Payload ID: 20338
  Gene Name: zinc finger, FYVE domain containing 1
  ENST ID: ENST00000553891
  CDS Start-End: 616-2985
actccgatcagctgatcccaactgacaacaggagaggaggaagcccgggaggcaacgaaggaggagggtggcggagatggagatgaggatggatctgccggtgtcctgaggaatagcctctgcccccactggcgccctgcggccccccgacgccgccttgctgcggccgagcttctcagtggtatcccctgaaatactgacttcaggtcgaattatattgaaaagctcctgaccactttctttcattaccaaaactttgtagctgatgtccaaccgatgaacccaccaccgtgaacccatcagacctctctcagatagccataaaagacccttccaagtcaattttgaccacatctttgcttgcactttatggaggatgaaaccatcaaaccaaatcaacgttgctgctaatacaagagtcttagaggcagcaaattaaaaatttgaacatttgtttgtgaagaactataacaggacatgaaaggtgttcttttttaaagtgttcagaaccctgtggaagtttcgtgcagtcttcagactcaaatcttcgtcttcacccccggggcaagctcagtgactattatatggtgggtgtgtttccttaccagcgtgagtatgagtgcccagacttccccagcagagaagggcctgaatccggggctgatgtgccaggaaagttacgcttgcagcgggactgatgaagctatctttgagtgtgatgagtgctgcagtctgcagtgtctccgctgcgaggaggagctccatcggcaggagcgcctgagaaaccatgagcggataagactcaaacctggccatgtcccttactgtgacctctgcaagggtctcagtgggcatttaccaggtgttaggcagagggcaatagtgaggtgccagacctgcaaaattaacttgtgcctggagtgccagaagaggactcattctgggggtaacaaaaggagacaccctgttactgtgtacaatgtcagtaatctccaggagtcactggaggcagaagagatggatgaggagaccaagaggaagaagatgactgagaaggttgtgagtttcctcctagtagacgaaaatgaagaaattcaggtaacaaatgaagaagactttattagaaaattggactgcaaacctgatcagcatctgaaagtggtttccatttttggaaatactggtgatggaaagtctcatactctcaaccacactttcttttatggtcgtgaagtctttaaaacctccccgacccaggagtcctgcactgtgggagtgtgggcagcctatgacccagttcacaaagtagcagtgatcgatacggaagggctcctgggggccaccgtgaatctaagccagagaacacggctgctgcttaaggtcctggccatctcagacctcgtcatctatcgaactcatgcagaccggctgcataacgacctcttcaaattccttggggatgcctcagaagcttatctgaagcacttcaccaaggagctcaaggccaccactgctcgctgtggcctggatgtccctttatccacactgggccctgcagttatcatcttccatgagaccgtgcacacccagctactgggctctgatcatccctcagaggtgccagagaagctcatccaggaccggttccggaagctgggccgtttccctgaagcctttagttccattcactacaagggaacgaggacttacaaccctcccacggacttttctgggcttcggcgtgctttggagcagctactagagaataacaccacccgttctccccggcacccgggagtcatcttcaaagccctgaaggcactaagtgaccgcttcagcggtgagatccccgatgaccagatggcgcacagctccttttttccagatgagtatttcacctgctcctccttgtgcctcagctgtggggttggatgtaagaaaagcatgaatcatgggaaggaaggagtgcctcatgaagccaagagccgctgcagatactcccaccagtatgacaaccgagtgtatacctgcaaggcctgctatgagagaggcgaggaagtcagtgtagtgcccaaaacatctgcttccactgactccccctggatgggtctcgcaaaatatgcctggtctgggtatgtgatcgaatgtcctaactgtggcgtggtctatcgtagtcggcagtactggtttggaaaccaagatcctgtggatacggtggtgcggacagagattgtgcatgtgtggcctggaactgatgggtttctgaaggacaacaacaatgctgcccagcgcctgttggacgggatgaacttcatggctcagtcggtgtccgagcttagccttggacccaccaaggctgtgacttcctggctgacagaccagatcgcccctgcctactggaggcccaactcccagattctgagctgcaacaagtgtgcgacgtcctttaaagataacgacactaagcatcactgccgagcctgtggggagggcttctgtgacagctgttcatcaaagactcggccagtgcctgagcggggctggggccctgcgccagtgcgggtctgtgacaactgctacgaagccaggaacgtccagttagctgttaccgaggcacaagtggacgatgaaggtggaacgctcattgctcggaaggtgggcgaggccgtgcagaacactctgggagccgtggtgacagccattgacataccactaggtctggtaaaggacgcggccaggcctgcgtactgggtgcctgaccacgaaatcctccactgccacaactgccggaaggagttcagcatcaagctctccaagcaccactgccgggcctgcggacagggcttctgtgatgagtgctcccatgaccgccgggctgttccttctcgtggctgggaccatcccgtccgagtctgcttcaactgcaataaaaagcccgcctggacatctctgtctgtcatgactggaaagggcccgttgtgctgaaatcctatcatcatggtggatttgatcttcagtggccaaacacgaattaaagtataattcttaactgaactggtgggtgggttgagctttagggaagtatatggcggtcattcctggtgcgcctatcggtgtgacatgagccctggagtgtgtcgtccctctcagccctgctcctcctgcctcctggggtccagtgactgggaccctactctagaactgtgtaccatccaattcgccatcataaaggaatcttcctgca

SEQ ID NO: 204501 - DNA, 6773 bp, Homo sapiens
  Payload ID: 20339
  Gene Name: zinc finger, FYVE domain containing 16
  Uniprot ID: Q7Z3T8
  ENST ID: ENST00000338008
  CDS Start-End: 181-4800
ctctgcgctgcccggtggggcggggaaagaagccctgagccgggatctggcactcccaggactcccggccggggtagctcttcactcctcagcgcgacgtcgtgtcgagttcccaaaaagctccgcaggggctgtagggaggcatacaagaattaaattctgaataagtctgcaggtaggatggacagttattttaaagcagctgtcagtgacttggacaaactccttgatgattttgaacagaacccagatgaacaagattatctccaagatgtacaaaatgcatatgattctaaccactgctcagtttcttcagagttggcttcctcacagcgaacttcattgctcccaaaagaccaagagtgcgttaatagttgtgcctcatcagaaacaagctatggaacaaatgagagttccctgaatgaaaaaacactcaagggacttacttctatacaaaatgaaaaaaatgtaacaggacttgatcttctttcttctgtggatggtggtacttcagatgaaatccagccgttatatatgggacgatgtagtaaacctatctgtgatctgataagtgacatgggtaacttagttcatgcaaccaatagtgaagaagatattaaaaaattattgccagatgattttaagtctaatgcagattccttgattggattggatttatcttcagtgtcagatactccctgtgtttcttcaacagaccatgatagtgatactgtcagagaacaacagaatgatatcagttctgaattacaaaatagagaaatcggaggaatcaaagaattgggtataaaagtagatacaacactttcagattcctataattacagtggaacagaaaatttaaaagataaaaagatctttaatcagttagaatcaattgttgattttaacatgtcatctgctttgactcgacaaagttccaaaatgtttcatgccaaagacaagctacaacacaagagccagccatgtggattactaaaagatgttggcttagtaaaagaggaagtagatgtggcagtcataactgccgcagaatgtttaaaagaagagggcaagacaagtgctttgacctgcagccttccgaaaaatgaagatttatgcttaaatgattcaaattcaagagatgaaaatttcaaattacctgacttttcctttcaggaagataagactgttataaaacaatctgcacaagaagactcaaaaagtttagaccttaaggataatgatgtaatccaagattcctcttcagctttacatgtttccagtaaagatgtgccgtcctcattgtcctgtcttcctgcgtctgggtctatgtgtggatcattaattgaaagtaaagcacggggtgattttttacctcagcatgaacataaagataatatacaagatgcagtgactatacatgaagaaatacagaacagtgttgttctaggtggggaaccattcaaagagaatgatcttttgaaacaggaaaaatgtaaaagcatactccttcagtcattaattgaagggatggaagacagaaagatagatcctgaccagacagtaatcagagctgagtctttggatggtggtgacaccagttctacagttgtagaatctcaagaggggctttctggcactcatgtcccagagtcttctgattgttgtgaaggttttattaatactttttcaagcaatgatatggatgggcaagacttagattactttaatattgatgaaggcgcaaaaagtggcccactaattagtgatgctgaacttgatgcctttctgacagaacagtatcttcagaccactaacataaagtcttttgaagaaaatgtaaatgactctaaatcgcaaatgaatcagatagatatgaaaggcttagatgatggaaacatcaataatatatatttcaatgcagaagcaggagctattggggaaagtcatggtattaatataatttgtgaaatagttgataaacaaaatacaatagaaaatggcctttctttaggagaaaaaagcactattccagttcaacaagggttacctaccagtaagtctgagattacaaatcaattatcggtctctgatattaacagtcaatctgttggaggggccagacctaagcaattgtttagccttccatcaagaacaaggagttcaaaggacctgaataagccagatgttccagatacaatagaaagtgaacccagcacagcagataccgttgttccaatcacttgtgctatagattctacagctgatccacaggttagcttcaactctaattacattgatatagaaagtaattctgaaggtggatctagtttcgtaactgcaaatgaagattctgtacctgaaaacacttgcaaagaaggcttggttttgggccagaaacagcctacttgggttcctgattcagaagctccaaactgtatgaactgccaagtcaaatttacttttaccaaacggcgacaccattgccgagcatgtgggaaagtattttgtggtgtctgttgtaataggaagtgtaaactgcaatatctagaaaaggaagcaagagtatgtgtagtctgctatgaaactattagtaaagctcaggcatttgaaaggatgatgagtccaactggttctaatcttaagtctaatcattctgatgaatgtactactgtccagcctcctcaggagaaccaaacatccagtataccttcaccagcaactttgccagtctcagcacttaaacaaccaggtgttgaaggactatgttccaaagaacagaagagagtatggtttgcagatggtatattgcccaatggtgaagttgcagatacaacaaaattatcatctggaagtaaaagatgttctgaagactttagtcctctctcacctgatgtgcctatgacagtaaacacagtggatcattcccattctactacagtggaaaagccaaacaatgagacaggagatattacaagaaatgagataattcagagtcctatttctcaggttccatcagtggaaaaattgtctatgaacacaggaaatgaggggttacctacttctggttcatttacactagatgatgatgtttttgcagaaactgaagaaccatctagtcctactggtgtcttagttaacagcaatttacctattgctagtatttcagattataggttactgtgtgatattaacaagtatgtctgcaataagattagtcttctacctaatgatgaggacagtttgcccccacttctggttgcatctggagaaaagggatcagtgcctgtagtagaagaacatccatctcatgagcagatcattttgcttcttgaaggtgaaagctttcatcctgttacatttgtcctaaatgctaatctactcgtgaatgtcaaattcatattttattcctcagacaaatattggtacttttcaaccaatggattgcatggcttgggacaggcagaaattattattctattgttatgtttgccaaatgaagatactattcctaaggacatcttcagactatttatcaccatatataaggatgctctaaaaggaaaatacatagaaaacttggacaatattacctttactgagagttttctcagtagcaaggatcacggaggattcctgtttattacacctacttttcagaaacttgatgatctctcattaccaagtaatccttttctttgtggaattcttatccagaagcttgagattccctgggcaaaggtttttcctatgcgtttaatgttgagattgggtgcagaatataaagcatatcctgctcctctaacaagcatcagaggccgaaaacctctttttggagaaataggacacactattatgaacttacttgttgaccttcgaaattaccagtataccttgcataatatagatcaactgttgattcatatggaaatgggaaaaagctgcataaaaataccacggaaaaagtacagtgatgtaatgaaagtactaaattcttccaatgagcatgtcattagcattggagcaagtttcagtacagaagcagattctcatctagtctgtatacagaatgatggaatttatgaaacacaggccaacagtgccactggccatcctagaaaagtgacaggtgcaagttttgtggtattcaatggagctctaaaaacatcttcaggatttcttgctaagtccagcatagttgaagatggcttaatggtacaaataactccagagaccatgaatggcttgcggctagctttacgagaacagaaagactttaaaattacatgtgggaaagttgatgcagtagacctgagagaatacgtggatatctgctgggtagatgctgaagaaaaaggaaacaaaggagttatcagttcagtggatggaatatcattacaaggatttccaagtgaaaaaataaaactggaagcagattttgaaaccgatgagaagattgtaaaatgtaccgaggtgttctactttctaaaggaccaggatttatctattttatcaacttcttatcagtttgcaaaagaaatagccatggcttgtagtgctgcgctgtgccctcacctgaaaactctaaaaagtaatgggatgaataaaattggactcagagtttccattgacactgatatggttgaatttcaggcaggatctgaaggccaacttctgcctcagcattatctaaatgatcttgatagtgctctgatacctgtgatccatggtgggacctccaactctagtttaccattagaaatagaattagtgtttttcattatagaacatcttttttagtgaaagaatgtgccatattacatattgcaacctaatttgttaaaactaactccagcactaaagctgaaatgccacaaacactaaaagtataaatatgtctgatttttgaaacacataagctttgctctttaggcaggaatgatcttttcaaatcattagcacaatatttaaatatctaaaaatttaagagatccatactttctgtagctttacaattaatttaagtactaaaaagacaaggatttcttttaagaaatttatagcatttactgtgttatttaaatgctaagccaaagtatctgcacttaggtatacctctttatgccaataatgattttaatgaaggctcttttcagatgtaaccttatgaaggaaatatctgctttgtgtatatgccagttagaatactggtttctaaagtctgtcaaattgtatttcagtggcacaaaaaccagttttgaggtcttagacttataattctttgaataaaactgataacttatttgtataattggagtggagacctacctccataattagataaactctttttggattataatcagaattttgccttttttcttctcaaattattacatatgtatgtattatatatccacatatatagttttccctgattaaatggatattaaaataattgcgggtgcttcaggactttttgcttctatatttaagtatattgtttttatagcaagaacatattctgaatgttttataaatctttaataatttatatgtaggtaatatttttgtatcacaatgcattatttttttcctcctttccttccaaactataccactgtatttaccacttctaagagtgactgacgacgggccagatgacccttgaagtagtcattatgtagcaataaatgaagcctgaaacaggtttttttacttccactttaatccttagaaatttcttggcaacttcgcatattttcattgacaccagtgtataagtataaatttaaatgaactaattacttttgcatattttaaattctttatatggtagttattttttataacaggatattaacataagttaaatcctatgtatttgaaattgttacagagctttcctctttacttcaaacagcaaaaaagtggggggcatattgtagtcctgtcatttaagttatgtaaaaaatttaatcattattttgatgctttaaacattctcatgtgtaatatatgtttttgtatcaaaaacactcatatatttcaagaaaaagaaattatgttaaatagccctgttttaagaaaaatatttatgaagcatctcaacttgaagatcaagtcaaagttataactcaggatctgaggtctcaagctaggagagactgagaattttaatcagtttgggcatatagtttggactgaatcacatctgtagtacttagccaaagacaatttggaggagaatatcagccttctggaagtagctacttcctgaacaatgtaaagtgtcgcagatattcaataaaatggcaacctgttataatttgtgaaatttattgaaatggtgtaagatgaaaacaattgcatatcaaacccaatttatgttttctaaatatagtgtatgtattctgccatgtaagtaattgaacagtcttaaaataaccaaatggtagagggctgttccatgatgggacagctttggatttgttttcataaaatctctatattcaataaaaattggaattatgtgcctgaagtttggaggcacattttgaagtattctttgtagacatatagtatgtttctgaatgtgtttgttacttatttggtcattggtacttaatttgaaattttaattttttaagagaagaaatagaatggttctttgtactcagtctgcaatgatctatttttggcttatgtcttttaatactactctctttctctgaattttgaaatatgaagtaaaatctagcccatttgtttta

SEQ ID NO: 204502 - DNA, 308 bp, Homo sapiens
  Payload ID: 20339
  Gene Name: zinc finger, FYVE domain containing 16
  ENST ID: ENST00000507548
  CDS Start-End: 1-154
aggactatgttccaaagaacagaagagagtatggtttgcagatggtatattgcccaatggtgaagttgcagatacaacaaaattatcatctggaagtaaaagatgttctgaagactttagtcctctctcacctgatgtgcctatgtgcctgtagtagaagaacatccatctcatgagcagatcattttgcttcttgaaggtgaaagctttcatcctgttacatttgtcctaaatgctaatctactcgtgaatgtcaaattcatattttattcctcagacaaatattggtacttttcaaccaatggatt

SEQ ID NO: 204503 - DNA, 684 bp, Homo sapiens
  Payload ID: 20339
  Gene Name: zinc finger, FYVE domain containing 16
  ENST ID: ENST00000509562
  CDS Start-End: 565-684
cccggccggggtagctcttcactcctcagcgcgacgtcgtgtcgagttcccaaaaagctccgcaggggctgtagggaggcatacaagaattaaattctgaataagtctgcaggtaggatggacagttattttaaagcagctgtcagtgacttggacaaactccttgatgattttgaacagaacccagatggggtctcactgtgttgctcaggctggtcttgaactcctgatctcaagttatcctccgaccgtggcttcccaaagcgctgggattacagttatgaacaagattatctccaagatgtacaaaatgcatatgattctaaccactgctcagtttcttcagagttggcttcctcacagcgaacttcattgctcccaaaagaccaagagtgcgttaatagttgtgcctcatcagaaacaagctatggaacaaatgagagttccctgaatgaaaaaacactcaagggacttacttctatacaaaatgaaaaaaatgtaacaggacttgatcttctttcttctgtggatggtggtacttcagatgaaatccagccgttatatatgggacgatgtagtaaacctatctgtgatctgataagtgacatgggtaacttagttcatgcaaccaatagtgaagaagatattaaaaaattattgccagatgattttaagtctaatgca

SEQ ID NO: 204504 - DNA, 6680 bp, Homo sapiens
  Payload ID: 20339
  Gene Name: zinc finger, FYVE domain containing 16
  Uniprot ID: Q7Z3T8
  ENST ID: ENST00000510158
  CDS Start-End: 298-4917
ccggtggggcggggaaagaagccctgagccgggatctggcactcccaggactcccggccggggtagctcttcactcctcagcgcgacgtcgtgtcgagttcccaaaaagctccgcaggggctgtagggaggtgatctcatccattaacagctgtgtgttgccagttcccaaatctttatctatctcagacttctctcctgcattccagattcttatattcagctgccttttggatatctctcccaggatgttctcaaggcatacaagaattaaattctgaataagtctgcaggtaggatggacagttattttaaagcagctgtcagtgacttggacaaactccttgatgattttgaacagaacccagatgaacaagattatctccaagatgtacaaaatgcatatgattctaaccactgctcagtttcttcagagttggcttcctcacagcgaacttcattgctcccaaaagaccaagagtgcgttaatagttgtgcctcatcagaaacaagctatggaacaaatgagagttccctgaatgaaaaaacactcaagggacttacttctatacaaaatgaaaaaaatgtaacaggacttgatcttctttcttctgtggatggtggtacttcagatgaaatccagccgttatatatgggacgatgtagtaaacctatctgtgatctgataagtgacatgggtaacttagttcatgcaaccaatagtgaagaagatattaaaaaattattgccagatgattttaagtctaatgcagattccttgattggattggatttatcttcagtgtcagatactccctgtgtttcttcaacagaccatgatagtgatactgtcagagaacaacagaatgatatcagttctgaattacaaaatagagaaatcggaggaatcaaagaattgggtataaaagtagatacaacactttcagattcctataattacagtggaacagaaaatttaaaagataaaaagatctttaatcagttagaatcaattgttgattttaacatgtcatctgctttgactcgacaaagttccaaaatgtttcatgccaaagacaagctacaacacaagagccagccatgtggattactaaaagatgttggcttagtaaaagaggaagtagatgtggcagtcataactgccgcagaatgtttaaaagaagagggcaagacaagtgctttgacctgcagccttccgaaaaatgaagatttatgcttaaatgattcaaattcaagagatgaaaatttcaaattacctgacttttcctttcaggaagataagactgttataaaacaatctgcacaagaagactcaaaaagtttagaccttaaggataatgatgtaatccaagattcctcttcagctttacatgtttccagtaaagatgtgccgtcctcattgtcctgtcttcctgcgtctgggtctatgtgtggatcattaattgaaagtaaagcacggggtgattttttacctcagcatgaacataaagataatatacaagatgcagtgactatacatgaagaaatacagaacagtgttgttctaggtggggaaccattcaaagagaatgatcttttgaaacaggaaaaatgtaaaagcatactccttcagtcattaattgaagggatggaagacagaaagatagatcctgaccagacagtaatcagagctgagtctttggatggtggtgacaccagttctacagttgtagaatctcaagaggggctttctggcactcatgtcccagagtcttctgattgttgtgaaggttttattaatactttttcaagcaatgatatggatgggcaagacttagattactttaatattgatgaaggcgcaaaaagtggcccactaattagtgatgctgaacttgatgcctttctgacagaacagtatcttcagaccactaacataaagtcttttgaagaaaatgtaaatgactctaaatcgcaaatgaatcagatagatatgaaaggcttagatgatggaaacatcaataatatatatttcaatgcagaagcaggagctattggggaaagtcatggtattaatataatttgtgaaatagttgataaacaaaatacaatagaaaatggcctttctttaggagaaaaaagcactattccagttcaacaagggttacctaccagtaagtctgagattacaaatcaattatcggtctctgatattaacagtcaatctgttggaggggccagacctaagcaattgtttagccttccatcaagaacaaggagttcaaaggacctgaataagccagatgttccagatacaatagaaagtgaacccagcacagcagataccgttgttccaatcacttgtgctatagattctacagctgatccacaggttagcttcaactctaattacattgatatagaaagtaattctgaaggtggatctagtttcgtaactgcaaatgaagattctgtacctgaaaacacttgcaaagaaggcttggttttgggccagaaacagcctacttgggttcctgattcagaagctccaaactgtatgaactgccaagtcaaatttacttttaccaaacggcgacaccattgccgagcatgtgggaaagtattttgtggtgtctgttgtaataggaagtgtaaactgcaatatctagaaaaggaagcaagagtatgtgtagtctgctatgaaactattagtaaagctcaggcatttgaaaggatgatgagtccaactggttctaatcttaagtctaatcattctgatgaatgtactactgtccagcctcctcaggagaaccaaacatccagtataccttcaccagcaactttgccagtctcagcacttaaacaaccaggtgttgaaggactatgttccaaagaacagaagagagtatggtttgcagatggtatattgcccaatggtgaagttgcagatacaacaaaattatcatctggaagtaaaagatgttctgaagactttagtcctctctcacctgatgtgcctatgacagtaaacacagtggatcattcccattctactacagtggaaaagccaaacaatgagacaggagatattacaagaaatgagataattcagagtcctatttctcaggttccatcagtggaaaaattgtctatgaacacaggaaatgaggggttacctacttctggttcatttacactagatgatgatgtttttgcagaaactgaagaaccatctagtcctactggtgtcttagttaacagcaatttacctattgctagtatttcagattataggttactgtgtgatattaacaagtatgtctgcaataagattagtcttctacctaatgatgaggacagtttgcccccacttctggttgcatctggagaaaagggatcagtgcctgtagtagaagaacatccatctcatgagcagatcattttgcttcttgaaggtgaaagctttcatcctgttacatttgtcctaaatgctaatctactcgtgaatgtcaaattcatattttattcctcagacaaatattggtacttttcaaccaatggattgcatggcttgggacaggcagaaattattattctattgttatgtttgccaaatgaagatactattcctaaggacatcttcagactatttatcaccatatataaggatgctctaaaaggaaaatacatagaaaacttggacaatattacctttactgagagttttctcagtagcaaggatcacggaggattcctgtttattacacctacttttcagaaacttgatgatctctcattaccaagtaatccttttctttgtggaattcttatccagaagcttgagattccctgggcaaaggtttttcctatgcgtttaatgttgagattgggtgcagaatataaagcatatcctgctcctctaacaagcatcagaggccgaaaacctctttttggagaaataggacacactattatgaacttacttgttgaccttcgaaattaccagtataccttgcataatatagatcaactgttgattcatatggaaatgggaaaaagctgcataaaaataccacggaaaaagtacagtgatgtaatgaaagtactaaattcttccaatgagcatgtcattagcattggagcaagtttcagtacagaagcagattctcatctagtctgtatacagaatgatggaatttatgaaacacaggccaacagtgccactggccatcctagaaaagtgacaggtgcaagttttgtggtattcaatggagctctaaaaacatcttcaggatttcttgctaagtccagcatagttgaagatggcttaatggtacaaataactccagagaccatgaatggcttgcggctagctttacgagaacagaaagactttaaaattacatgtgggaaagttgatgcagtagacctgagagaatacgtggatatctgctgggtagatgctgaagaaaaaggaaacaaaggagttatcagttcagtggatggaatatcattacaaggatttccaagtgaaaaaataaaactggaagcagattttgaaaccgatgagaagattgtaaaatgtaccgaggtgttctactttctaaaggaccaggatttatctattttatcaacttcttatcagtttgcaaaagaaatagccatggcttgtagtgctgcgctgtgccctcacctgaaaactctaaaaagtaatgggatgaataaaattggactcagagtttccattgacactgatatggttgaatttcaggcaggatctgaaggccaacttctgcctcagcattatctaaatgatcttgatagtgctctgatacctgtgatccatggtgggacctccaactctagtttaccattagaaatagaattagtgtttttcattatagaacatcttttttagtgaaagaatgtgccatattacatattgcaacctaatttgttaaaactaactccagcactaaagctgaaatgccacaaacactaaaagtataaatatgtctgatttttgaaacacataagctttgctctttaggcaggaatgatcttttcaaatcattagcacaatatttaaatatctaaaaatttaagagatccatactttctgtagctttacaattaatttaagtactaaaaagacaaggatttcttttaagaaatttatagcatttactgtgttatttaaatgctaagccaaagtatctgcacttaggtatacctctttatgccaataatgattttaatgaaggctcttttcagatgtaaccttatgaaggaaatatctgctttgtgtatatgccagttagaatactggtttctaaagtctgtcaaattgtatttcagtggcacaaaaaccagttttgaggtcttagacttataattctttgaataaaactgataacttatttgtataattggagtggagacctacctccataattagataaactctttttggattataatcagaattttgccttttttcttctcaaattattacatatgtatgtattatatatccacatatatagttttccctgattaaatggatattaaaataattgcgggtgcttcaggactttttgcttctatatttaagtatattgtttttatagcaagaacatattctgaatgttttataaatctttaataatttatatgtaggtaatatttttgtatcacaatgcattatttttttcctcctttccttccaaactataccactgtatttaccacttctaagagtgactgacgacgggccagatgacccttgaagtagtcattatgtagcaataaatgaagcctgaaacaggtttttttacttccactttaatccttagaaatttcttggcaacttcgcatattttcattgacaccagtgtataagtataaatttaaatgaactaattacttttgcatattttaaattctttatatggtagttattttttataacaggatattaacataagttaaatcctatgtatttgaaattgttacagagctttcctctttacttcaaacagcaaaaaagtggggggcatattgtagtcctgtcatttaagttatgtaaaaaatttaatcattattttgatgctttaaacattctcatgtgtaatatatgtttttgtatcaaaaacactcatatatttcaagaaaaagaaattatgttaaatagccctgttttaagaaaaatatttatgaagcatctcaacttgaagatcaagtcaaagttataactcaggatctgaggtctcaagctaggagagactgagaattttaatcagtttgggcatatagtttggactgaatcacatctgtagtacttagccaaagacaatttggaggagaatatcagccttctggaagtagctacttcctgaacaatgtaaagtgtcgcagatattcaataaaatggcaacctgttataatttgtgaaatttattgaaatggtgtaagatgaaaacaattgcatatcaaacccaatttatgttttctaaatatagtgtatgtattctgccatgtaagtaattgaacagtcttaaaataaccaaatggtagagggctgttccatgatgggacagctttggatttgttttcataaaatctctatattcaataaaaattggaattatgtgcctgaagtttggaggcacattttgaagt

SEQ ID NO: 204505 - DNA, 423 bp, Homo sapiens
  Payload ID: 20339
  Gene Name: zinc finger, FYVE domain containing 16
  ENST ID: ENST00000513789
  CDS Start-End: 1-112
caatggagctctaaaaacatcttcaggatttcttgctaagtccagcatagttgaagagttatcagttcagtggatggaatatcattacaaggatttccaagtgaaaaaataaaactggaagcagattttgaaaccgatgagaagattgtaaaatgtaccgaggtgttctactttctaaaggaccaggatttatctattttatcaacttcttatcagtttgcaaaagaaatagccatggcttgtagtgctgcgctgtgccctcacctgaaaactctaaaaagtaatgggatgaataaaattggactcagagtttccattgacactgatatggttgaatttcaggcaggatctgaaggccaacttctgcctcagcattatctaaatgatcttgatagtgctctgatacctgtgatccatggtggg

SEQ ID NO: 204506 - DNA, 637 bp, Homo sapiens
  Payload ID: 20339
  Gene Name: zinc finger, FYVE domain containing 16
  ENST ID: ENST00000509558
  CDS Start-End: 1-156
actggttctaatcttaagtctaatcattctgatgaatgtactactgtccagcctcctcaggagaaccaaacatccagtataccttcaccagcaactttgccagtctcagcacttaaacaaccaggtgttgaagtgcctgctattggaaaaagctgaccaaagccagtaacaagagagtctgggaattgcactttccagacttccagcctggcatccaagagcccactgtagagggtgagcttgggtttgagaggcaataggactatgttccaaagaacagaagagagtatggtttgcagatggtatattgcccaatggtgaagttgcagatacaacaaaattatcatctggaagtaaaagatgttctgaagactttagtcctctctcacctgatgtgcctatgacagtaaacacagtggatcattcccattctactacagtggaaaagccaaacaatgagacaggagatattacaagaaatgagataattcagagtcctatttctcaggttccatcagtggaaaaattgtctatgaacacaggaaatgaggggttacctacttctggttcatttacactagatgatgatgtttttgcagaaactgaagaaccatctagtcctactggtgtcttagtt

SEQ ID NO: 204507 - DNA, 6599 bp, Homo sapiens
  Payload ID: 20339
  Gene Name: zinc finger, FYVE domain containing 16
  Uniprot ID: Q7Z3T8
  ENST ID: ENST00000505560
  CDS Start-End: 222-4841
ggtggggcggggaaagaagccctgagccgggatctggcactcccaggactcccggccggggtagctcttcactcctcagcgcgacgtcgtgtcgagttcccaaaaagctccgcaggggctgtagggagattcctgtgaggtttctcgggcttatttggtggagtttctgttccagaccagaggcatacaagaattaaattctgaataagtctgcaggtaggatggacagttattttaaagcagctgtcagtgacttggacaaactccttgatgattttgaacagaacccagatgaacaagattatctccaagatgtacaaaatgcatatgattctaaccactgctcagtttcttcagagttggcttcctcacagcgaacttcattgctcccaaaagaccaagagtgcgttaatagttgtgcctcatcagaaacaagctatggaacaaatgagagttccctgaatgaaaaaacactcaagggacttacttctatacaaaatgaaaaaaatgtaacaggacttgatcttctttcttctgtggatggtggtacttcagatgaaatccagccgttatatatgggacgatgtagtaaacctatctgtgatctgataagtgacatgggtaacttagttcatgcaaccaatagtgaagaagatattaaaaaattattgccagatgattttaagtctaatgcagattccttgattggattggatttatcttcagtgtcagatactccctgtgtttcttcaacagaccatgatagtgatactgtcagagaacaacagaatgatatcagttctgaattacaaaatagagaaatcggaggaatcaaagaattgggtataaaagtagatacaacactttcagattcctataattacagtggaacagaaaatttaaaagataaaaagatctttaatcagttagaatcaattgttgattttaacatgtcatctgctttgactcgacaaagttccaaaatgtttcatgccaaagacaagctacaacacaagagccagccatgtggattactaaaagatgttggcttagtaaaagaggaagtagatgtggcagtcataactgccgcagaatgtttaaaagaagagggcaagacaagtgctttgacctgcagccttccgaaaaatgaagatttatgcttaaatgattcaaattcaagagatgaaaatttcaaattacctgacttttcctttcaggaagataagactgttataaaacaatctgcacaagaagactcaaaaagtttagaccttaaggataatgatgtaatccaagattcctcttcagctttacatgtttccagtaaagatgtgccgtcctcattgtcctgtcttcctgcgtctgggtctatgtgtggatcattaattgaaagtaaagcacggggtgattttttacctcagcatgaacataaagataatatacaagatgcagtgactatacatgaagaaatacagaacagtgttgttctaggtggggaaccattcaaagagaatgatcttttgaaacaggaaaaatgtaaaagcatactccttcagtcattaattgaagggatggaagacagaaagatagatcctgaccagacagtaatcagagctgagtctttggatggtggtgacaccagttctacagttgtagaatctcaagaggggctttctggcactcatgtcccagagtcttctgattgttgtgaaggttttattaatactttttcaagcaatgatatggatgggcaagacttagattactttaatattgatgaaggcgcaaaaagtggcccactaattagtgatgctgaacttgatgcctttctgacagaacagtatcttcagaccactaacataaagtcttttgaagaaaatgtaaatgactctaaatcgcaaatgaatcagatagatatgaaaggcttagatgatggaaacatcaataatatatatttcaatgcagaagcaggagctattggggaaagtcatggtattaatataatttgtgaaatagttgataaacaaaatacaatagaaaatggcctttctttaggagaaaaaagcactattccagttcaacaagggttacctaccagtaagtctgagattacaaatcaattatcggtctctgatattaacagtcaatctgttggaggggccagacctaagcaattgtttagccttccatcaagaacaaggagttcaaaggacctgaataagccagatgttccagatacaatagaaagtgaacccagcacagcagataccgttgttccaatcacttgtgctatagattctacagctgatccacaggttagcttcaactctaattacattgatatagaaagtaattctgaaggtggatctagtttcgtaactgcaaatgaagattctgtacctgaaaacacttgcaaagaaggcttggttttgggccagaaacagcctacttgggttcctgattcagaagctccaaactgtatgaactgccaagtcaaatttacttttaccaaacggcgacaccattgccgagcatgtgggaaagtattttgtggtgtctgttgtaataggaagtgtaaactgcaatatctagaaaaggaagcaagagtatgtgtagtctgctatgaaactattagtaaagctcaggcatttgaaaggatgatgagtccaactggttctaatcttaagtctaatcattctgatgaatgtactactgtccagcctcctcaggagaaccaaacatccagtataccttcaccagcaactttgccagtctcagcacttaaacaaccaggtgttgaaggactatgttccaaagaacagaagagagtatggtttgcagatggtatattgcccaatggtgaagttgcagatacaacaaaattatcatctggaagtaaaagatgttctgaagactttagtcctctctcacctgatgtgcctatgacagtaaacacagtggatcattcccattctactacagtggaaaagccaaacaatgagacaggagatattacaagaaatgagataattcagagtcctatttctcaggttccatcagtggaaaaattgtctatgaacacaggaaatgaggggttacctacttctggttcatttacactagatgatgatgtttttgcagaaactgaagaaccatctagtcctactggtgtcttagttaacagcaatttacctattgctagtatttcagattataggttactgtgtgatattaacaagtatgtctgcaataagattagtcttctacctaatgatgaggacagtttgcccccacttctggttgcatctggagaaaagggatcagtgcctgtagtagaagaacatccatctcatgagcagatcattttgcttcttgaaggtgaaagctttcatcctgttacatttgtcctaaatgctaatctactcgtgaatgtcaaattcatattttattcctcagacaaatattggtacttttcaaccaatggattgcatggcttgggacaggcagaaattattattctattgttatgtttgccaaatgaagatactattcctaaggacatcttcagactatttatcaccatatataaggatgctctaaaaggaaaatacatagaaaacttggacaatattacctttactgagagttttctcagtagcaaggatcacggaggattcctgtttattacacctacttttcagaaacttgatgatctctcattaccaagtaatccttttctttgtggaattcttatccagaagcttgagattccctgggcaaaggtttttcctatgcgtttaatgttgagattgggtgcagaatataaagcatatcctgctcctctaacaagcatcagaggccgaaaacctctttttggagaaataggacacactattatgaacttacttgttgaccttcgaaattaccagtataccttgcataatatagatcaactgttgattcatatggaaatgggaaaaagctgcataaaaataccacggaaaaagtacagtgatgtaatgaaagtactaaattcttccaatgagcatgtcattagcattggagcaagtttcagtacagaagcagattctcatctagtctgtatacagaatgatggaatttatgaaacacaggccaacagtgccactggccatcctagaaaagtgacaggtgcaagttttgtggtattcaatggagctctaaaaacatcttcaggatttcttgctaagtccagcatagttgaagatggcttaatggtacaaataactccagagaccatgaatggcttgcggctagctttacgagaacagaaagactttaaaattacatgtgggaaagttgatgcagtagacctgagagaatacgtggatatctgctgggtagatgctgaagaaaaaggaaacaaaggagttatcagttcagtggatggaatatcattacaaggatttccaagtgaaaaaataaaactggaagcagattttgaaaccgatgagaagattgtaaaatgtaccgaggtgttctactttctaaaggaccaggatttatctattttatcaacttcttatcagtttgcaaaagaaatagccatggcttgtagtgctgcgctgtgccctcacctgaaaactctaaaaagtaatgggatgaataaaattggactcagagtttccattgacactgatatggttgaatttcaggcaggatctgaaggccaacttctgcctcagcattatctaaatgatcttgatagtgctctgatacctgtgatccatggtgggacctccaactctagtttaccattagaaatagaattagtgtttttcattatagaacatcttttttagtgaaagaatgtgccatattacatattgcaacctaatttgttaaaactaactccagcactaaagctgaaatgccacaaacactaaaagtataaatatgtctgatttttgaaacacataagctttgctctttaggcaggaatgatcttttcaaatcattagcacaatatttaaatatctaaaaatttaagagatccatactttctgtagctttacaattaatttaagtactaaaaagacaaggatttcttttaagaaatttatagcatttactgtgttatttaaatgctaagccaaagtatctgcacttaggtatacctctttatgccaataatgattttaatgaaggctcttttcagatgtaaccttatgaaggaaatatctgctttgtgtatatgccagttagaatactggtttctaaagtctgtcaaattgtatttcagtggcacaaaaaccagttttgaggtcttagacttataattctttgaataaaactgataacttatttgtataattggagtggagacctacctccataattagataaactctttttggattataatcagaattttgccttttttcttctcaaattattacatatgtatgtattatatatccacatatatagttttccctgattaaatggatattaaaataattgcgggtgcttcaggactttttgcttctatatttaagtatattgtttttatagcaagaacatattctgaatgttttataaatctttaataatttatatgtaggtaatatttttgtatcacaatgcattatttttttcctcctttccttccaaactataccactgtatttaccacttctaagagtgactgacgacgggccagatgacccttgaagtagtcattatgtagcaataaatgaagcctgaaacaggtttttttacttccactttaatccttagaaatttcttggcaacttcgcatattttcattgacaccagtgtataagtataaatttaaatgaactaattacttttgcatattttaaattctttatatggtagttattttttataacaggatattaacataagttaaatcctatgtatttgaaattgttacagagctttcctctttacttcaaacagcaaaaaagtggggggcatattgtagtcctgtcatttaagttatgtaaaaaatttaatcattattttgatgctttaaacattctcatgtgtaatatatgtttttgtatcaaaaacactcatatatttcaagaaaaagaaattatgttaaatagccctgttttaagaaaaatatttatgaagcatctcaacttgaagatcaagtcaaagttataactcaggatctgaggtctcaagctaggagagactgagaattttaatcagtttgggcatatagtttggactgaatcacatctgtagtacttagccaaagacaatttggaggagaatatcagccttctggaagtagctacttcctgaacaatgtaaagtgtcgcagatattcaataaaatggcaacctgttataatttgtgaaatttattgaaatggtgtaagatgaaaacaattgcatatcaaacccaatttatgttttctaaatatagtgtatgtattctgccatgtaagtaattgaacagtcttaaaataaccaaatggtagagggctgttccatgatgggacagctttggatttgttttcataaaatctctatattcaataaaaattggaattatgtgcctgaagtttggaggcacatttt

SEQ ID NO: 204508 - DNA, 1555 bp, Homo sapiens
  Payload ID: 20340
  Gene Name: zinc finger, FYVE domain containing 19
  Uniprot ID: Q96K21
  ENST ID: ENST00000299173
  CDS Start-End: 1-1212
atgaactacgactcccagcagcccccgttgccgccgctgccgtacgctggctgcaggagagcgtccggattccctgctctaggtcgcggcgggacagtgccagtgggcgtgtggggcggggcagggcagggaagggaagggcggagctggggtgagggtccaaggggcccaggacttggccggcgtgatctcagctctgcagaccctgcggtgctgggagccaccatggagagtaggtgctacggctgcgctgtcaagttcaccctcttcaagaaggagtacggctgtaagaattgtggcagggccttctgttcaggctgcctaagcttcagtgcagcagtgcctcggactgggaacacccaacagaaagtctgcaagcaatgccatgaggtcctgaccagagggtcttctgccaatgcctccaagtggtcaccacctcagaactataagaagcgtgtggcagccttggaagccaagcaaaagcccagcacttcccagagccagggactgacacgacaagaccagatgattgctgagcgcctagcacgactccgccaggagaacaagcccaagttagtcccctcacaggcagagatagaggcacggctggctgccctaaaggatgaacgtcagggttccatcccttccacccaggaaatggaggcacgacttgcagcgttgcagggcagagttctaccttctcaaaccccccagccggcacatcacacaccggacaccaggacccaagcccagcagacacaggatctgctaacgcagctggcagctgaggtggctatcgatgaaagctggaaaggaggaggcccagtgaccctccaggactatcgcctcccagacagtgatgacgacgaggatgaggagacagccatccaaagagtcctgcagcagctcactgaagaagcttccctggatgaggcaagtggctttaacatccctgcagagcaggcttctcgaccctggacgcaaccccgcggggcagagcctgaggcccaggatgtggaccccaggcctgaggctgaggaagaggagctcccctggtgctgcatctgcaatgaggatgccaccctacgctgcgctggctgcgatggggacctcttctgtgcccgctgcttccgagagggccatgatgcctttgagcttaaagagcaccagacatctgcctactctcctccacgtgcaggccaagagcactgaagacaccctggtcctcccggaagggcagtcccacaggcagcggcacccatttctgggcccagccacaggacgtccgatgggagagcttgtctggctctactgatgatggataggccccttcctgagccttggtgtccctggaatgaggaaagattctccattcgagagaatgactgggagggaagaagtcggggccctcctattagaagcccagactggaagtgagaggcatgatggggagagaccagactgaatctacgggtgagccctgtaacctggctctagggcacaggcccctcccctggcacttagtgggtctaataaagtatgttgattcattggg

SEQ ID NO: 204509 - DNA, 1784 bp, Homo sapiens
  Payload ID: 20340
  Gene Name: zinc finger, FYVE domain containing 19
  Uniprot ID: Q96K21
  ENST ID: ENST00000336455
  CDS Start-End: 56-1441
ggcatagcgccgaccctcgctccccgcccaggacccgaatgaacctggagagcggatgccagcagtggccgaggcgctaggacaggaaggaccgccagacctctcaagatcagccttcctcgccaccgttctcacctctttgtccgctgccttctcctcaatgcctagcagcgcgtacagcctgcccttctccaggtcgctggagttagattaccacacttcctcctgcttccggggcaccatggtgaaggctgactgtcctgtccctatcacagacctgccagattcctctggtaaactgcagtacggctgtaagaattgtggcagggccttctgttcaggctgcctaagcttcagtgcagcagtgcctcggactgggaacacccaacagaaagtctgcaagcaatgccatgaggtcctgaccagagggtcttctgccaatgcctccaagtggtcaccacctcagaactataagaagcgtgtggcagccttggaagccaagcaaaagcccagcacttcccagagccagggactgacacgacaagaccagatgattgctgagcgcctagcacgactccgccaggagaacaagcccaagttagtcccctcacaggcagagatagaggcacggctggctgccctaaaggatgaacgtcagggttccatcccttccacccaggaaatggaggcacgacttgcagcgttgcagggcagagttctaccttctcaaaccccccagccggcacatcacacaccggacaccaggacccaagcccagcagacacaggatctgctaacgcagctggcagctgaggtggctatcgatgaaagctggaaaggaggaggcccagctgcctctctccagaatgatctcaaccagggtggcccagggagcactaattccaagaggcaggccaactggtccttggaggaggagaagagcagactgctggctgaggcagcacttgagttgcgggaggagaacacgaggcaggaacggattctggccctggccaagcgactagccatgctgcggggacaggaccccgagagagtgaccctccaggactatcgcctcccagacagtgatgacgacgaggatgaggagacagccatccaaagagtcctgcagcagctcactgaagaagcttccctggatgaggcaagtggctttaacatccctgcagagcaggcttctcgaccctggacgcaaccccgcggggcagagcctgaggcccaggatgtggaccccaggcctgaggctgaggaagaggagctcccctggtgctgcatctgcaatgaggatgccaccctacgctgcgctggctgcgatggggacctcttctgtgcccgctgcttccgagagggccatgatgcctttgagcttaaagagcaccagacatctgcctactctcctccacgtgcaggccaagagcactgaagacaccctggtcctcccggaagggcagtcccacaggcagcggcacccatttctgggcccagccacaggacgtccgatgggagagcttgtctggctctactgatgatggataggccccttcctgagccttggtgtccctggaatgaggaaagattctccattcgagagaatgactgggagggaagaagtcggggccctcctattagaagcccagactggaagtgagaggcatgatggggagagaccagactgaatctacgggtgagccctgtaacctggctctagggcacaggcccctcccctggcacttagtgggtctaataaagtatgttgattcattggg

SEQ ID NO: 204510 - DNA, 2775 bp, Homo sapiens
  Payload ID: 20340
  Gene Name: zinc finger, FYVE domain containing 19
  Uniprot ID: Q96K21
  ENST ID: ENST00000355341
  CDS Start-End: 502-1917
gttccttgctgcctcgccccgcggcctctaggagacaggggccacggggagagcacagccacccggcgcgaagagccctctgtaccccgcttcctcttgaggccctcggaccgtccaggaaatgtctgggagcccgcctgcggagggcatagcgccgaccctcgctccccgcccaggacccgaatgaacctggagagcggatgccagcagtggccgaggcgctaggacaggaaggaccgccagacctctcaagatcagccttcctcgccaccgttctcacctctttgtccgctgccttctcctcaatgcctagcagcgcgtacaggtccatctgtaagagctccttggtcactgccatggttccggcctgacggattcgtactacaactcccaagagtctaagcgcgcgtgaggactgcaggctccgagcggcgcctagccctctgggaattgtgttctgggtcaggcttgactgactctgagggaggccggcagtcgtgaatgaactacgactcccagcagcccccgttgccgccgctgccgtacgctggctgcaggagagcgtccggattccctgctctaggtcgcggcgggacagtgccagtgggcgtgtggggcggggcagggcagggaagggaagggcggagctggggtgagggtccaaggggcccaggacttggccggcgtgatctcagctctgcagaccctgcggtgctgggagccaccatggagagtaggtgctacggctgcgctgtcaagttcaccctcttcaagaaggagtacggctgtaagaattgtggcagggccttctgttcaggctgcctaagcttcagtgcagcagtgcctcggactgggaacacccaacagaaagtctgcaagcaatgccatgaggtcctgaccagagggtcttctgccaatgcctccaagtggtcaccacctcagaactataagaagcgtgtggcagccttggaagccaagcaaaagcccagcacttcccagagccagggactgacacgacaagaccagatgattgctgagcgcctagcacgactccgccaggagaacaagcccaagttagtcccctcacaggcagagatagaggcacggctggctgccctaaaggatgaacgtcagggttccatcccttccacccaggaaatggaggcacgacttgcagcgttgcagggcagagttctaccttctcaaaccccccagccggcacatcacacaccggacaccaggacccaagcccagcagacacaggatctgctaacgcagctggcagctgaggtggctatcgatgaaagctggaaaggaggaggcccagctgcctctctccagaatgatctcaaccagggtggcccagggagcactaattccaagaggcaggccaactggtccttggaggaggagaagagcagactgctggctgaggcagcacttgagttgcgggaggagaacacgaggcaggaacggattctggccctggccaagcgactagccatgctgcggggacaggaccccgagagagtgaccctccaggactatcgcctcccagacagtgatgacgacgaggatgaggagacagccatccaaagagtcctgcagcagctcactgaagaagcttccctggatgaggcaagtggctttaacatccctgcagagcaggcttctcgaccctggacgcaaccccgcggggcagagcctgaggcccaggatgtggaccccaggcctgaggctgaggaagaggagctcccctggtgctgcatctgcaatgaggatgccaccctacgctgcgctggctgcgatggggacctcttctgtgcccgctgcttccgagagggccatgatgcctttgagcttaaagagcaccagacatctgcctactctcctccacgtgcaggccaagagcactgaagacaccctggtcctcccggaagggcagtcccacaggcagcggcacccatttctgggcccagccacaggacgtccgatgggagagcttgtctggctctactgatgatggataggccccttcctgagccttggtgtccctggaatgaggaaagattctccattcgagagaatgactgggagggaagaagtcggggccctcctattagaagcccagactggaagtgagaggcatgatggggagagaccagactgaatctacgggtgagccctgtaacctggctctagggcacaggcccctcccctggcacttagtgggtctaataaagtatgttgattcattgggcccagcatctcatttctacaaccctatgagcctgggccctgtgagaggtggcaggaacagagcaggctgtaagcacagttgtggggaatgggggaaaaggttgagccatcctatgaacttctccaggcaggaacagccctacccatcctggtggcctcatacgaagtaaacatgtattcattcaactcaactgtgctccagctctgggcagccccacttagccaccagtccccaccatcttggatttctcagcctctctactactcacacaatgcacgcaggaacaatgcacacacaccctgcttcctgccttactggcaaaggaccccagctcctagggctcctgtcccaacctgcctgccattcagtctcagtatctctcttccagtaatgcgccctaaccggacccctgacctctcggcatgtaccctttacatgcctctgcattgcctctgctgtttctcttcctgcccctggctggaaccaactataaagagccctcgggctgaggtcta

SEQ ID NO: 204511 - DNA, 812 bp, Homo sapiens
  Payload ID: 20340
  Gene Name: zinc finger, FYVE domain containing 19
  ENST ID: ENST00000561617
  CDS Start-End: 1-812
cccaggacttggccggcgtgatctcagctctgcagaccctgcggtgctgggagccaccatggagagtaggtgctacggctgcgctgtcaagttcaccctcttcaagaaggagtacggctgtaagaattgtggcagggccttctgttcaggctgcctaagcttcagtgcagcagtgcctcggactgggaacacccaacagaaagtctgcaagcaatgccatgaggtcctgaccaggcgtgtggcagccttggaagccaagcaaaagcccagcacttcccagagccagggactgacacgacaagaccagatgattgctgagcgcctagcacgactccgccaggagaacaagcccaagttagtcccctcacaggcagagatagaggcacggctggctgccctaaaggatgaacgtcagggttccatcccttccacccaggaaatggaggcacgacttgcagcgttgcagggcagagttctaccttctcaaaccccccagccggcacatcacacaccggacaccaggacccaagcccagcagacacaggatctgctaacgcagctggcagctgaggtggctatcgatgaaagctggaaaggaggaggcccagctgcctctctccagaatgatctcaaccagggtggcccagggagcactaattccaagaggcaggccaactggtccttggaggaggagaagagcagactgctggctgaggcagcacttgagttgcgggaggagaacacgaggcaggaacggattctggccctggccaagcgactagccatgctgcggggacaggaccccgagagag

SEQ ID NO: 204512 - DNA, 580 bp, Homo sapiens
  Payload ID: 20340
  Gene Name: zinc finger, FYVE domain containing 19
  ENST ID: ENST00000568062
  CDS Start-End: 1-305
gcaggagagcgtccggattccctgctctaggtcgcggcgggacagtgccagtgggcgtgtggggcggggcagggcagggaagggaagggcggagctggggtgagggtccaaggggcccaggacttggccggcgtgatctcagctctgcagaccctgcggtgctgggagccaccatggagagtaggtgctacggctgcgctgtcaagttcaccctcttcaagaaggagggtttatgtgagggtccactgaagtgctttagtacggctgtaagaattgtggcagggccttctgttcaggctgcctaagcttcagtgcagcagtgcctcggactgggaacacccaacagaaagtctgcaagcaatgccatgaggtcctgaccagagggtcttctgccaatgcctccaagtggtcaccacctcagaactataagaagcgtgtggcagccttggaagccaagcaaaagcccagcacttcccagagccagggactgacacgacaagaccagatgattgctgagcgcctagcacgactccgccaggagaacaagcccaagttagtcccctcacaggcagagatagag

SEQ ID NO: 204513 - DNA, 1669 bp, Homo sapiens
  Payload ID: 20340
  Gene Name: zinc finger, FYVE domain containing 19
  ENST ID: ENST00000570108
  CDS Start-End: 204-1550
agcgttccttgctgcctcgccccgcggcctctaggagacaggggccacggggagagcacagccacccggcgcgaagagccctctgtaccccgcttcctcttgaggccctcggaccgtccaggaaatgtctgggagcccgcctgcggagggcatagcgccgaccctcgctccccgcccaggacccgaatgaacctggagagcggatgccagcagtggccgaggcgctaggacaggaaggaccgccagacctctcaagatcagccttcctcgccaccgttctcacctctttgtccgctgccttctcctcaatgcctagcagcgcgtacaggtccatctaccctgcggtgctgggagccaccatggagagtaggtgctacggctgcgctgtcaagttcaccctcttcaagaaggagtacggctgtaagaattgtggcagggccttctgttcaggctgcctaagcttcagtgcagcagtgcctcggactgggaacacccaacagaaagtctgcaagcaatgccatgaggtcctgaccagagggtcttctgccaatgcctccaagtggtcaccacctcagaactataagaagcgtgtggcagccttggaagccaagcaaaagcccagcacttcccagagccagggactgacacgacaagaccagatgattgctgagcgcctagcacgactccgccaggagaacaagcccaagttagtcccctcacaggcagagatagaggcacggctggctgccctaaaggatgaacgtcagggttccatcccttccacccaggaaatggaggcacgacttgcagcgttgcagggcagagttctaccttctcaaaccccccagccggcacatcacacaccggacaccaggacccaagcccagcagacacaggatctgctaacgcagctggcagctgaggtggctatcgatgaaagctggaaaggaggaggcccagctgcctctctccagaatgatctcaaccagggtggcccagggagcactaattccaagaggcaggccaactggtccttggaggaggagaagagcagactgctggctgaggcagcacttgagttgcgggaggagaacacgaggcaggaacggattctggccctggccaagcgactagccatgctgcggggacaggaccccgagagagtgaccctccaggactatcgcctcccagacagtgatgacgacgaggatgaggagacagccatccaaagagtcctgcagcagctcactgaagaagcttccctggatgaggcaagtggctttaacatccctgcagagcaggcttctcgaccctggacgcaaccccgcggggcagagcctgaggcccaggatgtggaccccaggcctgaggctgaggaagaggagctcccctggtgctgcatctgcaatgaggatgccaccctacgctgcgctggctgcgatggggacctcttctgtgcccgctgcttccgagagggccatgatgcctttgagcttaaagagcaccagacatctgcctactctcctccacgtgcaggccaagagcactgaagacaccctggtcctcccggaagggcagtcccacaggcagcggcacccatttctgggcccagccacaggacgtccgatgggagagcttgtctggctctactgatgatggataggcccct

SEQ ID NO: 204514 - DNA, 922 bp, Homo sapiens
  Payload ID: 20340
  Gene Name: zinc finger, FYVE domain containing 19
  ENST ID: ENST00000566407
  CDS Start-End: 1-922
ggcgggacagtgccagtgggcgtgtggggcggggcagggcagggaagggaagggcggagctggggtgagggtccaaggggcccaggacttggccggcgtgatctcagctctgcagaccctgcggtgctgggagccaccatggagagtaggtgctacggctgcgctgtcaagttcaccctcttcaagaaggagtacggctgtaagaattgtggcagggccttctgttcaggctgcctaagcttcagtgcagcagtgcctcggactgggaacacccaacagaaagtctgcaagcaatgccatgaggtcctgaccagagggtcttctgccaatgcctccaagtggtcaccacctcagaactataagaagcgtgtggcagccttggaagccaagcaaaagcccagcacttcccagagccagggactgacacgacaagaccagatgattgctgagcgcctagcacgactccgccaggagaacaagcccaagttagtcccctcacaggcagagatagaggcacggctggctgccctaaaggatgaacgtcagggttccatcccttccacccaggaaatggaggcacgacttgcagcgttgcagggcagagttctaccttctcaaaccccccagccggcacatcacacaccggacaccaggacccaagcccagcagacacaggatctgctaacgcagctggcagctgaggtggctatcgatgaaagctggaaaggaggaggcccaggtctccctcttcaagtgaccctccaggactatcgcctcccagacagtgatgacgacgaggatgaggagacagccatccaaagagtcctgcagcagctcactgaagaagcttccctggatgaggcaagtggctttaacatccctgcagagcaggcttctcgaccctggacgcaaccccgcgggg

SEQ ID NO: 204515 - DNA, 1486 bp, Homo sapiens
  Payload ID: 20340
  Gene Name: zinc finger, FYVE domain containing 19
  ENST ID: ENST00000561768
  CDS Start-End: 1-65
gccggcgtgatctcagctctgcagaccctgcggtgctgggagccaccatggagatacggctgtaagaattgtggcagggccttctgttcaggctgcctaagcttcagtgcagcagtgcctcggactgggaacacccaacagaaagtctgcaagcaatgccatgaggtcctgaccagagggtcttctgccaatgcctccaagtggtcaccacctcagaactataagaagcgtgtggcagccttggaagccaagcaaaagcccagcacttcccagagccagggactgacacgacaagaccagatgattgctgagcgcctagcacgactccgccaggagaacaagcccaagttagtcccctcacaggcagagatagaggcacggctggctgccctaaaggatgaacgtcagggttccatcccttccacccaggaaatggaggcacgacttgcagcgttgcagggcagagttctaccttctcaaaccccccagccggcacatcacacaccggacaccaggacccaagcccagcagacacaggatctgctaacgcagctggcagctgaggtggctatcgatgaaagctggaaaggaggaggcccagctgcctctctccagaatgatctcaaccagggtggcccagggagcactaattccaagaggcaggccaactggtccttggaggaggagaagagcagactgctggctgaggcagcacttgagttgcgggaggagaacacgaggcaggaacggattctggccctggccaagcgactagccatgctgcggggacaggaccccgagagagtgaccctccaggactatcgcctcccagacagtgatgacgacgaggatgaggagacagccatccaaagagtcctgcagcagctcactgaagaagcttccctggatgaggcaagtggctttaacatccctgcagagcaggcttctcgaccctggacgcaaccccgcggggcagagcctgaggcccaggatgtggaccccaggcctgaggctgaggaagaggagctcccctggtgctgcatctgcaatgaggatgccaccctacgctgcgctggctgcgatggggacctcttctgtgcccgctgcttccgagagggccatgatgcctttgagcttaaagagcaccagacatctgcctactctcctccacgtgcaggccaagagcactgaagacaccctggtcctcccggaagggcagtcccacaggcagcggcacccatttctgggcccagccacaggacgtccgatgggagagcttgtctggctctactgatgatggataggccccttcctgagccttggtgtccctggaatgaggaaagattctccattcgagagaatgactgggagggaagaagtcggggccctcctattagaagcccagactggaagtgagaggcatgatggggagagaccagactgaatctacgggtgagccctgtaacctggctctagggcacaggcc

SEQ ID NO: 204516 - DNA, 1036 bp, Homo sapiens
  Payload ID: 20340
  Gene Name: zinc finger, FYVE domain containing 19
  ENST ID: ENST00000569057
  CDS Start-End: 1-154
acttggccggcgtgatctcagctctgcagaccctgcggtgctgggagccaccatggagagtaggtgctacggctgcgctgtcaagttcaccctcttcaagaaggagagggtcttctgccaatgcctccaagtggtcaccacctcagaactataagaagcgtgtggcagccttggaagccaagcaaaagcccagcacttcccagagccagggactgacacgacaagaccagatgattgctgagcgcctagcacgactccgccaggagaacaagcccaagttagtcccctcacaggcagagatagaggcacggctggctgccctaaaggatgaacgtcagggttccatcccttccacccaggaaatggaggcacgacttgcagcgttgcagggcagagttctaccttctcaaaccccccagccggcacatcacacaccggacaccaggacccaagcccagcagacacaggatctgctaacgcagctggcagctgaggtggctatcgatgaaagctggaaaggaggaggcccagctgcctctctccagaatgatctcaaccagggtggcccagggagcactaattccaagaggcaggccaactggtccttggaggaggagaagagcagactgctggctgaggcagcacttgagttgcgggaggagaacacgaggcaggaacggattctggccctggccaagcgactagccatgctgcggggacaggaccccgagagagtgaccctccaggactatcgcctcccagacagtgatgacgacgaggatgaggagacagccatccaaagagtcctgcagcagctcactgaagaagcttccctggatgaggcaagtggctttaacatccctgcagagcaggcttctcgaccctggacgcaaccccgcggggcagagcctgaggcccaggatgtggaccccaggcctgaggctgaggaagaggagctcccctggtgctgcatctgcaatgaggatgccaccctacgctgcgctggctgcgatggggacctcttctgtgcccgctg

SEQ ID NO: 204517 - DNA, 2059 bp, Homo sapiens
  Payload ID: 20340
  Gene Name: zinc finger, FYVE domain containing 19
  Uniprot ID: Q96K21
  ENST ID: ENST00000564258
  CDS Start-End: 830-1720
gttccttgctgcctcgccccgcggcctctaggagacaggggccacggggagagcacagccacccggcgcgaagagccctctgtaccccgcttcctcttgaggccctcggaccgtccaggaaatgtctgggagcccgcctgcggagggcatagcgccgaccctcgctccccgcccaggacccgaatgaacctggagagcggatgccagcagtggccgaggcgctaggacaggaaggaccgccagacctctcaagatcagccttcctcgccaccgttctcacctctttgtccgctgccttctcctcaatgcctagcagcgcgtacaggtccatctgtaagagctccttggtcactgccatggttccggcctgacggattcgtactacaactcccaagagtctaagcgcgcgtgaggactgcaggctccgagcggcgcctagccctctgggaattgtgttctgggtcaggcttgactgactctgagggaggccggcagtcgtgaatgaactacgactcccagcagcccccgttgccgccgctgccgtacgctggctgcaggagagcgtccggattccctgctctagtacggctgtaagaattgtggcagggccttctgttcaggctgcctaagcttcagtgcagcagtgcctcggactgggaacacccaacagaaagtctgcaagcaatgccatgaggtcctgaccagagggtcttctgccaatgcctccaagtggtcaccacctcagaactataagaagcgtgtggcagccttggaagccaagcaaaagcccagcacttcccagagccagggactgacacgacaagaccagatgattgctgagcgcctagcacgactccgccaggagaacaagcccaagttagtcccctcacaggcagagatagaggcacggctggctgccctaaaggatgaacgtcagggttccatcccttccacccaggaaatggaggcacgacttgcagcgttgcagggcagagttctaccttctcaaaccccccagccggcacatcacacaccggacaccaggacccaagcccagcagacacaggatctgctaacgcagctggcagctgaggtggctatcgatgaaagctggaaaggaggaggcccagctgcctctctccagaatgatctcaaccagggtggcccagggagcactaattccaagaggcaggccaactggtccttggaggaggagaagagcagactgctggctgaggcagcacttgagttgcgggaggagaacacgaggcaggaacggattctggccctggccaagcgactagccatgctgcggggacaggaccccgagagagtgaccctccaggactatcgcctcccagacagtgatgacgacgaggatgaggagacagccatccaaagagtcctgcagcagctcactgaagaagcttccctggatgaggcaagtggctttaacatccctgcagagcaggcttctcgaccctggacgcaaccccgcggggcagagcctgaggcccaggatgtggaccccaggcctgaggctgaggaagaggagctcccctggtgctgcatctgcaatgaggatgccaccctacgctgcgctggctgcgatggggacctcttctgtgcccgctgcttccgagagggccatgatgcctttgagcttaaagagcaccagacatctgcctactctcctccacgtgcaggccaagagcactgaagacaccctggtcctcccggaagggcagtcccacaggcagcggcacccatttctgggcccagccacaggacgtccgatgggagagcttgtctggctctactgatgatggataggccccttcctgagccttggtgtccctggaatgaggaaagattctccattcgagagaatgactgggagggaagaagtcggggccctcctattagaagcccagactggaagtgagaggcatgatggggagagaccagactgaatctacgggtgagccctgtaacctggctctagggcacaggcccctcccctggcacttagtgggtctaataaagtatgttgattcat

SEQ ID NO: 204518 - DNA, 617 bp, Homo sapiens
  Payload ID: 20340
  Gene Name: zinc finger, FYVE domain containing 19
  ENST ID: ENST00000566767
  CDS Start-End: 447-617
catttggcttgaataaggtactggaaaccgaggaattgctttactcaccatccctaggccttaggggccccactcctcttcttcctcccagcagctggtcataacttcagtgacttctctctgtgtgtgcttggagagtccctgggagcagcctgcaggggcgggtgagagggggatctcccgcttcatgtttcttgtagtacggctgtaagaattgtggcagggccttctgttcaggctgcctaagcttcagtgcagcagtgcctcggactgggaacacccaacagaaagtctgcaagcaatgccatgaggtcctgaccagagggtcttctgccaatgcctccaagtggtcaccacctcagaactataagaagcgtgtggcagccttggaagccaagcaaaagcccagcacttcccagagccagggactgacacgacaagaccagatgattgctgagcgcctagcacgactccgccaggagaacaagcccaagttagtcccctcacaggcagagatagaggcacggctggctgccctaaaggatgaacgtcagggttccatcccttccacccaggaaatggaggcacgacttgcagcgttgcagggcagagttcta

SEQ ID NO: 204519 - DNA, 571 bp, Homo sapiens
  Payload ID: 20340
  Gene Name: zinc finger, FYVE domain containing 19
  ENST ID: ENST00000567756
  CDS Start-End: 1-144
agctggggtgagggtccaaggggcccaggacttggccggcgtgatctcagctctgcagaccctgcggtgctgggagccaccatggagagtaggtgctacggctgcgctgtcaagttcaccctcttcaagaaggaggctgcctaagcttcagtgcagcagtgcctcggactgggaacacccaacagaaagtctgcaagcaatgccatgaggtcctgaccagagggtcttctgccaatgcctccaagtggtcaccacctcagaactataagaagcgtgtggcagccttggaagccaagcaaaagcccagcacttcccagagccagggactgacacgacaagaccagatgattgctgagcgcctagcacgactccgccaggagaacaagcccaagttagtcccctcacaggcagagatagaggcacggctggctgccctaaaggatgaacgtcagggttccatcccttccacccaggaaatggaggcacgacttgcagcgttgcagggcagagttctaccttctcaaaccccccagccggcacatcacacaccggacaccaggacccaagccca

SEQ ID NO: 204520 - DNA, 1521 bp, Homo sapiens
  Payload ID: 20341
  Gene Name: zinc finger, FYVE domain containing 21
  Uniprot ID: Q9BQ24
  ENST ID: ENST00000216602
  CDS Start-End: 113-871
gattggacgccggcgctgtcagccgcgcgcggaccggggcggggcgggcggtgccccgggctgggcgaggggccgggtgcggggccgctggccgagaggctgaggcggcgtcatgtcctccgaggtgtccgcgcgccgcgacgccaagaagctggtgcgctccccgagcggcctgcgcatggtgcccgaacaccgcgccttcggaagcccgttcggcctggaggagccgcagtgggtcccggacaaggagtgtcggagatgtatgcagtgtgacgccaagtttgactttctcaccagaaagcaccactgtcgccgctgcgggaagtgcttctgcgacaggtgctgcagccagaaggtgccgctgcggcgcatgtgctttgtggaccccgtgcggcagtgcgcggagtgcgccctcgtgtccctcaaggaggcggagttctacgacaagcagctcaaagtgctcctgagcggagccaccttcctcgtcacgtttggaaactcagagaaacctgaaactatgacttgtcgtctttccaataaccagagatacttgtttctggatggagacagccactatgaaatcgaaattgtacacatttccaccgtgcagatcctcacagaaggcttccctcctggagaaaaagacattcacgcttacaccagcctccgggggagccagcctgcctctgaaggaggcaacgcacgggccacaggcatgttcctgcagtatacagtgccggggacggagggtgtgacccagctgaagctgacagtggtggaggacgtgactgtgggcaggaggcaggcggtggcgtggctagtggccatgcacaaggctgccaagctcctctatgaatctcgggaccagtaactctacgtggggctgagcttggagtacgtgtggtcaccaggactgagtcgcttggaacagcagagcctgctccttgcgtaccacagggattaatcctgcttgtgctgggaaatgcaactcactcatgtatttggagaaacaggagtgttcacttatctagtgcaatatgttcacagtttattaatgctttaaacagcttcatgttttagaatttgtgtattgtcaatacttaattgggggtgggagagactgagctacactactgctaaactatttttagcataatatataccatttttatgagttcgcaggtctactagaaggttctggcccatcaatattcatttcatttaattcttccacagaaccagtttgggcagtaggaactcaggcttctggtctgcagtggagcctgttcgcctctaatagccagtttacagcacttgccttagcctgtttcacagacttgtccacttaccttgtcactaatttggggcttctgggctgtgagtgatcctttgatacttcaccaaggggaacgtgggggctttgtgttttgtacttttcactcactatttcactttattaagatgactgtacagcaatttgtatataaagcttatgattaaaaactattttgaacatacgga

SEQ ID NO: 204521 - DNA, 1383 bp, Homo sapiens
  Payload ID: 20341
  Gene Name: zinc finger, FYVE domain containing 21
  Uniprot ID: Q9BQ24
  ENST ID: ENST00000311141
  CDS Start-End: 35-739
gcggggccgctggccgagaggctgaggcggcgtcatgtcctccgaggtgtccgcgcgccgcgacgccaagaagctggtgcgctccccgagcggcctgcgcatggtgcccgaacaccgcgccttcggaagcccgttcggcctggaggagccgcagtgggtcccggacaaggagtgtcggagatgtatgcagtgtgacgccaagtttgactttctcaccagaaagcaccactgtcgccgctgcgggaagtgcttctgcgacaggtgctgcagccagaaggtgccgctgcggcgcatgtgctttgtggaccccgtgcggcagtgcgcggagtgcgccctcgtgtccctcaaggaggcggagttctacgacaagcagctcaaagtgctcctgagcggagccaccttcctcgtcacgtttggaaactcagagaaacctgaaactatgacttgtcgtctttccaataaccagagatacttgtttctggatggagacagccactatgaaatcgaaattgtacacatttccaccgtgcagatcctcacagaaggcttccctcctggaggaggcaacgcacgggccacaggcatgttcctgcagtatacagtgccggggacggagggtgtgacccagctgaagctgacagtggtggaggacgtgactgtgggcaggaggcaggcggtggcgtggctagtggccatgcacaaggctgccaagctcctctatgaatctcgggaccagtaactctacgtggggctgagcttggagtacgtgtggtcaccaggactgagtcgcttggaacagcagagcctgctccttgcgtaccacagggattaatcctgcttgtgctgggaaatgcaactcactcatgtatttggagaaacaggagtgttcacttatctagtgcaatatgttcacagtttattaatgctttaaacagcttcatgttttagaatttgtgtattgtcaatacttaattgggggtgggagagactgagctacactactgctaaactatttttagcataatatataccatttttatgagttcgcaggtctactagaaggttctggcccatcaatattcatttcatttaattcttccacagaaccagtttgggcagtaggaactcaggcttctggtctgcagtggagcctgttcgcctctaatagccagtttacagcacttgccttagcctgtttcacagacttgtccacttaccttgtcactaatttggggcttctgggctgtgagtgatcctttgatacttcaccaaggggaacgtgggggctttgtgttttgtacttttcactcactatttcactttattaagatgactgtacagcaatttgtatataaagcttatgattaaaaactattttgaaca

SEQ ID NO: 204522 - DNA, 636 bp, Homo sapiens
  Payload ID: 20341
  Gene Name: zinc finger, FYVE domain containing 21
  ENST ID: ENST00000553512
  CDS Start-End: 16-297
ggctgaggcggcgtcatgtcctccgaggtgtccgcgcgccgcgacgccaagaagctggtgcgctccccgagcggcctgcgcatggtgcccgaacaccgcgccttcggaagcccgttcggcctggaggagccgcagtgggtcccggacaaggagtgtcggagatgtatgcagtgtgacgccaagtttgactttctcaccagaaaggtgaggcggatccccgctgcgtggtggggagcccaggggctggcgacaggaggtgcgcgtgtgcagcggccggcacaggggcctcgcgtttaggcgtggcccggggagtgccaggccagccggggccacacccggggccgcttgttccctgcccctcctcactgccaatcctcccgcatctgcccagcaccactgtcgccgctgcgggaagtgcttctgcgacaggtgctgcagccagaaggtgccgctgcggcgcatgtgctttgtggaccccgtgcggcagtgcgcggagtgcgccctcgtgtccctcaaggaggcggagttctacgacaagcagctcaaagtgctcctgagcggagccaccttcctcgtcacgtttggaaactcagagaaacctgaaactatgacttgtcgtctttccaataaccagag

SEQ ID NO: 204523 - DNA, 364 bp, Homo sapiens
  Payload ID: 20341
  Gene Name: zinc finger, FYVE domain containing 21
  ENST ID: ENST00000556610
  CDS Start-End: 4-192
gtcatgtcctccgaggtgtccgcgcgccgcgacgccaagaagctggtgcgctccccgagcggcctgcgcatggtgcccgaacaccgcgccttcggaagcccgttcggcctggaggagccgcagtgggtcccggacaaggaggagccaccttcctcgtcacgtttggaaactcagagaaacctgaaactatgacttgtcgtctttccaataaccagagatacttgtttctggatggagacagccactatgaaatcgaaattgtacacatttccaccgtgcagatcctcacagaaggcttccctcctggagaaaaagacattcacgcttacaccagcctccgggggagccagcctgcctctgaagg

SEQ ID NO: 204524 - DNA, 430 bp, Homo sapiens
  Payload ID: 20341
  Gene Name: zinc finger, FYVE domain containing 21
  ENST ID: ENST00000555163
  CDS Start-End: 1-346
caaagtgctcctgagcggagccaccttcctcgtcacgtttggaaactcagagaaacctgaaactatgacttgtcgtctttccaataaccagagatacttgtttctggatggagacagccactatgaaatcgaaattgtacacatttccaccgtgcagatcctcacagaaggcttccctcctggagaaaaagacattcacgcttacaccagcctccgggggagccagcctgcctctgaaggtcagcctcttcctcctcaccggggctccccgcatgcagcgggcccgttcctcccctcgccacctggcttctgtccacggggtggtccatgccaaggttctttgtgaaacctgaattcacttactttggttgacttaagagagatgttggatctgataagtgggtttataaagcataaatgaagataccgc

SEQ ID NO: 204525 - DNA, 9675 bp, Homo sapiens
  Payload ID: 20342
  Gene Name: zinc finger, FYVE domain containing 26
  Uniprot ID: Q68DK2
  ENST ID: ENST00000347230
  CDS Start-End: 140-7759
actcggctcaaacatggctgcgctgagagctctattgctttgggcgccgggagcaggaggtactccgcgaatgagaacattgagaatgtgttcggcataactcatttctttgtatctccctgcactctgtgctgggaaaatgaatcatccatttggaaaagaggaagctgcttcgcagaagcagctttttggatttttctgcgaatgcctgcggaggggagaatgggagctggcacaggcatgtgtacctcagctacaggagggacaaggggatatcccaaagagggtagaagacatacttcaggcattggtggtgtgtccaaatctgctgagatgtgggcaggacatcaaccctcaaagagtagcctgggtctggcttcttgtactggagaaatggttggcccgggaaaagaagttactcccagttgttttccggagaaagcttgagtttcttttattgtcagaagacctccaaggtgacattccagagaacatcctcgaggagctgtatgagaccttaacacagggtgcagtaggccacgtgcctgacggaaatccaaggagggagagctggactcctcgtctcagctccgaagctgtctctgtgctctgggatctcctgaggcagtctccccagccagcacaggccctgctggagctcctgcttgaggaggatgacggtactggcctctgtcactggcctctgcagaatgcactggtggacctcattcgaaaggcattgcgggctttgcagggccctgattcggtgccccctggggtagtcgatgccatctatggagccctgcggactctgcgttgccccgcagaaccacttggggttgagttgcatctcctgtgtgaggaactactagaggcctgcaggaccgaggggagtcccctgcgggaggagcggctgctcagctgcctgctgcacaaggccagccggggcctgctgtccctgtatggccatacctatgcagagaaggtcacagaaaagccaccgagggctacagcctcgggaaaagtctcaccggatcatctagatcctgagcgggcaatgctagccctgttctccaatcccaacccagccgaggcttggaaagtggcctatttctactgcctgagcaacaacaaacacttcctcgagcagattctggtaacagcactaacattgttgaaagaagaagacttcccaaatcttggctgcctacttgatagagaattcaggcccctcagttgcctgcttgtactcctgggctggacacactgccagagcctagagtcagccaagaggctgctccagaccctgcacaggacccagggcccaggctgtgatgagctcctcagggatgcctgtgatgggttgtgggctcacctggaggtcctggagtggtgcatacagcagagcagcaaccccataccaaagagagatctgttgtatcatttacacggtggagacagccactcagtgctctacactctccatcaccttacaaaccttccagccctcagggaggaagatgttctcaagctcttacagaaagtgccagccaaggacccccagcaagagcctgatgcagttgatgctccagtccctgagcacctgagccagtgtcagaacctgacactctaccagggcttctgtgccatgaagtatgccatctatgccctctgtgtaaactcacaccagcactcccagtgccaggactgcaaagacagcctctctgaggacctggcctcagctacagagccagcgaatgactctctctcctccccaggtgctgcaaatctcttctcaacttacctggccaggtgtcaacagtatctgtgcagtattcctgactctctgtgcctggagcttctggaaaacatcttctcattgcttctcatcacctctgctgatcttcacccagagcctcacttgcctgaggactatgctgaggatgatgacattgaggggaagagcccctcaggtttgaggtccccatcagagagccctcagcacatagcacatcctgaaaggaagtcagaacggggttccctgggagtcccaaagacccttgcttatacaatgccaagccatgtgaaggcagagccaaaagacagttacccagggcctcataggcacagctttttggacttaaaacactttactagtggtatcagtggatttctggctgatgaatttgcaataggggccttcctcaggcttctccaagagcaactggatgagatcagtagccgcagccctcctgagaagccaaagcaagaaagtcagagctgctcaggaagcagagatggactgcagagccgcctgcatcgactttccaaggttgtctctgaggcccagtggagacacaaggtggtgacaagcaaccatcgttcagaggagcaaccttcccgaagataccagcctgccacacgtcaccccagtctccgccggggtcgtcggacaagaaggagccaggcagatggccgagacagaggttcaaacccatccctggaaagtacaagtagtgagctgagcacaagtacgtcagagggaagtctgagtgccatgtctggccggaatgagctgcacagtagattgcacccccatcctcaaagttcactcatccccatgatgttctccccacctgagtcactgctggcatcctgcatccttcgcgggaacttcgcagaagcccatcaggtgctgttcacgttcaacctgaagtcctcacccagttcaggggaactgatgttcatggagcgctaccaggaagtgatccaagaactggcccaagtagagcacaagattgaaaaccagaactcagatgcgggtagcagcaccattcggagaactggcagtggccgctcaactctacaggccattggcagcgctgcagcagcaggaatggtgttttactctatctctgacgtgactgacaagctgctcaacacctctggagaccccatccccatgctccaggaggacttttggataagcacggctctagtggagcccactgctcccctgagagaggttctggaagacctcagtccccctgccatggctgcatttgacctagcttgctctcagtgccagctctggaaaacctgcaagcagcttttggagacagccgaacggcgtttgaatagtagccttgaaaggcggggtcgacggatagaccacgtactcctaaatgctgatggcattcgaggttttccagttgttcttcagcaaatcagtaagagtctcaattatctgcttatgtcagccagtcaaaccaaatcagagagtgtggaagaaaagggaggaggccctccacggtgcagcatcactgaactgcttcagatgtgctggcccagcctaagcgaggactgtgttgccagccacaccaccctctcccagcagctagatcaggtccttcagtcactgagagaggcactagagctgccagagcccaggactcctccactgtcttccctggtggagcaggcagcccagaaagctccagaggcagaggcccaccctgtgcagatccagactcagctcctccagaagaacctgggcaaacagaccccatcaggcagcaggcagatggactacttgggcaccttcttcagttactgcagcacccttgctgcagttctccttcaaagtttgagctctgagcctgatcatgtggaggtcaaggtaggaaatccctttgttctgctgcaacagagctcttcccaactggtgtcacatctcctgtttgagagacaagttcccccagagagactggcagcccttctggcccaagagaatctcagcctaagtgtgccacaggtcatcgtcagctgctgctgtgagccccttgctctttgctcatcccggcaaagccagcagacctcctccctcctgactcgtctgggtactctggcccagctacacgcctctcactgcctggatgacctcccactttctacaccgagctccccgaggacaactgagaaccctacattggaaagaaagccctactcctccccaagggactcatcactcccagccctcacctcctctgccttggcctttcttaagtcacgctcaaagctcctagctacggtggcctgcctgggggcttccccgaggttaaaggtcagcaaacccagcttgtcatggaaggaacttcgtggccgcagggaggtgcctctggctgcagagcaggtagcccgggagtgtgagcgccttctggaacaattccctctgtttgaggccttcctcctggctgcctgggagcccctgcgagggtctttgcagcaggggcagagtctggcagtgaatctctgtggttgggccagtctttctaccgttctcctgggcctacattctcccattgccctagatgtactgagtgaggcttttgaggaatccttggtggccagagattggtcccgggcccttcagctcactgaagtgtacgggcgagatgtggacgatttgagcagcataaaggatgcagtcctgagctgtgctgtggcatgtgacaaagaaggttggcaatacctgtttcccgtgaaggatgcatctctgagaagtcggctggccctacagtttgtggacaggtggcccctggagtcatgcctggagattctggcctactgcatttcagacacggctgtccaagaaggactaaagtgtgagctacagaggaagctggcggagctgcaggtgtatcagaagattctgggtttgcagtctcccccagtgtggtgtgactggcagaccttgaggagctgttgtgttgaggacccatcaactgtcatgaacatgattctagaagcacaggagtatgaactgtgtgaagagtggggctgcctgtaccccattccaagagaacatttaatcagccttcatcaaaagcatcttctccaccttctagaaagaagagatcatgacaaggctctgcaactcctgcgaagaatccctgaccccaccatgtgccttgaagtgacagagcaatccctcgaccagcacactagcttggccacttctcacttcttggccaactacctcaccacccacttctatggacaactgactgctgtccgacaccgtgaaatccaggcgctgtatgtgggatccaagattctgctgaccctgcctgagcagcaccgggccagctattcccacttgtcctctaaccccctgttcatgctggagcagctgcttatgaacatgaaggtggattgggccactgtggctgtgcagactctccagcagctgctggttggacaggagattggcttcactatggacgaggtggactcactgctttccagatacgcagagaaagccctggactttccataccctcagagggagaaacgatcagattctgtgattcacctccaagaaattgtccaccaggctgcagatcccgagaccctccctagatcaccatcagcagagttctctcctgctgctcctcctggtatctccagtatacattcccctagtctaagggaaaggagtttcccaccaacccagccctcacaggaatttgtgcccccagcgacaccccctgccaggcaccagtgggtaccggatgagactgagagtatctgcatggtctgctgcagggagcacttcaccatgtttaacaggcgtcatcattgtcgccgctgtggccggctagtgtgcagctcctgctccactaagaaaatggtggttgaaggctgcagagagaaccctgctcgtgtgtgtgatcagtgctatagttactgcaacaaagatgtaccagaggagccttcagaaaaaccagaagctctagacagctccaagaatgaaagccctccatactcgtttgtggtgagagtccccaaagcagatgaggtggaatggattttggatctcaaagaggaggaaaatgagctggtgcggagtgaattttactatgagcaggcccccagcgcctccttgtgcattgccatcctgaatctgcaccgggacagcattgcctgtggtcaccagctgattgagcactgctgcaggctctccaagggcctcaccaacccagaggtggatgccgggctgctcacggacatcatgaagcagctgctgttcagcgccaagatgatgttcgtcaaagccggccagagccaagacttggctctttgtgacagctacatcagcaaggtagatgtgctgaatattttagttgctgctgcctatcgccacgtgccatctttggatcagatcttgcagccagctgcagtaaccaggctaaggaaccagcttttggaagccgagtactaccaactgggcgttgaggtctccacaaagactgggcttgataccaccggggcgtggcatgcttggggcatggcctgcctcaaagccgggaacctcactgctgcacgggagaagttcagtcgctgtctgaagcccccatttgacctcaatcagctgaatcatggctcaaggctggtgcaggatgtggttgagtacctagagtccacagtgaggccctttgtatccttgcaagatgacgattactttgccaccctgagggaactggaagctacccttcggacgcagagcctttctctggcagtgattcctgaagggaaaatcatgaacaacacctactaccaggaatgcctcttctacctgcacaactatagcaccaacctggccatcatcagcttctacgtgaggcacagctgcctgcgggaagctcttctgcaccttctcaacaaggagagtcctccagaagtttttatagaaggcattttccaaccaagctataaaagtgggaagctacacactttggagaacttgctagaatccattgatccaaccttggagagctggggaaagtacttgattgctgcctgccaacatttacagaagaagaactactaccacattctgtatgagctgcagcagtttatgaaggaccaagttcgggccgccatgacctgtattcggttcttcagtcacaaagcaaagtcatatacagaactgggagagaagctctcatggctacttaaggccaaggaccacctgaagatctacctccaagaaacatcccgcagctctggaaggaagaaaaccacattcttcagaaagaagatgactgcagctgatgtgtcaaggcacatgaacacacttcagctgcagatggaagtgaccaggttcttgcatcggtgcgaaagtgctgggacctctcaaatcaccactttgcctctgccaaccctgtttggaaataaccacatgaaaatggatgttgcctgcaaggtcatgctgggagggaaaaatgtagaagatggttttggaattgctttccgtgttctgcaggacttccagctggatgctgccatgacctactgcagagctgcccgccagttggtggagaaagagaagtacagtgagatccagcaactgctcaaatgtgtcagtgagtcaggcatggcagccaaaagtgacggggacaccatcctcctcaactgcctggaagcgttcaagagaattccgccccaggagctggagggcctgatccaggcaatacacaatgatgacaacaaggttcgggcctacctgatatgttgcaaactgcgttctgcctacttgattgctgtgaagcaagaacactcacgggccacagcccttgtccagcaggtgcagcaggccgccaagagcagcggggatgcagtagtgcaagacatctgtgcccagtggcttctgacaagccacccccggggtgcccatggcccaggctccaggaagtgaccttgggcagtggggccaggaacacgtggcctgagagctgggcaacagcagtgatggcgatgccctccacctctttcctccagtggagtgggacttctctggctctgccctaggttggaaagagttggattggaccctacttgccttcccgggcaaggataggacctttcacgcaagtgccatgtttctctaaaattgtggaatctatgtgtgtttgtctggagatggccagttctttctacctcagagtgagtgagtgagtatgtgtgcacacacgtgtgcatgttcctgtgcgctgatgtttacgcccaagcatttctgaacaaatgaaactcttctccatttaaaagaggcactttactttagacttgccactctgaaaaccttccctgcgttttggttcttgacccgggttgtcctgtttgtatagtcccccctctgtggacgtgctttagtagctcctcttacctagagggcttttacagagaattagagcaacaccaaaaggattgcctcttttccttccttcccattccaaaattcagagatggctttggggcaagtgctacctgtggaataaacctgttttccaggtgtctcttctcccaagcacaagaagtcctggagtctttggaaggtagtctgaatagaagggttttcaggtgcaggcatctgaaagctgtgggtatgtgtataaatgatcaggtctgtgaggctaacacgggcaagagggaaagaaaggctaaccatccaaacagggatacaggggaggcggtggggggtggtggggggagcgggtgctcacaagcacagagctgcctgttgtgaatgtccctgctgcaaagttggtgggtgagagaatgggacttcctctttgagagtctggggagagaaaaggtggccaggatcctaggactgaatgactcgattttacctatttgagctgcagtcctgtttgcgctccttgaattggttaggaagctgcttccttttccctcctgcttcccttcagtctcttcaggaccacaggatggatatgcagacatgtggggtcattgggaagggagtgcgcttcttttctctgtcttagaaaagggagtcaagggttggctttggaattgggcctctggacagagtcagaatgagggaataatgaataggtcacatctggttggtggaaaactaggtgaagtgcttctttaatatgcactgtcttgtcttcccacgcaagatgtgacaatgtttgagaaaaggtgtgtcatactcagtgacttcaatttgcaaatgtggggcctaaagaaagctctgcagctctgaacctctcactggccagagctcagcctattggtcccatccatgatgctgagacaaacagaaactggaagctgaagtcagtgtctctggtgctcagaaaccctgtggatttccctctgaaccaagatttttagtagtaaaataaacaactcatggacatctgtcagatgagaagttttggtcctgttagagaggagaaagactgtaatgaaactactagacccatttgggctaaagtttggcttttccttccttgagtcatagaacgtatccatctcccaggaaatgtccttctctggcgtctgcttgcccttctgagtctgccttttttgcactgaacataagcactttatactaatgggtcacaaatcttgcagcccttaatttgggataagaccagattttcctgacattttcctctaactcattgaactatcaaattataggcaaccactgactagactgatatgagatgaggctaaaagcctttgaacaccacgctgtagtctccaacagaaaaacaccaccaaaacagatacccatgttgaggggttgaatgttttactacaaacaagccacaataaagtgtctatcaacatgtt

SEQ ID NO: 204526 - DNA, 7466 bp, Homo sapiens
  Payload ID: 20342
  Gene Name: zinc finger, FYVE domain containing 26
  ENST ID: ENST00000554557
  CDS Start-End: 131-1465
aaacatggctgcgctgagagctctattgctttgggcgccgggagcaggaggtactccgcgaatgagaacattgagaatgtgttcggcataactcatttctttgtatctccctgcactctgtgctgggaaaatgaatcatccatttggaaaagaggaagctgcttcgcagaagcagctttttggatttttctgcgaatgcctgcggaggggagaatgggagctggcacaggcatgtgtacctcagctacaggagggacaaggggatatcccaaagagggtagaagacatacttcaggcattggtggtgtgtccaaatctgctgagatgtgggcaggacatcaaccctcaaagagtagcctgggtctggcttcttgtactggagaaatggttggcccgggaaaagaagttactcccagttgttttccggagaaagcttgagtttcttttattgtcagaagacctccaaggtgacattccagagaacatcctcgaggagctgtatgagaccttaacacagggtgcagtaggccacgtgcctgacggaaatccaaggagggagagctggactcctcgtctcagctccgaagctgtctctgtgctctgggatctcctgaggcagtctccccagccagcacaggccctgctggagctcctgcttgaggaggatgacggtactggcctctgtcactggcctctgcagaatgcactggtggacctcattcgaaaggcattgcgggctttgcagggccctgattcggtgccccctggggtagtcgatgccatctatggagccctgcggactctgcgttgccccgcagaaccacttggggttgagttgcatctcctgtgtgaggaactactagaggcctgcaggaccgaggggagtcccctgcgggaggagcggctgctcagctgcctgctgcacaaggccagccggggcctgctgtccctgtatggccatacctatgcagagaaggtcacagaaaagccaccgagggctacagcctcgggaaaagtctcaccggatcatctagatcctgagcgggcaatgctagccctgttctccaatcccaacccagccgaggcttggaaagtggcctatttctactgcctgagcaacaacaaacacttcctcgagcagattctggtaacagcactaacattgttgaaagaagaagacttcccaaatcttggctgcctacttgatagagaattcaggcccctcagttgcctgcttgtactcctgggctggacacactgccagagcctagagtcagccaagaggctgctccagaccctgcacaggacccagggcccaggctgtgatgagctcctcagggatgcctgtgatgggttgtgggctcacctggaggtcctggagtggtgcatacagcagagcaggtgctgcaaatctcttctcaacttacctggccaggtgtcaacagtatctgtgcagtattcctgactctctgtgcctggagcttctggaaaacatcttctcattgcttctcatcacctctgctgatcttcacccagagcctcacttgcctgaggactatgctgaggatgatgacattgaggggaagagcccctcaggtttgaggtccccatcagagagccctcagcacatagcacatcctgaaaggaagtcagaacggggttccctgggagtcccaaagacccttgcttatacaatgccaagccatgtgaaggcagagccaaaagacagttacccagggcctcataggcacagctttttggacttaaaacactttactagtggtatcagtggatttctggctgatgaatttgcaataggggccttcctcaggcttctccaagagcaactggatgagatcagtagccgcagccctcctgagaagccaaagcaagaaagtcagagctgctcaggaagcagagatggactgcagagccgcctgcatcgactttccaaggttgtctctgaggcccagtggagacacaaggtggtgacaagcaaccatcgttcagaggagcaaccttcccgaagataccagcctgccacacgtcaccccagtctccgccggggtcgtcggacaagaaggagccaggcagatggccgagacagaggttcaaacccatccctggaaagtacaagtagtgagctgagcacaagtacgtcagagggaagtctgagtgccatgtctggccggaatgagctgcacagtagattgcacccccatcctcaaagttcactcatccccatgatgttctccccacctgagtcactgctggcatcctgcatccttcgcgggaacttcgcagaagcccatcaggtgctgttcacgttcaacctgaagtcctcacccagttcaggggaactgatgttcatggagcgctaccaggaagtgatccaagaactggcccaagtagagcacaagattgaaaaccagaactcagatgcgggtagcagcaccattcggagaactggcagtggccgctcaactctacaggccattggcagcgctgcagcagcaggaatggtgttttactctatctctgacgtgactgacaagctgctcaacacctctggagaccccatccccatgctccaggaggacttttggataagcacggctctagtggagcccactgctcccctgagagaggttctggaagacctcagtccccctgccatggctgcatttgacctagcttgctctcagtgccagctctggaaaacctgcaagcagcttttggagacagccgaacggcgtttgaatagtagccttgaaaggcggggtcgacggatagaccacgtactcctaaatgctgatggcattcgaggttttccagttgttcttcagcaaatcagtaagagtctcaattatctgcttatgtcagccagtcaaaccaaatcagagagtgtggaagaaaagggaggaggccctccacggtgcagcatcactgaactgcttcagatgtgctggcccagcctaagcgaggactgtgttgccagccacaccaccctctcccagcagctagatcaggtccttcagtcactgagagaggcactagagctgccagagcccaggactcctccactgtcttccctggtggagcaggcagcccagaaagctccagaggcagaggcccaccctgtgcagatccagactcagctcctccagaagaacctgggcaaacagaccccatcaggcagcaggcagatggactacttgggcaccttcttcagttactgcagcacccttgctgcagttctccttcaaagtttgagctctgagcctgatcatgtggaggtcaaggtaggaaatccctttgttctgctgcaacagagctcttcccaactggtgtcacatctcctgtttgagagacaagttcccccagagagactggcagcccttctggcccaagagaatctcagcctaagtgtgccacaggtcatcgtcagctgctgctgtgagccccttgctctttgctcatcccggcaaagccagcagacctcctccctcctgactcgtctgggtactctggcccagctacacgcctctcactgcctggatgacctcccactttctacaccgagctccccgaggacaactgagaaccctacattggaaagaaagccctactcctccccaagggactcatcactcccagccctcacctcctctgccttggcctttcttaagtcacgctcaaagctcctagctacggtggcctgcctgggggcttccccgaggttaaaggtcagcaaacccagcttgtcatggaaggaacttcgtggccgcagggaggtgcctctggctgcagagcagacaaagaaggttggcaatacctgtttcccgtgaaggatgcatctctgagaagtcggctggccctacagtttgtggacaggtggcccctggagtcatgcctggagattctggcctactgcatttcagacacggctgtccaagaaggactaaagtgtgagctacagaggaagctggcggagctgcaggtgtatcagaagattctgggtttgcagtctcccccagtgtggtgtgactggcagaccttgaggagctgttgtgttgaggacccatcaactgtcatgaacatgattctagaagcacaggagtatgaactgtgtgaagagtggggctgcctgtaccccattccaagagaacatttaatcagccttcatcaaaagcatcttctccaccttctagaaagaagagatcatgacaaggctctgcaactcctgcgaagaatccctgaccccaccatgtgccttgaagtgacagagcaatccctcgaccagcacactagcttggccacttctcacttcttggccaactacctcaccacccacttctatggacaactgactgctgtccgacaccgtgaaatccaggcgctgtatgtgggatccaagattctgctgaccctgcctgagcagcaccgggccagctattcccacttgtcctctaaccccctgttcatgctggagcagctgcttatgaacatgaaggtggattgggccactgtggctgtgcagactctccagcagctgctggttggacaggagattggcttcactatggacgaggtggactcactgctttccagatacgcagagaaagccctggactttccataccctcagagggagaaacgatcagattctgtgattcacctccaagaaattgtccaccaggctgcagatcccgagaccctccctagatcaccatcagcagagttctctcctgctgctcctcctggtatctccagtatacattcccctagtctaagggaaaggagtttcccaccaacccagccctcacaggaatttgtgcccccagcgacaccccctgccaggcaccagtgggtaccggatgagactgagagtatctgcatggtctgctgcagggagcacttcaccatgtttaacaggcgtcatcattgtcgccgctgtggccggctagtgtgcagctcctgctccactaagaaaatggtggttgaaggctgcagagagaaccctgctcgtgtgtgtgatcagtgctatagttactgcaacaaagatgtaccagaggagccttcagaaaaaccagaagctctagacagctccaagaatgaaagccctccatactcgtttgtggtgagagtccccaaagcagatgaggtggaatggattttggatctcaaagaggaggaaaatgagctggtgcggagtgaattttactatgagcaggcccccagcgcctccttgtgcattgccatcctgaatctgcaccgggacagcattgcctgtggtcaccagctgattgagcactgctgcaggctctccaagggcctcaccaacccagaggtggatgccgggctgctcacggacatcatgaagcagctgctgttcagcgccaagatgatgttcgtcaaagccggccagagccaagacttggctctttgtgacagctacatcagcaaggtagatgtgctgaatattttagttgctgctgcctatcgccacgtgccatctttggatcagatcttgcagccagctgcagtaaccaggctaaggaaccagcttttggaagccgagtactaccaactgggcgttgaggtctccacaaagactgggcttgataccaccggggcgtggcatgcttggggcatggcctgcctcaaagccgggaacctcactgctgcacgggagaagttcagtcgctgtctgaagcccccatttgacctcaatcagctgaatcatggctcaaggctggtgcaggatgtggttgagtacctagagtccacagtgaggccctttgtatccttgcaagatgacgattactttgccaccctgagggaactggaagctacccttcggacgcagagcctttctctggcagtgattcctgaagggaaaatcatgaacaacacctactaccaggaatgcctcttctacctgcacaactatagcaccaacctggccatcatcagcttctacgtgaggcacagctgcctgcgggaagctcttctgcaccttctcaacaaggagagtcctccagaagtttttatagaaggcattttccaaccaagctataaaagtgggaagctacacactttggagaacttgctagaatccattgatccaaccttggagagctggggaaagtacttgattgctgcctgccaacatttacagaagaagaactactaccacattctgtatgagctgcagcagtttatgaaggaccaagttcgggccgccatgacctgtattcggttcttcagtcacaaagcaaagtcatatacagaactgggagagaagctctcatggctacttaaggccaaggaccacctgaagatctacctccaagaaacatcccgcagctctggaaggaagaaaaccacattcttcagaaagaagatgactgcagctgatgtgtcaaggcacatgaacacacttcagctgcagatggaagtgaccaggttcttgcatcggtgcgaaagtgctgggacctctcaaatcaccactttgcctctgccaaccctgtttggaaataaccacatgaaaatggatgttgcctgcaaggtcatgctgggagggaaaaatgtagaagatggttttggaattgctttccgtgttctgcaggacttccagctggatgctgccatgacctactgcagagctgcccgccagttggtggagaaagagaagtacagtgagatccagcaactgctcaaatgtgtcagtgagtcaggcatggcagccaaaagtgacggggacaccatcctcctcaactgcctggaagcgttcaagagaattccgccccaggagctggagggcctgatccaggcaatacacaatgatgacaacaaggttcgggcctacctgatatgttgcaaactgcgttctgcctacttgattgctgtgaagcaagaacactcacgggccacagcccttgtccagcaggtgcagcaggccgccaagagcagcggggatgcagtagtgcaagacatctgtgcccagtggcttctgacaagccacccccggggtgcccatggcccaggctccaggaagtgaccttgggcagtggggccaggaacacgtggcctgagagctgggcaacagcagtgatggcgatgccctccacctctttcctccagtggagtgggacttctctggctctgccctaggttggaaagagttggattggaccctacttgccttcccgggcaaggataggacctttcacgcaagtgccatgtttctctaaaattgtggaatctatgtgtgtttgtctggagatggccagttctttctacctcagagtgagtgagtgagtatgtgtgcacacacgtgtgcatgttcctgtgcgctgatgtttacgcccaagcatttctgaacaaatgaaactcttctccatttaaaagaggcactttactttagacttgccactctgaaaaccttccctgcgttttggttc

SEQ ID NO: 204527 - DNA, 7309 bp, Homo sapiens
  Payload ID: 20342
  Gene Name: zinc finger, FYVE domain containing 26
  ENST ID: ENST00000555452
  CDS Start-End: 138-6815
tcggctcaaacatggctgcgctgagagctctattgctttgggcgccgggagcaggaggtactccgcgaatgagaacattgagaatgtgttcggcataactcatttctttgtatctccctgcactctgtgctgggaaaatgaatcatccatttggaaaagaggaagctgcttcgcagaagcagctttttggatttttctgcgaatgcctgcggaggggagaatgggagctggcacaggcatgtgtacctcagctacaggagggacaaggggatatcccaaagagggtagaagacatacttcaggcattggtggtgtgtccaaatctgctgagatgtgggcaggacatcaaccctcaaagagtagcctgggtctggcttcttgtactggagaaatggttggcccgggaaaagaagttactcccagttgttttccggagaaagcttgagtttcttttattgtcagaagacctccaaggtgacattccagagaacatcctcgaggagctgtatgagaccttaacacagggtgcagtaggccacgtgcctgacggaaatccaaggagggagagctggactcctcgtctcagctccgaagctgtctctgtgctctgggatctcctgaggcagtctccccagccagcacaggccctgctggagctcctgcttgaggaggatgacggtactggcctctgtcactggcctctgcagaatgcactggtggacctcattcgaaaggcattgcgggctttgcagggccctgattcggtgccccctggggtagtcgatgccatctatggagccctgcggactctgcgttgccccgcagaaccacttggggttgagttgcatctcctgtgtgaggaactactagaggcctgcaggaccgaggggagtcccctgcgggaggagcggctgctcagctgcctgctgcacaaggccagccggggcctgctgtccctgtatggccatacctatgcagagaaggtcacagaaaagccaccgagggctacagcctcgggaaaagtctcaccggatcatctagatcctgagcgggcaatgctagccctgttctccaatcccaacccagccgaggcttggaaagtggcctatttctactgcctgagcaacaacaaacacttcctcgagcagattctggtaacagcactaacattgttgaaagaagaagacttcccaaatcttggctgcctacttgatagagaattcaggcccctcagttgcctgcttgtactcctgggctggacacactgccagagcctagagtcagccaagaggctgctccagaccctgcacaggacccagggcccaggctgtgatgagctcctcagggatgcctgtgatgggttgtgggctcacctggaggtcctggagtggtgcatacagcagagcagcaaccccataccaaagagagatctgttgtatcatttacacggtggagacagccactcagtgctctacactctccatcaccttacaaaccttccagccctcagggaggaagatgttctcaagctcttacagaaagtgccagccaaggacccccagcaagagcctgatgcagttgatgctccagtccctgagcacctgagccagtgtcagaacctgacactctaccagggcttctgtgccatgaagtatgccatctatgccctctgtgtaaactcacaccagcactcccagtgccaggactgcaaagacagcctctctgaggacctggcctcagctacagagccagcgaatgactctctctcctccccaggtgctgcaaatctcttctcaacttacctggccaggtgtcaacagtatctgtgcagtattcctgactctctgtgcctggagcttctggaaaacatcttctcattgcttctcatcacctctgctgatcttcacccagagcctcacttgcctgaggactatgctgaggatgatgacattgaggggaagagcccctcaggtttgaggtccccatcagagagccctcagcacatagcacatcctgaaaggaagtcagaacggggttccctgggagtcccaaagacccttgcttatacaatgccaagccatgtgaaggcagagccaaaagacagttacccagggcctcataggcacagctttttggacttaaaacactttactagtggtatcagtggatttctggctgatgaatttgcaataggggccttcctcaggcttctccaagagcaactggatgagatcagtagccgcagccctcctgagaagccaaagcaagaaagtcagagctgctcaggaagcagagatggactgcagagccgcctgcatcgactttccaaggttgtctctgaggcccagtggagacacaaggtggtgacaagcaaccatcgttcagaggagcaaccttcccgaagataccagcctgccacacgtcaccccagtctccgccggggtcgtcggacaagaaggagccaggcagatggccgagacagaggttcaaacccatccctggaaagtacaagtagtgagctgagcacaagtacgtcagagggaagtctgagtgccatgtctggccggaatgagctgcacagtagattgcacccccatcctcaaagttcactcatccccatgatgttctccccacctgagtcactgctggcatcctgcatccttcgcgggaacttcgcagaagcccatcaggtgctgttcacgttcaacctgaagtcctcacccagttcaggggaactgatgttcatggagcgctaccaggaagtgatccaagaactggcccaagtagagcacaagattgaaaaccagaactcagatgcgggtagcagcaccattcggagaactggcagtggccgctcaactctacaggccattggcagcgctgcagcagcaggaatggtgttttactctatctctgacgtgactgacaagctgctcaacacctctggagaccccatccccatgctccaggaggacttttggataagcacggctctagtggagcccactgctcccctgagagaggttctggaagacctcagtccccctgccatggctgcatttgacctagcttgctctcagtgccagctctggaaaacctgcaagcagcttttggagacagccgaacggcgtttgaatagtagccttgaaaggcggggtcgacggatagaccacgtactcctaaatgctgatggcattcgaggttttccagttgttcttcagcaaatcagtaagagtctcaattatctgcttatgtcagccagtcaaaccaaatcagagagtgtggaagaaaagggaggaggccctccacggtgcagcatcactgaactgcttcagatgtgctggcccagcctaagcgaggactgtgttgccagccacaccaccctctcccagcagctagatcaggtccttcagtcactgagagaggcactagagctgccagagcccaggactcctccactgtcttccctggtggagcaggcagcccagaaagctccagaggcagaggcccaccctgtgcagatccagactcagctcctccagaagaacctgggcaaacagaccccatcaggcagcaggcagatggactacttgggcaccttcttcagttactgcagcacccttgctgcagttctccttcaaagtttgagctctgagcctgatcatgtggaggtcaaggtaggaaatccctttgttctgctgcaacagagctcttcccaactggtgtcacatctcctgtttgagagacaagttcccccagagagactggcagcccttctggcccaagagaatctcagcctaagtgtgccacaggtcatcgtcagctgctgctgtgagccccttgctctttgctcatcccggcaaagccagcagacctcctccctcctgactcgtctgggtactctggcccagctacacgcctctcactgcctggatgacctcccactttctacaccgagctccccgaggacaactgagaaccctacattggaaagaaagccctactcctccccaagggactcatcactcccagccctcacctcctctgccttggcctttcttaagtcacgctcaaagctcctagctacggtggcctgcctgggggcttccccgaggttaaaggtcagcaaacccagcttgtcatggaaggaacttcgtggccgcagggaggtgcctctggctgcagagcaggtagcccgggagtgtgagcgccttctggaacaattccctctgtttgaggccttcctcctggctgcctgggagcccctgcgagggtctttgcagcaggggcagagtctggcagtgaatctctgtggttgggccagtctttctaccgttctcctgggcctacattctcccattgccctagatgtactgagtgaggcttttgaggaatccttggtggccagagattggtcccgggcccttcagctcactgaagtgtacgggcgagatgtggacgatttgagcagcataaaggatgcagtcctgagctgtgctgtggcatgtgacaaagaaggttggcaatacctgtttcccgtgaaggatgcatctctgagaagtcggctggccctacagtttgtggacaggtggcccctggagtcatgcctggagattctggcctactgcatttcagacacggctgtccaagaaggactaaagtgtgagctacagaggaagctggcggagctgcaggtgtatcagaagattctgggtttgcagtctcccccagtgtggtgtgactggcagaccttgaggagctgttgtgttgaggacccatcaactgtcatgaacatgattctagaagcacaggagtatgaactgtgtgaagagtggggctgcctgtaccccattccaagagaacatttaatcagccttcatcaaaagcatcttctccaccttctagaaagaagagatcatgacaaggctctgcaactcctgcgaagaatccctgaccccaccatgtgccttgaagtgacagagcaatccctcgaccagcacactagcttggccacttctcacttcttggccaactacctcaccacccacttctatggacaactgactgctgtccgacaccgtgaaatccaggcgctgtatgtgggatccaagattctgctgaccctgcctgagcagcaccgggccagctattcccacttgtcctctaaccccctgttcatgctggagcagctgcttatgaacatgaaggtggattgggccactgtggctgtgcagactctccagcagctgctggttggacaggagattggcttcactatggacgaggtggactcactgctttccagatacgcagagaaagccctggactttccataccctcagagggagaaacgatcagattctgtgattcacctccaagaaattgtccaccaggctgcagatcccgagaccctccctagatcaccatcagcagagttctctcctgctgctcctcctggtatctccagtatacattcccctagtctaagggaaaggagtttcccaccaacccagccctcacaggaatttgtgcccccagcgacaccccctgccaggcaccagtgggtaccggatgagactgagagtatctgcatggtctgctgcagggagcacttcaccatgtttaacaggcgtcatcattgtcgccgctgtggccggctagtgtgcagctcctgctccactaagaaaatggtggttgaaggctgcagagagaaccctgctcgtgtgtgtgatcagtgctatagttactgcaacaaagatgtaccagaggagccttcagaaaaaccagaagctctagacagctccaagaatgaaagccctccatactcgtttgtggtgagagtccccaaagcagatgaggtggaatggattttggatctcaaagaggaggaaaatgagctggtgcggagtgaattttactatgagcaggcccccagcgcctccttgtgcattgccatcctgaatctgcaccgggacagcattgcctgtggtcaccagctgattgagcactgctgcaggctctccaagggcctcaccaacccagaggtggatgccgggctgctcacggacatcatgaagcagctgctgttcagcgccaagatgatgttcgtcaaagccggccagagccaagacttggctctttgtgacagctacatcagcaaggtagatgtgctgaatattttagttgctgctgcctatcgccacgtgccatctttggatcagatcttgcagccagctgcagtaaccaggctaaggaaccagcttttggaagccgagtactaccaactgggcgttgaggtctccacaaagactgggcttgataccaccggggcgtggcatgcttggggcatggcctgcctcaaagccgggaacctcactgctgcacgggagaagttcagtcgctgtctgaagcccccatttgacctcaatcagctgaatcatggctcaaggctggtgcaggatgtggttgagtacctagagtccacagtgaggccctttgtatccttgcaagatgacgattactttgccaccctgagggaactggaagctacccttcggacgcagagcctttctctggcagtgattcctgaagggaaaatcatgaacaacacctactaccaggaatgcctcttctacctgcacaactatagcaccaacctggccatcatcagcttctacgtgaggcacagctgcctgcgggaagctcttctgcaccttctcaacaaggtgggacatggacacagctcaaaaaggcagtgcctgccttactcctctggcttggaccactcagccttaagcgggacaataaccccctgacacttaaccctgtgttgagctatggggccatctctagcagagtcaagtcaaaacaggggactctgcacaactgttattcagtgagtgtgaaaagtcttagcctagatcccaaatcactgccctcaccagcaaaggcatgtttcattccttctgccaaaacatgcagcagaatcggatagtggttaagagcatgtctctggaatgagatgctcagtgtgagtcttgtgtggccttgggcatattgcttagagtctgcttccacgcgcctccctacctggcctgggatggtgtccagcttctgacccagctgctggtccattcagagttgttactacaagggccaggaagtaaccatggtgccaatcctatagttgaaccccaaatagatgatgaaagaagaatatgctctcctttttttcttctcccatcctctgcccccctcccactggaagcaaaggcaccactgaagaacattacatctttggagctcttaa

SEQ ID NO: 204528 - DNA, 1533 bp, Homo sapiens
  Payload ID: 20342
  Gene Name: zinc finger, FYVE domain containing 26
  ENST ID: ENST00000557306
  CDS Start-End: 1-984
atgaacaacacctactaccaggaatgcctcttctacctgcacaactatagcaccaacctggccatcatcagcttctacgtgaggcacagctgcctgcgggaagctcttctgcaccttctcaacaaggagagtcctccagaagtttttatagaaggcattttccaaccaagctataaaagtgggaagctacacactttggagaacttgctagaatccattgatccaaccttggagagctggggaaagtacttgattgctgcctgccaacatttacagaagaagaactactaccacattctgtatgagctgcagcagtttatgaaggaccaagttcgggccgccatgacctgtattcggttcttcagtcacaaagcaaagtcatatacagaactgggagagaagctctcatggctacttaaggccaaggaccacctgaagatctacctccaagaaacatcccgcagctctggaaggaagaaaaccacattcttcagaaagaagatgactgcagctgatgtgtcaaggcacatgaacacacttcagctgcagatggaagtgaccaggttcttgcatcggtgcgaaagtgctgggacctctcaaatcaccactttgcctctgccaaccctgtttggaaataaccacatgaaaatggatgttgcctgcaaggtcatgctgggagggaaaaatgtagaagatggttttggaattgctttccgtgttctgcaggacttccagctggatgctgccatgacctactgcagagctgcccgccagttggtggagaaagagaagtacagtgagatccagcaactgctcaaatgtgtcagtgagtcaggcatggcagccaaaagtgacggggacaccatcctcctcaactgcctggaagcgttcaagagaattccgccccaggagctggagggcctgatccaggcaatacacaatgatgacaacaaggtgagcggaattgtctccaaacgctggtgatgccaatgaattgtgtctcaggcttgcctagtcacctttatcccttgctccccacaatagttccatacaacccgtatctcagcttctgtattatcagaggtggagctgaggcttggataggggtgtagaaaggagggaatagatgaggagcaggtgaacatggactgcatgcgtctttgccttcccaagtctttatccccaagacaaacatgtcctaggctgctcttgaatctccattttatactgatgtcttctctcagagagccctaggaaatccctcacctcacctccatctttgggtggactgatggattgaggttcccagagtaagcaggtatctctttatcctagagggaaaaaggtacagtaagaaaaaaatccccaccccacactttgaccaacaatgtccaacaatgtctcggtctccagaatgaacctctcctcaggggccaaagaactcgtccctgtttgggaaaatggtgaacctttgcttcccgttgcctttgggaggagtgccagtcagaataaaaatcttcccagatgccccca

SEQ ID NO: 204529 - DNA, 2927 bp, Homo sapiens
  Payload ID: 20343
  Gene Name: zinc finger, FYVE domain containing 27
  Uniprot ID: Q5T4F4
  ENST ID: ENST00000337540
  CDS Start-End: 203-1321
gcagagcgattcgcgtcccggaagcggcggtggcggccgcggcgtaggcggaggagattttcggacctgcgacttccgaacaaccctggcaggaggagcggcgttcagccgggggaggcctgaagaaacgctccggggcccagtggctctacccctgctcctgcccgaccctgccgcctccctcacggagccagcggccgggatgcagacatcagaacgtgaggggagtgggccggagctgagccccagcgtgatgcccgaggctcccctggagtctccaccttttcctaccaagtccccagcgtttgaccttttcaacttggttctctcctacaagaggctggagatctacctggaacccttgaaggatgcaggtgcatggtactcagtaggtgccctgatgatttcagtgcccgccctgctgggctaccttcaggaggtttgccgggcacggctgcctgattccgagctgatgcggaggaagtatcatagcgtgaggcaggaggacctgcagagaggtcgcctgtctcgtcccgaggccgtggctgaggtgaagagcttcttgatccagctggaggccttcctgagccgcctgtgctgcacatgtgaagccgcctaccgcgtgctgcactgggagaaccccgtcgtgtcctcacagttctatggggctcttctgggcacagtctgcatgctgtatttgctgccactctgctgggttctcacccttttaaacagcacgctctttctggggaatgtggagttcttccgagttgtgtctgagtacagggcatctctgcagcagaggatgaacccaaagcaggaagagcatgcctttgagagtcctccaccaccagatgttggggggaaggatggtctgatggacagcacgcctgccctcacacccacggaggacctcacaccgggcagcgtggaggaggctgaggaggctgagccagatgaagagtttaaagatgcgattgaggaggatgatgagggcgccccgtgcccagcagaggatgagctggccctgcaggacaacgggttcctgagcaagaatgaggtgctgcgcagcaaggtgtctcggctcacggagcggctccgcaagcgctaccccaccaacaacttcgggaactgcacgggctgctcggccaccttctcagtgctgaagaagaggcggagctgcagtaattgtggaaacagcttctgctctcgatgctgctccttcaaggtgcccaagtcctccatgggggccacagcccctgaagcccagagggagactgtgtttgtgtgtgcctcgtgtaaccagaccttgagcaagtgagaagagaggccagggtccaaccaggcacccgtccttgggaccagcagtagaccccccactctccccacccctggcccactgtggtgtgtgctgggcaaatgtggcctgaatgctaggtaggcttccccttccttcctcactctctccagctggattctggagctgttctccatccatgagagtggctggcaatggctgctctcaatcccttgagggagaagagcccctggagggcctggcatgtttgtcctgctctgcctgggactgagcgagtggacttagggctgggcaggcagtagccaccagagggcagcagcgaactaggccaggcctgactggggtctgaagatcagggtcagtgtggctgtgcctgggaattccagacctgaggttgggaaaagaggtttttctcctgcagggtactgggccaggccctcagcctcagagagcctgcagaagggcttgggagtgccacaccccatctctgctgattgaatgtccctccaggcaccaggatctcatcatttccccatcagagggtgtggccaggcctaacaagaccatgggtgcttctagaaacagggttgaagttcccagattccctgagaggagaatgtgtataggagggtttggctgagtccttcagcgttaagtggaggaaagcttggggaagccccaatagctggacagacctcggcctcccctcgaagacacctcaattcacagactctcagcccacacaatgccccagtgtccccagctccgctggagcagctgcagggcacttggatcacaacttctgcaccctctgtccagagtctagggcagtcctccactggcccagcactccagtttcctttccctgcctcttgtccaatggagtgggaggccaggtgagtggagcagaggtcctgaagcccttgacccctgggggcctgggtagtgtaggatctcgctgggctgggtcctggattccagggctattccctggaggacagtctcagttatgggataaggccccctgggggtctccatttctttccaacagtttcatgttcactactggactcttacgggctcagtatctctcccttagccatgagctggctcaggcatcccttcccttccctggagctgccctgcctttctcaagtatttatttatttattgcatggttcctgggaacatgtggcacaagtaatgggatgaggaggaattgggggtgggggtcttctacctaggactcttccctggagtcatgggctgcctgggacccaggacccatgagggggctgagaggtttctacactcgaggagcaggggtccagagaggcaggctggggaggcaagggacccatcctaggcccgctttcttgccgagccaagcagcttagctggggctgtgcagccaggggcttacccaggccagtggaggtgccacagccctggggagccagacaggctttggtatcgtatcgcctctgtgtccttttaagagaggagagttcagtaccccgtgctttctttacactggagaggaactaaaaggatctctgtgtctatggagaattgtcaataaaaaggcctcaagcttcttgtttttgtc

SEQ ID NO: 204530 - DNA, 2765 bp, Homo sapiens
  Payload ID: 20343
  Gene Name: zinc finger, FYVE domain containing 27
  Uniprot ID: Q5T4F4
  ENST ID: ENST00000357540
  CDS Start-End: 203-1159
gcagagcgattcgcgtcccggaagcggcggtggcggccgcggcgtaggcggaggagattttcggacctgcgacttccgaacaaccctggcaggaggagcggcgttcagccgggggaggcctgaagaaacgctccggggcccagtggctctacccctgctcctgcccgaccctgccgcctccctcacggagccagcggccgggatgcagacatcagaacgtgaggggagtgggccggagctgagccccagcgtgatgcccgaggctcccctggagtctccaccttttcctaccaagtccccagcgtttgaccttttcaacttggttctctcctacaagaggctggagatctacctggaacccttgaaggatgcaggtgatggtgttcgatacttgctcagcttgatccagctggaggccttcctgagccgcctgtgctgcacatgtgaagccgcctaccgcgtgctgcactgggagaaccccgtcgtgtcctcacagttctatggggctcttctgggcacagtctgcatgctgtatttgctgccactctgctgggttctcacccttttaaacagcacgctctttctggggaatgtggagttcttccgagttgtgtctgagtacagggcatctctgcagcagaggatgaacccaaagcaggaagagcatgcctttgagagtcctccaccaccagatgttggggggaaggatggtctgatggacagcacgcctgccctcacacccacggaggacctcacaccgggcagcgtggaggaggctgaggaggctgagccagatgaagagtttaaagatgcgattgaggaggatgatgagggcgccccgtgcccagcagaggatgagctggccctgcaggacaacgggttcctgagcaagaatgaggtgctgcgcagcaaggtgtctcggctcacggagcggctccgcaagcgctaccccaccaacaacttcgggaactgcacgggctgctcggccaccttctcagtgctgaagaagaggcggagctgcagtaattgtggaaacagcttctgctctcgatgctgctccttcaaggtgcccaagtcctccatgggggccacagcccctgaagcccagagggagactgtgtttgtgtgtgcctcgtgtaaccagaccttgagcaagtgagaagagaggccagggtccaaccaggcacccgtccttgggaccagcagtagaccccccactctccccacccctggcccactgtggtgtgtgctgggcaaatgtggcctgaatgctaggtaggcttccccttccttcctcactctctccagctggattctggagctgttctccatccatgagagtggctggcaatggctgctctcaatcccttgagggagaagagcccctggagggcctggcatgtttgtcctgctctgcctgggactgagcgagtggacttagggctgggcaggcagtagccaccagagggcagcagcgaactaggccaggcctgactggggtctgaagatcagggtcagtgtggctgtgcctgggaattccagacctgaggttgggaaaagaggtttttctcctgcagggtactgggccaggccctcagcctcagagagcctgcagaagggcttgggagtgccacaccccatctctgctgattgaatgtccctccaggcaccaggatctcatcatttccccatcagagggtgtggccaggcctaacaagaccatgggtgcttctagaaacagggttgaagttcccagattccctgagaggagaatgtgtataggagggtttggctgagtccttcagcgttaagtggaggaaagcttggggaagccccaatagctggacagacctcggcctcccctcgaagacacctcaattcacagactctcagcccacacaatgccccagtgtccccagctccgctggagcagctgcagggcacttggatcacaacttctgcaccctctgtccagagtctagggcagtcctccactggcccagcactccagtttcctttccctgcctcttgtccaatggagtgggaggccaggtgagtggagcagaggtcctgaagcccttgacccctgggggcctgggtagtgtaggatctcgctgggctgggtcctggattccagggctattccctggaggacagtctcagttatgggataaggccccctgggggtctccatttctttccaacagtttcatgttcactactggactcttacgggctcagtatctctcccttagccatgagctggctcaggcatcccttcccttccctggagctgccctgcctttctcaagtatttatttatttattgcatggttcctgggaacatgtggcacaagtaatgggatgaggaggaattgggggtgggggtcttctacctaggactcttccctggagtcatgggctgcctgggacccaggacccatgagggggctgagaggtttctacactcgaggagcaggggtccagagaggcaggctggggaggcaagggacccatcctaggcccgctttcttgccgagccaagcagcttagctggggctgtgcagccaggggcttacccaggccagtggaggtgccacagccctggggagccagacaggctttggtatcgtatcgcctctgtgtccttttaagagaggagagttcagtaccccgtgctttctttacactggagaggaactaaaaggatctctgtgtctatggagaattgtcaataaaaaggcctcaagcttcttgtttttgtc

SEQ ID NO: 204531 - DNA, 2997 bp, Homo sapiens
  Payload ID: 20343
  Gene Name: zinc finger, FYVE domain containing 27
  Uniprot ID: Q5T4F4
  ENST ID: ENST00000359980
  CDS Start-End: 188-1402
ggaagcggcggtggcggccgcggcgtaggcggaggagattttcggacctgcgacttccgaacaaccctggcaggaggagcggcgttcagccgggggaggcctgaagaaacgctccggggcccagtggctctacccctgctcctgcccgaccctgccgcctccctcacggagccagcggccgggtaggatgcagacatcagaacgtgaggggagtgggccggagctgagccccagcgtgatgcccgaggctcccctggagtctccaccttttcctaccaagtccccagcgtttgaccttttcaacttggttctctcctacaagaggctggagatctacctggaacccttgaaggatgcaggtgatggtgttcgatacttgctcaggtggcagatgcctttgtgttccttgctgacctgcctgggcctcaacgtcttgttcctcactttgaatgagggtgcatggtactcagtaggtgccctgatgatttcagtgcccgccctgctgggctaccttcaggaggtttgccgggcacggctgcctgattccgagctgatgcggaggaagtatcatagcgtgaggcaggaggacctgcagagaggtcgcctgtctcgtcccgaggccgtggctgaggtgaagagcttcttgatccagctggaggccttcctgagccgcctgtgctgcacatgtgaagccgcctaccgcgtgctgcactgggagaaccccgtcgtgtcctcacagttctatggggctcttctgggcacagtctgcatgctgtatttgctgccactctgctgggttctcacccttttaaacagcacgctctttctggggaatgtggagttcttccgagttgtgtctgagtacagggcatctctgcagcagaggatgaacccaaagcaggaagagcatgcctttgagagtcctccaccaccagatgttggggggaaggatggtctgatggacagcacgcctgccctcacacccacggaggacctcacaccgggcagcgtggaggaggctgaggaggctgagccagatgaagagtttaaagatgcgattgaggaggatgatgagggcgccccgtgcccagcagaggatgagctggccctgcaggacaacgggttcctgagcaagaatgaggtgctgcgcagcaaggtgtctcggctcacggagcggctccgcaagcgctaccccaccaacaacttcgggaactgcacgggctgctcggccaccttctcagtgctgaagaagaggcggagctgcagtaattgtggaaacagcttctgctctcgatgctgctccttcaaggtgcccaagtcctccatgggggccacagcccctgaagcccagagggagactgtgtttgtgtgtgcctcgtgtaaccagaccttgagcaagtgagaagagaggccagggtccaaccaggcacccgtccttgggaccagcagtagaccccccactctccccacccctggcccactgtggtgtgtgctgggcaaatgtggcctgaatgctaggtaggcttccccttccttcctcactctctccagctggattctggagctgttctccatccatgagagtggctggcaatggctgctctcaatcccttgagggagaagagcccctggagggcctggcatgtttgtcctgctctgcctgggactgagcgagtggacttagggctgggcaggcagtagccaccagagggcagcagcgaactaggccaggcctgactggggtctgaagatcagggtcagtgtggctgtgcctgggaattccagacctgaggttgggaaaagaggtttttctcctgcagggtactgggccaggccctcagcctcagagagcctgcagaagggcttgggagtgccacaccccatctctgctgattgaatgtccctccaggcaccaggatctcatcatttccccatcagagggtgtggccaggcctaacaagaccatgggtgcttctagaaacagggttgaagttcccagattccctgagaggagaatgtgtataggagggtttggctgagtccttcagcgttaagtggaggaaagcttggggaagccccaatagctggacagacctcggcctcccctcgaagacacctcaattcacagactctcagcccacacaatgccccagtgtccccagctccgctggagcagctgcagggcacttggatcacaacttctgcaccctctgtccagagtctagggcagtcctccactggcccagcactccagtttcctttccctgcctcttgtccaatggagtgggaggccaggtgagtggagcagaggtcctgaagcccttgacccctgggggcctgggtagtgtaggatctcgctgggctgggtcctggattccagggctattccctggaggacagtctcagttatgggataaggccccctgggggtctccatttctttccaacagtttcatgttcactactggactcttacgggctcagtatctctcccttagccatgagctggctcaggcatcccttcccttccctggagctgccctgcctttctcaagtatttatttatttattgcatggttcctgggaacatgtggcacaagtaatgggatgaggaggaattgggggtgggggtcttctacctaggactcttccctggagtcatgggctgcctgggacccaggacccatgagggggctgagaggtttctacactcgaggagcaggggtccagagaggcaggctggggaggcaagggacccatcctaggcccgctttcttgccgagccaagcagcttagctggggctgtgcagccaggggcttacccaggccagtggaggtgccacagccctggggagccagacaggctttggtatcgtatcgcctctgtgtccttttaagagaggagagttcagtaccccgtgctttctttacactggagaggaactaaaaggatctctgtgtctatggagaattgtcaataaaaaggcctcaagcttc

SEQ ID NO: 204532 - DNA, 2769 bp, Homo sapiens
  Payload ID: 20343
  Gene Name: zinc finger, FYVE domain containing 27
  Uniprot ID: Q5T4F4
  ENST ID: ENST00000370610
  CDS Start-End: 228-1163
gcagagcgattcgcgtcccggaagcggcggtggcggccgcggcgtaggcggaggagattttcggacctgcgacttccgaacaaccctggcaggaggagcggcgttcagccgggggaggcctgaagaaacgctccggggcccagtggctctacccctgctcctgcccgaccctgccgcctccctcacggagccagcggccgggtgcatggtactcagtaggtgccctgatgatttcagtgcccgccctgctgggctaccttcaggaggtttgccgggcacggctgcctgattccgagctgatgcggaggaagtatcatagcgtgaggcaggaggacctgcagagaggtcgcctgtctcgtcccgaggccgtggctgaggtgaagagcttcttgatccagctggaggccttcctgagccgcctgtgctgcacatgtgaagccgcctaccgcgtgctgcactgggagaaccccgtcgtgtcctcacagttctatggggctcttctgggcacagtctgcatgctgtatttgctgccactctgctgggttctcacccttttaaacagcacgctctttctggggaatgtggagttcttccgagttgtgtctgagtacagggcatctctgcagcagaggatgaacccaaagcaggaagagcatgcctttgagagtcctccaccaccagatgttggggggaaggatggtctgatggacagcacgcctgccctcacacccacggagagtctctcttcccaggacctcacaccgggcagcgtggaggaggctgaggaggctgagccagatgaagagtttaaagatgcgattgaggaggatgatgagggcgccccgtgcccagcagaggatgagctggccctgcaggacaacgggttcctgagcaagaatgaggtgctgcgcagcaaggtgtctcggctcacggagcggctccgcaagcgctaccccaccaacaacttcgggaactgcacgggctgctcggccaccttctcagtgctgaagaagaggcggagctgcagtaattgtggaaacagcttctgctctcgatgctgctccttcaaggtgcccaagtcctccatgggggccacagcccctgaagcccagagggagactgtgtttgtgtgtgcctcgtgtaaccagaccttgagcaagtgagaagagaggccagggtccaaccaggcacccgtccttgggaccagcagtagaccccccactctccccacccctggcccactgtggtgtgtgctgggcaaatgtggcctgaatgctaggtaggcttccccttccttcctcactctctccagctggattctggagctgttctccatccatgagagtggctggcaatggctgctctcaatcccttgagggagaagagcccctggagggcctggcatgtttgtcctgctctgcctgggactgagcgagtggacttagggctgggcaggcagtagccaccagagggcagcagcgaactaggccaggcctgactggggtctgaagatcagggtcagtgtggctgtgcctgggaattccagacctgaggttgggaaaagaggtttttctcctgcagggtactgggccaggccctcagcctcagagagcctgcagaagggcttgggagtgccacaccccatctctgctgattgaatgtccctccaggcaccaggatctcatcatttccccatcagagggtgtggccaggcctaacaagaccatgggtgcttctagaaacagggttgaagttcccagattccctgagaggagaatgtgtataggagggtttggctgagtccttcagcgttaagtggaggaaagcttggggaagccccaatagctggacagacctcggcctcccctcgaagacacctcaattcacagactctcagcccacacaatgccccagtgtccccagctccgctggagcagctgcagggcacttggatcacaacttctgcaccctctgtccagagtctagggcagtcctccactggcccagcactccagtttcctttccctgcctcttgtccaatggagtgggaggccaggtgagtggagcagaggtcctgaagcccttgacccctgggggcctgggtagtgtaggatctcgctgggctgggtcctggattccagggctattccctggaggacagtctcagttatgggataaggccccctgggggtctccatttctttccaacagtttcatgttcactactggactcttacgggctcagtatctctcccttagccatgagctggctcaggcatcccttcccttccctggagctgccctgcctttctcaagtatttatttatttattgcatggttcctgggaacatgtggcacaagtaatgggatgaggaggaattgggggtgggggtcttctacctaggactcttccctggagtcatgggctgcctgggacccaggacccatgagggggctgagaggtttctacactcgaggagcaggggtccagagaggcaggctggggaggcaagggacccatcctaggcccgctttcttgccgagccaagcagcttagctggggctgtgcagccaggggcttacccaggccagtggaggtgccacagccctggggagccagacaggctttggtatcgtatcgcctctgtgtccttttaagagaggagagttcagtaccccgtgctttctttacactggagaggaactaaaaggatctctgtgtctatggagaattgtcaataaaaaggcctcaagcttcttgtttttgtc

SEQ ID NO: 204533 - DNA, 2669 bp, Homo sapiens
  Payload ID: 20343
  Gene Name: zinc finger, FYVE domain containing 27
  Uniprot ID: Q5T4F4
  ENST ID: ENST00000370613
  CDS Start-End: 203-1063
gcagagcgattcgcgtcccggaagcggcggtggcggccgcggcgtaggcggaggagattttcggacctgcgacttccgaacaaccctggcaggaggagcggcgttcagccgggggaggcctgaagaaacgctccggggcccagtggctctacccctgctcctgcccgaccctgccgcctccctcacggagccagcggccgggatgcagacatcagaacgtgaggggagtgggccggagctgagccccagcgtgatgcccgaggctcccctggagtctccaccttttcctaccaagtccccagcgtttgaccttttcaacttggttctctcctacaagaggctggagatctacctggaacccttgaaggatgcaggtgatggtgttcgatacttgctcaggttctatggggctcttctgggcacagtctgcatgctgtatttgctgccactctgctgggttctcacccttttaaacagcacgctctttctggggaatgtggagttcttccgagttgtgtctgagtacagggcatctctgcagcagaggatgaacccaaagcaggaagagcatgcctttgagagtcctccaccaccagatgttggggggaaggatggtctgatggacagcacgcctgccctcacacccacggaggacctcacaccgggcagcgtggaggaggctgaggaggctgagccagatgaagagtttaaagatgcgattgaggaggatgatgagggcgccccgtgcccagcagaggatgagctggccctgcaggacaacgggttcctgagcaagaatgaggtgctgcgcagcaaggtgtctcggctcacggagcggctccgcaagcgctaccccaccaacaacttcgggaactgcacgggctgctcggccaccttctcagtgctgaagaagaggcggagctgcagtaattgtggaaacagcttctgctctcgatgctgctccttcaaggtgcccaagtcctccatgggggccacagcccctgaagcccagagggagactgtgtttgtgtgtgcctcgtgtaaccagaccttgagcaagtgagaagagaggccagggtccaaccaggcacccgtccttgggaccagcagtagaccccccactctccccacccctggcccactgtggtgtgtgctgggcaaatgtggcctgaatgctaggtaggcttccccttccttcctcactctctccagctggattctggagctgttctccatccatgagagtggctggcaatggctgctctcaatcccttgagggagaagagcccctggagggcctggcatgtttgtcctgctctgcctgggactgagcgagtggacttagggctgggcaggcagtagccaccagagggcagcagcgaactaggccaggcctgactggggtctgaagatcagggtcagtgtggctgtgcctgggaattccagacctgaggttgggaaaagaggtttttctcctgcagggtactgggccaggccctcagcctcagagagcctgcagaagggcttgggagtgccacaccccatctctgctgattgaatgtccctccaggcaccaggatctcatcatttccccatcagagggtgtggccaggcctaacaagaccatgggtgcttctagaaacagggttgaagttcccagattccctgagaggagaatgtgtataggagggtttggctgagtccttcagcgttaagtggaggaaagcttggggaagccccaatagctggacagacctcggcctcccctcgaagacacctcaattcacagactctcagcccacacaatgccccagtgtccccagctccgctggagcagctgcagggcacttggatcacaacttctgcaccctctgtccagagtctagggcagtcctccactggcccagcactccagtttcctttccctgcctcttgtccaatggagtgggaggccaggtgagtggagcagaggtcctgaagcccttgacccctgggggcctgggtagtgtaggatctcgctgggctgggtcctggattccagggctattccctggaggacagtctcagttatgggataaggccccctgggggtctccatttctttccaacagtttcatgttcactactggactcttacgggctcagtatctctcccttagccatgagctggctcaggcatcccttcccttccctggagctgccctgcctttctcaagtatttatttatttattgcatggttcctgggaacatgtggcacaagtaatgggatgaggaggaattgggggtgggggtcttctacctaggactcttccctggagtcatgggctgcctgggacccaggacccatgagggggctgagaggtttctacactcgaggagcaggggtccagagaggcaggctggggaggcaagggacccatcctaggcccgctttcttgccgagccaagcagcttagctggggctgtgcagccaggggcttacccaggccagtggaggtgccacagccctggggagccagacaggctttggtatcgtatcgcctctgtgtccttttaagagaggagagttcagtaccccgtgctttctttacactggagaggaactaaaaggatctctgtgtctatggagaattgtcaataaaaaggcctcaagcttcttgtttttgtc

SEQ ID NO: 204534 - DNA, 3047 bp, Homo sapiens
  Payload ID: 20343
  Gene Name: zinc finger, FYVE domain containing 27
  Uniprot ID: Q5T4F4
  ENST ID: ENST00000393677
  CDS Start-End: 205-1440
agagcgattcgcgtcccggaagcggcggtggcggccgcggcgtaggcggaggagattttcggacctgcgacttccgaacaaccctggcaggaggagcggcgttcagccgggggaggcctgaagaaacgctccggggcccagtggctctacccctgctcctgcccgaccctgccgcctccctcacggagccagcggccgggtaggatgcagacatcagaacgtgaggggagtgggccggagctgagccccagcgtgatgcccgaggctcccctggagtctccaccttttcctaccaagtccccagcgtttgaccttttcaacttggttctctcctacaagaggctggagatctacctggaacccttgaaggatgcaggtgatggtgttcgatacttgctcaggtggcagatgcctttgtgttccttgctgacctgcctgggcctcaacgtcttgttcctcactttgaatgagggtgcatggtactcagtaggtgccctgatgatttcagtgcccgccctgctgggctaccttcaggaggtttgccgggcacggctgcctgattccgagctgatgcggaggaagtatcatagcgtgaggcaggaggacctgcagagaggtcgcctgtctcgtcccgaggccgtggctgaggtgaagagcttcttgatccagctggaggccttcctgagccgcctgtgctgcacatgtgaagccgcctaccgcgtgctgcactgggagaaccccgtcgtgtcctcacagttctatggggctcttctgggcacagtctgcatgctgtatttgctgccactctgctgggttctcacccttttaaacagcacgctctttctggggaatgtggagttcttccgagttgtgtctgagtacagggcatctctgcagcagaggatgaacccaaagcaggaagagcatgcctttgagagtcctccaccaccagatgttggggggaaggatggtctgatggacagcacgcctgccctcacacccacggaggacctcacaccgggcagcgtggaggaggctgaggaggctgagccagatgaagagtttaaagatgcgattgaggagacccacttggtggtgctggaggatgatgagggcgccccgtgcccagcagaggatgagctggccctgcaggacaacgggttcctgagcaagaatgaggtgctgcgcagcaaggtgtctcggctcacggagcggctccgcaagcgctaccccaccaacaacttcgggaactgcacgggctgctcggccaccttctcagtgctgaagaagaggcggagctgcagtaattgtggaaacagcttctgctctcgatgctgctccttcaaggtgcccaagtcctccatgggggccacagcccctgaagcccagagggagactgtgtttgtgtgtgcctcgtgtaaccagaccttgagcaagtgagaagagaggccagggtccaaccaggcacccgtccttgggaccagcagtagaccccccactctccccacccctggcccactgtggtgtgtgctgggcaaatgtggcctgaatgctaggtaggcttccccttccttcctcactctctccagctggattctggagctgttctccatccatgagagtggctggcaatggctgctctcaatcccttgagggagaagagcccctggagggcctggcatgtttgtcctgctctgcctgggactgagcgagtggacttagggctgggcaggcagtagccaccagagggcagcagcgaactaggccaggcctgactggggtctgaagatcagggtcagtgtggctgtgcctgggaattccagacctgaggttgggaaaagaggtttttctcctgcagggtactgggccaggccctcagcctcagagagcctgcagaagggcttgggagtgccacaccccatctctgctgattgaatgtccctccaggcaccaggatctcatcatttccccatcagagggtgtggccaggcctaacaagaccatgggtgcttctagaaacagggttgaagttcccagattccctgagaggagaatgtgtataggagggtttggctgagtccttcagcgttaagtggaggaaagcttggggaagccccaatagctggacagacctcggcctcccctcgaagacacctcaattcacagactctcagcccacacaatgccccagtgtccccagctccgctggagcagctgcagggcacttggatcacaacttctgcaccctctgtccagagtctagggcagtcctccactggcccagcactccagtttcctttccctgcctcttgtccaatggagtgggaggccaggtgagtggagcagaggtcctgaagcccttgacccctgggggcctgggtagtgtaggatctcgctgggctgggtcctggattccagggctattccctggaggacagtctcagttatgggataaggccccctgggggtctccatttctttccaacagtttcatgttcactactggactcttacgggctcagtatctctcccttagccatgagctggctcaggcatcccttcccttccctggagctgccctgcctttctcaagtatttatttatttattgcatggttcctgggaacatgtggcacaagtaatgggatgaggaggaattgggggtgggggtcttctacctaggactcttccctggagtcatgggctgcctgggacccaggacccatgagggggctgagaggtttctacactcgaggagcaggggtccagagaggcaggctggggaggcaagggacccatcctaggcccgctttcttgccgagccaagcagcttagctggggctgtgcagccaggggcttacccaggccagtggaggtgccacagccctggggagccagacaggctttggtatcgtatcgcctctgtgtccttttaagagaggagagttcagtaccccgtgctttctttacactggagaggaactaaaaggatctctgtgtctatggagaattgtcaataaaaaggcctcaagcttcttgtttttgtca

SEQ ID NO: 204535 - DNA, 3045 bp, Homo sapiens
  Payload ID: 20343
  Gene Name: zinc finger, FYVE domain containing 27
  Uniprot ID: Q5T4F4
  ENST ID: ENST00000423811
  CDS Start-End: 200-1450
gattcgcgtcccggaagcggcggtggcggccgcggcgtaggcggaggagattttcggacctgcgacttccgaacaaccctggcaggaggagcggcgttcagccgggggaggcctgaagaaacgctccggggcccagtggctctacccctgctcctgcccgaccctgccgcctccctcacggagccagcggccgggtaggatgcagacatcagaacgtgaggggagtgggccggagctgagccccagcgtgatgcccgaggctcccctggagtctccaccttttcctaccaagtccccagcgtttgaccttttcaacttggttctctcctacaagaggctggagatctacctggaacccttgaaggatgcaggtgatggtgttcgatacttgctcaggtggcagatgcctttgtgttccttgctgacctgcctgggcctcaacgtcttgttcctcactttgaatgagggtgcatggtactcagtaggtgccctgatgatttcagtgcccgccctgctgggctaccttcaggaggtttgccgggcacggctgcctgattccgagctgatgcggaggaagtatcatagcgtgaggcaggaggacctgcagagaggtcgcctgtctcgtcccgaggccgtggctgaggtgaagagcttcttgatccagctggaggccttcctgagccgcctgtgctgcacatgtgaagccgcctaccgcgtgctgcactgggagaaccccgtcgtgtcctcacagttctatggggctcttctgggcacagtctgcatgctgtatttgctgccactctgctgggttctcacccttttaaacagcacgctctttctggggaatgtggagttcttccgagttgtgtctgagtacagggcatctctgcagcagaggatgaacccaaagcaggaagagcatgcctttgagagtcctccaccaccagatgttggggggaaggatggtctgatggacagcacgcctgccctcacacccacggagagtctctcttcccaggacctcacaccgggcagcgtggaggaggctgaggaggctgagccagatgaagagtttaaagatgcgattgaggagacccacttggtggtgctggaggatgatgagggcgccccgtgcccagcagaggatgagctggccctgcaggacaacgggttcctgagcaagaatgaggtgctgcgcagcaaggtgtctcggctcacggagcggctccgcaagcgctaccccaccaacaacttcgggaactgcacgggctgctcggccaccttctcagtgctgaagaagaggcggagctgcagtaattgtggaaacagcttctgctctcgatgctgctccttcaaggtgcccaagtcctccatgggggccacagcccctgaagcccagagggagactgtgtttgtgtgtgcctcgtgtaaccagaccttgagcaagtgagaagagaggccagggtccaaccaggcacccgtccttgggaccagcagtagaccccccactctccccacccctggcccactgtggtgtgtgctgggcaaatgtggcctgaatgctaggtaggcttccccttccttcctcactctctccagctggattctggagctgttctccatccatgagagtggctggcaatggctgctctcaatcccttgagggagaagagcccctggagggcctggcatgtttgtcctgctctgcctgggactgagcgagtggacttagggctgggcaggcagtagccaccagagggcagcagcgaactaggccaggcctgactggggtctgaagatcagggtcagtgtggctgtgcctgggaattccagacctgaggttgggaaaagaggtttttctcctgcagggtactgggccaggccctcagcctcagagagcctgcagaagggcttgggagtgccacaccccatctctgctgattgaatgtccctccaggcaccaggatctcatcatttccccatcagagggtgtggccaggcctaacaagaccatgggtgcttctagaaacagggttgaagttcccagattccctgagaggagaatgtgtataggagggtttggctgagtccttcagcgttaagtggaggaaagcttggggaagccccaatagctggacagacctcggcctcccctcgaagacacctcaattcacagactctcagcccacacaatgccccagtgtccccagctccgctggagcagctgcagggcacttggatcacaacttctgcaccctctgtccagagtctagggcagtcctccactggcccagcactccagtttcctttccctgcctcttgtccaatggagtgggaggccaggtgagtggagcagaggtcctgaagcccttgacccctgggggcctgggtagtgtaggatctcgctgggctgggtcctggattccagggctattccctggaggacagtctcagttatgggataaggccccctgggggtctccatttctttccaacagtttcatgttcactactggactcttacgggctcagtatctctcccttagccatgagctggctcaggcatcccttcccttccctggagctgccctgcctttctcaagtatttatttatttattgcatggttcctgggaacatgtggcacaagtaatgggatgaggaggaattgggggtgggggtcttctacctaggactcttccctggagtcatgggctgcctgggacccaggacccatgagggggctgagaggtttctacactcgaggagcaggggtccagagaggcaggctggggaggcaagggacccatcctaggcccgctttcttgccgagccaagcagcttagctggggctgtgcagccaggggcttacccaggccagtggaggtgccacagccctggggagccagacaggctttggtatcgtatcgcctctgtgtccttttaagagaggagagttcagtaccccgtgctttctttacactggagaggaactaaaaggatctctgtgtctatggagaattgtcaataaaaaggcctcaagcttc

SEQ ID NO: 204536 - DNA, 4131 bp, Homo sapiens
  Payload ID: 20344
  Gene Name: zinc finger, FYVE domain containing 28
  Uniprot ID: Q9HCC9
  ENST ID: ENST00000290974
  CDS Start-End: 341-3004
gtgcggcgcggggcggccgtgaccagcggagcgctgggtgtcagtgagcagcgaggagccgcgcgcccccgtgcccgcgtctgtccgtgcgcccgagcgcccactcccgggtctgaggtctgcccggcgcgccgcttgcagagcatactcagggccgcgcacctgccccgcgcacctgcccgccgcccgctcggcgctccgggcttcgctagccagcctccctgcgacagcgcgggggctccggccgtgcctccgcgtccgccccgcgcctcagccgggcccgggcgcagcgctgcggagggcgagggccgcccggagtccggccagggccggcgcggcgatgatgaacaggttccgaaagtggctctacaaacccaagaggtcggatccgcagctgcttgcccggttctactatgccgacgaggagctgaaccaggtggccgcggagctggacagcctggatgggcggaaggacccccagcggtgcacgctgctggtcagccagttccgctcctgtcaggacaatgtgttgaacatcattaaccagatcatggatgagtgcatcccccaggaccgcgcccccagagatttctgcgtcaagttccctgaggagatccggcacgacaacctggccggccagctgtggttcggtgccgagtgcctggccgccggctccatcatcatgaaccgggagctggagagcatggccatgcgcccgctggccaaggagctgacgcgcagcctggaggacgtgcggggcgccctccgtgaccaggcgctgcgggacctgaacacctacacagagaagatgagggaagcgctgaggcacttcgacgtcctgttcgcagagtttgagctcagctacgtctcggccatggtgcctgtgaagtcccccagggagtactacgtgcagcaggaggtcatcgtgctcttctgcgagacggtggagagggccctggacttcgggtacctgactcaggacatgattgatgactacgagccggccctcatgttcagcatccccaggctggccatcgtgtgtggcctcgtggtctatgcggacggacctctgaacttggaccgcaaggtggaagacatgtccgagctgttccggcccttccacacgttgctgcggaaaataagggatttgctgcagacgctgacggaggaggagctgcacacgctggaacggaacctctgcatttcccaagacgtggagttccccatccgcgcagacgtgcagggacccgctgccctggcgcctgccctctctgcccctctcccccctgaggggccactctcagctaaggccaaagacccggatgcagagctggcctgctccatgcagtacgacgaccaggagctggagcagctcagccgcatggtccacagggcgggggacgagatgtcctctttgctttcaccgcccattgcctgccagtccccagctcacaggccaggagcggagggcagcccaggcggggaggcctctccaggtagaccgcgcctgcggtcaggcagtgacgaggaggagcgcgtgttcttcatggatgacgtggaggggacggcagaagccctggccaggcccgagtccccagctggcccatttgggtgggcaggcagtacctgggccgacccccaggagaaagggcagggtgggccaggcggagcggcggggatcagcttgcccgcctcggaaaaggaggaggacttgagcaacaacaatctcgaggccgagggcacagatggggccagcctcgcgggcaccagctcctgcagctgcctggactcgcggctgcacctggacggctgggaggtgggtgcggatgacgcagagacggctgagatgatcgcccaccggacagggggcatgaagctctcagccacggtcatcttcaaccccaaatcgcccacttccctggactctgcggtcgccacccaggaggccgcctcggagcccgtggccgaggggatggatggcggcccccacaagcttagcactggggccaccaactgccttctgcattcctgcgtgtgctgtgggagctgcggggacagcagggaggacgtggtggagcgtctgcgggagaagtgcagcccgggaggcgtcattggtgcctcgtacgctgccggcttagccaaggccagcgacagggcccctgagagacaggaggaggcgcccccaccctcagaagatgcctccaacgggcgggagcccaaagcccccacttccgacaagtgcctgcctcacacctcaggttcccaggtggacacagcgagtgggctgcaaggagaggctggggttgcaggtcagcaggagccagaggccagagagctgcatgctgggagcccctcggctcacgaggcgcctcaggccctgtcgggctccagcagctccacagctgggtcctgctcctcagacaagatggggccagaggcggccccagcagccacgcatgctgccccacaggccacaagagagaagatccggtccaggttccacggcagccacgacctcatccaccgcctgttcgtctgcatttcaggtgtggctgaccagctgcagacgaactatgccagtgacctgagaagtattcttaaaacactgtttgaggtcatggccaccaagcctgaaacagacgacaaggaaaagttaaggaaggtcacccagactctgcggagtgcggccttggaggactgtgcactgtgccaggagaccctgtcatcctctgaactggcagccaagacccgcgatggggactttgaagaccccccggagtgggtgccagacgaggcctgtggcttctgcacggcgtgcaaagcacccttcaccgtcatccgccggaagcaccactgccgcagctgtgggaagatcttctgctcgcgctgctcctcgcactcagcaccgctgccccgctacgggcaggtgaagccggtccgagtgtgcacccactgctacatgttccatgtcacgcccttctacagcgacaaggccggcctgtgacgtggtgccaggggcagccccaacccacccgggccaggaacccccaggaaggtggggccacgctgcaggcaggtctcactgcgtctcatgaggccgctgccgctgctgcaggggcacccagacctccagagcatccagagcctctgtcctgcccacgctagcctccctgcagggaccccgggccggctgcaggggccaacaagaggtcagctttgcccagcaggggacccggaggagcctggtggctgcctcagggcagggtgcctggcggagaaggcctgggccctcccactggtccctcggagatctgctggggctatgggaatcggggcgggtgatggaggtggacaagagtggggccactctgcgcctctgctgttgcggtgaatctggaagccggagcaagggccactccacaggctctttggcacagcagggctccctatgtgcctcccaaacgtcaaatgcaggctacccattctccccatcagctgcccacctcgttccccagccctcacccctcacccctcaccatccttcctcaggacttggctaaacaacatgcatctcatttcttcttggagtggggagatgcgggaagctgacccagtggtcctctaggcaggcagggtgctcctggtgtctgcccaccactgtccccttgctgatggcatgggggtccgaccaggcactgacaccgcaggcagaggttgctcggggccttgggtcgggtttaccaatcagccaggacgcccggggccaccagctcagctaccacttccccttccctctgcaccctctggaaccctggcccaattcctcagaccccagagtggcctgggacccaagctgccgcagctgagtggccccagcggacacctcctcaggcttaaatctcaggcttcacattgcaatgacgattgcagttttatttttggagatgacacacctactgcttcttttctaggataaatctaattactgtttactggtggagtacatatgcatagaaacggcttctgtcggggggagagtatataatggaggaaatattatgtattgagattatatttattttctaaatgctgtaatttgaagccatttccataaatctatttaaggattgc

SEQ ID NO: 204537 - DNA, 1135 bp, Homo sapiens
  Payload ID: 20344
  Gene Name: zinc finger, FYVE domain containing 28
  Uniprot ID: Q9HCC9
  ENST ID: ENST00000509171
  CDS Start-End: 329-847
gcggccgtgaccagcggagcgctgggtgtcagtgagcagcgaggagccgcgcgcccccgtgcccgcgtctgtccgtgcgcccgagcgcccactcccgggtctgaggtctgcccggcgcgccgcttgcagagcatactcagggccgcgcacctgccccgcgcacctgcccgccgcccgctcggcgctccgggcttcgctagccagcctccctgcgacagcgcgggggctccggccgtgcctccgcgtccgccccgcgcctcagccgggcccgggcgcagcgctgcggagggcgagggccgcccggagtccggccagggccggcgcggcgatgatgaacaggttccgaaagtggctctacaaacccaaggacaatgtgttgaacatcattaaccagatcatggatgagtgcatcccccaggaccgcgcccccagagatttctgcgtcaagttccctgaggagatccggcacgacaacctggccggccagctgtggttcggtgccgagtgcctggccgccggctccatcatcatgaaccgggagctggagagcatggccatgcgcccgctggccaaggagctgacgcgcagcctggaggacgtgcggggcgccctccgtgaccaggcgctgcgggacctgaacacctacacagagaagatgagggaagcgctgaggcacttcgacgtcctgttcgcagagtttgagctcagctacgtctcggccatggtgcctgtgaagtcccccagggagtactacgtgcagcaggaggtcatcgtgctcttctgcgagacggtggagagaaatggaaaaggtgttctaaaattcatgtggaactgcaatgggccctaaatagccaaaacaatattgaaaaacaaaaacaaaattggaagattcatacgtcctgatttcaaaacttactacaagtcaaaaccttatggtactggcataaagatagatgtatagaccaatggaataaaattgagaagccataaataaacccaaacatctatggtgaactgattattgacaagggggccaagatcattcaataaggaaagaacagtctcttcagtgaatgttcctggagcaactggataaccacatgcaaaagaacaaagttggaaaaaaaaaaaaaaa

SEQ ID NO: 204538 - DNA, 1874 bp, Homo sapiens
  Payload ID: 20344
  Gene Name: zinc finger, FYVE domain containing 28
  Uniprot ID: Q9HCC9
  ENST ID: ENST00000503000
  CDS Start-End: 287-1150
ggagccgcgcgcccccgtgcccgcgtctgtccgtgcgcccgagcgcccactcccgggtctgaggtctgcccggcgcgccgcttgcagagcatactcagggccgcgcacctgccccgcgcacctgcccgccgcccgctcggcgctccgggcttcgctagccagcctccctgcgacagcgcgggggctccggccgtgcctccgcgtccgccccgcgcctcagccgggcccgggcgcagcgctgcggagggcgagggccgcccggagtccggccagggccggcgcggcgatgatgaacaggttccgaaagtggctctacaaacccaagaggtcggatccgcagctgcttgcccggttctactatgccgacgaggagctgaaccaggtggccgcggagctggacagcctggatgggcggaaggacccccagcggtgcacgctgctggtcagccagttccgctcctgtcaggacaatgtgttgaacatcattaaccagatcatggatgagtgcatcccccaggaccgcgcccccagagatttctgcgtcaagttccctgaggagatccggcacgacaacctggccggccagctgtggttcggtgccgagtgcctggccgccggctccatcatcatgaaccgggagctggagagcatggccatgcgcccgctggccaaggagctgacgcgcagcctggaggacgtgcggggcgccctccgtgaccaggcgctgcgggacctgaacacctacacagagaagatgagggaagcgctgaggcacttcgacgtcctgttcgcagagtttgagctcagctacgtctcggccatggtgcctgtgaagtcccccagggagtactacgtgcagcaggaggtcatcgtgctcttctgcgagacggtggagagggccctggacttcgggtacctgactcaggacatgattgatgactacgagccggccctcatgttcagcatccccaggctggccatcgtgtgccccctccttccagcccatcccagaacacgtgcaggagccaccgcccacgtggcctgcaggatggttgccggatcctcttcaggggccctcacccatccacctgtgtcaaaacaaggtgtcatctctgccctgctcagacccttgccggagctcccaccgtgatctgcctgcaccgtgcccacaccagtcctctctccccagtccccacgcacccgctgccctgggtctccaccatgctgtccccttcgctcagggtccccttgactgtcctatccctactgccacactgtcccctcccccgcactgtccccttttccatgatgtttcctcctccacgctgtcccctctgctccagtgtcctcttggccatgctgtcctctccatggtgctggcccctccactacactgtcccctcctctatgctgtccccttgtctatgctgttccctcctctatgctatcccattctccatgctatcccattctccatgctgtcccctcctccatgctgtcccttcctctgcaatgtcctctcccctgtgctcctctgcactgtcccctcctccatgctgtcccctcctttatgatgttccctcctccgtgctgtcccctccatgatgtcccctcttccgtgctgtcctctcctctgcactgtcccctactccctgctgtacctccctctgcgatgtccccaccactgcaccgctcacccaagccctctcccaccagcaggttgcgtgacttactctgttatttatttttccatgttactgagataaaattcattaccctatgactcacccatctacagtgcacagtcgtttttggtacattcagaattgtgcagccatcaccacaaatttcataacattttcattactcacaaa

SEQ ID NO: 204539 - DNA, 3273 bp, Homo sapiens
  Payload ID: 20344
  Gene Name: zinc finger, FYVE domain containing 28
  Uniprot ID: Q9HCC9
  ENST ID: ENST00000511071
  CDS Start-End: 314-2887
ggagcgctgggtgtcagtgagcagcgaggagccgcgcgcccccgtgcccgcgtctgtccgtgcgcccgagcgcccactcccgggtctgaggtctgcccggcgcgccgcttgcagagcatactcagggccgcgcacctgccccgcgcacctgcccgccgcccgctcggcgctccgggcttcgctagccagcctccctgcgacagcgcgggggctccggccgtgcctccgcgtccgccccgcgcctcagccgggcccgggcgcagcgctgcggagggcgagggccgcccggagtccggccagggccggcgcggcgatgatgaacaggttccgaaagtggctctacaaacccaagaggtcggatccgcagctgcttgcccggttctactatgccgacgaggagctgaaccaggtggccgcggagctggacagcctggatgggcggaaggacccccagcggtgcacgctgctggtcagccagttccgctcctgtcaggacaatgtgttgaacatcattaaccagatcatggatgagtgcatcccccaggaccgcgcccccagagatttctgcgtcaagttccctgaggagatccggcacgacaacctggccggccagctgtggttcggtgccgagtgcctggccgccggctccatcatcatgaaccgggagctggagagcatggccatgcgcccgctggccaaggagctgacgcgcagcctggaggacgtgcggggcgccctccgtgaccaggcgctgcgggacctgaacacctacacagagaagatgagggaagcgctgaggcacttcgacgtcctgttcgcagagtttgagctcagctacgtctcggccatggtgcctgtgaagtcccccagggagtactacgtgcagcaggaggtcatcgtgctcttctgcgagacggtggagagtggcctcgtggtctatgcggacggacctctgaacttggaccgcaaggtggaagacatgtccgagctgttccggcccttccacacgttgctgcggaaaataagggatttgctgcagacgctgacggaggaggagctgcacacgctggaacggaacctctgcatttcccaagacgtggagttccccatccgcgcagacgtgcagggacccgctgccctggcgcctgccctctctgcccctctcccccctgaggggccactctcagctaaggccaaagacccggatgcagagctggcctgctccatgcagtacgacgaccaggagctggagcagctcagccgcatggtccacagggcgggggacgagatgtcctctttgctttcaccgcccattgcctgccagtccccagctcacaggccaggagcggagggcagcccaggcggggaggcctctccaggtagaccgcgcctgcggtcaggcagtgacgaggaggagcgcgtgttcttcatggatgacgtggaggggacggcagaagccctggccaggcccgagtccccagctggcccatttgggtgggcaggcagtacctgggccgacccccaggagaaagggcagggtgggccaggcggagcggcggggatcagcttgcccgcctcggaaaaggaggaggacttgagcaacaacaatctcgaggccgagggcacagatggggccagcctcgcgggcaccagctcctgcagctgcctggactcgcggctgcacctggacggctgggaggtgggtgcggatgacgcagagacggctgagatgatcgcccaccggacagggggcatgaagctctcagccacggtcatcttcaaccccaaatcgcccacttccctggactctgcggtcgccacccaggaggccgcctcggagcccgtggccgaggggatggatggcggcccccacaagcttagcactggggccaccaactgccttctgcattcctgcgtgtgctgtgggagctgcggggacagcagggaggacgtggtggagcgtctgcgggagaagtgcagcccgggaggcgtcattggtgcctcgtacgctgccggcttagccaaggccagcgacagggcccctgagagacaggaggaggcgcccccaccctcagaagatgcctccaacgggcgggagcccaaagcccccacttccgacaagtgcctgcctcacacctcaggttcccaggtggacacagcgagtgggctgcaaggagaggctggggttgcaggtcagcaggagccagaggccagagagctgcatgctgggagcccctcggctcacgaggcgcctcaggccctgtcgggctccagcagctccacagctgggtcctgctcctcagacaagatggggccagaggcggccccagcagccacgcatgctgccccacaggccacaagagagaagatccggtccaggttccacggcagccacgacctcatccaccgcctgttcgtctgcatttcaggtgtggctgaccagctgcagacgaactatgccagtgacctgagaagtattcttaaaacactgtttgaggtcatggccaccaagcctgaaacagacgacaaggaaaagttaaggaaggtcacccagactctgcggagtgcggccttggaggactgtgcactgtgccaggagaccctgtcatcctctgaactggcagccaagacccgcgatggggactttgaagaccccccggagtgggtgccagacgaggcctgtggcttctgcacggcgtgcaaagcacccttcaccgtcatccgccggaagcaccactgccgcagctgtgggaagatcttctgctcgcgctgctcctcgcactcagcaccgctgccccgctacgggcaggtgaagccggtccgagtgtgcacccactgctacatgttccatgtcacgcccttctacagcgacaaggccggcctgtgacgtggtgccaggggcagccccaacccacccgggccaggaacccccaggaaggtggggccacgctgcaggcaggtctcactgcgtctcatgaggccgctgccgctgctgcaggggcacccagacctccagagcatccagagcctctgtcctgcccacgctagcctccctgcagggaccccgggccggctgcaggggccaacaagaggtcagctttgcccagcaggggacccggaggagcctggtggctgcctcagggcagggtgcctggcggagaaggcctgggccctcccactggtccctcggagatctgctggggctatgggaatcggggcgggtgatggaggtggacaagagtggggccactctgcgcctctgctgttgcggtg

SEQ ID NO: 204540 - DNA, 1590 bp, Homo sapiens
  Payload ID: 20344
  Gene Name: zinc finger, FYVE domain containing 28
  Uniprot ID: Q9HCC9
  ENST ID: ENST00000515169
  CDS Start-End: 491-982
gtcacccgctcggaggccgtgggcgccttgacgagggcgcggcggcgggaatgcacaacgttatgctcatcacctgcgtccaccactgtcacccctgacggcgagacgcgaggtgctaagggcttgtccaggctaagcgggttctctgcgtccttaagcccactttgcagatgctaatcagaggggacaggcggccaagaacctggagcccacccgggcgtctgtgcccagtgccgaccgtctaaattcccttcccacgtggctcctgttgcgtctgggctgtggaggattcctctaaacaggcacagccaccctctggaggtcggatccgcagctgcttgcccggttctactatgccgacgaggagctgaaccaggtggccgcggagctggacagcctggatgggcggaaggacccccagcggtgcacgctgctggtcagccagttccgctcctgtcaggacaatgtgttgaacatcattaaccagatcatggatgagtgcatcccccaggaccgcgcccccagagatttctgcgtcaagttccctgaggagatccggcacgacaacctggccggccagctgtggttcggtgccgagtgcctggccgccggctccatcatcatgaaccgggagctggagagcatggccatgcgcccgctggccaaggagctgacgcgcagcctggaggacgtgcggggcgccctccgtgaccaggcgctgcgggacctgaacacctacacagagaagatgagggaagcgctgaggcacttcgacgtcctgttcgcagagtttgagctcagctacgtctcggccatggtgcctgtgaagtcccccagggagtactacgtgcagcaggaggtcatcgtgctcttctgcgagacggtggagagggccctggacttcgggtacctgactcaggacatgattgatgactacgagccggccctcatgttcagcatccccaggctggccatcgtgtgaaatggaaaaggtgttctaaaattcatgtggaactgcaatgggccctaaatagccaaaacaatattgaaaaacaaaaacaaaattggaagattcatacgtcctgatttcaaaacttactacaagtcaaaaccttatggtactggcataaagatagatgtatagaccaatggaataaaattgagaagccataaataaacccaaacatctatggtgaactgattattgacaagggggccaagatcattcaataaggaaagaacagtctcttcagtgaatgttcctggagcaactggataaccacatgcaaaagaacaaagttggaaaaaaaaaaaaaaaagaacaaagttggaccctgcgatggttaacttcatgtgtcatcttgggtaggccacattacccagatatttggtaaaataccagtctgaatgttgctgtgaaggtatttttttttctttttataatgataaactggcaatttataattgcgcagatttatagcatgcaaagttgtgttataatctatgaatgcagtgtggaataattaaatcaagctggttaacatatccatcacctcaaatatttaacatcttttgaatgagatcatttta

SEQ ID NO: 204541 - DNA, 3247 bp, Homo sapiens
  Payload ID: 20344
  Gene Name: zinc finger, FYVE domain containing 28
  Uniprot ID: Q9HCC9
  ENST ID: ENST00000515312
  CDS Start-End: 564-3017
actctcgcgactttgccgcggcgacgtgggggttttatcgcggtatcgcggaacacagcccccgccattcccagtcacccgctcggaggccgtgggcgccttgacgagggcgcggcggcgggaatgcacaacgttatgctcatcacctgcgtccaccactgtcacccctgacggcgagacgcgaggtgctaagggcttgtccaggctaagcgggttctctgcgtccttaagcccactttgcagatgctaatcagaggggacaggcggccaagaacctggagcccacccgggcgtctgtgcccagtgccgaccgtctaaattcccttcccacgtggctcctgttgcgtctgggctgtggaggattcctctaaacaggcacagccaccctctggaggtcggatccgcagctgcttgcccggttctactatgccgacgaggagctgaaccaggtggccgcggagctggacagcctggatgggcggaaggacccccagcggtgcacgctgctggtcagccagttccgctcctgtcaggacaatgtgttgaacatcattaaccagatcatggatgagtgcatcccccaggaccgcgcccccagagatttctgcgtcaagttccctgaggagatccggcacgacaacctggccggccagctgtggttcggtgccgagtgcctggccgccggctccatcatcatgaaccgggagctggagagcatggccatgcgcccgctggccaaggagctgacgcgcagcctggaggacgtgcggggcgccctccgtgaccaggcgctgcgggacctgaacacctacacagagaagatgagggaagcgctgaggcacttcgacgtcctgttcgcagagtttgagctcagctacgtctcggccatggtgcctgtgaagtcccccagggagtactacgtgcagcaggaggtcatcgtgctcttctgcgagacggtggagagggccctggacttcgggtacctgactcaggacatgattgatgactacgagccggccctcatgttcagcatccccaggctggccatcgtgtgtggcctcgtggtctatgcggacggacctctgaacttggaccgcaaggtggaagacatgtccgagctgttccggcccttccacacgttgctgcggaaaataagggatttgctgcagacgctgacggaggaggagctgcacacgctggaacggaacctctgcatttcccaagacgtggagttccccatccgcgcagacgtgcagggacccgctgccctggcgcctgccctctctgcccctctcccccctgaggggccactctcagctaaggccaaagacccggatgcagagctggcctgctccatgcagtacgacgaccaggagctggagcagctcagccgcatggtccacagggcgggggacgagatgtcctctttgctttcaccgcccattgcctgccagtccccagctcacaggccaggagcggagggcagcccaggcggggaggcctctccaggtagaccgcgcctgcggtcaggcagtgacgaggaggagcgcgtgttcttcatggatgacgtggaggggacggcagaagccctggccaggcccgagtccccagctggcccatttgggtgggcaggcagtacctgggccgacccccaggagaaagggcagggtgggccaggcggagcggcggggatcagcttgcccgcctcggaaaaggaggaggacttgagcaacaacaatctcgaggccgagggcacagatggggccagcctcgcgggcaccagctcctgcagctgcctggactcgcggctgcacctggacggctgggaggtgggtgcggatgacgcagagacggctgagatgatcgcccaccggacagggggcatgaagctctcagccacggtcatcttcaaccccaaatcgcccacttccctggactctgcggtcgccacccaggaggccgcctcggagcccgtggccgaggggatggatggcggcccccacaagcttagcactggggccaccaactgccttctgcattcctgcgtgtgctgtgggagctgcggggacagcagggaggacgtggtggagcgtctgcgggagaagtgcagcccgggaggcgtcattggtgcctcgtacgctgccggcttagccaaggccagcgacagggcccctgagagacaggaggaggcgcccccaccctcagaagatgcctccaacgggcgggagcccaaagcccccacttccgacaagtgcctgcctcacacctcaggttcccaggtggacacagcgagtgggctgcaaggagaggctggggttgcaggtcagcaggagccagaggccagagagctgcatgctgggagcccctcggctcacgaggcgcctcaggccctgtcgggctccagcagctccacagctgggtcctgctcctcagacaagatggggccagaggcggccccagcagccacgcatgctgccccacaggccacaagagagaagatccggtccaggttccacggcagccacgacctcatccaccgcctgttcgtctgcatttcaggtgtggctgaccagctgcagacgaactatgccagtgacctgagaagtattcttaaaacactgtttgaggtcatggccaccaagcctgaaacagacgacaaggaaaagttaaggaaggtcacccagactctgcggagtgcggccttggaggactgtgcactgtgccaggagaccctgtcatcctctgaactggcagccaagacccgcgatggggactttgaagaccccccggagtgggtgccagacgaggcctgtggcttctgcacggcgtgcaaagcacccttcaccgtcatccgccggaagcaccactgccgcagctgtgggaagatcttctgctcgcgctgctcctcgcactcagcaccgctgccccgctacgggcaggtgaagccggtccgagtgtgcacccactgctacatgttccatgtcacgcccttctacagcgacaaggccggcctgtgacgtggtgccaggggcagccccaacccacccgggccaggaacccccaggaaggtggggccacgctgcaggcaggtctcactgcgtctcatgaggccgctgccgctgctgcaggggcacccagacctccagagcatccagagcctctgtcctgcccacgctagcctccctgcagggaccccgggccggctgcaggggccaacaagaggtcagctttgcccagcaggggaccc

SEQ ID NO: 204542 - DNA, 541 bp, Homo sapiens
  Payload ID: 20344
  Gene Name: zinc finger, FYVE domain containing 28
  ENST ID: ENST00000508184
  CDS Start-End: 295-541
gtgctgttgacgagagatgtccacgagacagcttccgcagaaaggctgaaaagaaaggggcagaaaaggtgaaccaggcgtttaccaaaagcaaggaggtgaggttctttctccctgtatcagaggtcggatccgcagctgcttgcccggttctactatgccgacgaggagctgaaccaggtggccgcggagctggacagcctggatgggcggaaggacccccagcggtgcacgctgctggtcagccagttccgctcctgtcaggacaatgtgttgaacatcattaaccagatcatggatgagtgcatcccccaggaccgcgcccccagagatttctgcgtcaagttccctgaggagatccggcacgacaacctggccggccagctgtggttcggtgccgagtgcctggccgccggctccatcatcatgaaccgggagctggagagcatggccatgcgcccgctggccaaggagctgacgcgcagcctggaggacgtgcggggcgccctccgtgaccaggcgctgcgggacctgaacacct

SEQ ID NO: 204543 - DNA, 3828 bp, Homo sapiens
  Payload ID: 20344
  Gene Name: zinc finger, FYVE domain containing 28
  ENST ID: ENST00000508471
  CDS Start-End: 2107-2685
agagacctaaagagatcccaagggcgcctgggacaccccttcctccccttagctccagacgtcctggaaatctgtgatgtctgctggcctctgtagagggaacaccagccgcagccacctccacgtcagtcaccgcagagaaaggaagatttgtggaaggaatacagcaaatcaacgcctcctcgcaaagcactttccctggatgttgaaacagtgactgcaaactcagaggcccttcaggggcttaagccaggattcgttcagcccatcctacggctgctgcacgtgaggcccgaggcccttgctgcatctgcactgcacccacgccgctgagaggatctcacttgtctgacccgtcagtggctatcttactgtccgtgtctgtggctcaggcagcaaagctctggaccacataacctgcccagggtcgcccagcgggtgagagatgctcttaggatcagatgacagattccacctctagatgcctgtctggggctgctgtaacagaacacccatgagctgggaggcttaaaaccgtggggatttgctggtttacagttctggaggcaggcatctgagatgagggcgctggtggggtggcactgcagcccaaggttctaggggatgatcctcctgccgcttccagcttctggtggctcctggcacttccttgccttgtggccaagtcactccaagctctgcctccgtcttctcttggcccctcgctgtgtctgtctcttgtaaggatatttattggagttggtatccatccagatagtccaggatggtttcatctcaagatccttaacttaattaaatctgcaaacaacctttttctaaaaaaggtcacagtcgcagattcacattttgggggtcacattcagcccaccgtgacgtctgaatcctgtgcctccagcccctcacccctcccgtcaccccccaccctgtcttcaggacacagcagagagcaggggctggagagtcagcagccaagggctgagctccttccctaatcccacctggcataggtgaactggagaccgcatttgctccaccaagagcccacgtctcagctttgcatcagctagctgggctgtgtataagcaatgccgagtaagggtcctgcagcatccatgcgtcagatgcctgtctcagcacagctgggttctgtgctcagggtctccccaggctgaaatccaggtgctgtggactgcgctctcgtctggagcggctgacgtttatttcatcgcttcttgttgattgagaagagactatgagatgcagttgtggcagggaccgaagtcctgcagcagcaaatctcaggccactgtccctgcaccccctagagtgcctgcatggagcaggtttggaggtgggtgggggagcagtgactgggcccagagtgtctggaaggacccctggacctgtgcccacaccctgagaccggaggaatatggacattggagggtgctccaagacaatgcgccaagaccgggtgacacatccaggagagacctgcggaccaagctagtgcctgcctgtggggaccacagaccccggccagctgaccagggcggggcagccctgagatcccggcttcaatttccctccctcccgctgagctgtttctgggatgggcgcctgccctcctggaccggcccagccctccttcctgtccctcggttctgtccttcattctggcccacagtggcagcggcccttctgaggatgccctggtcacggaacagcattcgtctccttctcagtcccagcctgtgctcaacccaggggctgtggagctgcagtcaggagctgtggtgagaagactgacttccttgggaaggcgagtcacacaggaaaaccacgagagagaatgactttgcaaggggctggagaggaaaggaagcagggagattccagcctgctcagaagaaatcagcttacttgctgctggaagttattagggctgacaccagtgcaaaggcctggcagccacagtggggccggcgccatggcggggtcagcgccacgtgttagttcccccggctgctgtgacgaagcaccgcggcaagcagctccacagctgggtcctgctcctcagacaagatggggccagaggcggccccagcagccacgcatgctgccccacaggccacaagagagaagatccggtccaggttccacggcagccacgacctcatccaccgcctgttcgtctgcatttcaggtgtggctgaccagctgcagacgaactatgccagtgacctgagaagtattcttaaaacactgtttgaggtcatggccaccaagcctgaaacagacgacaaggaaaagttaaggaaggtcacccagactctgcggagtgcggccttggaggactgtgcactgtgccaggagaccctgtcatcctctgaactggcagccaagacccgcgatggggactttgaagaccccccggagtgggtgccagacgaggcctgtggcttctgcacggcgtgcaaagcacccttcaccgtcatccgccggaagcaccactgccgcagctgtgggaagatcttctgctcgcgctgctcctcgcactcagcaccgctgccccgctacgggcaggtgaagccggtccgagtgtgcacccactgctacatgttccatgtcacgcccttctacagcgacaaggccggcctgtgacgtggtgccaggggcagccccaacccacccgggccaggaacccccaggaaggtggggccacgctgcaggcaggtctcactgcgtctcatgaggccgctgccgctgctgcaggggcacccagacctccagagcatccagagcctctgtcctgcccacgctagcctccctgcagggaccccgggccggctgcaggggccaacaagaggtcagctttgcccagcaggggacccggaggagcctggtggctgcctcagggcagggtgcctggcggagaaggcctgggccctcccactggtccctcggagatctgctggggctatgggaatcggggcgggtgatggaggtggacaagagtggggccactctgcgcctctgctgttgcggtgaatctggaagccggagcaagggccactccacaggctctttggcacagcagggctccctatgtgcctcccaaacgtcaaatgcaggctacccattctccccatcagctgcccacctcgttccccagccctcacccctcacccctcaccatccttcctcaggacttggctaaacaacatgcatctcatttcttcttggagtggggagatgcgggaagctgacccagtggtcctctaggcaggcagggtgctcctggtgtctgcccaccactgtccccttgctgatggcatgggggtccgaccaggcactgacaccgcaggcagaggttgctcggggccttgggtcgggtttaccaatcagccaggacgcccggggccaccagctcagctaccacttccccttccctctgcaccctctggaaccctggcccaattcctcagaccccagagtggcctgggacccaagctgccgcagctgagtggccccagcggacacctcctcaggcttaaatctcaggcttcacattgcaatgacgattgcagttttatttttggagatgacacacctactgcttcttttctaggataaatctaattactgtttactggtggagtacatatgcatagaaacggcttctgtcggggggagagtatataatggaggaaatattatgtattgagattatatttattttctaaatgctgtaatttgaagccatttccataaatctatttaaggattgcagacgctctcctttct

SEQ ID NO: 204544 - DNA, 5194 bp, Homo sapiens
  Payload ID: 20345
  Gene Name: zinc finger, FYVE domain containing 9
  Uniprot ID: O95405
  ENST ID: ENST00000287727
  CDS Start-End: 453-4730
acgctggaggcttcgctgaggatccccgcctgccgcacctcggtcgtcccgccgcagccttgcgcccccggcccggctcggcggcgctcctccgggatccgcgtggctgccgcggcccgggcgccgatgcggctgggcgggtgccgggccttagcagcagtagcagccgcagctgcggctaccgcagctcctacaggagtgggaggtttcgcggcggcgcctggggccgcgccggtgccctccggaggaggctttcggctcagggacgacccccgtggccatgctgaagcggaggcggccgctgctcgaggatcaaacagagcatactgaatcagcaggactggctggtggtgcagcagacatcatgagtaagcaccgagaagtctgttccttatcacgtgtgtaaggggaaaaaggtttaaacaagtctcttaagtggtgtttcctcaccgatggagaattacttccaagcagaagcttacaacctggacaaggtgttagatgaatttgaacaaaacgaagatgaaacagtttcttctactttattggatacaaagtggaataagattctagatcccccttctcaccggctgtcatttaaccctactttggccagtgtgaatgaatctgcagtttctaatgagtcacaaccacaactgaaagtcttctccctggctcattcagctcccctgaccacagaggaagaggatcactgtgctaatggacaggactgtaatctaaatccagagattgccacaatgtggattgatgaaaatgctgttgcagaagaccagttaattaagagaaactatagttgggatgatcaatgcagtgctgttgaagtgggagagaagaaatgtggaaacctggcttgtctgccagatgagaagaatgttcttgttgtagccgtcatgcataactgtgataaaaggacattacaaaacgatttacaggattgtaataattataatagtcaatcccttatggatgcttttagctgttcactggataatgaaaacagacaaactgatcaatttagttttagtataaatgagtccactgaaaaagatatgaattcagagaaacaaatggatccattgaatagaccgaaaacagaggggagatctgttaaccatctgtgtcctacttcatctgatagtctagccagtgtctgttccccttcacaattaaaggatgacggaagtataggtagagacccctccatgtctgcgattacaagtttaacggttgattcagtaatctcatcccagggaacagatggatgtcctgctgttaaaaagcaagagaactatataccagatgaggacctcactggcaaaatcagctctcctaggacagatctagggagtccaaattccttttcccacatgagtgaggggattttgatgaaaaaagagccagcagaggagagcaccactgaagaatccctccggtctggtttacctttgcttctcaaaccagacatgcctaatgggtctggaaggaataatgactgtgaacggtgttcagattgccttgtgcctaatgaagttagggctgatgaaaatgaaggttatgaacatgaagaaactcttggcactacagaattccttaatatgacagagcatttctctgaatctcaggacatgactaattggaagttgactaaactaaatgagatgaatgatagccaagtaaacgaagaaaaggaaaagtttctacagattagtcagcctgaggacactaatggtgatagtggaggacagtgtgttggattggcagatgcaggtctagatttaaaaggaacttgcattagtgaaagtgaagaatgtgatttctccactgttatagacacaccagcagcaaattatctatctaatggttgtgattcctatggaatgcaagacccaggtgtttcttttgttccaaagactttaccctccaaagaagattcagtaacagaagaaaaagaaatagaggaaagcaagtcagaatgctactcaaatatttatgaacagagaggaaatgaggccacagaagggagtggactacttttaaacagcactggtgacctaatgaagaaaaattatttacataatttctgtagtcaagttccatcagtgcttgggcaatcttcccccaaggtagtagcaagcctgccatctatcagtgttccttttggtggtgcaagacccaagcaaccttctaatcttaaacttcaaattccaaagccattatcagaccatttacaaaatgactttcctgcaaacagtggaaataatactaaaaataaaaatgatattcttgggaaagcaaaattaggggaaaactcagcaaccaatgtatgcagtccatctttgggaaacatctctaatgtcgatacaaatggggaacatttagaaagttatgaggctgagatctccactagaccatgccttgcattagctccagatagcccagataatgatctcagagctggtcagtttggaatttctgccagaaagccattcaccactctgggtgaggtggctccagtatgggtaccggattctcaggctccaaattgcatgaaatgtgaagccaggtttacattcaccaaaaggaggcatcactgcagagcatgtgggaaggttttctgtgcttcctgctgtagcctgaaatgtaaactgttatacatggacagaaaggaagctagagtgtgtgtaatctgccattcagtgctaatgaatgctcaagcctgggagaacatgatgagtgcctcaagccagagccctaaccctaacaatcctgctgaatactgttctactatccctcccttgcagcaagctcaggcctcaggagctctgagctctccacctcccactgtgatggtacctgtgggagttttaaagcaccctggagcagaagtggctcagcccagagagcagaggcgagtttggtttgctgatgggatcttgcccaatggagaagttgctgatgcagccaaattaacaatgaatggaacttcctctgcaggaaccctggctgtgtcacacgacccagtcaagccagtaactaccagtcctctaccagcagagacggatatttgtctattctctgggagtataactcaggttggaagtcctgttggaagtgcaatgaatcttattcctgaagatggccttcctcccattctcatctccactggtgtaaaaggagactatgctgtggaagagaaaccatcacagatttcagtaatgcagcagttggaggatggtggccctgacccacttgtatttgttttaaatgcaaatttgttgtcaatggttaaaattgtaaattatgtgaacaggaagtgctggtgtttcacaaccaagggaatgcatgcagtgggtcagtctgagatagtcattcttctacagtgtttaccggatgaaaagtgtttgccaaaggatatctttaatcactttgtgcagctttatcgggatgctctggcagggaatgtggtgagcaacttgggacattccttcttcagtcaaagtttccttggcagtaaagaacatggtggattcttatatgtgacatctacctaccagtcactgcaagacctagtactcccaaccccaccttacttgtttgggattcttatccagaaatgggaaactccttgggctaaagtatttcctatccgtctgatgttgagacttggagctgaatatcgactttatccatgcccactattcagtgtcagatttcggaagccattgtttggagagacggggcataccatcatgaatcttcttgcagacttcagaaattaccagtataccttgccagtagttcaaggtttggtggttgatatggaagttcggaaaactagcatcaaaattcccagcaacagatacaatgagatgatgaaagccatgaacaagtccaatgagcatgtcctggcaggaggtgcctgcttcaatgaaaaggcagactctcatcttgtgtgtgtacagaatgatgatggaaactatcagacccaggctatcagtattcacaatcagcccagaaaagtgactggtgccagtttctttgtgttcagtggcgctctgaaatcctcttctggataccttgccaagtccagtattgtggaagatggtgttatggtccagattactgcagagaacatggattccttgaggcaggcactgcgagagatgaaggacttcaccatcacctgtgggaaggcggacgcggaggaaccccaggagcacatccacatccagtgggtggatgatgacaagaacgttagcaagggtgtcgtaagtcctatagatgggaagtccatggagactataacaaatgtgaagatattccatggatcagaatataaagcaaatggaaaagtaatcagatggacagaggtgtttttcctagaaaacgatgaccagcacaattgcctcagtgatcctgcagatcacagtagattgactgagcatgttgccaaagctttttgccttgctctctgtcctcacctgaaacttctgaaggaagatggaatgaccaaactgggactacgtgtgacacttgactcagatcaggttggctatcaagcagggagcaatggccagccccttccctcgcagtacatgaatgatctggacagcgccttggtgccggtgatccatggaggggcctgccagcttagtgagggccccgttgtcatggaactcatcttttatattctggaaaacatcgtataaacagagaagacttcatttttttctgttcagacttgttgcaacagcagtcatacccaaatcatttgcactttaaaactggaagattaagcttttgttaacactattaatggggtggggaatagggtgggagtgggggtttgggagacgggtgggaaagggtggttggggggaccgatgttccataattctaagtcttctatgcattgtccaccaagaagatctgggcagcttctgttcctgcacaacagttatgctatccttgcagctaatccccttctgttactgtttagacaagaattccgctcctctctcaagatttacttatggtcatgtgctcagaaatgctcaaatgggtacaaccatcaccaagggtgggatgggagggcagaggggaaataaaatataaagcatcagttcttgcactctttgtacagaattggtataaaaaggataattccacactg

SEQ ID NO: 204545 - DNA, 4567 bp, Homo sapiens
  Payload ID: 20345
  Gene Name: zinc finger, FYVE domain containing 9
  Uniprot ID: O95405
  ENST ID: ENST00000357206
  CDS Start-End: 173-4273
atgctgaagcggaggcggccgctgctcgaggatcaaacagagcatactgaatcagcaggactggctggtggtgcagcagacatcatgagtaagcaccgagaagtctgttccttatcacgtgtgtaaggggaaaaaggtttaaacaagtctcttaagtggtgtttcctcaccgatggagaattacttccaagcagaagcttacaacctggacaaggtgttagatgaatttgaacaaaacgaagatgaaacagtttcttctactttattggatacaaagtggaataagattctagatcccccttctcaccggctgtcatttaaccctactttggccagtgtgaatgaatctgcagtttctaatgagtcacaaccacaactgaaagtcttctccctggctcattcagctcccctgaccacagaggaagaggatcactgtgctaatggacaggactgtaatctaaatccagagattgccacaatgtggattgatgaaaatgctgttgcagaagaccagttaattaagagaaactatagttgggatgatcaatgcagtgctgttgaagtgggagagaagaaatgtggaaacctggcttgtctgccagatgagaagaatgttcttgttgtagccgtcatgcataactgtgataaaaggacattacaaaacgatttacaggattgtaataattataatagtcaatcccttatggatgcttttagctgttcactggataatgaaaacagacaaactgatcaatttagttttagtataaatgagtccactgaaaaagatatgaattcagagaaacaaatggatccattgaatagaccgaaaacagaggggagatctgttaaccatctgtgtcctacttcatctgatagtctagccagtgtctgttccccttcacaattaaaggatgacggaagtataggtagagacccctccatgtctgcgattacaagtttaacggttgattcagtaatctcatcccagggaacagatggatgtcctgctgttaaaaagcaagagaactatataccagatgaggacctcactggcaaaatcagctctcctaggacagatctagggagtccaaattccttttcccacatgagtgaggggattttgatgaaaaaagagccagcagaggagagcaccactgaagaatccctccggtctggtttacctttgcttctcaaaccagacatgcctaatgggtctggaaggaataatgactgtgaacggtgttcagattgccttgtgcctaatgaagttagggctgatgaaaatgaaggttatgaacatgaagaaactcttggcactacagaattccttaatatgacagagcatttctctgaatctcaggacatgactaattggaagttgactaaactaaatgagatgaatgatagccaagtaaacgaagaaaaggaaaagtttctacagattagtcagcctgaggacactaatggtgatagtggaggacagtgtgttggattggcagatgcaggtctagatttaaaaggaacttgcattagtgaaagtgaagaatgtgatttctccactgttatagacacaccagcagcaaattatctatctaatggttgtgattcctatggaatgcaagacccaggtgtttcttttgttccaaagactttaccctccaaagaagattcagtaacagaagaaaaagaaatagaggaaagcaagtcagaatgctactcaaatatttatgaacagagaggaaatgaggccacagaagggagtggactacttttaaacagcactggtgacctaatgaagaaaaattatttacataatttctgtagtcaagttccatcagtgcttgggcaatcttcccccaaggtagtagcaagcctgccatctatcagtgttccttttggtggtgcaagacccaagcaaccttctaatcttaaacttcaaattccaaagccattatcagaccatttacaaaatgactttcctgcaaacagtggaaataatactaaaaataaaaatgatattcttgggaaagcaaaattaggggaaaactcagcaaccaatgtatgcagtccatctttgggaaacatctctaatgtcgatacaaatggggaacatttagaaagttatgaggctgagatctccactagaccatgccttgcattagctccagatagcccagataatgatctcagagctggtcagtttggaatttctgccagaaagccattcaccactctgggtgaggtggctccagtatgggtaccggattctcaggctccaaattgcatgaaatgtgaagccaggtttacattcaccaaaaggaggcatcactgcagagcatgtgggaaggttttctgtgcttcctgctgtagcctgaaatgtaaactgttatacatggacagaaaggaagctagagtgtgtgtaatctgccattcagtgctaatgaatgtggctcagcccagagagcagaggcgagtttggtttgctgatgggatcttgcccaatggagaagttgctgatgcagccaaattaacaatgaatggaacttcctctgcaggaaccctggctgtgtcacacgacccagtcaagccagtaactaccagtcctctaccagcagagacggatatttgtctattctctgggagtataactcaggttggaagtcctgttggaagtgcaatgaatcttattcctgaagatggccttcctcccattctcatctccactggtgtaaaaggagactatgctgtggaagagaaaccatcacagatttcagtaatgcagcagttggaggatggtggccctgacccacttgtatttgttttaaatgcaaatttgttgtcaatggttaaaattgtaaattatgtgaacaggaagtgctggtgtttcacaaccaagggaatgcatgcagtgggtcagtctgagatagtcattcttctacagtgtttaccggatgaaaagtgtttgccaaaggatatctttaatcactttgtgcagctttatcgggatgctctggcagggaatgtggtgagcaacttgggacattccttcttcagtcaaagtttccttggcagtaaagaacatggtggattcttatatgtgacatctacctaccagtcactgcaagacctagtactcccaaccccaccttacttgtttgggattcttatccagaaatgggaaactccttgggctaaagtatttcctatccgtctgatgttgagacttggagctgaatatcgactttatccatgcccactattcagtgtcagatttcggaagccattgtttggagagacggggcataccatcatgaatcttcttgcagacttcagaaattaccagtataccttgccagtagttcaaggtttggtggttgatatggaagttcggaaaactagcatcaaaattcccagcaacagatacaatgagatgatgaaagccatgaacaagtccaatgagcatgtcctggcaggaggtgcctgcttcaatgaaaaggcagactctcatcttgtgtgtgtacagaatgatgatggaaactatcagacccaggctatcagtattcacaatcagcccagaaaagtgactggtgccagtttctttgtgttcagtggcgctctgaaatcctcttctggataccttgccaagtccagtattgtggaagatggtgttatggtccagattactgcagagaacatggattccttgaggcaggcactgcgagagatgaaggacttcaccatcacctgtgggaaggcggacgcggaggaaccccaggagcacatccacatccagtgggtggatgatgacaagaacgttagcaagggtgtcgtaagtcctatagatgggaagtccatggagactataacaaatgtgaagatattccatggatcagaatataaagcaaatggaaaagtaatcagatggacagaggtgtttttcctagaaaacgatgaccagcacaattgcctcagtgatcctgcagatcacagtagattgactgagcatgttgccaaagctttttgccttgctctctgtcctcacctgaaacttctgaaggaagatggaatgaccaaactgggactacgtgtgacacttgactcagatcaggttggctatcaagcagggagcaatggccagccccttccctcgcagtacatgaatgatctggacagcgccttggtgccggtgatccatggaggggcctgccagcttagtgagggccccgttgtcatggaactcatcttttatattctggaaaacatcgtataaacagagaagacttcatttttttctgttcagacttgttgcaacagcagtcatacccaaatcatttgcactttaaaactggaagattaagcttttgttaacactattaatggggtggggaatagggtgggagtgggggtttgggagacgggtgggaaagggtggttggggggaccgatgttccataattctaagtcttctatgcattgtccaccaagaagatctgggcagcttctgttcctgcacaacagttatgctatccttgcagctaatccccttctgttactgtttagacaa

SEQ ID NO: 204546 - DNA, 4874 bp, Homo sapiens
  Payload ID: 20345
  Gene Name: zinc finger, FYVE domain containing 9
  Uniprot ID: O95405
  ENST ID: ENST00000371591
  CDS Start-End: 132-4409
gcatactgaatcagcaggactggctggtggtgcagcagacatcatgagtaagcaccgagaagtctgttccttatcacgtgtgtaaggggaaaaaggtttaaacaagtctcttaagtggtgtttcctcaccgatggagaattacttccaagcagaagcttacaacctggacaaggtgttagatgaatttgaacaaaacgaagatgaaacagtttcttctactttattggatacaaagtggaataagattctagatcccccttctcaccggctgtcatttaaccctactttggccagtgtgaatgaatctgcagtttctaatgagtcacaaccacaactgaaagtcttctccctggctcattcagctcccctgaccacagaggaagaggatcactgtgctaatggacaggactgtaatctaaatccagagattgccacaatgtggattgatgaaaatgctgttgcagaagaccagttaattaagagaaactatagttgggatgatcaatgcagtgctgttgaagtgggagagaagaaatgtggaaacctggcttgtctgccagatgagaagaatgttcttgttgtagccgtcatgcataactgtgataaaaggacattacaaaacgatttacaggattgtaataattataatagtcaatcccttatggatgcttttagctgttcactggataatgaaaacagacaaactgatcaatttagttttagtataaatgagtccactgaaaaagatatgaattcagagaaacaaatggatccattgaatagaccgaaaacagaggggagatctgttaaccatctgtgtcctacttcatctgatagtctagccagtgtctgttccccttcacaattaaaggatgacggaagtataggtagagacccctccatgtctgcgattacaagtttaacggttgattcagtaatctcatcccagggaacagatggatgtcctgctgttaaaaagcaagagaactatataccagatgaggacctcactggcaaaatcagctctcctaggacagatctagggagtccaaattccttttcccacatgagtgaggggattttgatgaaaaaagagccagcagaggagagcaccactgaagaatccctccggtctggtttacctttgcttctcaaaccagacatgcctaatgggtctggaaggaataatgactgtgaacggtgttcagattgccttgtgcctaatgaagttagggctgatgaaaatgaaggttatgaacatgaagaaactcttggcactacagaattccttaatatgacagagcatttctctgaatctcaggacatgactaattggaagttgactaaactaaatgagatgaatgatagccaagtaaacgaagaaaaggaaaagtttctacagattagtcagcctgaggacactaatggtgatagtggaggacagtgtgttggattggcagatgcaggtctagatttaaaaggaacttgcattagtgaaagtgaagaatgtgatttctccactgttatagacacaccagcagcaaattatctatctaatggttgtgattcctatggaatgcaagacccaggtgtttcttttgttccaaagactttaccctccaaagaagattcagtaacagaagaaaaagaaatagaggaaagcaagtcagaatgctactcaaatatttatgaacagagaggaaatgaggccacagaagggagtggactacttttaaacagcactggtgacctaatgaagaaaaattatttacataatttctgtagtcaagttccatcagtgcttgggcaatcttcccccaaggtagtagcaagcctgccatctatcagtgttccttttggtggtgcaagacccaagcaaccttctaatcttaaacttcaaattccaaagccattatcagaccatttacaaaatgactttcctgcaaacagtggaaataatactaaaaataaaaatgatattcttgggaaagcaaaattaggggaaaactcagcaaccaatgtatgcagtccatctttgggaaacatctctaatgtcgatacaaatggggaacatttagaaagttatgaggctgagatctccactagaccatgccttgcattagctccagatagcccagataatgatctcagagctggtcagtttggaatttctgccagaaagccattcaccactctgggtgaggtggctccagtatgggtaccggattctcaggctccaaattgcatgaaatgtgaagccaggtttacattcaccaaaaggaggcatcactgcagagcatgtgggaaggttttctgtgcttcctgctgtagcctgaaatgtaaactgttatacatggacagaaaggaagctagagtgtgtgtaatctgccattcagtgctaatgaatgctcaagcctgggagaacatgatgagtgcctcaagccagagccctaaccctaacaatcctgctgaatactgttctactatccctcccttgcagcaagctcaggcctcaggagctctgagctctccacctcccactgtgatggtacctgtgggagttttaaagcaccctggagcagaagtggctcagcccagagagcagaggcgagtttggtttgctgatgggatcttgcccaatggagaagttgctgatgcagccaaattaacaatgaatggaacttcctctgcaggaaccctggctgtgtcacacgacccagtcaagccagtaactaccagtcctctaccagcagagacggatatttgtctattctctgggagtataactcaggttggaagtcctgttggaagtgcaatgaatcttattcctgaagatggccttcctcccattctcatctccactggtgtaaaaggagactatgctgtggaagagaaaccatcacagatttcagtaatgcagcagttggaggatggtggccctgacccacttgtatttgttttaaatgcaaatttgttgtcaatggttaaaattgtaaattatgtgaacaggaagtgctggtgtttcacaaccaagggaatgcatgcagtgggtcagtctgagatagtcattcttctacagtgtttaccggatgaaaagtgtttgccaaaggatatctttaatcactttgtgcagctttatcgggatgctctggcagggaatgtggtgagcaacttgggacattccttcttcagtcaaagtttccttggcagtaaagaacatggtggattcttatatgtgacatctacctaccagtcactgcaagacctagtactcccaaccccaccttacttgtttgggattcttatccagaaatgggaaactccttgggctaaagtatttcctatccgtctgatgttgagacttggagctgaatatcgactttatccatgcccactattcagtgtcagatttcggaagccattgtttggagagacggggcataccatcatgaatcttcttgcagacttcagaaattaccagtataccttgccagtagttcaaggtttggtggttgatatggaagttcggaaaactagcatcaaaattcccagcaacagatacaatgagatgatgaaagccatgaacaagtccaatgagcatgtcctggcaggaggtgcctgcttcaatgaaaaggcagactctcatcttgtgtgtgtacagaatgatgatggaaactatcagacccaggctatcagtattcacaatcagcccagaaaagtgactggtgccagtttctttgtgttcagtggcgctctgaaatcctcttctggataccttgccaagtccagtattgtggaagatggtgttatggtccagattactgcagagaacatggattccttgaggcaggcactgcgagagatgaaggacttcaccatcacctgtgggaaggcggacgcggaggaaccccaggagcacatccacatccagtgggtggatgatgacaagaacgttagcaagggtgtcgtaagtcctatagatgggaagtccatggagactataacaaatgtgaagatattccatggatcagaatataaagcaaatggaaaagtaatcagatggacagaggtgtttttcctagaaaacgatgaccagcacaattgcctcagtgatcctgcagatcacagtagattgactgagcatgttgccaaagctttttgccttgctctctgtcctcacctgaaacttctgaaggaagatggaatgaccaaactgggactacgtgtgacacttgactcagatcaggttggctatcaagcagggagcaatggccagccccttccctcgcagtacatgaatgatctggacagcgccttggtgccggtgatccatggaggggcctgccagcttagtgagggccccgttgtcatggaactcatcttttatattctggaaaacatcgtataaacagagaagacttcatttttttctgttcagacttgttgcaacagcagtcatacccaaatcatttgcactttaaaactggaagattaagcttttgttaacactattaatggggtggggaatagggtgggagtgggggtttgggagacgggtgggaaagggtggttggggggaccgatgttccataattctaagtcttctatgcattgtccaccaagaagatctgggcagcttctgttcctgcacaacagttatgctatccttgcagctaatccccttctgttactgtttagacaagaattccgctcctctctcaagatttacttatggtcatgtgctcagaaatgctcaaatgggtacaaccatcaccaagggtgggatgggagggcagaggggaaataaaatataaagcatcagttcttgcactctttgtacagaattggtataaaaaggataattccacactga

SEQ ID NO: 204547 - DNA, 2303 bp, Homo sapiens
  Payload ID: 20346
  Gene Name: zinc finger, GATA-like protein 1
  Uniprot ID: P0C6A0
  ENST ID: ENST00000403903
  CDS Start-End: 1200-2015
aaacaaaaacaaaccacacctgcatctgctgtgctgggcccccggttctcttttccctctgggatctaagatgccgctggggatccaaggcagaggcctgggagcccccatttccgagggggagggctagcgtggaaggccccgccccggcagctgcggagggatttggtggggtccaggccgcccttgccacgcaggggtgcgcggatgacctgaaaaaagccagaaagaggaaaggtgccgccgaggctggtcgctctcagctggggctcatcgcatcctctaccaagagcgctcccaccacacaggtcccgcccctcccaggtgggtttcatcgggtgggcccagcgggacagggccgggtgaaattagggagggggctgggctggggcgcaatggaggccgagccaatcccggactcctcaatgccagcaaagcttctggcgccgccctgtctgaacctggagcggctgggaggatccccctcccaggagaagccgaggaccccaggatgctgcagaatcagtgagaggtgcgtaaggccaaaccccattccccggaccccgctagcacttcaccacctggctcagtgatcaaggggtcatgacctctctttgctggggttatcgagaagtggcaattttataatagttactgaaacttacaaagaggttctggtgcccagagacacttggggtcatctagggatcagaggccatgcaattccatgtctctggggctgatgtaggcactccccagggatcatccaggggttatggagggcaactcaataataatgaaaatgataaaaatcgtaatcatattatggcaagccagcggcgtggtggcgcgtgcctgtaagtcccagctactcgggaggctgaggcggaaggatcggtcgagcccaggagttctaggctgcactgagtcctgatcacgcccctgcactccaggcgggggtacagagtgaggctcggtctctaaaagaaacacaaagaaaaaaagtaacctttttctcgatcctgcagccagaggcttgatatcctgcctcggtcacctagggcggtccctgcctgggtgatctacgggtgccgtaaggggttgattgatgtggagggctgggcgtgcctgggaggcccacagtgggcgaggtgagttgcaattactgcaactcttaaaccttccacccagagttagaaatgactgaacctcaggtggggtgtgtagcctgtccaagggtacacaaagagccggcccaagttggaaccccctggccggctaaacccaggagtcacccaagaaaacgtgaccccactgcccttctccccaggtccctctggcctgcatgccaggagtcggtcaccgccctgtgcttcctccaagagacagtggagaggctgggtcagtcccctgcccaggacaccccggtcctggggccttgctgggacccgatggctctggggactcagggccgcctgctgctggacagggattccaaggacacacagaccaggatcagccaaaagggccgccgtctgcagcccccggggactccctcggccccaccccagagaaggccccggaaacagctgaacccctgccggggcaccgagagagtggaccctgggttcgagggggtgactctgaagtttcagataaagccggactccagcctgcagatcatccccacgtacagcctgccctgcagtagccgttctcaggaatcccctgcagatgctgttgggggccctgcagcccacccaggaggcaccgaggcccactcagcaggcagcgaggccctggagccccggcgctgtgcttcctgtcggacccagaggaccccgctctggagagacgctgaagatgggacccctctctgcaacgcctgtgggatcaggtacaagaaatacggcactcgctgctccagctgctggctggtgcccaggaaaaatgtccagcccaagaggctatgtggcagatgtggagtgtccctggaccccattcaggaaggttaaacccagcttcaccctgctgagctgctgcttctgcctccgtttcaccagtgggagaatgggcagaagcagctctcctaggaggattggggaaagagccggcctgcctcctctctgccatctccagattcaaggatcccgggggaagacccaggcctcaggtggcagagcctgctaggggtcaccagccccttctccagtcagccttggccgaggccccctcaggagacgctctcaggaaggatgagcattgttacagcagggacaataaagtacagagatatgccgaga

SEQ ID NO: 204548 - DNA, 1028 bp, Homo sapiens
  Payload ID: 20346
  Gene Name: zinc finger, GATA-like protein 1
  ENST ID: ENST00000403352
  CDS Start-End: 449-1012
ctgggagcccccatttccgagggggagggctagcgtggaaggccccgccccggcagctgcggagggatttggtggggtccaggccgcccttgccacgcaggggtgcgcggatgacctgaaaaaagccagaaagaggaaaggtgccgccgaggctggtcgctctcagctggggctcatcgcatcctctaccaagagcgctcccaccacacaggtcccgcccctcccagcaaagcttctggcgccgccctgtctgaacctggagcggctgggaggatccccctcccaggagaagccgaggaccccaggatgctgcagaatcagtgagaggtccctctggcctgcatgccaggagtcggtcaccgccctgtgcttcctccaagagacagtggagaggctgggtcagtcccctgcccaggacaccccggtcctggggccttgctgggacccgatggctctggggactcagggccgcctgctgctggacagggattccaaggacacacagaccaggatcagccaaaagggccgccgtctgcagcccccggggactccctcggccccaccccagagaaggccccggaaacagctgaacccctgccggggcaccgagagagtggaccctgggttcgagggggtgactctgaagtttcagataaagccggactccagcctgcagatcatccccacgtacagcctgccctgcagtagccgttctcaggaatcccctgcagatgctgttgggggccctgcagcccacccaggaggcaccgaggcccactcagcaggcagcgaggccctggagccccggcgctgtgcttcctgtcggacccagaggaccccgctctggagagacgctgaagatgggacccctctctgcaacgcctgtgggatcaggtacaagaaatacggcactcgctgctccagctgctggctggtgcccaggaaaaatgtccagcccaagaggctatgtggcagatgtggagtgtccctggaccccattcaggaaggttaaacccagcttcaccctg

SEQ ID NO: 204549 - DNA, 3347 bp, Homo sapiens
  Payload ID: 20347
  Gene Name: zinc finger, GRF-type containing 1
  Uniprot ID: Q86YA3
  ENST ID: ENST00000309071
  CDS Start-End: 127-3315
taatgacgtcacgttgtttcgcgggagaaattcgaaagtggattttgtgcaatttgacaggtggtataaatagttgaatatttcctattttctggacccagctggtttataacttcagaagaaataatggaaagccaagaatttattgttctatatactcatcaaaagatgaagaagtcaaaagtgtggcaagatggaattctgaagatcactcacttaggaaacaaagcaattttatatgatgacaaaggagcatgtttggagagtctgtttcttaaatgccttgaggtgaaacctggagatgacttagaaagtgatcgatacttaatcacagttgaagaggttaaagttgctggagccataggtattgttaagcagaatgtcaataaagaagcaccagagttaaattcaaggacatttatatcctctggccgatctcttggatgtcagccctctggcttaaaaaggaagtttactggttttcaaggaccacgtcaggttccaaagaaaatggttattatggaaagtggtgaatcagctgcatcacatgaggctaagaaaactggccctactattttttctccattctgcagcatgcctcctttgtttcctactgttggcaagaaagatgtaaataatatactggcagaccctgagaacattgtgacttacaagaacagggagagaaatgccatggatttttcttcggttttttctccatccttccagattaacccagaagtgctgtgtgaagaaaattatttttgctcacctgtcaattctggaaataagctttcagactctttactgaccaatgagcctgtgaaaagagatagtttggcatctcactattcaggagtttcacaaaacatcagaagcaaagcacagatattagctcttctgaagtccgaatcatctagttcatgtgaggaactaaattctgagatgacagagcattttcctcaaaaacaaccacaaggaagtttaaaaattgctactaaaccaaagtacctaattcaacaggaagagtgtgctgagatgaagagcacagaaaatttatactaccagcatcaatcagaaaataccatgagaaataaaagccggtgggccatgtatttatcctcacagagttcacctatacattcttctactgtagatgggaatgatacagaaaggaaacccaaggcccaggaagatgatgtaaattctaatttgaaagacctttcattacaaaaaattatacagttcgttgaaacgtatgctgaagagaggaaaaagtataatgtagaccagtcagtcggtaataatgatccatcctggaatcaggaagtaaaattagaaattccttcattcaatgaaagcagtagcttacaggttacttgtagcagtgcagaaaatgatggtatattatcagaatctgacattcaagaagataataaaataccttttaatcaaaatgacaaggggtgcattaaaggatcagttctcattaaagaaaatgctcaggaggtaaatacatgtggaacactggaaaaggagtatgaacaatcagagtcatctctgccagaactgaaacatctccaaattgaatctagtaataattctaggatctctgatgacattacagacatgatttctgaaagtaaaatggataatgaaagtcttaatagtattcatgaatctctgagtaatgtaacacaaccatttttggaggtaacttttaatctgaacaattttgagaccagtgacactgaggaggaatcacaggaaagcaacaaaatttcccaggattcagagagttgggtaaaggacattttggttaatgatggcaattcatgttttcaaaagaggtctgagaatacaaactgtgaagagattgagggtgaacatttgccattcttaacatctgttagtgacaaacctacagtgacatttcctgttaaagagactctgccatcacagttttgtgataaaacttatgtgggttttgacatgggaatatgtaaaactgaaaacacaggaaaagaaatagaggagtatagtgacacattaagcaattttgaatctttcaagtggactgatgctgtatacggagataataaagaagatgctaataaacctattcaagaagtcagaattaactatgattttgctttacccccgaataaatctaaaggtataaacatgaatttacatattcctcatattcaaaaccagattgctgaaaacagtaatctattttcagaagatgctcaacctcagccttttattttgggaagtgacttagacaaaaatgatgaacatgttttaccctcaacttctagtagtgacaacagtgtccaactattaaataccaatcagaatcactatgaatgtattgcacttgataaatcaaatacccacatttccaattctttgttttacccactgggaaaaaagcatcttatttccaaagacacagaagcacatatatctgaacctgaagatttgggaaagattagaagtccaccccctgaccatgttgaggttgaaactgccagagaaggcaaacaatactggaatcctagaaattcttcagaactttctggattagtaaataccatttctattttaaagtcgctatgtgaacacagtactgctttagacagcttggaaatattgaaaaagaaaaatactgtctttcagcaaggaactcaacagacgtatgagccagatagccctcctgaagtgaggaaaccatttattacagtagtttcaccaaagtctcctcatctgcacaaggattctcaacagatactaaaagaagatgaagttgaactaagtgaaccacttcagtctgtgcagttctcttcctcgggaagtaaagaagagactgcttttcaagctgttattcctaaacaaatagagagaaaaacctgtgaccctaagcctgttgagtttcaaggacatcaagtaaaaggatcagctactagtggtgtaatggtcagaggacacagctcacagctaggatgcagtcagtttccagatagcactgagtatgaaaactttatgacagagacaccagagttacctagcacgtgtatgcagattgacttcttgcaggtgacatcaccagaagaaaacatctctacattgagccctgtttctaccttttctttgaactcaagagatgaagacttcatggtagaattctctgagacgtccctgaaagcaagaactttacctgatgatcttcattttctcaacttggagggtagtcgttaccacattgctctaatatctgtctattcatttaagatgaagttttttatttgagagattattacactaaatatatcttagaacca

SEQ ID NO: 204550 - DNA, 6529 bp, Homo sapiens
  Payload ID: 20347
  Gene Name: zinc finger, GRF-type containing 1
  Uniprot ID: Q86YA3
  ENST ID: ENST00000445203
  CDS Start-End: 1-6315
atggaaagccaagaatttattgttctatatactcatcaaaagatgaagaagtcaaaagtgtggcaagatggaattctgaagatcactcacttaggaaacaaagcaattttatatgatgacaaaggagcatgtttggagagtctgtttcttaaatgccttgaggtgaaacctggagatgacttagaaagtgatcgatacttaatcacagttgaagaggttaaagttgctggagccataggtattgttaagcagaatgtcaataaagaagcaccagagttaaattcaaggacatttatatcctctggccgatctcttggatgtcagccctctggcttaaaaaggaagtttactggttttcaaggaccacgtcaggttccaaagaaaatggttattatggaaagtggtgaatcagctgcatcacatgaggctaagaaaactggccctactattttttctccattctgcagcatgcctcctttgtttcctactgttggcaagaaagatgtaaataatatactggcagaccctgagaacattgtgacttacaagaacagggagagaaatgccatggatttttcttcggttttttctccatccttccagattaacccagaagtgctgtgtgaagaaaattatttttgctcacctgtcaattctggaaataagctttcagactctttactgaccaatgagcctgtgaaaagagatagtttggcatctcactattcaggagtttcacaaaacatcagaagcaaagcacagatattagctcttctgaagtccgaatcatctagttcatgtgaggaactaaattctgagatgacagagcattttcctcaaaaacaaccacaaggaagtttaaaaattgctactaaaccaaagtacctaattcaacaggaagagtgtgctgagatgaagagcacagaaaatttatactaccagcatcaatcagaaaataccatgagaaataaaagccggtgggccatgtatttatcctcacagagttcacctatacattcttctactgtagatgggaatgatacagaaaggaaacccaaggcccaggaagatgatgtaaattctaatttgaaagacctttcattacaaaaaattatacagttcgttgaaacgtatgctgaagagaggaaaaagtataatgtagaccagtcagtcggtaataatgatccatcctggaatcaggaagtaaaattagaaattccttcattcaatgaaagcagtagcttacaggttacttgtagcagtgcagaaaatgatggtatattatcagaatctgacattcaagaagataataaaataccttttaatcaaaatgacaaggggtgcattaaaggatcagttctcattaaagaaaatgctcaggaggtaaatacatgtggaacactggaaaaggagtatgaacaatcagagtcatctctgccagaactgaaacatctccaaattgaatctagtaataattctaggatctctgatgacattacagacatgatttctgaaagtaaaatggataatgaaagtcttaatagtattcatgaatctctgagtaatgtaacacaaccatttttggaggtaacttttaatctgaacaattttgagaccagtgacactgaggaggaatcacaggaaagcaacaaaatttcccaggattcagagagttgggtaaaggacattttggttaatgatggcaattcatgttttcaaaagaggtctgagaatacaaactgtgaagagattgagggtgaacatttgccattcttaacatctgttagtgacaaacctacagtgacatttcctgttaaagagactctgccatcacagttttgtgataaaacttatgtgggttttgacatgggaatatgtaaaactgaaaacacaggaaaagaaatagaggagtatagtgacacattaagcaattttgaatctttcaagtggactgatgctgtatacggagataataaagaagatgctaataaacctattcaagaagtcagaattaactatgattttgctttacccccgaataaatctaaaggtataaacatgaatttacatattcctcatattcaaaaccagattgctgaaaacagtaatctattttcagaagatgctcaacctcagccttttattttgggaagtgacttagacaaaaatgatgaacatgttttaccctcaacttctagtagtgacaacagtgtccaactattaaataccaatcagaatcactatgaatgtattgcacttgataaatcaaatacccacatttccaattctttgttttacccactgggaaaaaagcatcttatttccaaagacacagaagcacatatatctgaacctgaagatttgggaaagattagaagtccaccccctgaccatgttgaggttgaaactgccagagaaggcaaacaatactggaatcctagaaattcttcagaactttctggattagtaaataccatttctattttaaagtcgctatgtgaacacagtactgctttagacagcttggaaatattgaaaaagaaaaatactgtctttcagcaaggaactcaacagacgtatgagccagatagccctcctgaagtgaggaaaccatttattacagtagtttcaccaaagtctcctcatctgcacaaggattctcaacagatactaaaagaagatgaagttgaactaagtgaaccacttcagtctgtgcagttctcttcctcgggaagtaaagaagagactgcttttcaagctgttattcctaaacaaatagagagaaaaacctgtgaccctaagcctgttgagtttcaaggacatcaagtaaaaggatcagctactagtggtgtaatggtcagaggacacagctcacagctaggatgcagtcagtttccagatagcactgagtatgaaaactttatgacagagacaccagagttacctagcacgtgtatgcagattgacttcttgcaggtgacatcaccagaagaaaacatctctacattgagccctgtttctaccttttctttgaactcaagagatgaagacttcatggtagaattctctgagacgtccctgaaagcaagaactttacctgatgatcttcattttctcaacttggaggggatgaaaaaatcccgttctctggagaatgagaaccttcaaaggctttcattattaagtagaacccaggttccacttattactttgccacgtactgatgggccacctgacttagactctcattcgtatatgatcaactctaacacatacgagtcttctggctcccccatgctcaatttgtgtgaaaagtcagcagttctttcgtttagcattgagcctgaggaccaaaatgaaacctttttctctgaagaatctagggaagtgaatccaggggatgtttcacttaataatatatctactcagagcaagtggctgaaatatcaaaacacatcccaatgcaacgtggctactccaaacagagttgataagagaataactgatggcttctttgctgaggctgtttctgggatgcattttagagacacaagtgaaagacagagtgatgctgtcaatgaaagctctttagactctgtgcatttgcaaatgataaaaggcatgctctatcaacagcggcaggattttagcagtcaagattcggtttccagaaagaaagtactttctctgaatttaaagcagacttctaagacagaggaaattaaaaatgtattaggagggtctacctgctacaactacagtgtaaaggatttacaggagataagtggctctgagctgtgctttccaagtgggcagaaaataaaatctgcttatcttccccaaaggcaaattcacataccagctgtttttcagtctcctgctcattataagcagactttcacatcttgcctcatagaacatctaaatatattgctgtttgggttagcacaaaacctgcagaaagctctttcaaaagttgacatatcattttatacatcattgaagggagagaaactgaaaaacgcagaaaataatgtaccatcctgccatcatagtcaacctgcaaaacttgtcatggttaaaaaggaaggtccaaataagggtcgtctcttttatacatgtgatggacccaaagctgatcgatgtaaattctttaaatggcttgaggacgtgactccaggatattcaacacaggaaggagctcgacctggcatggttttaagtgatattaagagtattggcttatatttaagaagtcaaaagataccactttatgaggaatgccagcttttggtgagaaaaggatttgattttcagagaaaacagtatggcaaactaaagaagtttactactgtaaatcctgagttttataatgaaccaaaaaccaaactttatcttaagctaagtcggaaggaaagatcttcagcttatagcaaaaatgatctttgggtggtttcaaaaaccctagactttgagctggatacttttatcgcatgtagtgctttctttggaccatcatctatcaatgagatagaaatactgcctttgaaaggctatttcccttctaattggcccactaacatggttgtccatgcgttattggtttgtaatgctagcacagaactgactactttgaaaaacattcaggactactttaatccagctactctacctctaacacagtacctgttaacaacgtcttcgccaactatagttagtaacaaaagagtcagtaagagaaaatttatcccaccagccttcacaaatgtcagtacaaaatttgaactactcagcctaggagcaacattgaagttagctagtgagttgattcaggtacacaagttaaacaaggatcaagctacagctctaattcaaatagctcaaatgatggcatcacatgaaagcattgaagaagtgaaggaactgcaaactcataccttccctatcacaatcatacatggtgtgtttggagcaggaaagagttacttgctggcagtggtgattttgttctttgtacagctgtttgaaaagagtgaagctcccaccattggaaatgcaaggccgtggaaacttctgatttcttcttctactaatgtggctgttgacagagtacttcttgggcttctcagtcttggatttgaaaactttatcagagttgggagtgttaggaagattgccaaaccaattttaccttatagcttgcatgctggctcagaaaatgaaagtgaacagttaaaagaactacatgcactaatgaaagaagacctgactcctacggaaagagtctatgtgagaaaaagcattgagcagcataaactggggaccaatagaaccctgctgaagcaggttcgagtagttggagttacctgtgcagcctgcccattcccatgcatgaatgatcttaaatttcctgtagttgtgctggatgagtgtagtcagataactgaaccggcctctctccttcccattgcaaggtttgagtgtgaaaagctgattcttgttggggatcccaaacagctacctcctactattcagggttctgatgcagctcatgaaaatggattggaacaaactctttttgatcgactttgcttaatgggtcacaagccaattctattgagaactcaataccgttgtcatcctgcaatcagtgctattgctaatgatctgttttacaaaggagccctcatgaatggtgtaacagaaatagagcggagccctttattggaatggctaccaaccctgtgtttttataatgttaaaggactagaacagatagaaagagataacagctttcataatgtggcagaagctacgtttacactcaagctgattcaatcactgattgcaagtggaatagcaggctctatgattggtgtgataacattatacaaatcccagatgtacaagctttgtcatttactcagtgctgtggactttcaccatcctgatattaaaactgtgcaggtgtccacagtagatgcttttcagggagctgaaaaggagatcattattctgtcctgtgtaaggacaagacaagtaggattcattgattcagaaaaaagaatgaatgttgcattgactagaggaaagaggcatttgttgattgtgggaaatttagcctgtttgaggaaaaatcaactttggggacgagtgatccaacactgcgaaggaagggaagatggattgcaacatgcaaaccagtatgaaccacagctgaaccatctccttaaagattattttgaaaaacaagtggaagaaaaacagaagaaaaagagtgaaaaagagaaatctaaagataaatctcattcataaaaagacatggtgtaaatattttgtatttatgtaaattcagactcattttacatgatatattttttatatttttattactctaaaccctcttattaaaaatatgatatttaaataacatagtaaacacatgtaaaaattttgttcttcaaaaaagtgtacaaaaggtagtataaaatcctactaataaaaataagcttttttctaagaagaatga

SEQ ID NO: 204551 - DNA, 3089 bp, Homo sapiens
  Payload ID: 20347
  Gene Name: zinc finger, GRF-type containing 1
  ENST ID: ENST00000445413
  CDS Start-End: 1-2046
tgtgaaaagtcagcagttctttcgtttagcattgagcctgaggaccaaaatgaaacctttttctctgaagaatctagggaagtgaatccaggggatgtttcacttaataatatatctactcagagcaagtggctgaaatatcaaaacacatcccaatgcaacgtggctactccaaacagagttgataagagaataactgatggcttctttgctgaggctgtttctgggatgcattttagagacacaagtgaaagacagagtgatgctgtcaatgaaagctctttagactctgtgcatttgcaaatgataaaaggcatgctctatcaacagcggcaggattttagcagtcaagattcggtttccagaaagaaagtactttctctgaatttaaagcagacttctaagacagaggaaattaaaaatgtattaggagggtctacctgctacaactacagtgtaaaggatttacaggagataagtggctctgagctgtgctttccaagtgggcagaaaataaaatctgcttatcttccccaaaggcaaattcacataccagctgtttttcagtctcctgctcattataagcagactttcacatcttgcctcatagaacatctaaatatattgctgtttgggttagcacaaaacctgcagaaagctctttcaaaagttgacatatcattttatacatcattgaagggagagaaactgaaaaacgcagaaaataatgtaccatcctgccatcatagtcaacctgcaaaacttgtcatggttaaaaaggaaggtccaaataagggtcgtctcttttatacatgtgatggacccaaagctgatcgatgtaaattctttaaatggcttgaggacgtgactccaggatattcaacacaggaaggagctcgacctggcatggttttaagtgatattaagagtattggcttatatttaagaagtcaaaagataccactttatgaggaatgccagcttttggtgagaaaaggatttgattttcagagaaaacagtatggcaaactaaagaagtttactactgtaaatcctgagttttataatgaaccaaaaaccaaactttatcttaagctaagtcggaaggaaagatcttcagcttatagcaaaaatgatctttgggtggtttcaaaaaccctagactttgagctggatacttttatcgcatgtagtgctttctttggaccatcatctatcaatgagatagaaatactgcctttgaaaggctatttcccttctaattggcccactaacatggttgtccatgcgttattggtttgtaatgctagcacagaactgactactttgaaaaacattcaggactactttaatccagctactctacctctaacacagtacctgttaacaacgtcttcgccaactatagttagtaacaaaagagtcagtaagagaaaatttatcccaccagccttcacaaatgtcagtacaaaatttgaactactcagcctaggagcaacattgaagttagctagtgagttgattcaggtacacaagttaaacaaggatcaagctacagctctaattcaaatagctcaaatgatggcatcacatgaaagcattgaagaagtgaaggaactgcaaactcataccttccctatcacaatcatacatggtgtgtttggagcaggaaagagttacttgctggcagtggtgattttgttctttgtacagctgtttgaaaagagtgaagctcccaccattggaaatgcaaggccgtggaaacttctgatttcttcttctactaatgtggctgttgacagagtacttcttgggcttctcagtcttggatttgaaaactttatcagagttgggagtgttaggaagattgccaaaccaattttaccttatagcttgcatgctggctcagaaaatgaaagtgaacagttaaaagaactacatgcactaatgaaagaagacctgactcctacggaaagagtctatgtgagaaaaagcattgagcagcataaactggggaccaatagaaccctgctgaagcaggtttgagtgtgaaaagctgattcttgttggggatcccaaacagctacctcctactattcagggttctgatgcagctcatgaaaatggattggaacaaactctttttgatcgactttgcttaatgggtcacaagccaattctattgagaactcaataccgttgtcatcctgcaatcagtgctattgctaatgatctgttttacaaaggagccctcatgaatggtgtaacagaaatagagcggagccctttattggaatggctaccaaccctgtgtttttataatgttaaaggactagaacagatagaaagagataacagctttcataatgtggcagaagctacgtttacactcaagctgattcaatcactgattgcaagtggaatagcaggctctatgattggtgtgataacattatacaaatcccagatgtacaagctttgtcatttactcagtgctgtggactttcaccatcctgatattaaaactgtgcaggtgtccacagtagatgcttttcagggagctgaaaaggagatcattattctgtcctgtgtaaggacaagacaagtaggattcattgattcagaaaaaagaatgaatgttgcattgactagaggaaagaggcatttgttgattgtgggaaatttagcctgtttgaggaaaaatcaactttggggacgagtgatccaacactgcgaaggaagggaagatggattgcaacatgcaaaccagtatgaaccacagctgaaccatctccttaaagattattttgaaaaacaagtggaagaaaaacagaagaaaaagagtgaaaaagagaaatctaaagataaatctcattcataaaaagacatggtgtaaatattttgtatttatgtaaattcagactcattttacatgatatattttttatatttttattactctaaaccctcttattaaaaatatgatatttaaataacatagtaaacacatgtaaaaattttgttcttcaaaaaagtgtacaaaaggtagtataaaatcctactaataaaaataagcttttttctaagaa

SEQ ID NO: 204552 - DNA, 731 bp, Homo sapiens
  Payload ID: 20347
  Gene Name: zinc finger, GRF-type containing 1
  ENST ID: ENST00000502805
  CDS Start-End: 235-420
gcaatttgacaggtgaggtgaagtgtttctcgggatttcctaggaatgacttgagcgatttggggcgaagggacgaaagactctgctccttaagaagagaaccgggaaggatgctgtttggaaccaggattggggtggtcgcagtcacagctactcggactgcttgtagtggtataaatagttgaatatttcctattttctggacccagctggtttataacttcagaagaaataatggaaagccaagaatttattgttctatatactcatcaaaagatgaagaagtcaaaagtgtggcaagatggaattctgaagatcactcacttaggaaacaaaacagagtcttgctctgttgcccaggctggagtgcagtggcacagtcttggctcactacaacctctgcatccaaggttcaagtgattatcctgcctcagcctcctgagtagctgggattacaagcgcccaccaccatgcctggctaatttttgtgtttttagtagagatggggtttcaccatgttggccaggctggtctcaaactcctgacctcaagtgatccacccacctcagcctcctaaagtgctggtattacaggcaattttatatgatgacaaaggagcatgtttggagagtctgtttcttaaatgccttgaggtgaaacctggagatgacttagaaagtgatcgatacttaatcacagttgaagaggttaaagttgctggagccataggt

SEQ ID NO: 204553 - DNA, 6652 bp, Homo sapiens
  Payload ID: 20347
  Gene Name: zinc finger, GRF-type containing 1
  Uniprot ID: Q86YA3
  ENST ID: ENST00000505019
  CDS Start-End: 127-6441
taatgacgtcacgttgtttcgcgggagaaattcgaaagtggattttgtgcaatttgacaggtggtataaatagttgaatatttcctattttctggacccagctggtttataacttcagaagaaataatggaaagccaagaatttattgttctatatactcatcaaaagatgaagaagtcaaaagtgtggcaagatggaattctgaagatcactcacttaggaaacaaagcaattttatatgatgacaaaggagcatgtttggagagtctgtttcttaaatgccttgaggtgaaacctggagatgacttagaaagtgatcgatacttaatcacagttgaagaggttaaagttgctggagccataggtattgttaagcagaatgtcaataaagaagcaccagagttaaattcaaggacatttatatcctctggccgatctcttggatgtcagccctctggcttaaaaaggaagtttactggttttcaaggaccacgtcaggttccaaagaaaatggttattatggaaagtggtgaatcagctgcatcacatgaggctaagaaaactggccctactattttttctccattctgcagcatgcctcctttgtttcctactgttggcaagaaagatgtaaataatatactggcagaccctgagaacattgtgacttacaagaacagggagagaaatgccatggatttttcttcggttttttctccatccttccagattaacccagaagtgctgtgtgaagaaaattatttttgctcacctgtcaattctggaaataagctttcagactctttactgaccaatgagcctgtgaaaagagatagtttggcatctcactattcaggagtttcacaaaacatcagaagcaaagcacagatattagctcttctgaagtccgaatcatctagttcatgtgaggaactaaattctgagatgacagagcattttcctcaaaaacaaccacaaggaagtttaaaaattgctactaaaccaaagtacctaattcaacaggaagagtgtgctgagatgaagagcacagaaaatttatactaccagcatcaatcagaaaataccatgagaaataaaagccggtgggccatgtatttatcctcacagagttcacctatacattcttctactgtagatgggaatgatacagaaaggaaacccaaggcccaggaagatgatgtaaattctaatttgaaagacctttcattacaaaaaattatacagttcgttgaaacgtatgctgaagagaggaaaaagtataatgtagaccagtcagtcggtaataatgatccatcctggaatcaggaagtaaaattagaaattccttcattcaatgaaagcagtagcttacaggttacttgtagcagtgcagaaaatgatggtatattatcagaatctgacattcaagaagataataaaataccttttaatcaaaatgacaaggggtgcattaaaggatcagttctcattaaagaaaatgctcaggaggtaaatacatgtggaacactggaaaaggagtatgaacaatcagagtcatctctgccagaactgaaacatctccaaattgaatctagtaataattctaggatctctgatgacattacagacatgatttctgaaagtaaaatggataatgaaagtcttaatagtattcatgaatctctgagtaatgtaacacaaccatttttggaggtaacttttaatctgaacaattttgagaccagtgacactgaggaggaatcacaggaaagcaacaaaatttcccaggattcagagagttgggtaaaggacattttggttaatgatggcaattcatgttttcaaaagaggtctgagaatacaaactgtgaagagattgagggtgaacatttgccattcttaacatctgttagtgacaaacctacagtgacatttcctgttaaagagactctgccatcacagttttgtgataaaacttatgtgggttttgacatgggaatatgtaaaactgaaaacacaggaaaagaaatagaggagtatagtgacacattaagcaattttgaatctttcaagtggactgatgctgtatacggagataataaagaagatgctaataaacctattcaagaagtcagaattaactatgattttgctttacccccgaataaatctaaaggtataaacatgaatttacatattcctcatattcaaaaccagattgctgaaaacagtaatctattttcagaagatgctcaacctcagccttttattttgggaagtgacttagacaaaaatgatgaacatgttttaccctcaacttctagtagtgacaacagtgtccaactattaaataccaatcagaatcactatgaatgtattgcacttgataaatcaaatacccacatttccaattctttgttttacccactgggaaaaaagcatcttatttccaaagacacagaagcacatatatctgaacctgaagatttgggaaagattagaagtccaccccctgaccatgttgaggttgaaactgccagagaaggcaaacaatactggaatcctagaaattcttcagaactttctggattagtaaataccatttctattttaaagtcgctatgtgaacacagtactgctttagacagcttggaaatattgaaaaagaaaaatactgtctttcagcaaggaactcaacagacgtatgagccagatagccctcctgaagtgaggaaaccatttattacagtagtttcaccaaagtctcctcatctgcacaaggattctcaacagatactaaaagaagatgaagttgaactaagtgaaccacttcagtctgtgcagttctcttcctcgggaagtaaagaagagactgcttttcaagctgttattcctaaacaaatagagagaaaaacctgtgaccctaagcctgttgagtttcaaggacatcaagtaaaaggatcagctactagtggtgtaatggtcagaggacacagctcacagctaggatgcagtcagtttccagatagcactgagtatgaaaactttatgacagagacaccagagttacctagcacgtgtatgcagattgacttcttgcaggtgacatcaccagaagaaaacatctctacattgagccctgtttctaccttttctttgaactcaagagatgaagacttcatggtagaattctctgagacgtccctgaaagcaagaactttacctgatgatcttcattttctcaacttggaggggatgaaaaaatcccgttctctggagaatgagaaccttcaaaggctttcattattaagtagaacccaggttccacttattactttgccacgtactgatgggccacctgacttagactctcattcgtatatgatcaactctaacacatacgagtcttctggctcccccatgctcaatttgtgtgaaaagtcagcagttctttcgtttagcattgagcctgaggaccaaaatgaaacctttttctctgaagaatctagggaagtgaatccaggggatgtttcacttaataatatatctactcagagcaagtggctgaaatatcaaaacacatcccaatgcaacgtggctactccaaacagagttgataagagaataactgatggcttctttgctgaggctgtttctgggatgcattttagagacacaagtgaaagacagagtgatgctgtcaatgaaagctctttagactctgtgcatttgcaaatgataaaaggcatgctctatcaacagcggcaggattttagcagtcaagattcggtttccagaaagaaagtactttctctgaatttaaagcagacttctaagacagaggaaattaaaaatgtattaggagggtctacctgctacaactacagtgtaaaggatttacaggagataagtggctctgagctgtgctttccaagtgggcagaaaataaaatctgcttatcttccccaaaggcaaattcacataccagctgtttttcagtctcctgctcattataagcagactttcacatcttgcctcatagaacatctaaatatattgctgtttgggttagcacaaaacctgcagaaagctctttcaaaagttgacatatcattttatacatcattgaagggagagaaactgaaaaacgcagaaaataatgtaccatcctgccatcatagtcaacctgcaaaacttgtcatggttaaaaaggaaggtccaaataagggtcgtctcttttatacatgtgatggacccaaagctgatcgatgtaaattctttaaatggcttgaggacgtgactccaggatattcaacacaggaaggagctcgacctggcatggttttaagtgatattaagagtattggcttatatttaagaagtcaaaagataccactttatgaggaatgccagcttttggtgagaaaaggatttgattttcagagaaaacagtatggcaaactaaagaagtttactactgtaaatcctgagttttataatgaaccaaaaaccaaactttatcttaagctaagtcggaaggaaagatcttcagcttatagcaaaaatgatctttgggtggtttcaaaaaccctagactttgagctggatacttttatcgcatgtagtgctttctttggaccatcatctatcaatgagatagaaatactgcctttgaaaggctatttcccttctaattggcccactaacatggttgtccatgcgttattggtttgtaatgctagcacagaactgactactttgaaaaacattcaggactactttaatccagctactctacctctaacacagtacctgttaacaacgtcttcgccaactatagttagtaacaaaagagtcagtaagagaaaatttatcccaccagccttcacaaatgtcagtacaaaatttgaactactcagcctaggagcaacattgaagttagctagtgagttgattcaggtacacaagttaaacaaggatcaagctacagctctaattcaaatagctcaaatgatggcatcacatgaaagcattgaagaagtgaaggaactgcaaactcataccttccctatcacaatcatacatggtgtgtttggagcaggaaagagttacttgctggcagtggtgattttgttctttgtacagctgtttgaaaagagtgaagctcccaccattggaaatgcaaggccgtggaaacttctgatttcttcttctactaatgtggctgttgacagagtacttcttgggcttctcagtcttggatttgaaaactttatcagagttgggagtgttaggaagattgccaaaccaattttaccttatagcttgcatgctggctcagaaaatgaaagtgaacagttaaaagaactacatgcactaatgaaagaagacctgactcctacggaaagagtctatgtgagaaaaagcattgagcagcataaactggggaccaatagaaccctgctgaagcaggttcgagtagttggagttacctgtgcagcctgcccattcccatgcatgaatgatcttaaatttcctgtagttgtgctggatgagtgtagtcagataactgaaccggcctctctccttcccattgcaaggtttgagtgtgaaaagctgattcttgttggggatcccaaacagctacctcctactattcagggttctgatgcagctcatgaaaatggattggaacaaactctttttgatcgactttgcttaatgggtcacaagccaattctattgagaactcaataccgttgtcatcctgcaatcagtgctattgctaatgatctgttttacaaaggagccctcatgaatggtgtaacagaaatagagcggagccctttattggaatggctaccaaccctgtgtttttataatgttaaaggactagaacagatagaaagagataacagctttcataatgtggcagaagctacgtttacactcaagctgattcaatcactgattgcaagtggaatagcaggctctatgattggtgtgataacattatacaaatcccagatgtacaagctttgtcatttactcagtgctgtggactttcaccatcctgatattaaaactgtgcaggtgtccacagtagatgcttttcagggagctgaaaaggagatcattattctgtcctgtgtaaggacaagacaagtaggattcattgattcagaaaaaagaatgaatgttgcattgactagaggaaagaggcatttgttgattgtgggaaatttagcctgtttgaggaaaaatcaactttggggacgagtgatccaacactgcgaaggaagggaagatggattgcaacatgcaaaccagtatgaaccacagctgaaccatctccttaaagattattttgaaaaacaagtggaagaaaaacagaagaaaaagagtgaaaaagagaaatctaaagataaatctcattcataaaaagacatggtgtaaatattttgtatttatgtaaattcagactcattttacatgatatattttttatatttttattactctaaaccctcttattaaaaatatgatatttaaataacatagtaaacacatgtaaaaattttgttcttcaaaaaagtgtacaaaaggtagtataaaatcctactaataaaaataagcttttttctaagaagaa

SEQ ID NO: 204554 - DNA, 3416 bp, Homo sapiens
  Payload ID: 20347
  Gene Name: zinc finger, GRF-type containing 1
  ENST ID: ENST00000514770
  CDS Start-End: 206-322
gatttgaaagcggcggtttttggcttaggcggaggtgggcgggccaagttttgggtcctcatctggtgaggtcccgcgttaatgacgtcacgttgtttcgcgggagaaattcgaaagtggattttgtgcaatttgacaggtggtataaatagttgaatatttcctattttctggacccagctggtttataacttcagaagaaataatggaaagccaagaatttattgttctatatactcatcaaaagatgaagaagtcaaaagtgtggcaagatggaattctgaagatcactcacttaggaaacaaaatccagtgtctttaaaatcttgtagatatttaaaagccatctgattggattctgcatatcctttgtgttgtcttctggttccaaattattatggtcatgctagtgctattatccaactttatcttcaactatagcatacatttgttgagtgcccattatatatctcacacaagtaggttataggaaaacaagatagattcaagttagtccctgaaagtttctatgttccaggcaattttatatgatgacaaaggagcatgtttggagagtctgtttcttaaatgccttgaggtgaaacctggagatgacttagaaagtgatcgatacttaatcacagttgaagaggttaaagttgctggagccataggtattgttaagcagaatgtcaataaagaagcaccagagttaaattcaaggacatttatatcctctggccgatctcttggatgtcagccctctggcttaaaaaggaagtttactggttttcaaggaccacgtcaggttccaaagaaaatggttattatggaaagtggtgaatcagctgcatcacatgaggctaagaaaactggccctactattttttctccattctgcagcatgcctcctttgtttcctactgttggcaagaaagatgtaaataatatactggcagaccctgagaacattgtgacttacaagaacagggagagaaatgccatggatttttcttcggttttttctccatccttccagattaacccagaagtgctgtgtgaagaaaattatttttgctcacctgtcaattctggaaataagctttcagactctttactgaccaatgagcctgtgaaaagagatagtttggcatctcactattcaggagtttcacaaaacatcagaagcaaagcacagatattagctcttctgaagtccgaatcatctagttcatgtgaggaactaaattctgagatgacagagcattttcctcaaaaacaaccacaaggaagtttaaaaattgctactaaaccaaagtacctaattcaacaggaagagtgtgctgagatgaagagcacagaaaatttatactaccagcatcaatcagaaaataccatgagaaataaaagccggtgggccatgtatttatcctcacagagttcacctatacattcttctactgtagatgggaatgatacagaaaggaaacccaaggcccaggaagatgatgtaaattctaatttgaaagacctttcattacaaaaaattatacagttcgttgaaacgtatgctgaagagaggaaaaagtataatgtagaccagtcagtcggtaataatgatccatcctggaatcaggaagtaaaattagaaattccttcattcaatgaaagcagtagcttacaggttacttgtagcagtgcagaaaatgatggtatattatcagaatctgacattcaagaagataataaaataccttttaatcaaaatgacaaggggtgcattaaaggatcagttctcattaaagaaaatgctcaggaggtaaatacatgtggaacactggaaaaggagtatgaacaatcagagtcatctctgccagaactgaaacatctccaaattgaatctagtaataattctaggatctctgatgacattacagacatgatttctgaaagtaaaatggataatgaaagtcttaatagtattcatgaatctctgagtaatgtaacacaaccatttttggaggtaacttttaatctgaacaattttgagaccagtgacactgaggaggaatcacaggaaagcaacaaaatttcccaggattcagagagttgggtaaaggacattttggttaatgatggcaattcatgttttcaaaagaggtctgagaatacaaactgtgaagagattgagggtgaacatttgccattcttaacatctgttagtgacaaacctacagtgacatttcctgttaaagagactctgccatcacagttttgtgataaaacttatgtgggttttgacatgggaatatgtaaaactgaaaacacaggaaaagaaatagaggagtatagtgacacattaagcaattttgaatctttcaagtggactgatgctgtatacggagataataaagaagatgctaataaacctattcaagaagtcagaattaactatgattttgctttacccccgaataaatctaaaggtataaacatgaatttacatattcctcatattcaaaaccagattgctgaaaacagtaatctattttcagaagatgctcaacctcagccttttattttgggaagtgacttagacaaaaatgatgaacatgttttaccctcaacttctagtagtgacaacagtgtccaactattaaataccaatcagaatcactatgaatgtattgcacttgataaatcaaatacccacatttccaattctttgttttacccactgggaaaaaagcatcttatttccaaagacacagaagcacatatatctgaacctgaagatttgggaaagattagaagtccaccccctgaccatgttgaggttgaaactgccagagaaggcaaacaatactggaatcctagaaattcttcagaactttctggattagtaaataccatttctattttaaagtcgctatgtgaacacagtactgctttagacagcttggaaatattgaaaaagaaaaatactgtctttcagcaaggaactcaacagacgtatgagccagatagccctcctgaagtgaggaaaccatttattacagtagtttcaccaaagtctcctcatctgcacaaggattctcaacagaaaacagtgaagaaaaaaataaaacctaccctgcctctcagaatatttattaatgtttccagatttttttgtgtccagttaaaaaaaatggttagattgatgtatataaatagttttatatcctttccccttaatatcgttgtattatcttacattattaataattcttcttaaacatactttttaaaagttatttaccatccatcctatggctatcttgtgctttggacaaatagttctctgttttggtcatttaaataatttccagcattttgctattataagtaacactttaataaatgtttttacacat

SEQ ID NO: 204555 - DNA, 794 bp, Homo sapiens
  Payload ID: 20347
  Gene Name: zinc finger, GRF-type containing 1
  ENST ID: ENST00000503172
  CDS Start-End: 271-794
gttgtttcgcgggagaaattcgaaagtggattttgtgcaatttgacaggtgaggtgaagtgtttctcgggatttcctaggaatgacttgagcgatttggggcgaagggacgaaagactctgctccttaagaagagaaccgggaaggatgctgtttggaaccaggattggggtggtcgcagtcacagctactcggactgcttgtagtggtataaatagttgaatatttcctattttctggacccagctggtttataacttcagaagaaataatggaaagccaagaatttattgttctatatactcatcaaaagatgaagaagtcaaaagtgtggcaagatggaattctgaagatcactcacttaggaaacaaagcaattttatatgatgacaaaggagcatgtttggagagtctgtttcttaaatgccttgaggtgaaacctggagatgacttagaaagtgatcgatacttaatcacagttgaagaggttaaagttgctggagccataggtattgttaagcagaatgtcaataaagaagcaccagagttaaattcaaggacatttatatcctctggccgatctcttggatgtcagccctctggcttaaaaaggaagtttactggttttcaaggaccacgtcaggttccaaagaaaatggttattatggaaagtggtgaatcagctgcatcacatgaggctaagaaaactggccctactattttttctccattctgcagcatgcctcctttgtttcctactgttggcaagaaagatgtaaataatatactggcaga

SEQ ID NO: 204556 - DNA, 4589 bp, Homo sapiens
  Payload ID: 20347
  Gene Name: zinc finger, GRF-type containing 1
  ENST ID: ENST00000473015
  CDS Start-End: 120-2927
gtcacgttgtttcgcgggagaaattcgaaagtggattttgtgcaatttgacaggtggtataaatagttgaatatttcctattttctggacccagctggtttataacttcagaagaaataatggaaagccaagaatttattgttctatatactcatcaaaagatgaagaagtcaaaagtgtggcaagatggaattctgaagatcactcacttaggaaacaaagcaattttatatgatgacaaaggagcatgtttggagagtctgtttcttaaatgccttgaggtgaaacctggagatgacttagaaagtgatcgatacttaatcacagttgaagaggttaaagttgctggagccataggtattgttaagcagaatgtcaataaagaagcaccagagttaaattcaaggacatttatatcctctggccgatctcttggatgtcagccctctggcttaaaaaggaagtttactggttttcaaggaccacgtcaggttccaaagaaaatggttattatggaaagtggtgaatcagctgcatcacatgaggctaagaaaactggccctactattttttctccattctgcagcatgcctcctttgtttcctactgttggcaagaaagatgtaaataatatactggcagaccctgagaacattgtgacttacaagaacagggagagaaatgccatggatttttcttcggttttttctccatccttccagattaacccagaagtgctgtgtgaagaaaattatttttgctcacctgtcaattctggaaataagctttcagactctttactgaccaatgagcctgtgaaaagagatagtttggcatctcactattcaggagtttcacaaaacatcagaagcaaagcacagatattagctcttctgaagtccgaatcatctagttcatgtgaggaactaaattctgagatgacagagcattttcctcaaaaacaaccacaaggaagtttaaaaattgctactaaaccaaagtacctaattcaacaggaagagtgtgctgagatgaagagcacagaaaatttatactaccagcatcaatcagaaaataccatgagaaataaaagccggtgggccatgtatttatcctcacagagttcacctatacattcttctactgtagatgggaatgatacagaaaggaaacccaaggcccaggaagatgatgtaaattctaatttgaaagacctttcattacaaaaaattatacagttcgttgaaacgtatgctgaagagaggaaaaagtataatgtagaccagtcagtcggtaataatgatccatcctggaatcaggaagtaaaattagaaattccttcattcaatgaaagcagtagcttacaggttacttgtagcagtgcagaaaatgatggtatattatcagaatctgacattcaagaagataataaaataccttttaatcaaaatgacaaggggtgcattaaaggatcagttctcattaaagaaaatgctcaggaggtaaatacatgtggaacactggaaaaggagtatgaacaatcagagtcatctctgccagaactgaaacatctccaaattgaatctagtaataattctaggatctctgatgacattacagacatgatttctgaaagtaaaatggataatgaaagtcttaatagtattcatgaatctctgagtaatgtaacacaaccatttttggaggtaacttttaatctgaacaattttgagaccagtgacactgaggaggaatcacaggaaagcaacaaaatttcccaggattcagagagttgggtaaaggacattttggttaatgatggcaattcatgttttcaaaagaggtctgagaatacaaactgtgaagagattgagggtgaacatttgccattcttaacatctgttagtgacaaacctacagtgacatttcctgttaaagagactctgccatcacagttttgtgataaaacttatgtgggttttgacatgggaatatgtaaaactgaaaacacaggaaaagaaatagaggagtatagtgacacattaagcaattttgaatctttcaagtggactgatgctgtatacggagataataaagaagatgctaataaacctattcaagaagtcagaattaactatgattttgctttacccccgaataaatctaaaggtataaacatgaatttacatattcctcatattcaaaaccagattgctgaaaacagtaatctattttcagaagatgctcaacctcagccttttattttgggaagtgacttagacaaaaatgatgaacatgttttaccctcaacttctagtagtgacaacagtgtccaactattaaataccaatcagaatcactatgaatgtattgcacttgataaatcaaatacccacatttccaattctttgttttacccactgggaaaaaagcatcttatttccaaagacacagaagcacatatatctgaacctgaagatttgggaaagattagaagtccaccccctgaccatgttgaggttgaaactgccagagaaggcaaacaatactggaatcctagaaattcttcagaactttctggattagtaaataccatttctattttaaagtcgctatgtgaacacagtactgctttagacagcttggaaatattgaaaaagaaaaatactgtctttcagcaaggaactcaacagacgtatgagccagatagccctcctgaagtgaggaaaccatttattacagtagtttcaccaaagtctcctcatctgcacaaggattctcaacagatactaaaagaagatgaagttgaactaagtgaaccacttcagtctgtgcagttctcttcctcgggaagtaaagaagagactgcttttcaagctgttattcctaaacaaatagagagaaaaacctgtgaccctaagggatgaaaaaatcccgttctctggagaatgagaaccttcaaaggctttcattattaagtagaacccaggttccacttattactttgccacgtactgatgggccacctgacttagactctcattcgtatatgatcaactctaacacatacgagtcttctggctcccccatgctcaatttgtgtgaaaagtcagcagttctttcgtttagcattgagcctgaggaccaaaatgaaacctttttctctgaagaatctagggaagtgaatccaggggatgtttcacttaataatatatctactcagagcaagtggctgaaatatcaaaacacatcccaatgcaacgtggctactccaaacagagttgataagagaataactgatggcttctttgctgaggctgtttctgggatgcattttagagacacaagtgaaagacagagtgatgctgtcaatgaaagctctttagactctgtgcatttgcaaatgataaaaggcatgctctatcaacagcggcaggattttagcagtcaagattcggtttccagaaagaaagtactttctctgaatttaaagcagacttctaagacagaggaaattaaaaatgtattaggagggtctacctgctacaactacagtgtaaaggatttacaggagataagtggctctgagctgtgctttccaagtgggcagaaaataaaatctgcttatcttccccaaaggcaaattcacataccagctgtttttcagtctcctgctcattataagcagactttcacatcttgcctcatagaacatctaaatatattgctgtttgggttagcacaaaacctgcagaaagctctttcaaaagttgacatatcattttatacatcattgaagggagagaaactgaaaaacgcagaaaataatgtaccatcctgccatcatagtcaacctgcaaaacttgtcatggttaaaaaggaaggtccaaataagggtcgtctcttttatacatgtgatggacccaaagctgatcgatgtaaattctttaaatggcttgaggacgtgactccaggatattcaacacaggaaggagctcgacctggcatggttttaagtgatattaagagtattggcttatatttaagaagtcaaaagataccactttatgaggaatgccagcttttggtgagaaaaggatttgattttcagagaaaacagtatggcaaactaaagaagtttactactgtaaatcctgagttttataatgaaccaaaaaccaaactttatcttaagctaagtcggaaggaaagatcttcagcttatagcaaaaatgatctttgggtggtttcaaaaaccctagactttgagctggatacttttatcgcatgtagtgctttctttggaccatcatctatcaatgagatagaaatactgcctttgaaaggctatttcccttctaattggcccactaacatggttgtccatgcgttattggtttgtaatgctagcacagaactgactactttgaaaaacattcaggactactttaatccagctactctacctctaacacagtacctgttaacaacgtaagtcattttttacctttgagtcattggtattaaaaaatggtaatcagaagtaaatatgaaaattcaataaaagtacagtatataaatgttgccaa

SEQ ID NO: 204557 - DNA, 2176 bp, Homo sapiens
  Payload ID: 20347
  Gene Name: zinc finger, GRF-type containing 1
  Uniprot ID: Q86YA3
  ENST ID: ENST00000612287
  CDS Start-End: 1254-1973
ggttttaagtgatattaagagtattggcttatatttaagaagtcaaaagataccactttatgaggaatgccagcttttggtgagaaaaggatttgattttcagagaaaacagtatggcaaactaaagaagtttactactgtaaatcctgagttttataatgaaccaaaaaccaaactttatcttaagctaagtcggaaggaaagatcttcagcttatagcaaaaatgatctttgggtggtttcaaaaaccctagactttgagctggatacttttatcgcatgtagtgctttctttggaccatcatctatcaatgagatagaaatactgcctttgaaaggctatttcccttctaattggcccactaacatggttgtccatgcgttattggtttgtaatgctagcacagaactgactactttgaaaaacattcaggactactttaatccagctactctacctctaacacagtacctgttaacaacgtcttcgccaactatagttagtaacaaaagagtcagtaagagaaaatttatcccaccagccttcacaaatgtcagtacaaaatttgaactactcagcctaggagcaacattgaagttagctagtgagttgattcaggtacacaagttaaacaaggatcaagctacagctctaattcaaatagctcaaatgatggcatcacatgaaagcattgaagaagtgaaggaactgcaaactcataccttccctatcacaatcatacatggtgtgtttggagcaggaaagagttacttgctggcagtggtgattttgttctttgtacagctgtttgaaaagagtgaagctcccaccattggaaatgcaaggccgtggaaacttctgatttcttcttctactaatgtggctgttgacagagtacttcttgggcttctcagtcttggatttgaaaactttatcagagttgggagtgttaggaagattgccaaaccaattttaccttatagcttgcatgctggctcagaaaatgaaagtgaacagttaaaagaactacatgcactaatgaaagaagacctgactcctacggaaagagtctatgtgagaaaaagcattgagcagcataaactggggaccaatagaaccctgctgaagcaggtttgagtgtgaaaagctgattcttgttggggatcccaaacagctacctcctactattcagggttctgatgcagctcatgaaaatggattggaacaaactctttttgatcgactttgcttaatgggtcacaagccaattctattgagaactcaataccgttgtcatcctgcaatcagtgctattgctaatgatctgttttacaaaggagccctcatgaatggtgtaacagaaatagagcggagccctttattggaatggctaccaaccctgtgtttttataatgttaaaggactagaacagatagaaagagataacagctttcataatgtggcagaagctacgtttacactcaagctgattcaatcactgattgcaagtggaatagcaggctctatgattggtgtgataacattatacaaatcccagatgtacaagctttgtcatttactcagtgctgtggactttcaccatcctgatattaaaactgtgcaggtgtccacagtagatgcttttcagggagctgaaaaggagatcattattctgtcctgtgtaaggacaagacaagtaggattcattgattcagaaaaaagaatgaatgttgcattgactagaggaaagaggcatttgttgattgtgggaaatttagcctgtttgaggaaaaatcaactttggggacgagtgatccaacactgcgaaggaagggaagatggattgcaacatgcaaaccagtatgaaccacagctgaaccatctccttaaagattattttgaaaaacaagtggaagaaaaacagaagaaaaagagtgaaaaagagaaatctaaagataaatctcattcataaaaagacatggtgtaaatattttgtatttatgtaaattcagactcattttacatgatatattttttatatttttattactctaaaccctcttattaaaaatatgatatttaaataacatagtaaacacatgtaaaaattttgttcttcaaaaaagtgtacaaaaggtagtataaaatcctactaataaaaataagcttttttct

SEQ ID NO: 204558 - DNA, 1225 bp, Homo sapiens
  Payload ID: 20348
  Gene Name: zinc finger, HIT-type containing 1
  Uniprot ID: O43257
  ENST ID: ENST00000305105
  CDS Start-End: 529-993
gagagtgcgggcggaagacggggagagcgagaggctggcggcgacagggagggaggaagcctaggagtccgccgcgggacggaggcctgggggaactgggagttcagctttctgcagagggccactaggaacctcggattgcccacggaagccagccactttctttgacagtccagcccacctcctcttctgcccggagaagctccaggggctgcctttgtgatcacagcatcttcacaaggaccaaaggaaaataagatttcttgtaagaacaccgtgaccacatctttaaaatgacccatttcgtggctcccacaagatttacacctccacactgaggccggaagtggttttgcccctataaaacatggcgaaaagctttcttgtctccaaggaaacgccacgtaatgagtcaaagctgtggcgcacgcgcagaagtacaagctaccggaagtgatggcgcccctactaaagccttggggttagtacgcgtgcgcagcagtttcttccgacagttgtgttgtgccaatggtggagaagaaaacttcggttcgctcccaggaccccgggcagcggcgggtgctggaccgggctgcccggcagcgtcgcatcaaccggcagctggaggccctggagaatgacaacttccaggatgacccccacgcgggactccctcagctcggcaagagactgcctcagtttgatgacgatgcggacactggaaagaaaaagaagaaaacccgaggtgatcattttaaacttcgcttccgaaaaaactttcaggccctgttggaggagcagaacttgagtgtggccgagggccctaactacctgacggcctgtgcgggacccccatcgcggccccagcgccccttctgtgctgtctgtggcttcccatccccctacacctgtgtcagctgcggtgcccggtactgcactgtgcgctgtctggggacccaccaggagaccaggtgtctgaagtggactgtgtgagcctgggcattcccagagaggaagggccgctgtgcactgcccggccttcagaaagacagaatttcatcacccaatgcagggggagctcttcctggaccaagggaggagccgctcattcacccaacaaaactgtgtcttatctgccaggaaagaccagcctcactcctgggaactgtctggcaggtaggctgggccccccagtgctgttagaataaaaagcctcgtgccggaa

SEQ ID NO: 204559 - DNA, 1306 bp, Homo sapiens
  Payload ID: 20349
  Gene Name: zinc finger, HIT-type containing 2
  Uniprot ID: Q9UHR6
  ENST ID: ENST00000310597
  CDS Start-End: 56-1267
aagtttcgaactaccaccggcgtgcgttcgcaggtagatcgcggtgccagttgccatggagccggccgggccctgtggcttctgcccggcgggggaggtccagccagcgcgttacacctgccctcgctgtaatgcgccctactgctcgctgcgctgctaccggacgcatggcacctgcgcagaaaacttctaccgtgaccaggtgctgggagagctccgcggttgcagcgctcctcccagccgcctagcaagcgccctacgccggctgcgtcagcaacgcgagaccgaggacgagcctggggaagcaggcctcagctccggcccggcgcccggcggcctatcgggactctgggagcggctggcgccgggcgaaaaagctgccttcgagcggctgctgagccgcggtgaggccgggcggctgctgcctccatggcggccgtggtggtggaaccgcggagccggaccgcagcttctggaggagctggataatgccccgggtagtgacgccgcggagctggagctcgcccctgcgaggaccccgccggattctgtgaaagatgcctccgccgcggagcccgcggccgccgagcgggttcttggagatgtcccgggggcctgcacgcccgtcgtacccacccgcatccccgcgatagtcagcctgagccgcggcccagtctcgccgctcgtgcgcttccagctgcccaatgtgctgttcgcctacgcgcatactctcgccctgtatcacggcggtgacgacgcgctgctctctgacttctgtgccacactgctcggcgtttccggagccctgggtgcccagcaagtcttcgcctctgcggaagaagccctgcaggcggcagcccacgtgctggaagcaggcgagcacccgccggggcccctgggcacacgaggggctatgcacgaggtcgcccgcatcctgctgggcgagggcccgaccaaccagaaaggctacacgctggcagcactgggggacctggcacagaccctgggccgtgcccggaaacaggccgtggctagagaagagcgagatcatctttaccgggcccggaaaaagtgccagttcctcctggcctggaccaacgaaaatgaggcggccctcacacccctggccctagactgcgccagggctcaccaagcccatgctgtggtagccgaggaggtggccgccctcactggggagctggagcggctttggggaggccccgtgccacctgccccaagaactctcattgaggagctccctagctgaacgggttaccctggtcattaataaagctgtgactggtca

SEQ ID NO: 204560 - DNA, 579 bp, Homo sapiens
  Payload ID: 20349
  Gene Name: zinc finger, HIT-type containing 2
  ENST ID: ENST00000528598
  CDS Start-End: 21-579
agatcgcggtgccagttgccatggagccggccgggccctgtggcttctgcccggcgggggaggtccagccagcgcgttacacctgccctcgctgtaatgcgccctactgctcgctgcgctgctaccggacgcatggcacctgcgcagaaaacttctaccgtgaccagctgcccaatgtgctgttcgcctacgcgcatactctcgccctgtatcacggcggtgacgacgcgctgctctctgacttctgtgccacactgctcggcgtttccggagccctgggtgcccagcaagtcttcgcctctgcggaagaagccctgcaggcggcagcccacgtgctggaagcaggcgagcacccgccggggcccctgggcacacgaggggctatgcacgaggtcgcccgcatcctgctgggcgagggcccgaccaaccagaaaggctacacgctggcagcactgggggacctggcacagaccctgggccgtgcccggaaacaggccgtggctagagaagagcgagatcatctttaccgggcccggaaaaagtgccagttcctcctggcctggaccaacgaaaatgagg

SEQ ID NO: 204561 - DNA, 567 bp, Homo sapiens
  Payload ID: 20350
  Gene Name: zinc finger, HIT-type containing 3
  ENST ID: ENST00000622312
  CDS Start-End: 7-129
aaaaccatggcgtcgctcaaatgtagcaccgtcgtctgcgtgatctgcttggagaagcccaaataccgctgtccagcctgccgcgtgccctatgcaaccctgaaactcgtcctgttgagaaaaaaataagatcagctcttcctaccaaaaccgtaaagcctgtggaaaacaaagatgatgatgactctatagctgattttctcaatagtgatgaggaagaagacagagtttctttgcagaatttaaagaatttagatggactctcgtcctgtcacccaggctggagtgcagcggcgcaatctcggctcactgcaacctctccctcccagattcaagcaattctcatgcctcagcctcccgagcagctgggactacaggcgcctgccactacgcccaaccaatttttgtatttttagtagagatggggtttcgccatgttggccaggctggtcttgaactcctgacctcaggtgatacacccgcctcgacttcccaaagtactgggattataggcgtgagccaccgctccaggccctaagctaaactttcatcacctcctgctcctga

SEQ ID NO: 204562 - DNA, 834 bp, Homo sapiens
  Payload ID: 20350
  Gene Name: zinc finger, HIT-type containing 3
  Uniprot ID: Q15649
  ENST ID: ENST00000619649
  CDS Start-End: 6-452
aaaccatggcgtcgctcaaatgtagcaccgtcgtctgcgtgatctgcttggagaagcccaaataccgctgtccagcctgccgcgtgccctactgctcggtagtctgcttccggaagcacaaagaacagtgcaaccctgaaactcgtcctgttgagaaaaaaataagatcagctcttcctaccaaaaccgtaaagcctgtggaaaacaaagatgatgatgactctatagctgattttctcaatagtgatgaggaagaagacagagtttctttgcagaatttaaagaatttagatggactctcgtcctgtcacccaggctggagtgcagcggcgcaatctcggctcactgcaacctctccctcccagattcaagcaattctcatgcctcagcctcccgagcagctgggactacaggcgcctgccactacgcccaaccaatttttgtatttttagtagagatggggtttcgccatgttggccaggctggtcttgaactcctgacctcaggtgatacacccgcctcgacttcccaaagtactgggattataggcgtgagccaccgctccaggccctaagctaaactttcatcacctcctgctcctgactcatctaaagccttggttctcacagtgtggttcatggagcatcagaatcagctgggagcttgctagaaacgcagcattgcatttggaaatgggactagaagatttagagatgctgaaataattagaagcagtttttaaaaagataaagggctctggaagattcccagttataacaaaataaataatccaaacctgcagctgattgggacatgcagccctctggtttaccc

SEQ ID NO: 204563 - DNA, 834 bp, Homo sapiens; identical to SEQ ID NO: 204562
  Payload ID: 20350
  Gene Name: zinc finger, HIT-type containing 3
  Uniprot ID: Q15649
  ENST ID: ENST00000620324
  CDS Start-End: 6-452

SEQ ID NO: 204564 - DNA, 926 bp, Homo sapiens
  Payload ID: 20350
  Gene Name: zinc finger, HIT-type containing 3
  ENST ID: ENST00000619730
  CDS Start-End: 379-507
gggcgtgcacgcgggcgcggctgcgtgagaggcgcgcggcggcgcagtgaacagtctccttccacaaaaccatggcgtcgctcaaatgtagcaccgtcgtctgcgtgatctgcttggagaagcccaaataccgctgtccagcctgccgcgtgccctaaacagtgcaaccctgaaactcgtcctgttgagaaaaaaataagatcagctcttcctaccaaaaccgtaaagcctgtggaaaacaaagatgatgatgactctatagctgattttctcaatagtgatgaggaagaagacagagtttctttgcagaatttaaagaatttaggggaatctgcaacattaagaagcttattgctcaatccacacctcaggcagttgatggtcaacctcgatcagggagaagacaaagcaaagctcatgagagcttacatgcaagagcctttgtttgtggagtttgcagactgctgtttaggaattgtggagccatcccagaatgaggagtcttaagatggattattgtgctgcttgctcaagcgtgtgcttgactcctggaacctgcctgctccctctcccagaccagctagtttggggctggggagctcaggcaaaagaggtttccaggatgcagattaggtcatgcaggcctttaccggcattgatgtggctcatgtttcaggcagacttggggtccttaaggtggcaagtcctttatggagagaaaacttgacattcagatgattgtttttaaatgttttacttttggtacagttgatagacatcataaacgatatcaagcttacacttcatatggagttaaacttggtcagtgttaataaaatcaaaacgtgattctactgtacattgcattattcataatttaattgtttgaaattacattaaataaatcaactaattaaatactaaag

SEQ ID NO: 204565 - DNA, 951 bp, Homo sapiens
  Payload ID: 20350
  Gene Name: zinc finger, HIT-type containing 3
  Uniprot ID: Q15649
  ENST ID: ENST00000620508
  CDS Start-End: 66-533
gcacgcgggcgcggctgcgtgagaggcgcgcggcggcgcagtgaacagtctccttccacaaaaccatggcgtcgctcaaatgtagcaccgtcgtctgcgtgatctgcttggagaagcccaaataccgctgtccagcctgccgcgtgccctactgctcggtagtctgcttccggaagcacaaagaacagtgcaaccctgaaactcgtcctgttgagaaaaaaataagatcagctcttcctaccaaaaccgtaaagcctgtggaaaacaaagatgatgatgactctatagctgattttctcaatagtgatgaggaagaagacagagtttctttgcagaatttaaagaatttaggggaatctgcaacattaagaagcttattgctcaatccacacctcaggcagttgatggtcaacctcgatcagggagaagacaaagcaaagctcatgagagcttacatgcaagagcctttgtttgtggagtttgcagactgctgtttaggaattgtggagccatcccagaatgaggagtcttaagatggattattgtgctgcttgctcaagcgtgtgcttgactcctggaacctgcctgctccctctcccagaccagctagtttggggctggggagctcaggcaaaagaggtttccaggatgcagattaggtcatgcaggcctttaccggcattgatgtggctcatgtttcaggcagacttggggtccttaaggtggcaagtcctttatggagagaaaacttgacattcagatgattgtttttaaatgttttacttttggtacagttgatagacatcataaacgatatcaagcttacacttcatatggagttaaacttggtcagtgttaataaaatcaaaacgtgattctactgtacattgcattattcataatttaattgtttgaaattacattaaataaatcaactaattaaatactaaa

SEQ ID NO: 204566 - DNA, 616 bp, Homo sapiens
  Payload ID: 20350
  Gene Name: zinc finger, HIT-type containing 3
  ENST ID: ENST00000616269
  CDS Start-End: 1-272
tctgcgtgatctgcttggagaagcccaaataccgctgtccagcctgccgcgtgccctactgctcggtagtctgcttccggaagcacaaaggggaatctgcaacattaagaagcttattgctcaatccacacctcaggcagttgatggtcaacctcgatcagggagaagacaaagcaaagctcatgagagcttacatgcaagagcctttgtttgtggagtttgcagactgctgtttaggaattgtggagccatcccagaatgaggagtcttaagatggattattgtgctgcttgctcaagcgtgtgcttgactcctggaacctgcctgctccctctcccagaccagctagtttggggctggggagctcaggcaaaagaggtttccaggatgcagattaggtcatgcaggcctttaccggcattgatgtggctcatgtttcaggcagacttggggtccttaaggtggcaagtcctttatggagagaaaacttgacattcagatgattgtttttaaatgttttacttttggtacagttgatagacatcataaacgatatcaagcttacacttcatatggagttaaacttggtcagtgttaataaaatcaaaacgtgatt

SEQ ID NO: 204567 - DNA, 494 bp, Homo sapiens
  Payload ID: 20350
  Gene Name: zinc finger, HIT-type containing 3
  ENST ID: ENST00000612494
  CDS Start-End: 458-494
tgcagccttgacacactgggcttaagggatcctcctgcctcagcctcccaagtagctgagaccacatgtgtgtaccaccatgcctggatgattttttttattttctgtagagacatagtcttgctaggttgcccaggctggtctcaaactcctgggctcaagtgatcctcccaccttggcctccgaatgttaggattacaggcgtgagccagcacagctggccttctgttgactctaacagtgcaaccctgaaactcgtcctgttgagaaaaaaataagatcagctcttcctaccaaaaccgtaaagcctgtggaaaacaaagatgatgatgactctatagctgattttctcaatagtgatgaggaagaagacagagtttctttgcagaatttaaagaatttaggggaatctgcaacattaagaagcttattgctcaatccacacctcaggcagttgatggtcaacctcgatcagggagaagacaaagcaaagc

SEQ ID NO: 204568 - DNA, 616 bp, Homo sapiens; identical to SEQ ID NO: 204566
  Payload ID: 20350
  Gene Name: zinc finger, HIT-type containing 3
  ENST ID: ENST00000613198
  CDS Start-End: 1-272

SEQ ID NO: 204569 - DNA, 881 bp, Homo sapiens
  Payload ID: 20350
  Gene Name: zinc finger, HIT-type containing 3
  ENST ID: ENST00000620863
  CDS Start-End: 1-129
atggcgtcgctcaaatgtagcaccgtcgtctgcgtgatctgcttggagaagcccaaataccgctgtccagcctgccgcgtgccctactgctcggtagtctgcttccggaagcacaaagtgcaaccctgaaactcgtcctgttgagaaaaaaataagatcagctcttcctaccaaaaccgtaaagcctgtggaaaacaaagatgatgatgactctatagctgattttctcaatagtgatgaggaagaagacagagtttctttgcagaatttaaagaatttaggggaatctgcaacattaagaagcttattgctcaatccacacctcaggcagttgatggtcaacctcgatcagggagaagacaaagcaaagctcatgagagcttacatgcaagagcctttgtttgtggagtttgcagactgctgtttaggaattgtggagccatcccagaatgaggagtcttaagatggattattgtgctgcttgctcaagcgtgtgcttgactcctggaacctgcctgctccctctcccagaccagctagtttggggctggggagctcaggcaaaagaggtttccaggatgcagattaggtcatgcaggcctttaccggcattgatgtggctcatgtttcaggcagacttggggtccttaaggtggcaagtcctttatggagagaaaacttgacattcagatgattgtttttaaatgttttacttttggtacagttgatagacatcataaacgatatcaagcttacacttcatatggagttaaacttggtcagtgttaataaaatcaaaacgtgattctactgtacattgcattattcataatttaattgtttgaaattacattaaataaatcaactaattaaatactaaa

SEQ ID NO: 204570 - DNA, 505 bp, Homo sapiens
  Payload ID: 20350
  Gene Name: zinc finger, HIT-type containing 3
  ENST ID: ENST00000622013
  CDS Start-End: 418-505
cttgacacactgggcttaagggatcctcctgcctcagcctcccaagtagctgagaccacatgtgtgtaccaccatgcctggatgattttttttattttctgtagagacatagtcttgctaggttgcccaggctggtctcaaactcctgggctcaagtgatcctcccaccttggcctccgaatgttaggattacaggcgtgagccagcacagctggccttctgttgactctaacagtgcaaccctgaaactcgtcctgttgagaaaaaaataagatcagctcttcctaccaaaaccgtaaagcctgtggaaaacaaagtgatgaggaagaagacagagtttctttgcagaatttaaagaatttaggggaatctgcaacattaagaagcttattgctcaatccacacctcaggcagttgatggtcaacctcgatcagggagaagacaaagcaaagctcatgagagcttacatgcaagagcctttgtttgtggagtttgcagactgct

SEQ ID NO: 204571 - DNA, 951 bp, Homo sapiens; identical to SEQ ID NO: 204565
  Payload ID: 20350
  Gene Name: zinc finger, HIT-type containing 3
  Uniprot ID: Q15649
  ENST ID: ENST00000617429
  CDS Start-End: 66-533

SEQ ID NO: 204572 - DNA, 505 bp, Homo sapiens; identical to SEQ ID NO: 204570
  Payload ID: 20350
  Gene Name: zinc finger, HIT-type containing 3
  ENST ID: ENST00000634200
  CDS Start-End: 418-505

SEQ ID NO: 204573 - DNA, 926 bp, Homo sapiens; identical to SEQ ID NO: 204564
  Payload ID: 20350
  Gene Name: zinc finger, HIT-type containing 3
  ENST ID: ENST00000631862
  CDS Start-End: 379-507

SEQ ID NO: 204574 - DNA, 567 bp, Homo sapiens; identical to SEQ ID NO: 204561
  Payload ID: 20350
  Gene Name: zinc finger, HIT-type containing 3
  ENST ID: ENST00000632245
  CDS Start-End: 7-129

SEQ ID NO: 204575 - DNA, 494 bp, Homo sapiens; identical to SEQ ID NO: 204567
  Payload ID: 20350
  Gene Name: zinc finger, HIT-type containing 3
  ENST ID: ENST00000633117
  CDS Start-End: 458-494

SEQ ID NO: 204576 - DNA, 881 bp, Homo sapiens; identical to SEQ ID NO: 204569
  Payload ID: 20350
  Gene Name: zinc finger, HIT-type containing 3
  ENST ID: ENST00000633937
  CDS Start-End: 1-129

SEQ ID NO: 204577 - DNA, 2797 bp, Homo sapiens
  Payload ID: 20351
  Gene Name: zinc finger, HIT-type containing 6
  Uniprot ID: Q9NWK9
  ENST ID: ENST00000370574
  CDS Start-End: 135-1547
gctattccgggtttgtggctgcttggctccacacgtgggccgccgtaggtattccgaccggtaattcctcctattggtgtgcagcagccacattgaaggatagagtggcagcagaggccaaggatcgtgagttgatggagtttgctgctgaaaatgaagggaagtctgggggaggtctccacagcgtagctgagggggtgcggctaagtccagagcctggcagggagggagtaagggacttagcaggggcggaggagttcggcggcggagaggaggggacagggctgacagggataaaggagataggggatggagaggaaggaagtggacaaaggccagaggaaataccgatggacctaacggtagtgaagcaggaaattatagactggccaggtacagaaggcaggttggctggccagtgggtagaacaggaggtggaggataggcctgaggtgaaggatgagaacgcaggcgtattggaggtgaagcaggagacggatagtagtttagtggtaaaagaagcgaaggtgggtgaaccagaggtaaaggaagagaaggtaaaggaagaggtaatggactggtcagaagtgaaggaagagaaggataacttggagataaaacaggaggagaagtttgttggtcaatgcataaaagaggaattgatgcatggagagtgtgtaaaagaagagaaggatttcctgaagaaagaaatcgtggatgatacaaaggtgaaagaagagcctccgataaatcacccggtgggctgcaagcggaaactggccatgtcaaggtgtgagacttgtggtacagaagaagcaaagtacagatgtccacgttgtatgcgatattcctgcagtttgccctgtgtaaagaaacacaaagcagaactgacatgtaatggagttcgagataaaactgcatacatttcaatacaacagtttactgaaatgaatctcctaagtgattatcgatttttggaagatgtggcaagaacagcggaccatatttctagagatgcttttttgaagagaccaataagcaataaatatatgtactttatgaaaaatcgtgcccggaggcaaggtattaacttaaaacttctacccaatggattcaccaagaggaaggagaattcaaccttttttgataagaaaaaacaacagttttgttggcatgtgaagctccagtttcctcaaagtcaagctgagtacatagaaaaaagagtaccagatgataaaactattaatgaaatcctaaaaccttacattgatcctgaaaagtctgatcctgtaattcgtcaaaggttgaaagcctacattcgctctcagactggggttcagattttaatgaagattgaatatatgcagcaaaatttagtaagatattatgaactagatccttataaaagtctcctagacaatttgaggaacaaagtgatcattgagtatccaacattacatgtggtattgaaaggatccaataatgacatgaaagttcttcaccaagtgaagagtgaatctaccaagaacgttggcaatgaaaattgagcattttttctggaagaagaaagtgaaaacttccagacaactgcagcagactctgcattgatgggctgttggctgattggggtattgtcaatgggtgattggaattttttctttgtatgaaaaataagcttaactcttttaaaaaatgtattttataacctcttgaattaattgacttgtaagacccatttattcatattaagaactctcctttgcacttgatcagcatagtacttattaggccctggctttttaatatgcttaattgcttaattccataaactgaaaactttttttttcttttttctttctttttttgagatggggtcttggagtgcaagtggtatgagcatagcttcctcaaattcctgggctcgaatggtcctctcactgcagcctcccaacaggctggtaccaccacactcagctaagttttttgttgttgtttttttttggtagagacagggttgcgctctttcgcccaggctggtctcaaatttgtggcctcaagcaatccttccacctcagactccaaagcattgggattacaggcatcagccaccacacctggccttgaacattttttatttgttaatttcatgcgtgacgaaacccaaggatcacccatgtcaaccacaaagttggcattccctttagtagaacctcactaaacggaaaggctgtacaacgcaccgtctagccacaggagaactaatcttctatcagttgccctttcttctttggagtttttatgtaacttacccttgtgagacaagttttctacttgagaaactcctagtacaatgtcttatactagaagcctggataaatactattaactactgtttcttatattcacttcagaaaatcagtggctccacattgtttgagccattagtgataacaaatttggatctacttactcaagtcttatgaattctgtgcctttcatcacattcctagcccactctcatcattactgcagaagggtgttgtgatgaccagttttatactgtgttttgatatgtctagcaataacttaaagaaaaaaaaacctgggaaatcttcaacatgttattggaacatatatgtatgtattaatgtatatacatggcttaacttatacgttatggcagctctgtatacagtttgatctcatgtactgaaaaaaaattcttaattttattggagtttataccactgtgaaactgcaatatgactgtaagagagtaaaaagattgttacatcta

SEQ ID NO: 204578 - DNA, 6080 bp, Homo sapiens
  Payload ID: 20351
  Gene Name: zinc finger, HIT-type containing 6
  Uniprot ID: Q9NWK9
  ENST ID: ENST00000431532
  CDS Start-End: 150-1445
agtcgcgtcaagcaggctattccgggtttgtggctgcttggctccacacgtgggccgccgtaggtattccgaccggtaattcctcctattggtgtgcagcagccacattgaaggatagagtggcagcagaggccaaggatcgtgagttgatggagtttgctgctgaaaatgaagggaagtctgggggaggtctccacagcgtagctgagggggtgcggctaagtccagagcctggcagggagggagtaagggacttagcaggggcggaggagttcggcggcggagaggaggggacagggctgacagggataaaggagataggggatggagaggaaggaagtggacaaaggccagaggaaataccgatggacctaacggtagtgaagcaggagacggatagtagtttagtggtaaaagaagcgaaggtgggtgaaccagaggtaaaggaagagaaggtaaaggaagaggtaatggactggtcagaagtgaaggaagagaaggataacttggagataaaacaggaggagaagtttgttggtcaatgcataaaagaggaattgatgcatggagagtgtgtaaaagaagagaaggatttcctgaagaaagaaatcgtggatgatacaaaggtgaaagaagagcctccgataaatcacccggtgggctgcaagcggaaactggccatgtcaaggtgtgagacttgtggtacagaagaagcaaagtacagatgtccacgttgtatgcgatattcctgcagtttgccctgtgtaaagaaacacaaagcagaactgacatgtaatggagttcgagataaaactgcatacatttcaatacaacagtttactgaaatgaatctcctaagtgattatcgatttttggaagatgtggcaagaacagcggaccatatttctagagatgcttttttgaagagaccaataagcaataaatatatgtactttatgaaaaatcgtgcccggaggcaaggtattaacttaaaacttctacccaatggattcaccaagaggaaggagaattcaaccttttttgataagaaaaaacaacagttttgttggcatgtgaagctccagtttcctcaaagtcaagctgagtacatagaaaaaagagtaccagatgataaaactattaatgaaatcctaaaaccttacattgatcctgaaaagtctgatcctgtaattcgtcaaaggttgaaagcctacattcgctctcagactggggttcagattttaatgaagattgaatatatgcagcaaaatttagtaagatattatgaactagatccttataaaagtctcctagacaatttgaggaacaaagtgatcattgagtatccaacattacatgtggtattgaaaggatccaataatgacatgaaagttcttcaccaagtgaagagtgaatctaccaagaacgttggcaatgaaaattgagcattttttctggaagaagaaagtgaaaacttccagacaactgcagcagactctgcattgatgggctgttggctgattggggtattgtcaatgggtgattggaattttttctttgtatgaaaaataagcttaactcttttaaaaaatgtattttataacctcttgaattaattgacttgtaagacccatttattcatattaagaactctcctttgcacttgatcagcatagtacttattaggccctggctttttaatatgcttaattgcttaattccataaactgaaaactttttttttcttttttctttctttttttgagatggggtcttggagtgcaagtggtatgagcatagcttcctcaaattcctgggctcgaatggtcctctcactgcagcctcccaacaggctggtaccaccacactcagctaagttttttgttgttgtttttttttggtagagacagggttgcgctctttcgcccaggctggtctcaaatttgtggcctcaagcaatccttccacctcagactccaaagcattgggattacaggcatcagccaccacacctggccttgaacattttttatttgttaatttcatgcgtgacgaaacccaaggatcacccatgtcaaccacaaagttggcattccctttagtagaacctcactaaacggaaaggctgtacaacgcaccgtctagccacaggagaactaatcttctatcagttgccctttcttctttggagtttttatgtaacttacccttgtgagacaagttttctacttgagaaactcctagtacaatgtcttatactagaagcctggataaatactattaactactgtttcttatattcacttcagaaaatcagtggctccacattgtttgagccattagtgataacaaatttggatctacttactcaagtcttatgaattctgtgcctttcatcacattcctagcccactctcatcattactgcagaagggtgttgtgatgaccagttttatactgtgttttgatatgtctagcaataacttaaagaaaaaaaaacctgggaaatcttcaacatgttattggaacatatatgtatgtattaatgtatatacatggcttaacttatacgttatggcagctctgtatacagtttgatctcatgtactgaaaaaaaattcttaattttattggagtttataccactgtgaaactgcaatatgactgtaagagagtaaaaagattgttacatctatattgtatgtgtgtacttaatggttaaaaagcaatgataaaactggacattaatgaaattgatttttagttacagttggaataagttttttaccaaaaagaaaccagagacgttagttaaggagacttaaaaagatctgaaatatgaaaagagaatgagaagatgagcagaagataaatttgtgggacacaagtataacttggggtagaaactggagaagagaatcgaaaaacaataatgccagaaggacccttggtatgaaagtactaatggaatgtgattcatagaaagttcatagaaagtgagtccttgcaacttgagaaacatacatacatatatatttataatctctaaagcaacatcaggaatcttctaatatatgataaagaatttgtgtagaattacgttgttcacagtattattggagagacaaataagatttcaaggaattcatttataatcaaaagtgaaatgtgtcttcttgaaaccagcaagaaatagatgaattgagtgaaacgtgttgttattaggagaagtgggataacgtatacaaaaagaacttgcgatctgaatatgatctgaatatgagggtggataggaattttttgacagtgaaatctgttatgatgtagtctcatttccaagaaaagtcttgagttccatccccccttctgaatttaaattgaaacctggacagaaaacaaactatcctgtagtttccactgctcaggaggaaaaaaagaaatctatattatctaatgcatctttgccatctttattttctagaattctattagacttttcaattataggctattaggaaagaatataactcttagaattcccctaaatataattatcaactcatttgattaatatgcatattttttcccgtaagatttacaatacacgtgtgttttagtgaattaccaatggcttggagagaatgaaattggaataactaactgaaaaccctagatgtttgtagcattgagacccaatatctttttggaggccctctccatgttagcttattgtcaaattctggtgtgtaaacaaactccttgacccatgttaagttcagcatcctgcattttgttcatgaatcacattttaaaaggagaaaagctccacctggttttctttatttttttaaacagtgatttcaaagagaagataggcctttcataattgctaattatacatataggattaatagtcataaattatagtaaataaaacttgtacctattccttttataaatatgaattggctaggcacagtggctcacagctgtaatcccagcactttgggaggctgaggcgggcagatcacaaggtcaggtgtttgagactagcctggccaacatggcaaaaccctgtgtctactaaaaatacaaaaattagccaggcgtggtggcaggcacctgtaattccagctactcaggaagctggggcacgagaatcacttgaaccctggtggcagagtttgcagtgagctgagattgttccactgcattcctgggcactgcctgggtgacagaatgagactctgcctcaaaaaaaaaaaaagttattaaaaatagatatttaagattccaaaatgtagttgatccagtttgtttccctgtagcaagtagtgggatttgggtttcatgacatataattaaaatgttaatcacataactataatgccaacaattttctttatacatttttgtttaattatgttgacatatactttgtgttgtaccttatttcatgttactaaattttacataaagatgctggtctatttttatttaatcatatactgttatggtttgaatatagtttgttcctaccaaaactcatgttgaaattagattccccatgtgctagtgttgggaggcagagcctaatggaaggtgtttgggtcatgggggcagatagatcccacatgaataaactaatgccctcctactggggtgagtgagttctcattcttgctgtcgtgggaatggattagttctcacaagcaagggttactaaagagtctggctttcttgattttctcctttttgcctcctgccttcccatgtgatctctttgcacatacctactcccctttcactttgtaccaagagtggaagcaacatgagaccctcaccagatacagctgcccaatcttgagccttccagccaccagaatcatgagccaaataaaactctttttaaaaataagttacccagtcttagatattctattatagcgacacaaaatggactaagctgtactctgttgcattaaaatgtgttgtttatatgcaagtgacaaaaactcaaaatagtgtcagcatgaagggcagttcattggcttatatacagggaagtccaggcaatgactgggtcctgggtccaaacgtcaaaagcagtcatcttgccatcctacacacttggctctgattattttcttctttatggattggttttcttttcagattttccctttggggatattctgtatgggatgaggaacagtgaggtgagaggatggtggataacagcaattgacattttcagcttaccttagcataacaaggctgaaagcttttataaagcaagctatgtaaaattttggagaagtacttttattttgcccagattggatcacattccgttcctgagctaatcaagagaggaattcacccaaaggagggggaaatttttagaagaaagccagaatgtagggagcaggtgaggaaaggtagttactgggaatacgaaagtaacacattcattgcaccctgtttgaatttgagtagcaagaagtttctgatttgtactaacagaaggagtaaagttcagatttaatctgcaagtcttgattgtttttaactagagattttaatctcttcttcttattattgctgctttgagttgccattataggtttttggattttttttttaatgccatccatttttatttgacatcatgttgttgctagtttgagcagatgcacatagcatatgtttccattaccaatttggaaatttttcccagtggcatcagcatttgagagatactgattttgaaattagagtactaggggaaaatgcttcaaaaatgaagactacttaaataaaaattggctttaaataaacctttggggatctgtacttgactaaaaagtattttctttaaactttggtctttgaaaactaaagtgtgtgtgcatgtgttcattaaaatgacctataacatgaacattttccatactggagtgtgatgtactgtactcattttgaactttagaaccaaatgcatcctttagcatttgatgagctgctatataattctatttccagttttattttcttgccaaataaagtaccaaagctca

SEQ ID NO: 204579 - DNA, 2226 bp, Homo sapiens
  Payload ID: 20352
  Gene Name: zinc finger, imprinted 2
  Uniprot ID: Q9NZV7
  ENST ID: ENST00000599935
  CDS Start-End: 549-2132
ggtgcagaagtctgggcagctgcgggaggagaggtttgggaggcgcgggagatgtccaccctgggctggtggcgccgccgggcgccgggcgccatgagggtgcgctaggcggctgttcgtgcccgaggctgcgcagcactgaggtgagctttgccttcttgatcttccgtccttcttggagacgactggcgagaggaagagggactaggtccaaacgctaggtggctgggtccagatacctgtgttttgactctgttcctgtggatagctgcttggtctgaagttccagaaaggatcctgttcccagacagaggtttcggaacctaatctatgtggaatttgttgggcctcggaagaccctgatcaaactccgaaacctctgcctcgattggttgcagccggagacccgcaccaaggaggagatcatcgagctcttggtccttgagcagtacctgaccatcatccctgaaaagctcaagccttgggtgcgagcaaaaaagccggagaactgtgagaagctcgtcactctgctggagaattacaaggagatgtaccaaccagaagacgacaacaacagtgacgtgaccagcgacgacgacatgacccggaacagaagagagtcctcaccacctcactcagtccattctttcagtggtgaccgggactgggaccggaggggcagaagcagagacatggagccacgagaccgctggtcccacaccaggaacccaagaagcaggatgcctccgcgggatctttcccttcctgtggtggcgaaaacaagctttgaaatggacagagaggacgacagggactccagggcttatgagtcccgatctcaggatgctgaatcataccaaaatgtggtggacctcgctgaggacaggaaacctcacaacacaatccaggacaacatggaaaactacaggaagctgctctccctcggtttccttgctcaggactctgtccctgcagaaaagaggaacacagagatgttagacaatctgccatctgctgggtcccagttcccggacttcaaacacttaggaacatttctggtgtttgaggagttggtgaccttcgaggatgtgcttgtggacttcagcccagaggaacttagttcccttagtgctgctcagagaaacctctacagggaggtgatgctggagaattaccggaacctggtctccctggggcaccagttctctaaacctgacattatctcacgcctggaagaggaggaatcatatgcaatggagacagacagcagacatacagtgatttgtcaaggagagtctcatgatgatccattggaaccacaccagggcaaccaagagaaacttttgactcctataacaatgaatgaccccaagaccctcactccggaaagaagctatggcagtgatgaatttgagagaagctctaatcttagtaaacaatcaaaggatcctctaggaaaggatccccaggaaggcactgctcctggaatatgtacgagtccccagtcagcatcccaagagaacaaacacaacagatgtgaattttgcaaacgaacctttagtacgcaagtagcccttaggagacacgaacggatccatactgggaagaaaccctatgaatgtaaacagtgtgctgaagccttctatctcatgccacacctcaacagacatcagaagacccattctggtaggaagacttctggctgcaatgaaggtagaaagccttccgtccagtgtgcgaatctctgtgaacgtgtaagaattcacagtcaggaggactactttgaatgttttcagtgcggcaaagcttttctccagaatgtgcatcttcttcaacatctcaaagcccatgaggcagcaagagtccttcctcctgggttgtcccacagcaagacatacttaattcgttatcagcggaaacatgactacgttggagagagagcctgccagtgttgtgactgtggcagagtcttcagtcggaattcatatctcattcagcattatagaactcacactcaagagaggccttaccagtgtcagctatgtgggaaatgtttcggccgaccctcatacctcactcaacattatcaactccattctcaagagaaaactgttgagtgcgatcactgttgagaaacctttagtcacagcacacacttttctcaacattattggcttcctcctagagtgttgtgagtgtgagaaggcctttcactagccccacctt

SEQ ID NO: 204580 - DNA, 483 bp, Homo sapiens
  Payload ID: 20352
  Gene Name: zinc finger, imprinted 2
  ENST ID: ENST00000593931
  CDS Start-End: 38-238
tgagaagctcgtcactctgctggagaattacaaggagatgtaccaaccagaagacgacaacaacagtgacgtgaccagcgacgacgacatgacccggaacagaagagagtcctcaccacctcactcagtccattctttcagtggtgaccgggactgggaccggaggggcagaagcagagacatggagccacgagaccgctggtcccacaccaggaacccaagaagcagtgagtcttaaccactttctttcccagtaggagatatagagcatgtgctgtgcacaggttcaaggggaaagtgccagggcctcgaagtttctgctgctccatttggagtatattccgcttccccaaaagtttagtccaaggctcgtatttttgaagttccactcggtaccaccagcacaggtttcaccacatagacctgttgccacctaaactatttgctcagtattcttaagctggtgcattaaaaaaaaaaaaa

SEQ ID NO: 204581 - DNA, 2054 bp, Homo sapiens
  Payload ID: 20352
  Gene Name: zinc finger, imprinted 2
  ENST ID: ENST00000595671
  CDS Start-End: 212-793
cttggagacgactggcgagaggaagagggactaggtccaaacgctaggtggctgggtccagccggagacccgcaccaaggaggagatcatcgagctcttggtccttgagcagtacctgaccatcatccctgaaaagctcaagccttgggtgcgagcaaaaaagccggagaactgtgagaagctcgtcactctgctggagaattacaaggagatgtaccaaccagaagacgacaacaacagtgacgtgaccagcgacgacgacatgacccggaacagaagagagtcctcaccacctcactcagtccattctttcagtggtgaccgggactgggaccggaggggcagaagcagagacatggagccacgagaccgctggtcccacaccaggaacccaagaagcaggatgcctccgcgggatctttcccttcctgtggtggcgaaaacaagctttgaaatggacagagaggacgacagggactccagggcttatgagtcccgatctcaggatgctgaatcataccaaaatgtggtggacctcgctgaggacaggaaacctcacaacacaatccaggacaacatggaaaactacaggaagctgctctccctcggagtgcagcttgctgaagacgatggccactcccacatgacgcagggccactcatcaagatccaagagaagtgcctacccaagcaccagtcgaggtttccttgctcaggactctgtccctgcagaaaagaggaacacagagatgttagacaatctgccatctgctgggtcccaggtgggaccctgaggcttaacctacccaaactcacaaagaaccagagccaggactctgattcctgaggctgagttcccggacttcaaacacttaggaacatttctggtgtttgaggagttggtgaccttcgaggatgtgcttgtggacttcagcccagaggaacttagttcccttagtgctgctcagagaaacctctacagggaggtgatgctggagaattaccggaacctggtctccctggggcaccagttctctaaacctgacattatctcacgcctggaagaggaggaatcatatgcaatggagacagacagcagacatacagtgatttgtcaaggagagtctcatgatgatccattggaaccacaccagggcaaccaagagaaacttttgactcctataacaatgaatgaccccaagaccctcactccggaaagaagctatggcagtgatgaatttgagagaagctctaatcttagtaaacaatcaaaggatcctctaggaaaggatccccaggaaggcactgctcctggaatatgtacgagtccccagtcagcatcccaagagaacaaacacaacagatgtgaattttgcaaacgaacctttagtacgcaagtagcccttaggagacacgaacggatccatactgggaagaaaccctatgaatgtaaacagtgtgctgaagccttctatctcatgccacacctcaacagacatcagaagacccattctggtaggaagacttctggctgcaatgaaggtagaaagccttccgtccagtgtgcgaatctctgtgaacgtgtaagaattcacagtcaggaggactactttgaatgttttcagtgcggcaaagcttttctccagaatgtgcatcttcttcaacatctcaaagcccatgaggcagcaagagtccttcctcctgggttgtcccacagcaagacatacttaattcgttatcagcggaaacatgactacgttggagagagagcctgccagtgttgtgactgtggcagagtcttcagtcggaattcatatctcattcagcattatagaactcacactcaagagaggccttaccagtgtcagctatgtgggaaatgtttcggccgaccctcatacctcactcaacattatcaactccattctcaagagaaaactgttgagtgcgatcactgttgagaaacctttagtcacagcacacacttttctcaacattattggcttcctcctagagtgttgtgagtgtgagaaggcctttcactagccccacctt

SEQ ID NO: 204582 - DNA, 1965 bp, Homo sapiens
  Payload ID: 20352
  Gene Name: zinc finger, imprinted 2
  Uniprot ID: Q9NZV7
  ENST ID: ENST00000601070
  CDS Start-End: 288-1871
cttggagacgactggcgagaggaagagggactaggtccaaacgctaggtggctgggtccagatacctgtgttttgactctgttcctgtggatagctgcttggtctgaagttccagaaaggatcctgttcccagacagccggagacccgcaccaaggaggagatcatcgagctcttggtccttgagcagtacctgaccatcatccctgaaaagctcaagccttgggtgcgagcaaaaaagccggagaactgtgagaagctcgtcactctgctggagaattacaaggagatgtaccaaccagaagacgacaacaacagtgacgtgaccagcgacgacgacatgacccggaacagaagagagtcctcaccacctcactcagtccattctttcagtggtgaccgggactgggaccggaggggcagaagcagagacatggagccacgagaccgctggtcccacaccaggaacccaagaagcaggatgcctccgcgggatctttcccttcctgtggtggcgaaaacaagctttgaaatggacagagaggacgacagggactccagggcttatgagtcccgatctcaggatgctgaatcataccaaaatgtggtggacctcgctgaggacaggaaacctcacaacacaatccaggacaacatggaaaactacaggaagctgctctccctcggtttccttgctcaggactctgtccctgcagaaaagaggaacacagagatgttagacaatctgccatctgctgggtcccagttcccggacttcaaacacttaggaacatttctggtgtttgaggagttggtgaccttcgaggatgtgcttgtggacttcagcccagaggaacttagttcccttagtgctgctcagagaaacctctacagggaggtgatgctggagaattaccggaacctggtctccctggggcaccagttctctaaacctgacattatctcacgcctggaagaggaggaatcatatgcaatggagacagacagcagacatacagtgatttgtcaaggagagtctcatgatgatccattggaaccacaccagggcaaccaagagaaacttttgactcctataacaatgaatgaccccaagaccctcactccggaaagaagctatggcagtgatgaatttgagagaagctctaatcttagtaaacaatcaaaggatcctctaggaaaggatccccaggaaggcactgctcctggaatatgtacgagtccccagtcagcatcccaagagaacaaacacaacagatgtgaattttgcaaacgaacctttagtacgcaagtagcccttaggagacacgaacggatccatactgggaagaaaccctatgaatgtaaacagtgtgctgaagccttctatctcatgccacacctcaacagacatcagaagacccattctggtaggaagacttctggctgcaatgaaggtagaaagccttccgtccagtgtgcgaatctctgtgaacgtgtaagaattcacagtcaggaggactactttgaatgttttcagtgcggcaaagcttttctccagaatgtgcatcttcttcaacatctcaaagcccatgaggcagcaagagtccttcctcctgggttgtcccacagcaagacatacttaattcgttatcagcggaaacatgactacgttggagagagagcctgccagtgttgtgactgtggcagagtcttcagtcggaattcatatctcattcagcattatagaactcacactcaagagaggccttaccagtgtcagctatgtgggaaatgtttcggccgaccctcatacctcactcaacattatcaactccattctcaagagaaaactgttgagtgcgatcactgttgagaaacctttagtcacagcacacacttttctcaacattattggcttcctcctagagtgttgtgagtgtgagaaggcctttcactagccccacctt

SEQ ID NO: 204583 - DNA, 2037 bp, Homo sapiens
  Payload ID: 20352
  Gene Name: zinc finger, imprinted 2
  ENST ID: ENST00000597281
  CDS Start-End: 288-776
cttggagacgactggcgagaggaagagggactaggtccaaacgctaggtggctgggtccagatacctgtgttttgactctgttcctgtggatagctgcttggtctgaagttccagaaaggatcctgttcccagacagccggagacccgcaccaaggaggagatcatcgagctcttggtccttgagcagtacctgaccatcatccctgaaaagctcaagccttgggtgcgagcaaaaaagccggagaactgtgagaagctcgtcactctgctggagaattacaaggagatgtaccaaccagaagacgacaacaacagtgacgtgaccagcgacgacgacatgacccggaacagaagagagtcctcaccacctcactcagtccattctttcagtggtgaccgggactgggaccggaggggcagaagcagagacatggagccacgagaccgctggtcccacaccaggaacccaagaagcaggatgcctccgcgggatctttcccttcctgtggtggcgaaaacaagctttgaaatggacagagaggacgacagggactccagggcttatgagtcccgatctcaggatgctgaatcataccaaaatgtggtggacctcgctgaggacaggaaacctcacaacacaatccaggacaacatggaaaactacaggaagctgctctccctcggtttccttgctcaggactctgtccctgcagaaaagaggaacacagagatgttagacaatctgccatctgctgggtcccaggtgggaccctgaggcttaacctacccaaactcacaaagaaccagagccaggactctgattcctgaggctgagttcccggacttcaaacacttaggaacatttctggtgtttgaggagttggtgaccttcgaggatgtgcttgtggacttcagcccagaggaacttagttcccttagtgctgctcagagaaacctctacagggaggtgatgctggagaattaccggaacctggtctccctggggcaccagttctctaaacctgacattatctcacgcctggaagaggaggaatcatatgcaatggagacagacagcagacatacagtgatttgtcaaggagagtctcatgatgatccattggaaccacaccagggcaaccaagagaaacttttgactcctataacaatgaatgaccccaagaccctcactccggaaagaagctatggcagtgatgaatttgagagaagctctaatcttagtaaacaatcaaaggatcctctaggaaaggatccccaggaaggcactgctcctggaatatgtacgagtccccagtcagcatcccaagagaacaaacacaacagatgtgaattttgcaaacgaacctttagtacgcaagtagcccttaggagacacgaacggatccatactgggaagaaaccctatgaatgtaaacagtgtgctgaagccttctatctcatgccacacctcaacagacatcagaagacccattctggtaggaagacttctggctgcaatgaaggtagaaagccttccgtccagtgtgcgaatctctgtgaacgtgtaagaattcacagtcaggaggactactttgaatgttttcagtgcggcaaagcttttctccagaatgtgcatcttcttcaacatctcaaagcccatgaggcagcaagagtccttcctcctgggttgtcccacagcaagacatacttaattcgttatcagcggaaacatgactacgttggagagagagcctgccagtgttgtgactgtggcagagtcttcagtcggaattcatatctcattcagcattatagaactcacactcaagagaggccttaccagtgtcagctatgtgggaaatgtttcggccgaccctcatacctcactcaacattatcaactccattctcaagagaaaactgttgagtgcgatcactgttgagaaacctttagtcacagcacacacttttctcaacattattggcttcctcctagagtgttgtgagtgtgagaaggcctttcactagccccacctt

SEQ ID NO: 204584 - DNA, 2083 bp, Homo sapiens
  Payload ID: 20352
  Gene Name: zinc finger, imprinted 2
  Uniprot ID: Q9NZV7
  ENST ID: ENST00000593711
  CDS Start-End: 364-1947
cgggaggagaggtttgggaggcgcgggagatgtccaccctgggctggtggcgccgccgggcgccgggcgccatgagggtgcgctaggcggctgttcgtgcccgaggctgcgcagcactgaggtgagctttgccttcttgatcttccgtccttcttggagacgactggcgagaggaagagggactaggtccaaacgctaggtggctgggtccagccggagacccgcaccaaggaggagatcatcgagctcttggtccttgagcagtacctgaccatcatccctgaaaagctcaagccttgggtgcgagcaaaaaagccggagaactgtgagaagctcgtcactctgctggagaattacaaggagatgtaccaaccagaagacgacaacaacagtgacgtgaccagcgacgacgacatgacccggaacagaagagagtcctcaccacctcactcagtccattctttcagtggtgaccgggactgggaccggaggggcagaagcagagacatggagccacgagaccgctggtcccacaccaggaacccaagaagcaggatgcctccgcgggatctttcccttcctgtggtggcgaaaacaagctttgaaatggacagagaggacgacagggactccagggcttatgagtcccgatctcaggatgctgaatcataccaaaatgtggtggacctcgctgaggacaggaaacctcacaacacaatccaggacaacatggaaaactacaggaagctgctctccctcggtttccttgctcaggactctgtccctgcagaaaagaggaacacagagatgttagacaatctgccatctgctgggtcccagttcccggacttcaaacacttaggaacatttctggtgtttgaggagttggtgaccttcgaggatgtgcttgtggacttcagcccagaggaacttagttcccttagtgctgctcagagaaacctctacagggaggtgatgctggagaattaccggaacctggtctccctggggcaccagttctctaaacctgacattatctcacgcctggaagaggaggaatcatatgcaatggagacagacagcagacatacagtgatttgtcaaggagagtctcatgatgatccattggaaccacaccagggcaaccaagagaaacttttgactcctataacaatgaatgaccccaagaccctcactccggaaagaagctatggcagtgatgaatttgagagaagctctaatcttagtaaacaatcaaaggatcctctaggaaaggatccccaggaaggcactgctcctggaatatgtacgagtccccagtcagcatcccaagagaacaaacacaacagatgtgaattttgcaaacgaacctttagtacgcaagtagcccttaggagacacgaacggatccatactgggaagaaaccctatgaatgtaaacagtgtgctgaagccttctatctcatgccacacctcaacagacatcagaagacccattctggtaggaagacttctggctgcaatgaaggtagaaagccttccgtccagtgtgcgaatctctgtgaacgtgtaagaattcacagtcaggaggactactttgaatgttttcagtgcggcaaagcttttctccagaatgtgcatcttcttcaacatctcaaagcccatgaggcagcaagagtccttcctcctgggttgtcccacagcaagacatacttaattcgttatcagcggaaacatgactacgttggagagagagcctgccagtgttgtgactgtggcagagtcttcagtcggaattcatatctcattcagcattatagaactcacactcaagagaggccttaccagtgtcagctatgtgggaaatgtttcggccgaccctcatacctcactcaacattatcaactccattctcaagagaaaactgttgagtgcgatcactgttgagaaacctttagtcacagcacacacttttctcaacattattggcttcctcctagagtgttgtgagtgtgagaaggcctttcactagccccaccttgttaacaacttgaacattcatcaaagtgtggtaaaaaaaaaa

SEQ ID NO: 204585 - DNA, 2253 bp, Homo sapiens
  Payload ID: 20352
  Gene Name: zinc finger, imprinted 2
  Uniprot ID: Q9NZV7
  ENST ID: ENST00000629319
  CDS Start-End: 544-2127
ggtgcagaagtctgggcagctgcgggaggagaggtttgggaggcgcgggagatgtccaccctgggctggtggcgccgccgggcgccgggcgccatgagggtgcgctaggcggctgttcgtgcccgaggctgcgcagcactgagctttgccttcttgatcttccgtccttcttggagacgactggcgagaggaagagggactaggtccaaacgctaggtggctgggtccagatacctgtgttttgactctgttcctgtggatagctgcttggtctgaagttccagaaaggatcctgttcccagacagaggtttcggaacctaatctatgtggaatttgttgggcctcggaagaccctgatcaaactccgaaacctctgcctcgattggttgcagccggagacccgcaccaaggaggagatcatcgagctcttggtccttgagcagtacctgaccatcatccctgaaaagctcaagccttgggtgcgagcaaaaaagccggagaactgtgagaagctcgtcactctgctggagaattacaaggagatgtaccaaccagaagacgacaacaacagtgacgtgaccagcgacgacgacatgacccggaacagaagagagtcctcaccacctcactcagtccattctttcagtggtgaccgggactgggaccggaggggcagaagcagagacatggagccacgagaccgctggtcccacaccaggaacccaagaagcaggatgcctccgcgggatctttcccttcctgtggtggcgaaaacaagctttgaaatggacagagaggacgacagggactccagggcttatgagtcccgatctcaggatgctgaatcataccaaaatgtggtggacctcgctgaggacaggaaacctcacaacacaatccaggacaacatggaaaactacaggaagctgctctccctcggtttccttgctcaggactctgtccctgcagaaaagaggaacacagagatgttagacaatctgccatctgctgggtcccagttcccggacttcaaacacttaggaacatttctggtgtttgaggagttggtgaccttcgaggatgtgcttgtggacttcagcccagaggaacttagttcccttagtgctgctcagagaaacctctacagggaggtgatgctggagaattaccggaacctggtctccctggggcaccagttctctaaacctgacattatctcacgcctggaagaggaggaatcatatgcaatggagacagacagcagacatacagtgatttgtcaaggagagtctcatgatgatccattggaaccacaccagggcaaccaagagaaacttttgactcctataacaatgaatgaccccaagaccctcactccggaaagaagctatggcagtgatgaatttgagagaagctctaatcttagtaaacaatcaaaggatcctctaggaaaggatccccaggaaggcactgctcctggaatatgtacgagtccccagtcagcatcccaagagaacaaacacaacagatgtgaattttgcaaacgaacctttagtacgcaagtagcccttaggagacacgaacggatccatactgggaagaaaccctatgaatgtaaacagtgtgctgaagccttctatctcatgccacacctcaacagacatcagaagacccattctggtaggaagacttctggctgcaatgaaggtagaaagccttccgtccagtgtgcgaatctctgtgaacgtgtaagaattcacagtcaggaggactactttgaatgttttcagtgcggcaaagcttttctccagaatgtgcatcttcttcaacatctcaaagcccatgaggcagcaagagtccttcctcctgggttgtcccacagcaagacatacttaattcgttatcagcggaaacatgactacgttggagagagagcctgccagtgttgtgactgtggcagagtcttcagtcggaattcatatctcattcagcattatagaactcacactcaagagaggccttaccagtgtcagctatgtgggaaatgtttcggccgaccctcatacctcactcaacattatcaactccattctcaagagaaaactgttgagtgcgatcactgttgagaaacctttagtcacagcacacacttttctcaacattattggcttcctcctagagtgttgtgagtgtgagaaggcctttcactagccccaccttgttaacaacttgaacattcatcaaagtgtggt

SEQ ID NO: 204586 - DNA, 2627 bp, Homo sapiens
  Payload ID: 20353
  Gene Name: zinc finger, imprinted 3
  Uniprot ID: Q96PE6
  ENST ID: ENST00000269834
  CDS Start-End: 387-1805
ttccattggaaactgattgggcagatttgaaaattaagctttcacaatcacaatttttatgagagttcattcagttttggagaagtcgaggaaagaattgggaattgaaattttgatgtggcctgataggatcaggtggggcttttgataggaagtgagtgttttgggttgtttcttgactggattatgatgcggaatacagcgggtagagggccgattaagttttagtcattagtgtagcttttcagtatacacgccttttcattttcagtccctttcagaagaaaagaccacaggcatcagaaatcaatcaacttgctaatttatgccagattccactggagatctgccttcccaagactttactgactggtgaagaacaggaaatgaacaattcccagggaagagtgaccttcgaggatgtcactgtgaacttcacccagggggagtggcagcggctgaatcccgaacagagaaacttgtacagggatgtgatgctggagaattacagcaaccttgtctctgtgggacaaggggaaaccaccaaacccgatgtgatcttgaggttggaacaaggaaaggagccatggttggaggaagaggaagtgctgggaagtggccgtgcagaaaaaaatggggacattggagggcagatttggaagccaaaggatgtgaaagagagtctcgcaagagaagtcccatcaatcaataaggaaacgctgactacgcagaaaggtgtagaatgtgacggatctaagaaaatacttccactgggcatagatgatgtatcttccttgcaacactatgtacaaaataattctcacgatgataatggatacagaaaattagttggcaataatccatccaaatttgtaggacaacaactgaaatgtaatgcctgtagaaagttattcagttcaaagtcacgccttcaaagtcacctgaggaggcatgcctgtcaaaaaccctttgaatgtcatagctgtggaagagcattcggggagaagtggaagcttgataaacatcagaaaactcacgcagaggaaaggccctataaatgtgagaactgtggaaatgcctacaagcagaagtcaaatctctttcaacatcagaaaatgcatactaaagagaaaccctatcagtgtaagacatgtggaaaagccttttcctggaaatcatcctgcattaatcatgagaaaattcataatgccaagaaatcctatcagtgtaatgaatgtgagaaatccttcaggcagaactcaaccctcattcaacataaaaaagttcacactggacaaaaaccctttcaatgtacggactgtggaaaggctttcatttacaagtcagatcttgtgaaacaccagagaatacacacgggagagaaaccctataaatgtagcatatgtgagaaggccttttcccagaaatccaatgtcatcgatcatgagaaaattcacactgggaagagagcttatgagtgtgatctatgtggaaatacctttatccagaagaaaaacctcattcaacataaaaaaatccatactggggaaaagccctatgaatgtaacagatgtggaaaagccttctttcagaagtcaaaccttcatagccatcagaaaactcatagcggagagaggacctatagatgtagtgaatgtggaaaaaccttcatccggaaattaaaccttagtttgcataaaaaaacccatactggacaaaaaccttatggatgttctgaatgcggtaaagccttcgctgacaggtcataccttgttaggcaccagaaaagaattcactccagataggagccccatgcacttaaaaaaacatgggaagatatggttgcctggaattgtcaccccagaattccatgttgaaatggcctctaatttggaggctatttttgaaggtagcgaggacttattatcacagtatcctttgaaaacccattcggcatactcactcagcaaatgtttattaagtataaatatttattagatgccttttgtgtaccaggaactcttaaacactgaagatgtagcaataaaccaaatgtgctaaaaccctgatggagttttattccagtgaataatgaccagtggtatccatatctttaaaaacgtttaaaagactatacttttggccaggcgtggtggctcaaatgcctgtaatcccagtactttgggaggctgaggtgggcgcatcacctgaggtcaggagttcgagaccagcatgaccaacatggtgaaaccctgtctctaccaaaaatacaaaaattagccaggcatagttgtgggcacctgtaatcccagctacccgggaggctgaggcaggagaattgcttgaacctgggaggtagaggttgcagtgagccaatattgcaccattgcactcctgcctgggcaacaagagcaaaatttcatctcaaaaataagataaaataaaataaacaaataagacagcactttatacttttagggatgatttctataattcatgagtggagaggtttctctagaggtgtaggggactggaaaccacatccaggaagtacagctttctctcctgagcatgaaggtatcttggcatttcttcactgcaattgccatttgccttttttgtttttc

SEQ ID NO: 204587 - DNA, 3185 bp, Homo sapiens
  Payload ID: 20354
  Gene Name: zinc finger, matrin-type 1
  Uniprot ID: Q5H9K5
  ENST ID: ENST00000372782
  CDS Start-End: 49-1965
gggggggcagtagttttaaagtagacacccgcccttgcctcagagaagatggagtcttgctctgtcaccaggctggagtgcagtggcgcaatctcggctcactgcagcctccacctcccgggttcaagcgattcccctgcctcagcctcccaaatagctgggactacagacgccatttggaatgaacaggaaaaggctgaactttttacagataagttttgtcaagtatgtggagtgatgctacagtttgaatcacaaagaatttcacattatgagggtgaaaaacatgctcaaaatgttagtttttattttcaaatgcatggggaacaaaatgaagtgcctggtaagaaaatgaagatgcatgttgagaattttcaggtgcataggtatgaaggagtggacaaaaacaaattttgtgatctctgcaacatgatgtttagctctccacttattgctcagtctcactatgtgggaaaggtccatgctaaaaaactgaagcaattaatggaggaacatgatcaggcatctccatcaggatttcaaccagagatggcatttagtatgagaacctatgtttgccatatttgtagtattgcttttacatctttagatatgttccggtcccacatgcaaggaagtgaacatcaaattaaagaatccattgttatcaatctagtgaagaattcaaggaagacacaagactcttaccaaaatgagtgtgcagattacatcaatgtgcagaaagccagaggactagaggccaagacttgtttcagaaagatggaagagagttctttggaaacccgtagatacagagaagtggtcgattccagacccagacatagaatgtttgaacaaagactcccatttgagactttccggacatacgcagcaccatacaatatttcacaagcaatggaaaagcagttacctcattcaaagaagacatatgactctttccaagatgaacttgaagattacatcaaagtacagaaagccagaggactagatccaaagacttgtttcagaaagatgagagagaactctgtggatactcatgggtacagagaaatggttgattctggacccagatcaagaatgtgtgagcaaagattttcacatgaggcttcccagacctaccaacgaccataccatatttcaccagtggaaagccagttacctcagtggctaccaacccattcaaagaggacatatgattctttccaagatgaacttgaagattacataaaagtgcagaaagccagaggactagagccaaaaacttgtttcagaaagataggagatagctctgtagaaacacacaggaacagagaaatggttgatgtcagacccagacatagaatgttggagcaaaagctcccatgtgagactttccagacctattcaggaccatatagtatttcacaagtagtggaaaaccagttacctcattgcttaccagctcatgatagcaaacagagactagattctattagctactgtcaactcaccagagactgtttcccagaaaaaccagtacccttgagccttaatcagcaagaaaataactctggctcatacagtgtagaatctgaagtttacaagcacctctcttcagaaaacaatactgctgaccatcaagcaggtcataaacggaaacatcagaagagaaaacgacacctagaagaaggcaaagaaaggccagagaaagagcagtccaagcataaaaggaaaaagagttatgaagatacagatttagacaaagacaagagcatcagacaaaggaaaagagaggaggatagagtcaaggtcagttcaggaaagcttaagcatcgaaaaaagaaaaaaagccatgatgtaccctccgagaaagaagaacgtaagcacaggaaagagaaaaagaaatctgttgaagaaaggacagaagaggaaatgctttgggatgagtctattcttggattttgaatgtttagttttgtttacccaaggttgaattgaaaaaaaaaaacagtcaatatggatttagaaaaaggaacacctgatgaagaaaaggagaggtagatacagtcagtgtcacttcaggacacttaggttttttttgtataaaaatttaaattgaattaaaagaaggaaaaaaaaagcccaaacttaacctctgagaaaagaacataagaactcaaggagaacataagagaaaaggaaacctgttacagaaaagacaagaatctgtgttttggaatgagtctattcttgggtattgaacttttagttttgtttgcccaaggattaattgaggaaatcagctaagaaaatggactttagacaaaagcaagaggatcagatgaagaaaaggagaggtagatacagtcagtgtcacttcaggaaagctatttaaaaaaacttgaaatttaattgaaagaagaaacaacaacaaaaaagcctaaacctagcctctgaacaacactaacatgagaacacaagaacttaagagaaaaagaaacctactcaagaaaagacagaagagacagtgatttgggatgagtctactctaggattttcaactttttagttttgttccttcaaagttgaaggaaaaaaagtttggttttataaaattcatgttattgtaatttttctaggtggatggctactttaatctctaaaaaagccaagtgaagtaaaagtattcagtatgccttttcctcaagttactttccttcattttcttaaaaaagaaaaaaaattattaaatgtttctcacatatctcacatataatgtaatttccctaaatgaagttgtctctacttctgctcatcaaattgctgtgatagtgaattatttattcatgggagataatttattttaaaggacagaattaccaagcgttacaaaatcagttctttccttggttttgtgttagtgttggtggtattttattgttgtttttctgtgtttatgtgtctcagctttctccaaggaatatgtatgaaataacttaaactgattttttctttgttaaatctaatttgcagtgtatttttgcattttctagttctgaaagtggaaaatgaaacagtctataataaacttagatgatatatagttttaaaacggtctcaaaaagtactgatataaggtcagtctatattctggaaatgtttatattaaagtgttttaatttcta

SEQ ID NO: 204588 - DNA, 3139 bp, Homo sapiens
  Payload ID: 20354
  Gene Name: zinc finger, matrin-type 1
  Uniprot ID: Q5H9K5
  ENST ID: ENST00000540921
  CDS Start-End: 1-1917
atggagtcttgctctgtcaccaggctggagtgcagtggcgcaatctcggctcactgcagcctccacctcccgggttcaagcgattcccctgcctcagcctcccaaatagctgggactacagacgccatttggaatgaacaggaaaaggctgaactttttacagataagttttgtcaagtatgtggagtgatgctacagtttgaatcacaaagaatttcacattatgagggtgaaaaacatgctcaaaatgttagtttttattttcaaatgcatggggaacaaaatgaagtgcctggtaagaaaatgaagatgcatgttgagaattttcaggtgcataggtatgaaggagtggacaaaaacaaattttgtgatctctgcaacatgatgtttagctctccacttattgctcagtctcactatgtgggaaaggtccatgctaaaaaactgaagcaattaatggaggaacatgatcaggcatctccatcaggatttcaaccagagatggcatttagtatgagaacctatgtttgccatatttgtagtattgcttttacatctttagatatgttccggtcccacatgcaaggaagtgaacatcaaattaaagaatccattgttatcaatctagtgaagaattcaaggaagacacaagactcttaccaaaatgagtgtgcagattacatcaatgtgcagaaagccagaggactagaggccaagacttgtttcagaaagatggaagagagttctttggaaacccgtagatacagagaagtggtcgattccagacccagacatagaatgtttgaacaaagactcccatttgagactttccggacatacgcagcaccatacaatatttcacaagcaatggaaaagcagttacctcattcaaagaagacatatgactctttccaagatgaacttgaagattacatcaaagtacagaaagccagaggactagatccaaagacttgtttcagaaagatgagagagaactctgtggatactcatgggtacagagaaatggttgattctggacccagatcaagaatgtgtgagcaaagattttcacatgaggcttcccagacctaccaacgaccataccatatttcaccagtggaaagccagttacctcagtggctaccaacccattcaaagaggacatatgattctttccaagatgaacttgaagattacataaaagtgcagaaagccagaggactagagccaaaaacttgtttcagaaagataggagatagctctgtagaaacacacaggaacagagaaatggttgatgtcagacccagacatagaatgttggagcaaaagctcccatgtgagactttccagacctattcaggaccatatagtatttcacaagtagtggaaaaccagttacctcattgcttaccagctcatgatagcaaacagagactagattctattagctactgtcaactcaccagagactgtttcccagaaaaaccagtacccttgagccttaatcagcaagaaaataactctggctcatacagtgtagaatctgaagtttacaagcacctctcttcagaaaacaatactgctgaccatcaagcaggtcataaacggaaacatcagaagagaaaacgacacctagaagaaggcaaagaaaggccagagaaagagcagtccaagcataaaaggaaaaagagttatgaagatacagatttagacaaagacaagagcatcagacaaaggaaaagagaggaggatagagtcaaggtcagttcaggaaagcttaagcatcgaaaaaagaaaaaaagccatgatgtaccctccgagaaagaagaacgtaagcacaggaaagagaaaaagaaatctgttgaagaaaggacagaagaggaaatgctttgggatgagtctattcttggattttgaatgtttagttttgtttacccaaggttgaattgaaaaaaaaaaacagtcaatatggatttagaaaaaggaacacctgatgaagaaaaggagaggtagatacagtcagtgtcacttcaggacacttaggttttttttgtataaaaatttaaattgaattaaaagaaggaaaaaaaaagcccaaacttaacctctgagaaaagaacataagaactcaaggagaacataagagaaaaggaaacctgttacagaaaagacaagaatctgtgttttggaatgagtctattcttgggtattgaacttttagttttgtttgcccaaggattaattgaggaaatcagctaagaaaatggactttagacaaaagcaagaggatcagatgaagaaaaggagaggtagatacagtcagtgtcacttcaggaaagctatttaaaaaaacttgaaatttaattgaaagaagaaacaacaacaaaaaagcctaaacctagcctctgaacaacactaacatgagaacacaagaacttaagagaaaaagaaacctactcaagaaaagacagaagagacagtgatttgggatgagtctactctaggattttcaactttttagttttgttccttcaaagttgaaggaaaaaaagtttggttttataaaattcatgttattgtaatttttctaggtggatggctactttaatctctaaaaaagccaagtgaagtaaaagtattcagtatgccttttcctcaagttactttccttcattttcttaaaaaagaaaaaaaattattaaatgtttctcacatatctcacatataatgtaatttccctaaatgaagttgtctctacttctgctcatcaaattgctgtgatagtgaattatttattcatgggagataatttattttaaaggacagaattaccaagcgttacaaaatcagttctttccttggttttgtgttagtgttggtggtattttattgttgtttttctgtgtttatgtgtctcagctttctccaaggaatatgtatgaaataacttaaactgattttttctttgttaaatctaatttgcagtgtatttttgcattttctagttctgaaagtggaaaatgaaacagtctataataaacttagatgatatatagttttaaaacggtctcaaaaagtactgatataaggtcagtctatattctggaaatgtttatattaaagtgttttaatttctaca

SEQ ID NO: 204589 - DNA, 1647 bp, Homo sapiens
  Payload ID: 20355
  Gene Name: zinc finger, matrin-type 2
  Uniprot ID: Q96NC0
  ENST ID: ENST00000274712
  CDS Start-End: 128-727
agaaaccctccagtccttagctcgtttagaacacaagactccaagcttattggagggctatcttgccttacggctccaagccgctttttacggcgtttttcagctcgccattcacttcgctgtgaagatggcgtcgggcagcgggacaaaaaacttggactttcgccgaaagtgggacaaagatgaatatgagaaactcgccgagaagaggctcacggaagagagagaaaagaaagatggaaaaccagtgcagcctgtcaagcgagagcttttacggcatagggactacaaggtggacttggaatccaagcttgggaagacaattgtcattaccaagacaacccctcaatctgagatgggaggatattactgcaatgtctgtgactgtgtggtgaaggactccatcaactttctggatcacattaatggaaagaaacatcagagaaacctgggcatgtctatgcgtgtggaacgttccaccctggatcaggtgaagaaacgttttgaggtcaacaagaagaagatggaagagaagcagaaggattatgattttgaggaaaggatgaaggagctcagagaagaggaggaaaaggccaaagcgtacaagaaagagaaacagaaggagaagaaaaggagggctgaggaggacttgacatttgaggaggacgatgagatggcagctgtgatgggcttctctggctttggttccaccaagaagagttactgaggctttctgtgcttggcctgactttggcctatgctggacctaactttgcgtgtgtgtgtgtgtagtagggggtcatttctttttgggtaatgggaaagttcttaagagtgtcaatggggagggatagagggtgggggctcatggtttccctctactttgggagagggcacagattgcagaggtaatgctgtggcatattgcttctgcctcagtgtatcactggagtcacaggaccctgcccacctgagttcccaataaagaaaaacctccccttctgaggctgctttcccaaaactccccctgcatctttatctcttcatctatcccacctcttgtctgaacatcccacctttatcctgtgttctgcctttgttttaattttaactcatgttcatcctgcaacagaagcattctctaggtcccagtttccagttgattgcatatccttgatcagccctttttcccatcctgccctatggttctctagccacctgtgcatgcatgtgtatttctgcctggttctatggtgtgtggatgtgtgtgcatgaatctgtcatatagagggggtccgagctggaatcctagagcattgctgccctggggcctgatgttcttggcttcctcagagcatgtaacaggaaattaaatgggatgagtgtttggtgtggtttgtgtctgatgagttttttaacattcaggtgtagattgtttcagcttctcatgtttcattttcctgaagatttatgtttttgtctaccttgtgagcaggcttttggaagaacctgtttgatgcaaaaaagaaaatgaaaaacaaaacaaaaaatccccaaaaccttattatgggagcccgtcggtcttagaagctgtttgacatgtataataaatggcattgactgggcctgttttacatttggtgagaa

SEQ ID NO: 204590 - DNA, 521 bp, Homo sapiens
  Payload ID: 20355
  Gene Name: zinc finger, matrin-type 2
  ENST ID: ENST00000519913
  CDS Start-End: 363-521
ccattcttcctgggtgcagaactgtagaagaccctgaggactcctgggctagtgtgagcagctattctgcatgggtgcagatggctggatgtgaaagagacatgctctagctgcagaggcaaatttgaagtgccacggaacgttgtcaagagacaaaaaacttggactttcgccgaaagtgggacaaagatgaatatgagaaactcgccgagaagaggctcacggaagagagagaaaagaaagatggaaaaccagtgcagcctgtcaagcgagagcttttacggcatagggactacaaggtggacttggaatccaagcttgggaagacaattgtcattaccaagacaacccctcaatctgagatgggaggatattactgcaatgtctgtgactgtgtggtgaaggactccatcaactttctggatcacattaatggaaagaaacatcagagaaacctgggcatgtctatgcgtgtggaacgttccaccctggatcaggtgaagaaacgttttgaggtcaac

SEQ ID NO: 204591 - DNA, 735 bp, Homo sapiens
  Payload ID: 20355
  Gene Name: zinc finger, matrin-type 2
  ENST ID: ENST00000506644
  CDS Start-End: 1-390
gcgtcgggcagcgggacaaaaaacttggactttcgccgaaagtgggacaaagatgaatatgagaaactcgccgagaagaggctcacggaagagagagaaaagaaagatggaaaaccagtgcagcctgtcaagcgagagcttttacggcatagggactacaaggtggacttggaatccaagcttgggaagacaattgtcattaccaagacaacccctcaatctgagatgggaggatattactgcaatgtctgtgactgtgtggtgaaggactccatcaactttctggatcacattaatggaaagaaacgtaaggcttggagatcagagaaacctgggcatgtctatgcgtgtggaacgttccaccctggatcaggtgaagaaacgttttgaggtcaacaagaagaagatggaagagaagcagaaggattatgattttgaggaaaggatgaaggagctcagagaagaggaggaaaaggccaaagcgtacaagaaagagaaacagaaggagaagaaaaggagggctgaggaggacttgacatttgaggaggacgatgagatggcagctgtgatgggcttctctggctttggttccaccaagaagagttactgaggctttctgtgcttggcctgactttggcctatgctggacctaactttgcgtgtgtgtgtgtgtagtagggggtcatttctttttgggtaatgggaaagttcttaagagtgtcaatggggagggat

SEQ ID NO: 204592 - DNA, 9406 bp, Homo sapiens
  Payload ID: 20356
  Gene Name: zinc finger, matrin-type 3
  Uniprot ID: Q9HA38
  ENST ID: ENST00000311417
  CDS Start-End: 743-1612
ctccatcctggggcggaagtggggagagcagcagtttaaaggttctgttgcagcagtttaaaggatccactcagccgccttaaccgccaaccagcaggctaagggaggaacagaatgaacaatgtttggatcccaatgactggagatgaaagttgcaaaagctctgcccaggcttctaccaaggattaactttccagggcatctgctgaactgctcttcggggctgtctgctgagattggcggcgggaccctcccgcctctcactcgtgcctttgttccccacgccggcctaaccccgcgcccctgcgctcgcggccagggcacctgacccacgcgccgcccgccggggatgcgggagccgccactgctaccgctgccaccgctgccgggcctgctccgccaagcacatgcgcagtggcgacgccgagccggcgccctcagtctcctcctccaccgcctcccggttccgcagtcacttcctgcagctgtttccctgtgggtcgggttggactgacttttgacagtcagccttcggctgcggagggggctcggcggcggccggcggagaaagttgctccgagaagaggctgggtcgagctgggccgagccgggcgcgcagggcgggcgtcgcgggcgtcccgggcggacgcggcgcggagactgccggcgcgtcccgggggttccgatttgaagaccttgcttctcatcacccactggattatgccccaggcttccctacccaatgatcctcttgcaacacgccgtgcttcctccacctaagcagccctcaccctcgcctcctatgtcagtggccaccaggtctacaggaaccttgcagcttccaccacagaagccttttgggcaggaggcttccttgcctcttgcaggggaagaagagttatcgaagggaggggagcaagactgtgccctggaggagctatgtaagcccctgtactgcaaactctgcaatgtcaccttgaactctgcacagcaagcccaggctcattatcagggtaaaaatcatggtaagaaactccgaaattactatgcagcaaatagctgtcctcctcctgctagaatgagcaatgtggtcgagcctgcagctactccagttgttccagtccctccgcagatgggctcctttaagccaggaggccgagtgatcctggccacggagaatgattactgtaagctctgtgatgcctccttcagttccccagctgtggctcaggctcactatcaagggaagaatcatgccaagaggctgcggctggcggaagctcagagtaactcattctcggaatcctcagagctgggtcaacggcgggccaggaaagaagggaatgagtttaagatgatgcctaacaggagaaatatgtatacagtacagaataattcagcaggtccttacttcaatccccgctctcggcagagaattccacgtgatctggccatgtgtgttactccaagtggccagttttactgctcaatgtgtaatgttggagctggcgaagagatggaattccggcagcatttagagagcaagcaacataagagcaaggtgtctgaacagcggtacaggaatgagatggagaatctgggatatgtatagtgattatcatattaagatagagcagcttttcctgcctgttgtttgccttttgtcaacttgccctgctttgtggtctttttgatatgagtacattcctctgcttaatgttaatacatgtaacccacagtggtaccatgagatgtcaaaacctgggggcccgggggcggggcggggggaggtgggtgtgaagaacgtgcttcttaggtcataacgcttttgcagggtcaatggtgttgagccgctcatagcatgtgacctacctaccccatcagaaataactttttatcttgctcaagttctggtcaactagtagcctgacggcttagaactttgactatttaaaagtttcattttcttttgcaattttagttttatgtactgttaaagaattgtactgaattctttttagatcacagtaaaaataggttggcagagatttcagtttcccagggcttaaccagaaccgccacctcaatgcattgtcagtagaatacattattagaaactgttaaggtctttcccgggacatttttttctgccattttcttttgcaattgtagttttatgtactgttaaagaattgtattgaattctttttagatcaaagtaaaaataggtcagcagagatttcagtttcccagggcttaaccagaaccgccacctcaatgcattgtcagtaggatacattattagaaactgttagggtctttcccaggacatttttttttctgtatcatgtctccccatcattgaagcgcaaattttcttgaattcaaatactcccaatgagcttgtatacttccaaacagctaaacttgatttccagttgtggatttcacacatataattgccgccttcttccctcctcttttttcccccctagttgaatcagcttgtctaacaagcccattttcatgccccagctgtgctgtgggttttccaagcctcatatttgaatattcaatgagtttaagatggatatgatttcaaaaaatagggccgggcgcggtggctcacgcctgtaatcccagcactttgggaggccgaagcaggcggatcacgaggtcaggaggtcgagatcatcctggctaacacagtgaaaccccatctctactaaaaatacaaaacattagccgggcgtggtggtgggtgcctgtagtcccagctactctggaggctgaggcaggagaatggcgtgaacccgggaggcggagcttgcagtgagccgagatcgcgccactgcactccagcctgggtgacagagcgagactccgtctcaaaaaaaaaaaaaaaaaaaaaaaaaaaatatatatatatatagatatattttccagcagtttttaggaaacaaaggtgtgtttgattttccaatttagagttacttcattgatagtaacatgcgcttatatcatgatctaaaccataagttcagattgcttgatattttgttttgccagacttttttgataatctgattcttacggtttacttacattttcctctgtcttgccagtctggtggccatcctgaaaaatatcaccacctgctgttttatacacagaggaattttttaaaaagcaaataaagtttcactatcttcgtttccagtagaaatatacacgaactatggttttattctttgtaattcggctttcttgaagatactaacaagtatatgatagatcactttggcatctgataattatatcagtattattatttttgtttttttgcgtttaaaataagaagttgtatgaacccaggaggtggaggttgcagtcagccaagaatcgtgccactgcactccagtctgggcgacagagcaatactccgtctccaaaaaaaaaaaaaaagaagctataatatatatctagattaactaatggagtgctctgtgaatattcattaactacattttatctatttactatattttatatgggtaagaccagtggtcatccgtatttcttttgaaagcccacttgatcaggaagtttatattttaagcagtatgtttgcacaatggtcagttcacatttgattgcttgtattactaattagaggtaaaacttctattttttcttgataattctgtaggcaaaaaaaattggggaaggcaaattacaatcattcttcttctgtaatactttgggacaatttttaaacaactcagacccatgtttaaaaacgagttttgtgtgattaacccttgtatagtatccagttactgtcttctcttgaagtggtggttctttgagaagtagaattattttgtaacttttcttctcccagaaacagaagaatcaaatactattctgttaggattctatctagacctgtgactcttagtataataacccttttattattattattattattattttttcagtaatctataaagtagagttgcttagttttgagcaatttagggcttttcttattggccagtaggttattcattttgctgctaaatataattttttggttaattttaacattatagtgctggccgcttggttctatgattacctaaaaatctagtttttttcctccataggtagatgtgtgtgtatgcatacccccacacacacacgtacatatatgttgtcatagagaggtatttcaacccttatttcaaataacagtagaagatacgaacatgaatttatattttgtaaaaatgtcattcatccactttgttttccattggaaatagttttataagaagggttccccttgctctctccacttaacaatttcattatatacgtagaaaaagcagccgacttaagggcttgatgttttttcaggccttgtggattcaggtttccagtttcccagtgcccttaatggatgttatgaatgcataagcacattttcttttaaagaaagaagttagatttatagtgttatttcttacttgctatatttctttgcactaaaaaagagctatgtgtttgttttataggacactttagtaccgtattgcctacaataactcagtttgctccttaaattccaaactctgggaagttgataaataacttccatgatcacttgtaaaagttacatgcacatctgaaaaaaaatcacaaatctctatgacagtaggttatgttttgagcttgttaccttgcagtattcttctctgttccataggtgaaaacaaagggtgacagaggttatcaggcaggaaatgcctaaatagatacatctctgcatggtacaatttctcatattcatgtattccataaacagtgttttttctctgtttaagcagactgttgtttcttctgagtcagtgatatgtgatcttcgttggtttcattttgtgaagctcagtctgtctctgtaacatactttaggatttgcaccttgtgctccccaggaattatgttagtgtccttttctatgctgtcttcaaggatggacagaggcctaaaccacaacaacaacaaaaattagaaaaaaaaatacttagatttcggtaatcatccataggaactcatagcatcagtctcttttctctgtgaataatatctttgtgtaagttgtcataaaaaatcaacgttagaagatgacaattagaattcttcttaggtattgagggtaagaagttgtaaagaaagaaaattcgtgtttcaactaaaagattggattgcatatacctttgaagtggttttgtaaaaaaagttcagttactaaactgagtgtgccctgtaatccttttgagtgcactgaagatgctttgaaaatactttgttggtcttcacattgtgcatcatgtcctgcaacttgtaaatatgtgcatgttgtttatgtttgtctgcctgtctcttattgcactaaattctgcaaggtgaataatttttttataccatttatttggaaaaagttcctcctccaactcttcttcactgaccttttaattagttggtaaacttagaaaaccaggtaggatttttgaagccctgagtttaaaagaagaatcgtggctatttgacatcatccttacattcccctgacttaaaaagctaacaagaagcacgagatcttccacctcattttagaaagcttttctacagaactatatgcttgcttatagctacctatctacagtttgaacagggagaaagggagatatgtatgtctggttacatcttccttcactcttgaattggctgggacagcaagcaacaacagtttgaggtccagtgacctacgtaaaatgagtgtcgtttgtgtcaggggacacatgtaactgtgcaacatggtattttctacagggagggctaggaagggtggttttggaacctaacctactttgtgtcttcattgtcagaactaaggttggaaatgccctttaaagaacttggtgaggcatatgctaggacaatagagctgctttagaaagaaattgagacatgttttgtcaggacagataaaagtttaatgcaggcttttgaacagatgttttaaaacaaatttgaccttaccaactatttttttcttctagccaaatcattgtacaggagtttcatatatgataaaaagtgttttgttattgtttttgctttcttggcaggggagaacccctaccattgtgagcagttactgtcactctggctgaatggacaaatagctgtgtaaatagcttctcataaaacgcttctactgatagctgtttgactttttcttcccgttatgaatgggaggaacatttgtaaacttcctttctgggtagctaccaaaaaacgtactggcttatggtcccatgtgaccttgtctccgttaagcccagaatctgagtgcctttagcaagtgttagcatttcacagagagaagagagacagaattattgctattaatcaccattcataaataggagcttggaataacaaaggtctgtgtgaattctgttctacgtcttttttttcccttttttaaataaatgtcaatttgatatcaagtaaaactattgtcattattgatcagaaaccatacattctgaaaatgaatccagttttcccaagctggcagaagtcagagatcatttttcaccttgatctgtgttgcgtttgtacttagtgaatggcagtgtggttgattggaagagcttgacactgatgtttggaaaaattctttattctagtggtcattttcaaacttgtcttctgtagagaggggaaaaattatgtatttgcagctaaagcgaagagactggcacaataattattaattgtgttagttcatttctatattaaatgaagcatcttcacaaatcaggtttgaagccattaaaagcaaaattttccctagtttaattaatttaaaattctaaattgcctgactacttagaatcttagaaacgccctgctagactgattttattatagaaatgttaacatgttcctcaacattttctcaagaaaattttcagacatatatcaaagttgaaaaaactttgcagtataaccactgctagattctgccatcaacatttgactatacttgtattgccatgtatctgttcatattctctatccctcttttcatccatcgatccatcagattttttttttaaagaacattccaaagtaaattttaggcaatacactgccctaaattcttagcatgggtgtcattaattaaggtttagtattcgtttaaatatctattttgaaagtggtgtatgaagttgataatctgagccaattaacatacttttttttttttcctcctgtggacttttgtcttccagtttctctttttgtgtgtacttagggtgagggaggacaattcctttcaaacacaagtttattttagaattggtcatttttaagtgcttgtcataaattttaaagtttcaatataatttttcttttccccacttctgataatgtatttttgccaaactatgcagcttcttcaaaaaactgtaaattactgattggggtttatgaaatcagcgaatacctcatttcaatctgttgctgcttttctccctcttgtcacttctcctttcactactttcagctgctctaccagaaggtagaggggagtaaagggtcaaacccctatataattagctgttttaaacaactctaggagagcagattaagtagcttagtaagttgaaactattaatttttctaaagaatttgatttgaattccttgagaattgtaattatccacacttcctccagctataattagcagaattaaaaatgattgtactgtacaatgagttgttgaaattgtaagccttagtaaccatctttagctttattgtagtcatgtttagaaaaaattatttttacatatgcctttatttttatgcccactttttgtggataagattctttagataaaatctaaagaattttaagtgactttctccaggtcatgaagattcaatgggtagaattgaatcagaattgaaatgttccagattcatattcttgtgtgtgtttgataaaattcatggcttccaaagtaactgaacacttcctttgggcccttggagggaaaatccatatttttactaattacacttttttttttagacatctggcagttctttgaacttaaacatattctcatggccatagttccaaattaagcccgacgcagttgctaaaaatcttgctgcactgttgaatactaataatgcaacatttattggatgtttttgcattttgatgaccttcatgattcatttataagtctttgtaagtgcttaagtgaccccctcactagtgaaaataataaatgttctatatcatttattattatttgtgtattctctacatgatatatttttttaaggaagagtaactccacatgtcagaatgagtgatattatcctagggcaaagcgcaaatagggcagtttgtttctactctgcaaatatggcatgtataggaacaaaactcttttggagtggctggtcattgttctgccctcttttggtacctgagtacctttctggggttttgtaaatcgtgtgtcatttgtaagaatttcacgttaactctgcgttacttggtgttcacctgtggtatccttgactgaccataatgatttagtttgggtatgatgtgtctgctttgaaatgccttactggagtatgtcagatcctgctttaaagcattccatatatctgctgggacaataagttgcttctccttggaaatatgctctagattcagaagcaaaaccgattttgctttcaccattaaggttgcattttaatgcagttattgttttaaattagagaataaaatgtaaaaccaagggaggctttagaaccctttattgaatggcatggcaaacttttaaaactgcttttgctatttcactagaactatctttgataaaggatatagctaaaaaatgtcagcccaaactgtgtgtaattagggttgtttattaaaattttctctaaatgtcatacagaggcttaagatctgtgtatgctgttgggtcggagtgccagtcactgctttggaagtctgtgttctggggctgcagaatgacaaacgtgtcatgggattaaaaccaatcaactgtgaattgtgaaattgaaactactctttcggttttattttctttagcatattgagtatagaaatctgaaacttatttaaaatttatactgcttttgttgatggctcattttggctgtgtatcctcacttatgtactgatttctgataaaggcttgacattattataacacgcattttgtgttccagtttaataaaacggtttctgagtcttgtctgaaaa

SEQ ID NO: 204593 - DNA, 2944 bp, Homo sapiens
  Payload ID: 20356
  Gene Name: zinc finger, matrin-type 3
  Uniprot ID: Q9HA38
  ENST ID: ENST00000432729
  CDS Start-End: 800-1666
atccactcagccgccttaaccgccaaccagcaggctaagggaggaacagaatgaacaatgtttggatcccaatgactggagatgaaagttgcaaaagctctgcccaggcttctaccaaggattaactttccagggcatctgctgaactgctcttcggggctgtctgctgagattggcggcgggaccctcccgcctctcactcgtgcctttgttccccacgccggcctaaccccgcgcccctgcgctcgcggccagggcacctgacccacgcgccgcccgccggggatgcgggagccgccactgctaccgctgccaccgctgccgggcctgctccgccaagcacatgcgcagtggcgacgccgagccggcgccctcagtctcctcctccaccgcctcccggttccgcagtcacttcctgcagctgtttccctgtgggtcgggttggactgacttttgacagtcagccttcggctgcggagggggctcggcggcggccggcggagaaagttgctccgagaagaggctgggtcgagctgggccgagccgggcgcgcagggcgggcgtcgcgggcgtcccgggcggacgcggcgcggagactgccggcgcgtcccgggggttccggcatttcacgtggaccaggtggatcatctgtgcgtgcagctgccttggccctctcagttgcccccgccccgtgggagtcgggggattccatccttcgtgatggcatccataccgggttgagatttgaagaccttgcttctcatcacccactggattatgccccaggcttccctacccaatgatcctcttgcaacacgccgtgcttcctccacctaagcagccctcaccctcgcctcctatgtcagtggccaccaggtctacaggaaccttgcagcttccaccacagaagccttttgggcaggaggcttccttgcctcttgcaggggaagaagagttatcgaagggaggggagcaagactgtgccctggaggagctatgtaagcccctgtactgcaaactctgcaatgtcaccttgaactctgcacagcaagcccaggctcattatcagggtaaaaatcatggtaagaaactccgaaattactatgcagcaaatagctgtcctcctcctgctagaatgagcaatgtggtcgagcctgcagctactccagttgttccagtccctccgcagatgggctcctttaagccaggaggccgagtgatcctggccacggagaatgattactgtaagctctgtgatgcctccttcagttccccagctgtggctcaggctcactatcaagggaagaatcatgccaagaggctgcggctggcggaagctcagagtaactcattctcggaatcctcagagctgggtcaacggcgggccaggaaagaagggaatgagtttaagatgatgcctaacaggagaaatatgtatacagtacagaataattcaggtccttacttcaatccccgctctcggcagagaattccacgtgatctggccatgtgtgttactccaagtggccagttttactgctcaatgtgtaatgttggagctggcgaagagatggaattccggcagcatttagagagcaagcaacataagagcaaggtgtctgaacagcggtacaggaatgagatggagaatctgggatatgtatagtgattatcatattaagatagagcagcttttcctgcctgttgtttgccttttgtcaacttgccctgctttgtggtctttttgatatgagtacattcctctgcttaatgttaatacatgtaacccacagtggtaccatgagatgtcaaaacctgggggcccgggggcggggcggggggaggtgggtgtgaagaacgtgcttcttaggtcataacgcttttgcagggtcaatggtgttgagccgctcatagcatgtgacctacctaccccatcagaaataactttttatcttgctcaagttctggtcaactagtagcctgacggcttagaactttgactatttaaaagtttcattttcttttgcaattttagttttatgtactgttaaagaattgtactgaattctttttagatcacagtaaaaataggttggcagagatttcagtttcccagggcttaaccagaaccgccacctcaatgcattgtcagtagaatacattattagaaactgttaaggtctttcccgggacatttttttctgccattttcttttgcaattgtagttttatgtactgttaaagaattgtattgaattctttttagatcaaagtaaaaataggtcagcagagatttcagtttcccagggcttaaccagaaccgccacctcaatgcattgtcagtaggatacattattagaaactgttagggtctttcccaggacatttttttttctgtatcatgtctccccatcattgaagcgcaaattttcttgaattcaaatactcccaatgagcttgtatacttccaaacagctaaacttgatttccagttgtggatttcacacatataattgccgccttcttccctcctcttttttcccccctagttgaatcagcttgtctaacaagcccattttcatgccccagctgtgctgtgggttttccaagcctcatatttgaatattcaatgagtttaagatggatatgatttcaaaaaatagggccgggcgcggtggctcacgcctgtaatcccagcactttgggaggccgaagcaggcggatcacgaggtcaggaggtcgagatcatcctggctaacacagtgaaaccccatctctactaaaaatacaaaacattagccgggcgtggtggtgggtgcctgtagtcccagctactctggaggctgaggcaggagaatggcgtgaacccgggaggcggagcttgcagtgagccgagatcgcgccactgcactccagcctgggtgacagagcgagactccgtctc

SEQ ID NO: 204594 - DNA, 743 bp, Homo sapiens
  Payload ID: 20356
  Gene Name: zinc finger, matrin-type 3
  ENST ID: ENST00000414084
  CDS Start-End: 298-743
gctttcaggacgagcccctggagcgccggggactagcggttcctttccgatgctctttccatctgccctccacgtgacagggcttgcgctgcttctatttatcagtttgcttgtttcaggcatttcacgtggaccaggtggatcatctgtgcgtgcagctgccttggccctctcagttgcccccgccccgtgggagtcgggggattccatccttcgtgatggcatccataccgggttgagatttgaagaccttgcttctcatcacccactggattatgccccaggcttccctacccaatgatcctcttgcaacacgccgtgcttcctccacctaagcagccctcaccctcgcctcctatgtcagtggccaccaggtctacaggaaccttgcagcttccaccacagaagccttttgggcaggaggcttccttgcctcttgcaggggaagaagagttatcgaagggaggggagcaagactgtgccctggaggagctatgtaagcccctgtactgcaaactctgcaatgtcaccttgaactctgcacagcaagcccaggctcattatcagggtaaaaatcatggtaagaaactccgaaattactatgcagcaaatagctgtcctcctcctgctagaatgagcaatgtggtcgagcctgcagctactccagttgttccagtccctccgcagatgggctcctttaagccaggaggccgagtgatcctggccacggagaatgattactg

SEQ ID NO: 204595 - DNA, 2466 bp, Homo sapiens
  Payload ID: 20357
  Gene Name: zinc finger, matrin-type 4
  Uniprot ID: Q9H898
  ENST ID: ENST00000297737
  CDS Start-End: 148-837
cagttggtccgagctgccgaaaggtctggtcgcagagacaggaacgtgtaatcctcagcgtgctccagcccacagcttcgctctactgctcggcagggcagctggcctctgggcaccggcggcccctctgcctcgcggaaaagcctgatgaagtcctccgatattgatcaggatttattcacagacagttactgcaaggtgtgcagtgcacagctgatctccgaatcgcagcgtgtggcccactacgagagtcgaaaacatgcaagcaaagtccgactgtattacatgcttcaccccagggatggagggtgtcctgccaagaggctccggtcagaaaatggaagtgatgccgacatggtggataagaacaagtgctgcacactctgcaacatgtcattcacttcagcggtggtggccgattcccattatcaaggcaaaatccacgccaagaggttaaaactcttgctaggagagaagaccccattaaagaccacagcaacacccctgagcccacttaagcccccacggatggacactgctccggtggtcgcatctccctatcaaagaagagattcagacagatactgtgggctctgtgcagcctggtttaataaccctctgatggcccagcaacattatgatggcaagaaacacaaaaagaatgcggcaagagttgctttgttagaacaactggggacaaccctggatatgggggaactgagaggtctgaggcgcaattacagatgtaccatctgcagtgtctccctaaactcaatagaacagtatcatgcccatctgaaaggatctaaacaccagaccaacctgaagaataagtagtgaaagcatcaatcaagacataagaacaaaacattagcatttctctgccgtggagaattgcttatcaaccaccagaggaggcttctttcttgaacaataaacatttcttataaggattcacagattcacatacgactgatcttgatttttggaaatgaatgaggtttcttttttctttttcctttttttaattttggggtaagttatgatatttggatggatttttaaattctttcctgataacatatttagcacatgttctaaattataatcctatagcaaacagttggagcattattcaaactgaaagtggaaaaatttaaatttccaatttattctagatttcctcagagcataattattctgttaaatcctcaatgagtgtgatgtaaaccacctctatccagaaatatacattcttttctcatcatgttggacacagttgagggtgacatgcacagaactggaacagatcactattagtggaaaataccaaatggacaaataaataccagtcgttttctccgttctccaagcacaggagccaggtttaccatctgaacaatgaagacgaagggagtaaataaaggaagaattctcatcttttttcctgatcattcaaagaacagtttctcaaggttaagccaagtcctccttgcaagttgccaaataatagcttaggaaaagaattagtctgcctgcatgatgatcttcttaggcaaaaacgtcttcacagcccttgaccttggtgaatttttttccccaaaagcatccaaaagaagaattataaaccccagaatgagatggaaataaacaagtatttttttttatgatgtttggcctgaactgtgggctttaattgggggatactgatcgtttggaaagaagtgagaaaattctgaagaaatggcggccttgggctaggcggggtcccctatttcttctgtttctcactgaagtcctactgctgagccaagactcagtcactctggaaagagcatgaccgataaagaaaacagttcctttctgatggggagcgtctgagtgcagatcatgaggctctttctctaggtttaattcttttccatggtgaccggacttggtgtcttgtagcctggttacgaagtgggacgttgagcttctactgacgatgccctgcatggaccagctgggatctggctggggctgccctgtgtccctaacgaccataggcaatccatcttcttgtgtcagcaatttctggacacccactgttttccaccaagagctgaggtggcaacaactcagtgagcaataaacaaaatgacacagaaatgcacagtgttgttatgaaggagcctgtttacctgtgttcaaaatctggcaccattcccttgagcagggcccgctcaggagggaccaggtctgccagtttctgtgcctgcagagagacgaagccccacgagccacaccctactctacaagaggaaagggggttggatgggaagaatctattttgctgttttggaaagcacacagccgacctacaaacctcctgtgatggtgtttcttcggatgtgtaaaataaggctttatttgtcaattccgctgtaaaataagcattgtccgagtaaaaacagcagcaacaac

SEQ ID NO: 204596 - DNA, 2250 bp, Homo sapiens
  Payload ID: 20357
  Gene Name: zinc finger, matrin-type 4
  Uniprot ID: Q9H898
  ENST ID: ENST00000315769
  CDS Start-End: 156-617
cgctagcacagttggtccgagctgccgaaaggtctggtcgcagagacaggaacgtgtaatcctcagcgtgctccagcccacagcttcgctctactgctcggcagggcagctggcctctgggcaccggcggcccctctgcctcgcggaaaagcctgatgaagtcctccgatattgatcaggatttattcacagacagttactgcaaggtgtgcagtgcacagctgatctccgaatcgcagcgtgtggcccactacgagagtcgaaaacatgcaagcaaagtccgactgtattacatgcttcaccccagggatggagggtgtcctgccaagaggctccggtcagaaaatggaagtgatgccgacatggtggataagaacaagtgctgcacactctgcaacatgtcattcacttcagcggtggtggccgattcccattatcaaggcaaaatccacgccaagaggttaaaactcttgctaggagagaagaccccattaaagaccacaggtctgaggcgcaattacagatgtaccatctgcagtgtctccctaaactcaatagaacagtatcatgcccatctgaaaggatctaaacaccagaccaacctgaagaataagtagtgaaagcatcaatcaagacataagaacaaaacattagcatttctctgccgtggagaattgcttatcaaccaccagaggaggcttctttcttgaacaataaacatttcttataaggattcacagattcacatacgactgatcttgatttttggaaatgaatgaggtttcttttttctttttcctttttttaattttggggtaagttatgatatttggatggatttttaaattctttcctgataacatatttagcacatgttctaaattataatcctatagcaaacagttggagcattattcaaactgaaagtggaaaaatttaaatttccaatttattctagatttcctcagagcataattattctgttaaatcctcaatgagtgtgatgtaaaccacctctatccagaaatatacattcttttctcatcatgttggacacagttgagggtgacatgcacagaactggaacagatcactattagtggaaaataccaaatggacaaataaataccagtcgttttctccgttctccaagcacaggagccaggtttaccatctgaacaatgaagacgaagggagtaaataaaggaagaattctcatcttttttcctgatcattcaaagaacagtttctcaaggttaagccaagtcctccttgcaagttgccaaataatagcttaggaaaagaattagtctgcctgcatgatgatcttcttaggcaaaaacgtcttcacagcccttgaccttggtgaatttttttccccaaaagcatccaaaagaagaattataaaccccagaatgagatggaaataaacaagtatttttttttatgatgtttggcctgaactgtgggctttaattgggggatactgatcgtttggaaagaagtgagaaaattctgaagaaatggcggccttgggctaggcggggtcccctatttcttctgtttctcactgaagtcctactgctgagccaagactcagtcactctggaaagagcatgaccgataaagaaaacagttcctttctgatggggagcgtctgagtgcagatcatgaggctctttctctaggtttaattcttttccatggtgaccggacttggtgtcttgtagcctggttacgaagtgggacgttgagcttctactgacgatgccctgcatggaccagctgggatctggctggggctgccctgtgtccctaacgaccataggcaatccatcttcttgtgtcagcaatttctggacacccactgttttccaccaagagctgaggtggcaacaactcagtgagcaataaacaaaatgacacagaaatgcacagtgttgttatgaaggagcctgtttacctgtgttcaaaatctggcaccattcccttgagcagggcccgctcaggagggaccaggtctgccagtttctgtgcctgcagagagacgaagccccacgagccacaccctactctacaagaggaaagggggttggatgggaagaatctattttgctgttttggaaagcacacagccgacctacaaacctcctgtgatggtgtttcttcggatgtgtaaaataaggctttatttgtcaattccgctgtaaaataagcattgtccgagtaaaaacagcagcaacaacaaaa

SEQ ID NO: 204597 - DNA, 515 bp, Homo sapiens
  Payload ID: 20357
  Gene Name: zinc finger, matrin-type 4
  ENST ID: ENST00000523542
  CDS Start-End: 133-273
gccgaaaggtctggtcgcagagacaggaacgtgtaatcctcagcgtgctccagcccacagcttcgctctactgctcggcagggcagctggcctctgggcaccggcggcccctctgcctcgcggaaaagcctgatgaagtcctccgatattgatcaggatttattcacagacagttactgcaaggtgtgcagtgcacagctgatctccgaatcgcagcgtgtggcccactacgagtgtggtgcagttcctctgggaatgagcaatgtaacttaaaactagctgtgtcaataagtcaagagtcgaaaacatgcaagcaaagtccgactgtattacatgcttcaccccagggatggagggtgtcctgccaagaggctccggtcagaaaatggaagtgatgccgacatggtggataagaacaagtgctgcacactctgcaacatgtcattcacttcagcggtggtggccgattcccattatcaaggcaaaatccacgccaagaggttaaaactcttgct

SEQ ID NO: 204598 - DNA, 690 bp, Homo sapiens
  Payload ID: 20357
  Gene Name: zinc finger, matrin-type 4
  ENST ID: ENST00000519406
  CDS Start-End: 56-690
ctttggaccgttcacaggctaattgggaaaagtggacaggcctgcctgaagcctgatgaagtcctccgatattgatcaggatttattcacagacagttactgcaaggtgtgcagtgcacagctgatctccgaatcgcagcgtgtggcccactacgagagtcgaaaacatgcaagcaaagtccgactgtattacatgcttcaccccagggatggagggtgtcctgccaagaggctccggtcagaaaatggaagtgatgccgacatggtggataagaacaagtgctgcacactctgcaacatgtcattcacttcagcggtggtggccgattcccattatcaaggcaaaatccacgccaagaggttaaaactcttgctaggagagaagaccccattaaagaccacagcaacacccctgagcccacttaagcccccacggatggacactgctccggtggtcgcatctccctatcaaagaagagattcagacagatactgtgggctctgtgcagcctggtttaataaccctctgatggcccagcaacattatgatggcaagaaacacaaaaagaatgcggcaagagttgctttgttagaacaactggggacaaccctggatatgggggaactgagaggtctgaggcgcaattacagatgtaccatctgcagtgtctccctaaactcaatagaaca

SEQ ID NO: 204599 - DNA, 473 bp, Homo sapiens
  Payload ID: 20357
  Gene Name: zinc finger, matrin-type 4
  ENST ID: ENST00000522623
  CDS Start-End: 130-270
gaaaggtctggtcgcagagacaggaacgtgtaatcctcagcgtgctccagcccacagcttcgctctactgctcggcagggcagctggcctctgggcaccggcggcccctctgcctcgcggaaaagcctgatgaagtcctccgatattgatcaggatttattcacagacagttactgcaaggtgtgcagtgcacagctgatctccgaatcgcagcgtgtggcccactacgagtgtggtgcagttcctctgggaatgagcaatgtaacttaaaactagctgtgtcaataagtcaagggtccagaattcttgaggaaggggaatttcattagacatactaagccaaaagaagatgtcacactgaagaaggtggctgtgtgaattctgacccagtcgaaaacatgcaagcaaagtccgactgtattacatgcttcaccccagggatggagggtgtcctgccaagaggctccggtcag

SEQ ID NO: 204600 - DNA, 564 bp, Homo sapiens
  Payload ID: 20357
  Gene Name: zinc finger, matrin-type 4
  ENST ID: ENST00000523188
  CDS Start-End: 147-332
agttggtccgagctgccgaaaggtctggtcgcagagacaggaacgtgtaatcctcagcgtgctccagcccacagcttcgctctactgctcggcagggcagctggcctctgggcaccggcggcccctctgcctcgcggaaaagcctgatgaagtcctccgatattgatcaggatttattcacagacagttactgcaaggtgtgcagtgcacagctgatctccgaatcgcagcgtgtggcccactacgagggtccagaattcttgaggaaggggaatttcattagacatactaagccaaaagaagatgtcacactgaagaaggtggctgtgtgaattctgacccagtcgaaaacatgcaagcaaagtccgactgtattacatgcttcaccccagggatggagggtgtcctgccaagaggctccggtcagaaaatggaagtgatgccgacatggtggataagaacaagtgctgcacactctgcaacatgtcattcacttcagcggtggtggccgattcccattatcaaggcaaaatccacgccaagaggttaaaactcttgctagga

SEQ ID NO: 204601 - DNA, 899 bp, Homo sapiens
  Payload ID: 20358
  Gene Name: zinc finger, matrin-type 5
  Uniprot ID: Q9UDW3
  ENST ID: ENST00000344318
  CDS Start-End: 118-630
accggggagccaggtaccttccgcgagacgtcgaggggcgagtcctagtctcttttctccgcactggaagacttgaacacttccttctctgcagcaaagcacctgctctgagtggccatggggaagcgatacttctgtgactactgcgaccgctccttccaggacaacctccacaaccgcaagaagcacctgaacgggctgcagcacctcaaggccaagaaggtctggtacgacatgttccgagatgcagctgccatcttgctggatgagcagaacaagcggccctgcaggaagtttctactgacaggccagtgcgactttggctccaactgcagattttcccacatgtcagagcgagacctgcaggagctgagcatccaggtggaggaggagaggcgagccagggagtggctactagatgctcctgagctccccgagggccatctggaggactggctggagaagagagccaagcggctgagctcagccccaagtagcagggctgaacccatcagaaccactgtcttccagtaccccgtgggctggccaccagttcaggagctgcctccatccctgcgggcacccccacctggggggtggcctctgcagcccagagtccagtggggctgagccccttgcccccgactgacccccacgtggtcacttttctcatcagtcacaataggaagccaagcccggttcctgctacgccccatggaggctccgagaccatctgcccagcctcactgaggctcaggacacggccacaccaagtgcagccctcgtcctgggtctgcaccgggcagctctcccctcactctcctccacctgcccccctgcttcttaagaagatgggggagaaaacttccaaatgtttataaagaaagtctgtcaccaca

SEQ ID NO: 204602 - DNA, 7546 bp, Homo sapiens
  Payload ID: 20359
  Gene Name: zinc finger, MIZ-type containing 1
  Uniprot ID: Q9ULJ6
  ENST ID: ENST00000334512
  CDS Start-End: 573-3776
cgggcgccggggagagcgggcggccgggcggcaggcgggcgagcagcgatcgggcggccgagcgagcgagcaacgccggcgcagcgcggtgaccccagccccagccggcgcggagcaggagccggagccgagcggatctcggcgccctcgctgcgctcctcccggcccgagcctgccctacccggcggtggcggcggcgcgtcctccagcggcggcagcggcgctcgcagcgcccggactcacggcagctgtgttctgatttcgtactactgctggggctgccacctcctcctccagacgctctcagcagacttgagtcctggtccttctgcagaggcctgagcaggaggaagaggaggaggcccgttggcgtcggaccaatgctgcaaggggtgtgaggagaggagccgctgtttttcactgagctgccataccccgaaagcaggatggagctggagtgaggtggaggggccgcaagctgctgaccggcgtgtggaacactggtggtttgcagatcactgaggctggacaacgttcatggctctcgggtagaacctagtgaaacggccagaatgaattctatggacaggcacatccagcagaccaatgaccgactgcagtgcatcaagcagcacttacagaatcctgccaacttccacaatgccgccacggagctgctggactggtgcggagacccacgggccttccagcggcccttcgagcagagcctgatgggctgtttgacggtggtcagtcgggtggcagcccagcaaggctttgacctggacctcggctacagactgctggctgtgtgtgctgcaaaccgagacaagttcaccccgaagtctgccgccttgttgtcctcctggtgcgaagagctcggccgcctgctgctgctccgacatcagaagagccgccagagcgatccccctgggaaactccccatgcagccccctctcagctccatgagctccatgaaacccactctgtcgcacagtgatgggtcgttcccctatgactctgtcccttggcagcagaacaccaaccagcctcccggctccctttccgtggtcaccacggtttggggagtaaccaacacatcccagagccaggtccttgggaaccctatggccaatgccaacaaccccatgaatccaggcggcaaccccatggcgtcgggcatgaccaccagcaacccaggcctcaactccccacagtttgcggggcagcagcagcagttctcagccaaggctggccccgctcagccctacatccagcagagcatgtatggccggcccaactaccccggcagcgggggctttggggccagttaccctgggggtcctaacgcccccgcaggcatgggcatccctccgcacaccaggccgcctgctgacttcactcagcccgcggcagccgctgcagcagcggcagtggcagcagcagcagccacagctacagccacagccacggccactgtggcagccctgcaggagacacagaacaaggatataaaccagtatggaccgatgggtcccacccaggcgtataacagccaattcatgaaccagcccgggccgcgggggcctgcctccatggggggcagcatgaaccccgcgagcatggcggctggcatgacgccctcggggatgagcggccctcccatgggcatgaaccagccccggccgcccggcatcagcccctttggcacacacgggcagcggatgccccagcagacctacccgggcccccggccccagtcccttcctattcagaacataaagaggccataccctggagagcccaactatggaaaccagcaatatggaccaaacagccagttccccacccagccaggccagtacccagcccccaaccccccgaggccactcacctcccccaactacccaggacagaggatgcccagccagccgagctccgggcagtacccgccccccacggtcaacatggggcagtattacaagccagaacagtttaatggacaaaataacacgttctcgggaagcagctacagtaactacagccaagggaatgtcaacaggcctcccaggccggttcctgtggcaaattacccccactcacctgttccagggaaccccacaccccccatgacccctgggagcagcatccctccatacctgtcccccagccaagacgtcaaaccacccttcccgcctgacatcaagccaaatatgagcgctctgccaccacccccagccaaccacaatgacgagctgcggctcacattccctgtgcgggatggcgtggtgctggagcccttccgcctggagcacaacctggcggtcagcaaccatgtgttccacctgcggcccacggtccaccagacgctgatgtggaggtctgacctggagctgcagttcaagtgctaccaccacgaggaccggcagatgaacaccaactggcccgcctcggtgcaggtcagcgtgaacgccacgcccctcaccattgagcgcggcgacaacaagacctcccacaagcccctgcacctgaagcacgtgtgccagccgggccgcaacaccatccagatcaccgtcacggcctgctgctgctcccacctcttcgtgctgcagctggtacaccggccctccgtccgctctgtgctgcaaggactcctcaagaagcgcctcctgcccgcagagcactgtatcacgaaaatcaagcggaatttcagcagcgtggctgcctcctcgggcaacacgaccctcaacggggaggatggggtggagcagacggccatcaaggtgtctctgaagtgccccatcacattccggcgcatccagctgcctgctcgaggacacgattgcaagcatgtgcagtgctttgatctggagtcatacctgcagctgaattgcgagagagggacctggaggtgtcctgtgtgcaataaaaccgctctgctggagggcctggaggtggatcagtacatgtggggaatcctgaatgccatccaacactccgagtttgaagaggtcaccatcgatcccacgtgcagctggcggccggtgcccatcaagtcggacttacacatcaaggacgaccctgatggcatcccctccaagcggttcaagaccatgagtcccagccagatgatcatgcccaatgtcatggagatgatcgcagccctgggccccggcccgtccccctatcccctcccgcctcccccagggggcaccaactccaacgactacagcagccaaggcaacaactaccaaggccatggcaactttgacttcccccacgggaaccctggagggacatccatgaatgacttcatgcacgggcccccccagctctcccaccccccggacatgcccaacaacatggccgccctcgagaaacccctcagccaccccatgcaggaaactatgccacacgctggcagctctgaccagccccacccctccatacaacaaggtttgcacgtaccacaccccagcagccagtcagggcctccattacatcacagtggggctcctcctcctcctccttcccagcctccccggcagccgccacaggccgctcccagcagccatccacacagcgacctgacctttaacccctcctcagccttagagggtcaggccggagcgcagggagcgtccgacatgccggagccttcgctggatctccttcccgaactcacaaatcctgacgagctcctgtcttatctggacccccccgacctgccgagcaatagtaacgatgacctcctgtctctatttgagaacaactgagggccacccggtcggggccatccctccacactctgcatcctaccccacctacccaacacacttttccacctgggagcctgtgccctcagaccgccccgcaccagagccacgggctgtggggcggggagccctcccccgctgcagccctctcagaacagaggggtagggagggtgcaccagtgcaccaggaaggctgtgtgggtctggagcccacgtcccacctccacacccttggcttgggcccatgcccagcgcaggcctgaagaccaccctcccgagaggaaccagcccggtaagagggcacacgctgatgcggcttcccggtccctccgcgtgtgccgattccagatgaccttccagtgtccccaaggttcttccatcttctagactgtaaccctgcctccctgcttcctggtccagagcctccctccagtgactgtggagcctgagaaggcccccgggccccagcatgggccccgagccttggaggagcactggcagttggtggcagtgagaccagcccacccaccaccacccaccacagaaaagcacaaacctctgggaaagacaacgtctctcgggggccaggggtcatcggtttgacccctgacctataagccaagataccccataaacacactcagaaagcagagaaaaaggacaagagtctgtgtttgagagggggtctgccattcctgcttggggactggtggggaagagggccaggacatcttctgagccaggacgtccctgaggctccacctccaagctcagacagggcccaggcttggggaacagagagagcaggtgtacacccaaccaaagtgattgtgcccttggttggggggcgcgggcatataacctgtcagaagcaaacaggagcggcaacttctaactttgctccaagccactctctttttaaacagcaacaatttaaagctatgaagtcacctggagaaaaggaacgttgctcttggacagcaagcaaaccatttctctccgtctgttctgtttttctcctagtccctctcctgccacctctccaagacttccgtgggacacccacttccctctgtcctagttctctttgtccaatcagatggcaagggcagtgcgtggaaaggccggggaggtgcagaaaccagagcccagggcaatggtgtctgtccagcccctccctctgtccctgtgctccaagctgcccccggctgcagcccaggccatggacatgtgcaccagtatgtacctgcaggcatgggggggaggggggcgtgtttctgggcctgccccagacactgcccttggctgccagcctaccctgcctgcactcctccaccatcacaatctcacccaaactcctgctcactcaagcaaaagcagcctctggccttccctccaccgctttgctccatctggcttaccactctccagggcctcctggggagcctgtcctgtgttcactttgtttcaggctggtctgtgccccgtgagccacatggcctagggtgatgccaggttgtcccgtcactggggtcccatctgtaaattctttgcgcccttcccggctgctgcctggggccctttcctgctctcccgtccgctgtgggtggtccccagctctcctctgtgggttttaccggaaaggtggccccagctgttgacttccagtcactgtcccagacggcacaaggttttctgtaggaaagctgccattgccccggccccttttcttcctttgtcccgttgtcgaggttttttcaaatagcgtgttgttcagtatgcaaatcaattattttaagaatcgcttttgtaaatatctttgtgaatattttagtatcgtctttgataatattcaacattttcatgacctggttatagcctttgctggtgtttttaaaatacctggactcaatgacaaagaccgagtcttctttttttttaaacaaaaacaaaaaaagcaaccagggctatttgtacagttgaaggggtgaacagaatgggcggctgtgctgggagttggaagaccgggcagcccgctatttagagccatccctcagtcagctggcagggacaagccaacgccaggtagcatgtggccacccttgcccagtgtctgtggcctggcaagtggccacgccctgtgtcagaccatctgggaattaagctccagacagacttacagatgccttccttaggagttcttgcttcttgcgttgatactttgccccagaaaggcctgggattcattctggttcttatcagggtgtgtccacactctgctcacaggtggatccacggctttccagtgcggagagtcgagatgctccctgcagcccaggccccgggcacctcctgcaaccatctctgggctcagcacctgaggcgggtttcctgggtcccctctccagcaagcctccaccagcaagctcggcccagagcttcccttccggctggctctgaaccgtgcgtggtgcctacagcctgcagtctggagacaagctcttccggagtgctctgggagccaggccagggtgtgagggaggtgcagaggcatccggggcgggagcaagccccaggttgtgacaggtgcaggtagacaacgcccataaacagagatggtcctgaactctggagagatccttccctgatcctttcggacgactacttggagccataagtaacctcagcaaaaacgaggcctctgcaagccacttttccatgccaagcatccacccggcccacaggcatgtttctgccgccactccgcaagatggacagggagccagcaggcaggcgggaagggccaagtacaggcaatcacccccatcttcttggtttgaagctttatccatgtatcatgttccgtgtagccattttattttttaagaaactgctaatactttctccctaatggaagccctgatcccccagagagctacaggtctgctcccgacgggcctcgggcctgacccgtccacacagggccgtgtcaacagcagcgactcaagggacgtgtgtacatatgtaaatgagaaatagagacgtgtcaacagatgcattcatttctcttggaatgtgtattgtttttattttgcgaaacaaaacaaaacaaaaaaaaaagcttggaactccatcacgtggaaaaactagatcctgttggttatagcatttgtgagttctccacgtctgtctctctcgctcatgtaatatactctgaccctgagtggaaaggggtttttgttctgtttttattttacctacatgtactatttagcttcagtgtactagtcctgccacctgtgtatttttagggtgctatggaaataatgaaaagaaacggggatttcagaagaaaattgtaaccaaattcatactttgtataatttttgatatcatgatcacaggtgattcacacgtacacacataaacacacccaccagtgcagcctgaagtaactcccacagaaaccatcatcgtctttgtacatcgtatgtacaatgcaatcatttcatactttaaactggtcaaaaaactaattgtgatttctagtcttgcaaagctgtatgtagttagatgatgtgacaacctctaatatttatctaataaatatgtattcagatgaaacctgtatattaggtgttcatgtggttattttgtatttaaagatcaaattatttgactattgctagacatttctatactctgttgtaacactgaggtatctcatttgcccatgttaatttttttctaaataaattgacaaaaacaaa

SEQ ID NO: 204603 - DNA, 6686 bp, Homo sapiens
  Payload ID: 20359
  Gene Name: zinc finger, MIZ-type containing 1
  ENST ID: ENST00000446377
  CDS Start-End: 1-2907
atgaggttgctgaggcatacagagagtgagcagtggtttcatcgcttccctctgtgtccttctctcactttctgggccccagtggccatgtggccacagacacactgtgtaggtggtcggtcatcaggcttaacgaaatggacatattcattttcagcatcactccaagatgggtcgttcccctatgactctgtcccttggcagcagaacaccaaccagcctcccggctccctttccgtggtcaccacggtttggggagtaaccaacacatcccagagccaggctgacgttctcatcccccacgccacctgccgcccaggcccgctccttatcagtccttgggaaccctatggccaatgccaacaaccccatgaatccaggcggcaaccccatggcgtcgggcatgaccaccagcaacccaggcctcaactccccacagtttgcggggcagcagcagcagttctcagccaaggctggccccgctcagccctacatccagcagagcatgtatggccggcccaactaccccggcagcgggggctttggggccagcccgcggcagccgctgcagcagcggcagtggcagcagcagcagccacagctacagccacagccacggccactgtggcagccctgcaggagacacagaacaaggatataaaccagtatggaccggccccagtgctgctccctgaccttctgaaggatgggttaggggatgaggagaggggagcccccataggaatgcagaacaggaggaaccccgcgagcatggcggctggcatgacgccctcggggatgagcggccctcccatgggcatgaaccagccccggccgcccggcatcagcccctttggcacacacgggcagcggatgccccagcagacctacccgggcccccggccccagtcccttcctattcagaacataaagaggccataccctggagagcccaactatggaaaccagcaatatggaccaaacagccagttccccacccagccaggccagtacccagcccccaaccccccgaggccactcacctcccccaactacccaggacagaggatgcccagccagccgagctccgggcagtacccgccccccacggtcaacatggggcagtattacaagccagaacagtttaatggacaaaataacacgttctcgggaagcagctacagtaactacagccaagggaatgtcaacaggcctcccaggccggttcctgtggcaaattacccccactcacctgttccagggaaccccacaccccccatgacccctgggagcagcatccctccatacctgtcccccagccaagacgtcaaaccacccttcccgcctgacatcaagccaaatatgagcgctctgccaccacccccagaccacaatgacgagctgcggctcacattccctgtgcgggatggcgtggtgctggagcccttccgcctggagcacaacctggcggtcagcaaccatgtgttccacctgcggcccacggtccaccagacgctgatgtggtctgacctggagctgcagttcaagtgctaccaccacgaggaccggcagatgaacaccaactggcccgcctcggtgcaggtcagcgtgaacgccacgcccctcaccattgagcgcggcgacaacaagacctcccacaagcccctgcacctgaagcacgtgtgccagccgggccgcaacaccatccagatcaccgtcacggcctgctgctgctcccacctcttcgtgctgcagctggtacaccggccctccgtccgctctgtgctgcaaggactcctcaagaagcgcctcctgcccgcagagcactgtatcacgaaaaagcggaatttcagcagcgtggctgcctcctcgggcaacacgaccctcaacggggaggatggggtggagcagacggccatcaaggtgtctctgaagtgccccatcacattccggcgcatccagctgcctgctcgaggacacgattgcaagcatgtgcagtgctttgatctggagtcatacctgcagctgaattgcgagagagggacctggaggtgtcctgtgtgcaaaaccgctctgctggagggcctggaggtggatcagtacatgtggggaatcctgaatgccatccaacacgagtttgaagaggtcaccatcgatcccacgtgcagctggcggccggtgcccatcaagtcggacttacacatcaaggacgaccctgatggcatcccctccaagcggttcaagaccatgagtcccagccagatgatcatgcccaatgtcatggagatgatcgcagccctgggccccggcccgtccccctatcccctcccgcctcccccagggggcaccaactccaacgactacagcagccaagacaactaccaaggccatggcaactttgacttcccccacgggaaccctggagggacatccatgaatgacttcatgcacgggcccccccagctctcccaccccccggacatgcccaacaacatggccgccctcgagaaacccctcagccaccccatgcaggaaactatgccacacgctggcagctctgaccagccccacccctccatacaacaaggtttgcacgtaccacaccccagcagccagtcagggcctccattacatcacagtggggctcctcctcctcctccttcccagcctccccggcagccgccacaggccgctcccagcagccatccacacagcgacctgacctttaacccctcctcagccttagagggtcaggccggagcgcagggagcgtccgacatgccggagccttcgctggatctccttcccgaactcacaaatcctgacgagctcctgtcttatctggacccccccgacctgccgagcaatagtaacgatgacctcctgtctctatttgagaacaactgagggccacccggtcggggccatccctccacactctgcatcctaccccacctacccaacacacttttccacctgggagcctgtgccctcagaccgccccgcaccagagccacgggctgtggggcggggagccctcccccgctgcagccctctcagaacagaggggtagggagggtgcaccagtgcaccaggaaggctgtgtgggtctggagcccacgtcccacctccacacccttggcttgggcccatgcccagcgcaggcctgaagaccaccctcccgagaggaaccagcccggtaagagggcacacgctgatgcggcttcccggtccctccgcgtgtgccgattccagatgaccttccagtgtccccaaggttcttccatcttctagactgtaaccctgcctccctgcttcctggtccagagcctccctccagtgactgtggagcctgagaaggcccccgggccccagcatgggccccgagccttggaggagcactggcagttggtggcagtgagaccagcccacccaccaccacccaccacagaaaagcacaaacctctgggaaagacaacgtctctcgggggccaggggtcatcggtttgacccctgacctataagccaagataccccataaacacactcagaaagcagagaaaaaggacaagagtctgtgtttgagagggggtctgccattcctgcttggggactggtggggaagagggccaggacatcttctgagccaggacgtccctgaggctccacctccaagctcagacagggcccaggcttggggaacagagagagcaggtgtacacccaaccaaagtgattgtgcccttggttggggggcgcgggcatataacctgtcagaagcaaacaggagcggcaacttctaactttgctccaagccactctctttttaaacagcaacaatttaaagctatgaagtcacctggagaaaaggaacgttgctcttggacagcaagcaaaccatttctctccgtctgttctgtttttctcctagtccctctcctgccacctctccaagacttccgtgggacacccacttccctctgtcctagttctctttgtccaatcagatggcaagggcagtgcgtggaaaggccggggaggtgcagaaaccagagcccagggcaatggtgtctgtccagcccctccctctgtccctgtgctccaagctgcccccggctgcagcccaggccatggacatgtgcaccagtatgtacctgcaggcatgggggggaggggggcgtgtttctgggcctgccccagacactgcccttggctgccagcctaccctgcctgcactcctccaccatcacaatctcacccaaactcctgctcactcaagcaaaagcagcctctggccttccctccaccgctttgctccatctggcttaccactctccagggcctcctggggagcctgtcctgtgttcactttgtttcaggctggtctgtgccccgtgagccacatggcctagggtgatgccaggttgtcccgtcactggggtcccatctgtaaattctttgcgcccttcccggctgctgcctggggccctttcctgctctcccgtccgctgtgggtggtccccagctctcctctgtgggttttaccggaaaggtggccccagctgttgacttccagtcactgtcccagacggcacaaggttttctgtaggaaagctgccattgccccggccccttttcttcctttgtcccgttgtcgaggttttttcaaatagcgtgttgttcagtatgcaaatcaattattttaagaatcgcttttgtaaatatctttgtgaatattttagtatcgtctttgataatattcaacattttcatgacctggttatagcctttgctggtgtttttaaaatacctggactcaatgacaaagaccgagtcttctttttttttaaacaaaaacaaaaaaagcaaccagggctatttgtacagttgaaggggtgaacagaatgggcggctgtgctgggagttggaagaccgggcagcccgctatttagagccatccctcagtcagctggcagggacaagccaacgccaggtagcatgtggccacccttgcccagtgtctgtggcctggcaagtggccacgccctgtgtcagaccatctgggaattaagctccagacagacttacagatgccttccttaggagttcttgcttcttgcgttgatactttgccccagaaaggcctgggattcattctggttcttatcagggtgtgtccacactctgctcacaggtggatccacggctttccagtgcggagagtcgagatgctccctgcagcccaggccccgggcacctcctgcaaccatctctgggctcagcacctgaggcgggtttcctgggtcccctctccagcaagcctccaccagcaagctcggcccagagcttcccttccggctggctctgaaccgtgcgtggtgcctacagcctgcagtctggagacaagctcttccggagtgctctgggagccaggccagggtgtgagggaggtgcagaggcatccggggcgggagcaagccccaggttgtgacaggtgcaggtagacaacgcccataaacagagatggtcctgaactctggagagatccttccctgatcctttcggacgactacttggagccataagtaacctcagcaaaaacgaggcctctgcaagccacttttccatgccaagcatccacccggcccacaggcatgtttctgccgccactccgcaagatggacagggagccagcaggcaggcgggaagggccaagtacaggcaatcacccccatcttcttggtttgaagctttatccatgtatcatgttccgtgtagccattttattttttaagaaactgctaatactttctccctaatggaagccctgatcccccagagagctacaggtctgctcccgacgggcctcgggcctgacccgtccacacagggccgtgtcaacagcagcgactcaagggacgtgtgtacatatgtaaatgagaaatagagacgtgtcaacagatgcattcatttctcttggaatgtgtattgtttttattttgcgaaacaaaacaaaacaaaaaaaaaagcttggaactccatcacgtggaaaaactagatcctgttggttatagcatttgtgagttctccacgtctgtctctctcgctcatgtaatatactctgaccctgagtggaaaggggtttttgttctgtttttattttacctacatgtactatttagcttcagtgtactagtcctgccacctgtgtatttttagggtgctatggaaataatgaaaagaaacggggatttcagaagaaaattgtaaccaaattcatactttgtataatttttgatatcatgatcacaggtgattcacacgtacacacataaacacacccaccagtgcagcctgaagtaactcccacagaaaccatcatcgtctttgtacatcgtatgtacaatgcaatcatttcatactttaaactggtcaaaaaactaattgtgatttctagtcttgcaaagctgtatgtagttagatgatgtgacaacctctaatatttatctaataaatatgtattcagatgaaacctgtatattaggtgttcatgtggttattttgtatttaaagatcaaattatttgactattgctagacatttctatactctgttgtaacactgaggtatctcatttgcccatgttaatttttttctaaataaattgacaaaaacaaaggtttggcg

SEQ ID NO: 204604 - DNA, 2196 bp, Homo sapiens
  Payload ID: 20359
  Gene Name: zinc finger, MIZ-type containing 1
  ENST ID: ENST00000611351
  CDS Start-End: 39-701
ttcatggctctcgggtagaacctagtgaaacggccagaatgaattctatggacaggcacatccagcagaccaatgaccgactgcagtgcatcaagcagcacttacagaatcctgccaacttccacaatgccgccacggagctgctggactggtgcggagacccacgggccttccagcggcccttcgagcagagcctgatgggctgtttgacggtggtcagtcgggtggcagcccagcaaggctttgacctggacctcggctacagactgctggctgtgtgtgctgcaaaccgagacaagttcaccccgaagtctgccgccttgttgtcctcctggtgcgaagagctcggccgcctgctgctgctccgacatcagaagagccgccagagcgatccccctgggaaactccccatgcagccccctctcagctccatgagctccatgaaacccactctgtcgcacagtgatgggtcgttcccctatgactctgtcccttggctgccagcctaccctgcctgcactcctccaccatcacaatctcacccaaactcctgctcactcaagcaaaagcagcctctggccttccctccaccgctttgctccatctggcttaccactctccagggcctcctggggagcctgtcctgtgttcactttgtttcaggctggtctgtgccccgtgagccacatggcctagggtgatgccaggttgtcccgtcactggggtcccatctgtaaattctttgcgcccttcccggctgctgcctggggccctttcctgctctcccgtccgctgtgggtggtccccagctctcctctgtgggttttaccggaaaggtggccccagctgttgacttccagtcactgtcccagacggcacaaggttttctgtaggaaagctgccattgccccggccccttttcttcctttgtcccgttgtcgaggttttttcaaatagcgtgttgttcagtatgcaaatcaattattttaagaatcgcttttgtaaatatctttgtgaatattttagtatcgtctttgataatattcaacattttcatgacctggttatagcctttgctggtgtttttaaaatacctggactcaatgacaaagaccgagtcttctttttttttaaacaaaaacaaaaaaagcaaccagggctatttgtacagttgaaggggtgaacagaatgggcggctgtgctgggagttggaagaccgggcagcccgctatttagagccatccctcagtcagctggcagggacaagccaacgccaggtagcatgtggccacccttgcccagtgtctgtggcctggcaagtggccacgccctgtgtcagaccatctgggaattaagctccagacagacttacagatgccttccttaggagttcttgcttcttgcgttgatactttgccccagaaaggcctgggattcattctggttcttatcagggtgtgtccacactctgctcacaggtggatccacggctttccagtgcggagagtcgagatgctccctgcagcccaggccccgggcacctcctgcaaccatctctgggctcagcacctgaggcgggtttcctgggtcccctctccagcaagcctccaccagcaagctcggcccagagcttcccttccggctggctctgaaccgtgcgtggtgcctacagcctgcagtctggagacaagctcttccggagtgctctgggagccaggccagggtgtgagggaggtgcagaggcatccggggcgggagcaagccccaggttgtgacaggtgcaggtagacaacgcccataaacagagatggtcctgaactctggagagatccttccctgatcctttcggacgactacttggagccataagtaacctcagcaaaaacgaggcctctgcaagccacttttccatgccaagcatccacccggcccacaggcatgtttctgccgccactccgcaagatggacagggagccagcaggcaggcgggaagggccaagtacaggcaatcacccccatcttcttggtttgaagctttatccatgtatcatgttccgtgtagccattttattttttaagaaactgctaatactttctccctaatggaagccctgatcccccagagagctacaggtctgctcccgacgggcctcgggcctgacccgtccacacagggccgtgtcaacagcagcgact

SEQ ID NO: 204605 - DNA, 3643 bp, Homo sapiens
  Payload ID: 20360
  Gene Name: zinc finger, MIZ-type containing 2
  Uniprot ID: Q8NF64
  ENST ID: ENST00000265346
  CDS Start-End: 46-2730
cagataaaaactgtcagacccggcctgtaggctgctccattgccaatgaactccatgaaccccatgaaacctgccctgccccctgcgccacacggtgatggttcattcgcatatgagtctgtgccttggcaacaaagcgccactcagccggctggatcgctgtctgtggtcactactgtgtggggagttggcaacgcgacacagagccaggttttggggaaccccatgggccctgcagggagtccctctggcagctccatgatgcctggtgtggcagggggcagctccgccttgacctccccacagtgcctgggacagcaggcgtttgctgaaggcggcgccaacaagggctacgtgcagcaaggcgtgtacagccgcgggggctaccctggggcccccggcttcaccaccgggtatgcaggcggcccggggggcctgggcctcccctcacatgctgcaagaccctccactgacttcacgcaagcggcagctgctgcagctgtggctgctgcggcagccactgccaccgccacagccacagccaccgtggctgctctccaggagaagcagagccaggagctgagccagtatggagcgatgggggccggacagtcttttaacagccagtttctgcagcatggaggtccccgggggcctagtgtccccgctggcatgaaccctactggcataggaggggtaatgggcccctctggcctctcccccttggctatgaaccccacccgggcagcaggaatgacacccttgtatgcagggcagcgtctgccccaacatgggtatcctgggcctccccaggcccagccactgccccgacagggggtcaagagaacctactctgaggtgtatccagggcagcagtatctgcaaggaggccagtatgcacccagcaccgcccagtttgcgcccagccctgggcagccccctgccccctccccttcctaccctgggcacaggctgcccctgcagcagggcatgacccagtccctgtccgtgcctggccccacgggactgcattataagcctacccgttccatcccgggctatcccagttccccactgccagggaaccccacgccacccatgaccccaagcagcagcgtcccttacatgtcaccaaaccaagaggtcaagtctcccttcttgcctgatctcaagcccaacctcaactccttgcactcatcgccctctggaagcgggccttgtgacgagttgcggctgaccttccctgtgcgcgatggggtggtcctggagcccttccgcctgcagcacaacctggctgtaagcaaccatgtcttccagctgcgagactcagtctacaagaccctgataatgaggcctgacctggagctgcaattcaagtgctaccaccacgaggaccggcagatgaacaccaactggccagcctcggtgcaggtcagcgtcaatgccacgccgctcaccatcgagcgtggcgacaacaagacctcgcacaagccactctacctgaagcatgtgtgccagccaggccgcaacaccatccagatcaccgtcaccgcctgctgctgctcccacctcttcgtgctgcagctagtgcaccgcccatccgtccgctcggtgctgcagggcctcctcaaaaagcgcctcctgcctgctgagcactgcatcaccaagataaagcggaacttcagcagcggcaccatccctggcacccctgggcccaacggagaggacggggtggagcagacagctatcaaggtgtccctgaagtgccccatcaccttccgcaggatccagctccctgcccgaggtcatgactgtcgccacatacagtgctttgacctggagtcgtacctgcagctcaactgtgagcgggggacttggaggtgtcctgtgtgcaacaagacagctttgctggagggcctggaggtggaccagtacatgctgggcatcctgatttacattcagaactctgactatgaggagatcaccatcgaccccacgtgcagctggaagccagtgcccgtgaagcctgacatgcacatcaaggaggagccggatgggccagcactgaagcgctgccgcaccgtgagccccgcccacgtgctcatgcccagcgtgatggagatgatcgccgccctgggccccggcgctgccccctttgcccccctgcagcccccctcagtccctgcccccagcgactaccctggccagggttccagcttcctggggcctggaactttccctgagtccttcccacccaccacgcccagcaccccaacccttgctgagttcaccccgggaccaccccccatctcctaccagtctgacattcccagcagcctcctgacttcagagaagtctaccgcctgcctcccaagccagatggcaccagcaggtcacctggaccccactcacaatcctgggacaccaggactacacacctccaaccttggggcccctccaggtccccagctgcaccattcaaaccctcccccagcgtcccggcagtccttgggccaagcgagcttaggacctacgggtgaactggccttcagtcctgccacaggcgtgatggggccccccagcatgtctggagccggggaggccccagaaccagctctggacctgctcccggaactgaccaaccctgatgagctactgtcctacttgggcccacccgacctccctacgaacaacaatgacgacctgctttctctgtttgagaacaactgatcctgtgtttaccccaagcccggcggggacacgctcacagatgtcaccacagccctgcccttcatgcccagccccatgggacacccggtggtctttcccaaacctcccccaaaacacacctggagccagagccttctgccgccagccctgcccctgaattggaagcagccctgtgctcgatgggaggggctcccaggccggcagcccttgccacctccctctgccaagcctgctgctgcagaacggtttttgctgaggtgcccctgcccagccctgtccagccttgtccacacacacatctcacgcccctggtctcacagcctcacaccttgtccttccacccctgcctgcccccacccagcctgcttcttgtccagcattgatccttctgtttcaacaactcctccactgggcagagctgggcatctggcagggctggctctgtcccctgggcctttggctccagtggcccctgtgcccagcagtccagctcttggaacctcgctgaatggcagcctcttgggggcctggagctctggcagcccagccgtgtgtggtgtcaggttcctctccccaccccagcttcaagcagaggcctcggggtgggggagctacaaagcacaacaatgtacatagtgtagaaacactaacagctgggagaggggagccagctgtccagccagcatgttcctgttgtacagcccggtctccctgcgcgctctgctccttcccatgtgcagacagatcagggaggaacctccaatgggtgggggacagtgagcttcggcctggccgaggtgggtgggtgggctctcagattcagctctgtgtaaagattctctagcgggctgcgctcccaagttccccttctctgtgaaagtgaagaattagtacagctgtgttttttaaagcc

SEQ ID NO: 204606 - DNA, 5144 bp, Homo sapiens
  Payload ID: 20360
  Gene Name: zinc finger, MIZ-type containing 2
  Uniprot ID: Q8NF64
  ENST ID: ENST00000309315
  CDS Start-End: 124-2886
cgcatggagcggcgcgggccgggggccgccacggcgaggggccgggccaggccgggcggagccagagcagctgagttccagataaaaactgtcagacccggcctgtaggctgctccattgccaatgaactccatgaaccccatgaaacctgccctgccccctgcgccacacggtgatggttcattcgcatatgagtctgtgccttggcaacaaagcgccactcagccggctggatcgctgtctgtggtcactactgtgtggggagttggcaacgcgacacagagccaggttttggggaaccccatgggccctgcagggagtccctctggcagctccatgatgcctggtgtggcagggggcagctccgccttgacctccccacagtgcctgggacagcaggcgtttgctgaaggcggcgccaacaagggctacgtgcagcaaggcgtgtacagccgcgggggctaccctggggcccccggcttcaccaccgggtatgcaggcggcccggggggcctgggcctcccctcacatgctgcaagaccctccactgacttcacgcaagcggcagctgctgcagctgtggctgctgcggcagccactgccaccgccacagccacagccaccgtggctgctctccaggagaagcagagccaggagctgagccagtatggagcgatgggggccggacagtcttttaacagccagtttctgcagcatggaggtccccgggggcctagtgtccccgctggcatgaaccctactggcataggaggggtaatgggcccctctggcctctcccccttggctatgaaccccacccgggcagcaggaatgacacccttgtatgcagggcagcgtctgccccaacatgggtatcctgggcctccccaggcccagccactgccccgacagggggtcaagagaacctactctgaggtgtatccagggcagcagtatctgcaaggaggccagtatgcacccagcaccgcccagtttgcgcccagccctgggcagccccctgccccctccccttcctaccctgggcacaggctgcccctgcagcagggcatgacccagtccctgtccgtgcctggccccacgggactgcattataagcccacagagcagttcaacgggcagggcgccagcttcaacgggggcagcgtcagctacagccaacctggcctgagtgggcctacccgttccatcccgggctatcccagttccccactgccagggaaccccacgccacccatgaccccaagcagcagcgtcccttacatgtcaccaaaccaagaggtcaagtctcccttcttgcctgatctcaagcccaacctcaactccttgcactcatcgccctctggaagcgggccttgtgacgagttgcggctgaccttccctgtgcgcgatggggtggtcctggagcccttccgcctgcagcacaacctggctgtaagcaaccatgtcttccagctgcgagactcagtctacaagaccctgataatgaggcctgacctggagctgcaattcaagtgctaccaccacgaggaccggcagatgaacaccaactggccagcctcggtgcaggtcagcgtcaatgccacgccgctcaccatcgagcgtggcgacaacaagacctcgcacaagccactctacctgaagcatgtgtgccagccaggccgcaacaccatccagatcaccgtcaccgcctgctgctgctcccacctcttcgtgctgcagctagtgcaccgcccatccgtccgctcggtgctgcagggcctcctcaaaaagcgcctcctgcctgctgagcactgcatcaccaagataaagcggaacttcagcagcggcaccatccctggcacccctgggcccaacggagaggacggggtggagcagacagctatcaaggtgtccctgaagtgccccatcaccttccgcaggatccagctccctgcccgaggtcatgactgtcgccacatacagtgctttgacctggagtcgtacctgcagctcaactgtgagcgggggacttggaggtgtcctgtgtgcaacaagacagctttgctggagggcctggaggtggaccagtacatgctgggcatcctgatttacattcagaactctgactatgaggagatcaccatcgaccccacgtgcagctggaagccagtgcccgtgaagcctgacatgcacatcaaggaggagccggatgggccagcactgaagcgctgccgcaccgtgagccccgcccacgtgctcatgcccagcgtgatggagatgatcgccgccctgggccccggcgctgccccctttgcccccctgcagcccccctcagtccctgcccccagcgactaccctggccagggttccagcttcctggggcctggaactttccctgagtccttcccacccaccacgcccagcaccccaacccttgctgagttcaccccgggaccaccccccatctcctaccagtctgacattcccagcagcctcctgacttcagagaagtctaccgcctgcctcccaagccagatggcaccagcaggtcacctggaccccactcacaatcctgggacaccaggactacacacctccaaccttggggcccctccaggtccccagctgcaccattcaaaccctcccccagcgtcccggcagtccttgggccaagcgagcttaggacctacgggtgaactggccttcagtcctgccacaggcgtgatggggccccccagcatgtctggagccggggaggccccagaaccagctctggacctgctcccggaactgaccaaccctgatgagctactgtcctacttgggcccacccgacctccctacgaacaacaatgacgacctgctttctctgtttgagaacaactgatcctgtgtttaccccaagcccggcggggacacgctcacagatgtcaccacagccctgcccttcatgcccagccccatgggacacccggtggtctttcccaaacctcccccaaaacacacctggagccagagccttctgccgccagccctgcccctgaattggaagcagccctgtgctcgatgggaggggctcccaggccggcagcccttgccacctccctctgccaagcctgctgctgcagaacggtttttgctgaggtgcccctgcccagccctgtccagccttgtccacacacacatctcacgcccctggtctcacagcctcacaccttgtccttccacccctgcctgcccccacccagcctgcttcttgtccagcattgatccttctgtttcaacaactcctccactgggcagagctgggcatctggcagggctggctctgtcccctgggcctttggctccagtggcccctgtgcccagcagtccagctcttggaacctcgctgaatggcagcctcttgggggcctggagctctggcagcccagccgtgtgtggtgtcaggttcctctccccaccccagcttcaagcagaggcctcggggtgggggagctacaaagcacaacaatgtacatagtgtagaaacactaacagctgggagaggggagccagctgtccagccagcatgttcctgttgtacagcccggtctccctgcgcgctctgctccttcccatgtgcagacagatcagggaggaacctccaatgggtgggggacagtgagcttcggcctggccgaggtgggtgggtgggctctcagattcagctctgtgtaaagattctctagcgggctgcgctcccaagttccccttctctgtgaaagtgaagaattagtacagctgtgttttttaaagccacctctctgtctccaccccatgggcccacacccaggtgggggaggaggaagccactgcatctgttggctcagggccccagcctgtgcgagcagggcgcctgggctgttgtgtctcctgtctgtgccgatctctattaaaggactccctcttggtgggcctggccgagtccctcctttgtgctcccagggactattttctcctcgtaagccagcgacctgcctaaagcttgggctgtgcctgcaaagcttgtgcaggacctgggggccaggtcgaccttcaagtggcttttggggccccaggttgagctctggatgtttcaagccaaggctcggctattcccgccccatagtaaatttccttttccctggaattttccaagttggcttcagctgaagagctgttttgtgaagcatcccaggcttgcccaggagagacatttgccactatgtcaccttatctgggcttgccctggggcactgagacagttgtttggcagccccagcccagccaggggctcatccttctcagctcttgtccctgggaggcctctgcttgtcacttcccagagattgcagaggtgtgtcctgcctaccatctgcctgtccagcttggtgggggtccgggtcaccatttcctccagtcctgggccccatccttgagggccttcccagccagccagcaggagaggcaagaactgggggaacacaggaacctaggggaggaggggagcgctgggcatcctcaggctggcggccaaggcctgcccctggaggcactagaggagggcatctgtctgtgggagcccagaggctgcagggaggaggaggagggaggtatctggtgtgagcgttgcccctgcgacatttgggaccacacaggtgggcttccttattccctgacaaagcctctgtttccagctcttccgccctctctggatgagggaacagaagtggaggaaacaaaagaagcagcagcacgcacagtcctgtcgctgggtgcggagacagcctggcaaagtcccactcagccatggcctgatgcaggccccaggccctcctttcttgggtgtcaaatgactgtgtcctggacatctgatgcaccacctgccctgcctgttgcaaacgtgatgctcccggatggagtggagaaactaggagactgggacaagcaaaaggctgcaaacaacccagaagcccatcctcagaagactggagaaatgattgaggaatgcatgggcaccgtggccctgtgctccatcacaaacacctctcagaaacaacgtgggatgaaaaagcaagacagttcatacagtatgatgccatttttataaagctcaaaaccaaa

SEQ ID NO: 204607 - DNA, 3800 bp, Homo sapiens
  Payload ID: 20360
  Gene Name: zinc finger, MIZ-type containing 2
  ENST ID: ENST00000433667
  CDS Start-End: 63-2729
ccagagcagctgagttccagataaaaactgtcagacccggcctgtaggctgctccattgccaatgaactccatgaaccccatgaaacctgccctgccccctgcgccacacggtgatggttcattcgcatatgagtctgtgccttggcaacaaagcgccactcagccggctggatcgctgtctgtggtcactactgtgtggggagttggcaacgcgacacagagccagtgcctgggacagcaggcgtttgctgaaggcggcgccaacaagggctacgtgcagcaaggcgtgtacagccgcgggggctaccctggggcccccggcttcaccaccgggtatgcaggcggcccggggggcctgggcctcccctcacatgctgcaagaccctccactgacttcacgcaagcggcagctgctgcagctgtggctgctgcggcagccactgccaccgccacagccacagccaccgtggctgctctccaggagaagcagagccaggagctgagccagtatggagcgatgggggccggacagtcttttaacagccagtttctgcagcatggaggtccccgggggcctagtgtccccgctggcatgaaccctactggcataggaggggtaatgggcccctctggcctctcccccttggctatgaaccccacccgggcagcaggaatgacacccttgtatgcagggcagcgtctgccccaacatgggtatcctgggcctccccaggcccagccactgccccgacagggggtcaagagaacctactctgaggtgtatccagggcagcagtatctgcaaggaggccagtatgcacccagcaccgcccagtttgcgcccagccctgggcagccccctgccccctccccttcctaccctgggcacaggctgcccctgcagcagggcatgacccagtccctgtccgtgcctggccccacgggactgcattataagcccacagagcagttcaacgggcagggcgccagcttcaacgggggcagcgtcagctacagccaacctggcctgagtgggcctacccgttccatcccgggctatcccagttccccactgccagggaaccccacgccacccatgaccccaagcagcagcgtcccttacatgtcaccaaaccaagaggtcaagtctcccttcttgcctgatctcaagcccaacctcaactccttgcactcatcgccctctggaagcgggccttgtgacgagttgcggctgaccttccctgtgcgcgatggggtggtcctggagcccttccgcctgcagcacaacctggctgtaagcaaccatgtcttccagctgcgagactcagtctacaagaccctgataatgaggcctgacctggagctgcaattcaagtgctaccaccacgaggaccggcagatgaacaccaactggccagcctcggtgcaggtcagcgtcaatgccacgccgctcaccatcgagcgtggcgacaacaagacctcgcacaagccactctacctgaagcatgtgtgccagccaggccgcaacaccatccagatcaccgtcaccgcctgctgctgctcccacctcttcgtgctgcagctagtgcaccgcccatccgtccgctcggtgctgcagggcctcctcaaaaagcgcctcctgcctgctgagcactgcatcaccaagataaagcggaacttcagcagcggcaccatccctggcacccctgggcccaacggagaggacggggtggagcagacagctatcaaggtgtccctgaagtgccccatcaccttccgcaggatccagctccctgcccgaggtcatgactgtcgccacatacagtgctttgacctggagtcgtacctgcagctcaactgtgagcgggggacttggaggtgtcctgtgtgcaacaagacagctttgctggagggcctggaggtggaccagtacatgctgggcatcctgatttacattcagaactctgactatgaggagatcaccatcgaccccacgtgcagctggaagccagtgcccgtgaagcctgacatgcacatcaaggaggagccggatgggccagcactgaagcgctgccgcaccgtgagccccgcccacgtgctcatgcccagcgtgatggagatgatcgccgccctgggccccggcgctgccccctttgcccccctgcagcccccctcagtccctgcccccagcgactaccctggccagggttccagcttcctggggcctggaactttccctgagtccttcccacccaccacgcccagcaccccaacccttgctgagttcaccccgggaccaccccccatctcctaccagtctgacattcccagcagcctcctgacttcagagaagtctaccgcctgcctcccaagccagatggcaccagcaggtcacctggaccccactcacaatcctgggacaccaggactacacacctccaaccttggggcccctccaggtccccagctgcaccattcaaaccctcccccagcgtcccggcagtccttgggccaagcgagcttaggacctacgggtgaactggccttcagtcctgccacaggcgtgatggggccccccagcatgtctggagccggggaggccccagaaccagctctggacctgctcccggaactgaccaaccctgatgagctactgtcctacttgggcccacccgacctccctacgaacaacaatgacgacctgctttctctgtttgagaacaactgatcctgtgtttaccccaagcccggcggggacacgctcacagatgtcaccacagccctgcccttcatgcccagccccatgggacacccggtggtctttcccaaacctcccccaaaacacacctggagccagagccttctgccgccagccctgcccctgaattggaagcagccctgtgctcgatgggaggggctcccaggccggcagcccttgccacctccctctgccaagcctgctgctgcagaacggtttttgctgaggtgcccctgcccagccctgtccagccttgtccacacacacatctcacgcccctggtctcacagcctcacaccttgtccttccacccctgcctgcccccacccagcctgcttcttgtccagcattgatccttctgtttcaacaactcctccactgggcagagctgggcatctggcagggctggctctgtcccctgggcctttggctccagtggcccctgtgcccagcagtccagctcttggaacctcgctgaatggcagcctcttgggggcctggagctctggcagcccagccgtgtgtggtgtcaggttcctctccccaccccagcttcaagcagaggcctcggggtgggggagctacaaagcacaacaatgtacatagtgtagaaacactaacagctgggagaggggagccagctgtccagccagcatgttcctgttgtacagcccggtctccctgcgcgctctgctccttcccatgtgcagacagatcagggaggaacctccaatgggtgggggacagtgagcttcggcctggccgaggtgggtgggtgggctctcagattcagctctgtgtaaagattctctagcgggctgcgctcccaagttccccttctctgtgaaagtgaagaattagtacagctgtgttttttaaagccacctctctgtctccaccccatgggcccacacccaggtgggggaggaggaagccactgcatctgttggctcagggccccagcctgtgcgagcagggcgcctgggctgttgtgtctcctgtctgtgccgatctctattaaaggactccctcttggtgggc

SEQ ID NO: 204608 - DNA, 616 bp, Homo sapiens
  Payload ID: 20360
  Gene Name: zinc finger, MIZ-type containing 2
  ENST ID: ENST00000416856
  CDS Start-End: 93-281
cggcgaggggccgggccaggccgggcggagccagagcagctgagttccagataaaaactgtcagacccggcctgtaggctgctccattgccaatgaactccatgaaccccatgaaacctgccctgccccctgcgccacacggtgatggttcattcgcatatgagtctgtgccttggcaacaaagcgccactcagccggctggatcgctgtctgtggtcactactgtgtggggagttggcaacgcgacacagagccagggagtccctctggcagctccatgatgcctggtgtggcagggggcagctccgccttgacctccccacagtgcctgggacagcaggcgtttgctgaaggcggcgccaacaagggctacgtgcagcaaggcgtgtacagccgcgggggctaccctggggcccccggcttcaccaccgggtatgcaggcggcccggggggcctgggcctcccctcacatgctgcaagaccctccactgacttcacgcaagcggcagctgctgcagctgtggctgctgcggcagccactgccaccgccacagccacagccaccgtggctgctctccaggagaagcagagccaggagctgagccagtatggagcg

SEQ ID NO: 204609 - DNA, 3773 bp, Homo sapiens
  Payload ID: 20360
  Gene Name: zinc finger, MIZ-type containing 2
  Uniprot ID: Q8NF64
  ENST ID: ENST00000413916
  CDS Start-End: 114-2702
gactgcgagcaggaagagcgcagtggctctgccgacgccgcgttcagaaagccagagcagctgagttccagataaaaactgtcagacccggcctgtaggctgctccattgccaatgaactccatgaaccccatgaaacctgccctgccccctgcgccacacggtgatggttcattcgcatatgagtctgtgccttggcaacaaagcgccactcagccggctggatcgctgtctgtggtcactactgtgtggggagttggcaacgcgacacagagccagtgcctgggacagcaggcgtttgctgaaggcggcgccaacaagggctacgtgcagcaaggcgtgtacagccgcgggggctaccctggggcccccggcttcaccaccgggtatgcaggcggcccggggggcctgggcctcccctcacatgctgcaagaccctccactgacttcacgcaagcggcagctgctgcagctgtggctgctgcggcagccactgccaccgccacagccacagccaccgtggctgctctccaggagaagcagagccaggagctgagccagtatggagcgatgggggccggacagtcttttaacagccagtttctgcagcatggaggtccccgggggcctagtgtccccgctggcatgaaccctactggcataggaggggtaatgggcccctctggcctctcccccttggctatgaaccccacccgggcagcaggaatgacacccttgtatgcagggcagcgtctgccccaacatgggtatcctgggcctccccaggcccagccactgccccgacagggggtcaagagaacctactctgaggtgtatccagggcagcagtatctgcaaggaggccagtatgcacccagcaccgcccagtttgcgcccagccctgggcagccccctgccccctccccttcctaccctgggcacaggctgcccctgcagcagggcatgacccagtccctgtccgtgcctggccccacgggactgcattataagcctacccgttccatcccgggctatcccagttccccactgccagggaaccccacgccacccatgaccccaagcagcagcgtcccttacatgtcaccaaaccaagaggtcaagtctcccttcttgcctgatctcaagcccaacctcaactccttgcactcatcgccctctggaagcgggccttgtgacgagttgcggctgaccttccctgtgcgcgatggggtggtcctggagcccttccgcctgcagcacaacctggctgtaagcaaccatgtcttccagctgcgagactcagtctacaagaccctgataatgaggcctgacctggagctgcaattcaagtgctaccaccacgaggaccggcagatgaacaccaactggccagcctcggtgcaggtcagcgtcaatgccacgccgctcaccatcgagcgtggcgacaacaagacctcgcacaagccactctacctgaagcatgtgtgccagccaggccgcaacaccatccagatcaccgtcaccgcctgctgctgctcccacctcttcgtgctgcagctagtgcaccgcccatccgtccgctcggtgctgcagggcctcctcaaaaagcgcctcctgcctgctgagcactgcatcaccaagataaagcggaacttcagcagcggcaccatccctggcacccctgggcccaacggagaggacggggtggagcagacagctatcaaggtgtccctgaagtgccccatcaccttccgcaggatccagctccctgcccgaggtcatgactgtcgccacatacagtgctttgacctggagtcgtacctgcagctcaactgtgagcgggggacttggaggtgtcctgtgtgcaacaagacagctttgctggagggcctggaggtggaccagtacatgctgggcatcctgatttacattcagaactctgactatgaggagatcaccatcgaccccacgtgcagctggaagccagtgcccgtgaagcctgacatgcacatcaaggaggagccggatgggccagcactgaagcgctgccgcaccgtgagccccgcccacgtgctcatgcccagcgtgatggagatgatcgccgccctgggccccggcgctgccccctttgcccccctgcagcccccctcagtccctgcccccagcgactaccctggccagggttccagcttcctggggcctggaactttccctgagtccttcccacccaccacgcccagcaccccaacccttgctgagttcaccccgggaccaccccccatctcctaccagtctgacattcccagcagcctcctgacttcagagaagtctaccgcctgcctcccaagccagatggcaccagcaggtcacctggaccccactcacaatcctgggacaccaggactacacacctccaaccttggggcccctccaggtccccagctgcaccattcaaaccctcccccagcgtcccggcagtccttgggccaagcgagcttaggacctacgggtgaactggccttcagtcctgccacaggcgtgatggggccccccagcatgtctggagccggggaggccccagaaccagctctggacctgctcccggaactgaccaaccctgatgagctactgtcctacttgggcccacccgacctccctacgaacaacaatgacgacctgctttctctgtttgagaacaactgatcctgtgtttaccccaagcccggcggggacacgctcacagatgtcaccacagccctgcccttcatgcccagccccatgggacacccggtggtctttcccaaacctcccccaaaacacacctggagccagagccttctgccgccagccctgcccctgaattggaagcagccctgtgctcgatgggaggggctcccaggccggcagcccttgccacctccctctgccaagcctgctgctgcagaacggtttttgctgaggtgcccctgcccagccctgtccagccttgtccacacacacatctcacgcccctggtctcacagcctcacaccttgtccttccacccctgcctgcccccacccagcctgcttcttgtccagcattgatccttctgtttcaacaactcctccactgggcagagctgggcatctggcagggctggctctgtcccctgggcctttggctccagtggcccctgtgcccagcagtccagctcttggaacctcgctgaatggcagcctcttgggggcctggagctctggcagcccagccgtgtgtggtgtcaggttcctctccccaccccagcttcaagcagaggcctcggggtgggggagctacaaagcacaacaatgtacatagtgtagaaacactaacagctgggagaggggagccagctgtccagccagcatgttcctgttgtacagcccggtctccctgcgcgctctgctccttcccatgtgcagacagatcagggaggaacctccaatgggtgggggacagtgagcttcggcctggccgaggtgggtgggtgggctctcagattcagctctgtgtaaagattctctagcgggctgcgctcccaagttccccttctctgtgaaagtgaagaattagtacagctgtgttttttaaagccacctctctgtctccaccccatgggcccacacccaggtgggggaggaggaagccactgcatctgttggctcagggccccagcctgtgcgagcagggcgcctgggctgttgtgtctcctgtctgtgccgatctctattaaaggactccctcttggtgggc

SEQ ID NO: 204610 - DNA, 5089 bp, Homo sapiens
  Payload ID: 20360
  Gene Name: zinc finger, MIZ-type containing 2
  Uniprot ID: Q8NF64
  ENST ID: ENST00000441627
  CDS Start-End: 72-2834
gtcgggcagccagagcagctgagttccagataaaaactgtcagacccggcctgtaggctgctccattgccaatgaactccatgaaccccatgaaacctgccctgccccctgcgccacacggtgatggttcattcgcatatgagtctgtgccttggcaacaaagcgccactcagccggctggatcgctgtctgtggtcactactgtgtggggagttggcaacgcgacacagagccaggttttggggaaccccatgggccctgcagggagtccctctggcagctccatgatgcctggtgtggcagggggcagctccgccttgacctccccacagtgcctgggacagcaggcgtttgctgaaggcggcgccaacaagggctacgtgcagcaaggcgtgtacagccgcgggggctaccctggggcccccggcttcaccaccgggtatgcaggcggcccggggggcctgggcctcccctcacatgctgcaagaccctccactgacttcacgcaagcggcagctgctgcagctgtggctgctgcggcagccactgccaccgccacagccacagccaccgtggctgctctccaggagaagcagagccaggagctgagccagtatggagcgatgggggccggacagtcttttaacagccagtttctgcagcatggaggtccccgggggcctagtgtccccgctggcatgaaccctactggcataggaggggtaatgggcccctctggcctctcccccttggctatgaaccccacccgggcagcaggaatgacacccttgtatgcagggcagcgtctgccccaacatgggtatcctgggcctccccaggcccagccactgccccgacagggggtcaagagaacctactctgaggtgtatccagggcagcagtatctgcaaggaggccagtatgcacccagcaccgcccagtttgcgcccagccctgggcagccccctgccccctccccttcctaccctgggcacaggctgcccctgcagcagggcatgacccagtccctgtccgtgcctggccccacgggactgcattataagcccacagagcagttcaacgggcagggcgccagcttcaacgggggcagcgtcagctacagccaacctggcctgagtgggcctacccgttccatcccgggctatcccagttccccactgccagggaaccccacgccacccatgaccccaagcagcagcgtcccttacatgtcaccaaaccaagaggtcaagtctcccttcttgcctgatctcaagcccaacctcaactccttgcactcatcgccctctggaagcgggccttgtgacgagttgcggctgaccttccctgtgcgcgatggggtggtcctggagcccttccgcctgcagcacaacctggctgtaagcaaccatgtcttccagctgcgagactcagtctacaagaccctgataatgaggcctgacctggagctgcaattcaagtgctaccaccacgaggaccggcagatgaacaccaactggccagcctcggtgcaggtcagcgtcaatgccacgccgctcaccatcgagcgtggcgacaacaagacctcgcacaagccactctacctgaagcatgtgtgccagccaggccgcaacaccatccagatcaccgtcaccgcctgctgctgctcccacctcttcgtgctgcagctagtgcaccgcccatccgtccgctcggtgctgcagggcctcctcaaaaagcgcctcctgcctgctgagcactgcatcaccaagataaagcggaacttcagcagcggcaccatccctggcacccctgggcccaacggagaggacggggtggagcagacagctatcaaggtgtccctgaagtgccccatcaccttccgcaggatccagctccctgcccgaggtcatgactgtcgccacatacagtgctttgacctggagtcgtacctgcagctcaactgtgagcgggggacttggaggtgtcctgtgtgcaacaagacagctttgctggagggcctggaggtggaccagtacatgctgggcatcctgatttacattcagaactctgactatgaggagatcaccatcgaccccacgtgcagctggaagccagtgcccgtgaagcctgacatgcacatcaaggaggagccggatgggccagcactgaagcgctgccgcaccgtgagccccgcccacgtgctcatgcccagcgtgatggagatgatcgccgccctgggccccggcgctgccccctttgcccccctgcagcccccctcagtccctgcccccagcgactaccctggccagggttccagcttcctggggcctggaactttccctgagtccttcccacccaccacgcccagcaccccaacccttgctgagttcaccccgggaccaccccccatctcctaccagtctgacattcccagcagcctcctgacttcagagaagtctaccgcctgcctcccaagccagatggcaccagcaggtcacctggaccccactcacaatcctgggacaccaggactacacacctccaaccttggggcccctccaggtccccagctgcaccattcaaaccctcccccagcgtcccggcagtccttgggccaagcgagcttaggacctacgggtgaactggccttcagtcctgccacaggcgtgatggggccccccagcatgtctggagccggggaggccccagaaccagctctggacctgctcccggaactgaccaaccctgatgagctactgtcctacttgggcccacccgacctccctacgaacaacaatgacgacctgctttctctgtttgagaacaactgatcctgtgtttaccccaagcccggcggggacacgctcacagatgtcaccacagccctgcccttcatgcccagccccatgggacacccggtggtctttcccaaacctcccccaaaacacacctggagccagagccttctgccgccagccctgcccctgaattggaagcagccctgtgctcgatgggaggggctcccaggccggcagcccttgccacctccctctgccaagcctgctgctgcagaacggtttttgctgaggtgcccctgcccagccctgtccagccttgtccacacacacatctcacgcccctggtctcacagcctcacaccttgtccttccacccctgcctgcccccacccagcctgcttcttgtccagcattgatccttctgtttcaacaactcctccactgggcagagctgggcatctggcagggctggctctgtcccctgggcctttggctccagtggcccctgtgcccagcagtccagctcttggaacctcgctgaatggcagcctcttgggggcctggagctctggcagcccagccgtgtgtggtgtcaggttcctctccccaccccagcttcaagcagaggcctcggggtgggggagctacaaagcacaacaatgtacatagtgtagaaacactaacagctgggagaggggagccagctgtccagccagcatgttcctgttgtacagcccggtctccctgcgcgctctgctccttcccatgtgcagacagatcagggaggaacctccaatgggtgggggacagtgagcttcggcctggccgaggtgggtgggtgggctctcagattcagctctgtgtaaagattctctagcgggctgcgctcccaagttccccttctctgtgaaagtgaagaattagtacagctgtgttttttaaagccacctctctgtctccaccccatgggcccacacccaggtgggggaggaggaagccactgcatctgttggctcagggccccagcctgtgcgagcagggcgcctgggctgttgtgtctcctgtctgtgccgatctctattaaaggactccctcttggtgggcctggccgagtccctcctttgtgctcccagggactattttctcctcgtaagccagcgacctgcctaaagcttgggctgtgcctgcaaagcttgtgcaggacctgggggccaggtcgaccttcaagtggcttttggggccccaggttgagctctggatgtttcaagccaaggctcggctattcccgccccatagtaaatttccttttccctggaattttccaagttggcttcagctgaagagctgttttgtgaagcatcccaggcttgcccaggagagacatttgccactatgtcaccttatctgggcttgccctggggcactgagacagttgtttggcagccccagcccagccaggggctcatccttctcagctcttgtccctgggaggcctctgcttgtcacttcccagagattgcagaggtgtgtcctgcctaccatctgcctgtccagcttggtgggggtccgggtcaccatttcctccagtcctgggccccatccttgagggccttcccagccagccagcaggagaggcaagaactgggggaacacaggaacctaggggaggaggggagcgctgggcatcctcaggctggcggccaaggcctgcccctggaggcactagaggagggcatctgtctgtgggagcccagaggctgcagggaggaggaggagggaggtatctggtgtgagcgttgcccctgcgacatttgggaccacacaggtgggcttccttattccctgacaaagcctctgtttccagctcttccgccctctctggatgagggaacagaagtggaggaaacaaaagaagcagcagcacgcacagtcctgtcgctgggtgcggagacagcctggcaaagtcccactcagccatggcctgatgcaggccccaggccctcctttcttgggtgtcaaatgactgtgtcctggacatctgatgcaccacctgccctgcctgttgcaaacgtgatgctcccggatggagtggagaaactaggagactgggacaagcaaaaggctgcaaacaacccagaagcccatcctcagaagactggagaaatgattgaggaatgcatgggcaccgtggccctgtgctccatcacaaacacctctcagaaacaacgtgggatgaaaaagcaagacagttcatacagtatgatgccatttttataaagctcaaaacc

SEQ ID NO: 204611 - DNA, 747 bp, Homo sapiens
  Payload ID: 20360
  Gene Name: zinc finger, MIZ-type containing 2
  ENST ID: ENST00000457123
  CDS Start-End: 479-747
cgggcggcggcgcgatggcgcgggtggcggcggccccggggcggcgggcggcgcggagggcgggctgagcgcatggagcggcgcgggccgggggccgccacggcgaggggccgggccaggccgggcggagatttcacagggacacacacggaacatgtgacttggtctgagaccgtggtgattacggataggatggacacagactcaccaccaagttctggcaagctagaaccagagggcatcccttgatgcttagtgtggaaacaggagaagtgaaggaatcttaacttccagaggggcacagggtcaaggataccagacctggagactggaagtcttttcagagagactgtcctcagagaggagaccagaggcatgagttcgggtcggcaggaaatccccctgtgcagtgaagaccagagcagctgagttccagataaaaactgtcagacccggcctgtaggctgctccattgccaatgaactccatgaaccccatgaaacctgccctgccccctgcgccacacggtgatggttcattcgcatatgagtctgtgccttggcaacaaagcgccactcagccggctggatcgctgtctgtggtcactactgtgtggggagttggcaacgcgacacagagccaggttttggggaaccccatgggccctgcagggagtccctctggcagctccatgatgcctggtgtggcagggggcagctccgccttgacctccccacagtgcctggg

SEQ ID NO: 204612 - DNA, 2772 bp, Homo sapiens
  Payload ID: 20360
  Gene Name: zinc finger, MIZ-type containing 2
  ENST ID: ENST00000615423
  CDS Start-End: 1-2772
atgaactccatgaaccccatgaaacctgccctgccccctgcgccacacggtgatggttcattcgcatatgagtctgtgccttggcaacaaagcgccactcagccggctggatcgctgtctgtggtcactactgtgtggggagttggcaacgcgacacagagccaggttttggggaaccccatgggccctgcagggagtccctctggcagctccatgatgcctggtgtggcagggggcagctccgccttgacctccccacagtgcctgggacagcaggcgtttgctgaaggcggcgccaacaagggctacgtgcagcaaggcgtgtacagccgcgggggctaccctggggcccccggcttcaccaccgggtatgcaggcggcccggggggcctgggcctcccctcacatgctgcaagaccctccactgacttcacgcaagcggcagctgctgcagctgtggctgctgcggcagccactgccaccgccacagccacagccaccgtggctgctctccaggagaagcagagccaggagctgagccagtatggagcgatgggggccggacagtcttttaacagccagtttctgcagcatggaggtccccgggggcctagtgtccccgctggcatgaaccctactggcataggaggggtaatgggcccctctggcctctcccccttggctatgaaccccacccgggcagcaggaatgacacccttgtatgcagggcagcgtctgccccaacatgggtatcctgggcctccccaggcccagccactgccccgacagggggtcaagagaacctactctgaggtgtatccagggcagcagtatctgcaaggaggccagtatgcacccagcaccgcccagtttgcgcccagccctgggcagccccctgccccctccccttcctaccctgggcacaggctgcccctgcagcagggcatgacccagtccctgtccgtgcctggccccacgggactgcattataagcccacagagcagttcaacgggcagggcgccagcttcaacgggggcagcgtcagctacagccaacctggcctgagtgggcctacccgttccatcccgggctatcccagttccccactgccagggaaccccacgccacccatgaccccaagcagcagcgtcccttacatgtcaccaaaccaagaggtcaagtctcccttcttgcctgatctcaagcccaacctcaactccttgcactcatcgccctctggaagcgggccttgtgacgagttgcggctgaccttccctgtgcgcgatggggtggtcctggagcccttccgcctgcagcacaacctggctgtaagcaaccatgtcttccagctgcgagactcagtctacaagaccctgataatgaggcctgacctggagctgcaattcaagtgctaccaccacgaggaccggcagatgaacaccaactggccagcctcggtgcaggtcagcgtcaatgccacgccgctcaccatcgagcgtggcgacaacaagacctcgcacaagccactctacctgaagcatgtgtgcgccaggccgcaacaccatccatcaccgtcaccgcctgctgctgcgtgcgtgtcctgctcccacctcttcgtgctgcagctagtgcaccgcccatccgtccgctcggtgctgcagggcctcctcaaaaagcgcctcctgcctgctgagcactgcatcaccaagataaagcggaacttcagcagcggcaccatccctggcacccctgggcccaacggagaggacggggtggagcagacagctatcaaggtgtccctgaagtgccccatcaccttccgcaggatccagctccctgcccgaggtcatgactgtcgccacatacagtgctttgacctggagtcgtacctgcagctcaactgtgagcgggggacttggaggtgtcctgtgtgcaacaagacagctttgctggagggcctggaggtggaccagtacatgctgggcatcctgatttacattcagaactctgactatgaggagatcaccatcgaccccacgtgcagctggaagccagtgcccgtgaagcctgacatgcacatcaaggaggagccggatgggccagcactgaagcgctgccgcaccgtgagccccgcccacgtgctcatgcccagcgtgatggagatgatcgccgccctgggccccggcgctgccccctttgcccccctgcagcccccctcagtccctgcccccagcgactaccctggccagggttccagcttcctggggcctggaactttccctgagtccttcccacccaccacgcccagcaccccaacccttgctgagttcaccccgggaccaccccccatctcctaccagtctgacattcccagcagcctcctgacttcagagaagtctaccgcctgcctcccaagccagatggcaccagcaggtcacctggaccccactcacaatcctgggacaccaggactacacacctccaaccttggggcccctccaggtccccagctgcaccattcaaaccctcccccagcgtcccggcagtccttgggccaagcgagcttaggacctacgggtgaactggccttcagtcctgccacaggcgtgatggggccccccagcatgtctggagccggggaggccccagaaccagctctggacctgctcccggaactgaccaaccctgatgagctactgtcctacttgggcccacccgacctccctacgaacaacaatgacgacctgctttctctgtttgagaacaactga

SEQ ID NO: 204613 - DNA, 4175 bp, Homo sapiens
  Payload ID: 20361
  Gene Name: zinc finger, MYM-type 1
  Uniprot ID: Q5SVZ6
  ENST ID: ENST00000359858
  CDS Start-End: 151-3579
gggcggggtcggcggggccgtttcgcttcgaagattgtttcagaagcgttgggcggggcgtccctgagagaaattagaatctggaaactgttcttcaggaagaaacccattagtttggaactggagaattcctttgcatcagatactaaaatgaaagaaccacttttaggtggtgagtgtgacaaggcagtggcatcacagctggggctgctagatgaaattaagacagaacccgacaatgctcaagagtattgtcataggcaacagtccagaactcaggagaatgaactgaaaataaatgctgtgttttcagagagtgcttcacagttgactgcaggcattcagctttctctggcatcatctggcgtgaataaaatgcttccttcagtttcaaccacagctattcaggtttcctgtgctggttgtaaaaaaattctccagaaggggcaaactgcttatcagaggaaaggatctgctcaacttttctgctccataccatgcatcactgaatacatttcatctgccagttcaccagttccttctaagagaacttgttcaaactgctcaaaagacattttaaatccaaaggatgtgattagtgtccagctggaagacactacctcttgcaaaactttttgcagcctatcttgtctttcatcatatgaagaaaaaagaaaaccatttgttaccatatgtactaatagcattttgaccaagtgcagcatgtgccagaagactgctattattcagtatgaagtaaaataccaaaatgtgaaacataatctttgcagtaatgcctgcctttcaaagtttcactctgctaacaacttcatcatgaactgctgtgagaactgtggcacttactgttacaccagctctagtctgtcccacatacttcagatggaaggacagtctcattactttaatagttcaaagagtattacagcatataagcagaaacctgccaaaccacttatatctgttccttgcaaaccattgaagccctcagatgaaatgattgagactacgagtgatttggggaagacagagcttttctgctctattaattgtttctctgcatacagtaaagctaagatggaatcttcttcagtaagtgttgtttctgtggtgcatgatacttcaacagagcttctttctccaaagaaagatacgactccagttataagcaatatagtgtcattggcagacaccgatgttgccttgcccatcatgaacactgatgtcttacaagatacagtttcttcagtaacagcaacagcagatgtcattgtggatctttctaagagttcacctagtgaacccagtaatgctgttgctagtagtagtacggaacagccaagcgtttcaccatcttcatcagtattcagtcagcatgcaattggttccagtacagaagtacaaaaagacaatatgaaatctatgaaaataagtgatgaactatgtcacccaaaatgtacatccaaagtacaaaaagttaaaggtaaatcacgaagtattaaaaaatcttgttgtgcagattttgagtgtttggaaaacagtaaaaaagatgtggcattctgttattcatgccagttgttctgccaaaaatattttagctgtggaagagagtcatttgcaacccacggaacttctaattggaaaaaaaccctggaaaaattcagaaagcatgaaaaaagtgaaatgcatttgaagtcattggaattttggagagaataccaattttgtgatggagctgtcagtgacgatttatctattcattcgaaacagattgagggaaataaaaagtacctaaagcttataattgaaaatattttatttcttggaaagcagtgtttacccttaagaggaaacgaccagtcagtttcatctgtgaataaaggcaattttttagaattgttagaaatgagagcaaaagataaaggagaagaaacatttcgacttatgaattcacaagttgacttctataacagtacacaaattcaaagtgatattatcgaaataataaagactgaaatgttgcaggatattgtgaatgagatcaatgactcctcagcattttcaatcatatgtgatgagacaatcaatagtgccatgaaagaacagctttcaatttgtgtaagatacccacaaaaatcatcaaaggctatcttaattaaggaaagattcttgggttttgttgatactgaggagatgactgggacccacttacataggactatcaaaacttatctgcagcaaattggagttgatatggataaaatacatggccaggcctatgatagcaccactaatttgaagataaaatttaataaaatagcagcagaattcaagaaagaagaaccaagagctttatacatacattgttatgcacactttttggatttatcaataattaggttttgtaaagaagtaaaagaactccgaagtgctctaaaaactctcagttctttgttcaacactatttgtatgtctggggaaatgttggcaaattttcgaaacatttataggctaagtcaaaacaaaacatgcaagaaacatatatcacaatcatgttggacagtccatgatcgtacattactatctgtgattgacagtcttccagagattattgaaacattggaagttatagcaagccattcttcaaatacaagtttcgccgatgaattgagtcatttgctgacattggtttccaaatttgaatttgtcttttgtttgaaattcctgtatcgagtgctgagtgttacaggaattctttccaaagagcttcaaaataaaaccatagacattttttctttgtcttcaaaaatagaagcaattttggaatgtttatcatctgaaagaaatgacgtatactttaaaacaatctgggatggaacagaggaaatatgtcaaaaaataacctgtaaaggttttaaagttgaaaaaccttctcttcagaaaagaagaaaaattcagaaatcagtagatcttggcaattcagataatatgttttttcctacttcaacagaagaacaatataaaattaatatctattaccaaggattagatactatattacaaaatttaaagttatgtttttcggagtttgattattgcaaaataaagcaaatttcagaactgttatttaaatggaatgaaccattaaatgaaacaacagcaaaacatgttcaggaattttataaacttgatgaggacattatcccagaacttagattttatcgacattatgcaaagcttaactttgtcatagatgatagttgcataaacttcgtcagtctcggctgtttgtttattcagcatggtcttcacagtaatattccttgtctctcaaagctattatatattgctttgtcttggccaattacttcagcaagtactgagaactcattttctaccctgcctcgtcttaagacatatttatgtaataccatgggacaagagaagcttactggcccagccctaatggctgttgagcaggagttggtaaataaactaatggagcctgaaagactcaatgaaattgtggaaaagtttatcagtcagatgaaagaaatataatacatgctcatttgaacttacctaaaagacttgtatttccattgggatgttttcatttcaaaattgttcaaaattcaaaagacacagaacgataaacagtgaagtctccttccctcctttagaactcattttctcttcccaaaaagtgttatcttttccttaaatatccctctagaggtatttttcctaagtggtattgtacggtgtatactgttcttcagcttgtcttctctgtgtaacatatttttgagattgtcccatgtcgttacatgaagagtttcttgattcttggtctataattgcagatgttattgtatgaatgtaccataatatatttgagcagtccctgctgacatttttttcctaaccttttgctattataaataatgattcattttataaccttttatataggtcacattgcacatgagtgagtttactgtaagctggaaatctaaagttagaattactaggttaagatatgtgcatttttacttttgatagatattggcaagttgccatctataaggattgtgccagtttacagtcccacccacaatgcatgagagtgcctattaaatctttgtaagtgttat

SEQ ID NO: 204614 - DNA, 4203 bp, Homo sapiens
  Payload ID: 20361
  Gene Name: zinc finger, MYM-type 1
  Uniprot ID: Q5SVZ6
  ENST ID: ENST00000373330
  CDS Start-End: 175-3603
gcttcgaagattgtttcagaagcgttgggcggggcgtccctgagagaaattagttcaagcgattctcgtgcctcagcctcccgagtagctgggattacaggaatctggaaactgttcttcaggaagaaacccattagtttggaactggagaattcctttgcatcagatactaaaatgaaagaaccacttttaggtggtgagtgtgacaaggcagtggcatcacagctggggctgctagatgaaattaagacagaacccgacaatgctcaagagtattgtcataggcaacagtccagaactcaggagaatgaactgaaaataaatgctgtgttttcagagagtgcttcacagttgactgcaggcattcagctttctctggcatcatctggcgtgaataaaatgcttccttcagtttcaaccacagctattcaggtttcctgtgctggttgtaaaaaaattctccagaaggggcaaactgcttatcagaggaaaggatctgctcaacttttctgctccataccatgcatcactgaatacatttcatctgccagttcaccagttccttctaagagaacttgttcaaactgctcaaaagacattttaaatccaaaggatgtgattagtgtccagctggaagacactacctcttgcaaaactttttgcagcctatcttgtctttcatcatatgaagaaaaaagaaaaccatttgttaccatatgtactaatagcattttgaccaagtgcagcatgtgccagaagactgctattattcagtatgaagtaaaataccaaaatgtgaaacataatctttgcagtaatgcctgcctttcaaagtttcactctgctaacaacttcatcatgaactgctgtgagaactgtggcacttactgttacaccagctctagtctgtcccacatacttcagatggaaggacagtctcattactttaatagttcaaagagtattacagcatataagcagaaacctgccaaaccacttatatctgttccttgcaaaccattgaagccctcagatgaaatgattgagactacgagtgatttggggaagacagagcttttctgctctattaattgtttctctgcatacagtaaagctaagatggaatcttcttcagtaagtgttgtttctgtggtgcatgatacttcaacagagcttctttctccaaagaaagatacgactccagttataagcaatatagtgtcattggcagacaccgatgttgccttgcccatcatgaacactgatgtcttacaagatacagtttcttcagtaacagcaacagcagatgtcattgtggatctttctaagagttcacctagtgaacccagtaatgctgttgctagtagtagtacggaacagccaagcgtttcaccatcttcatcagtattcagtcagcatgcaattggttccagtacagaagtacaaaaagacaatatgaaatctatgaaaataagtgatgaactatgtcacccaaaatgtacatccaaagtacaaaaagttaaaggtaaatcacgaagtattaaaaaatcttgttgtgcagattttgagtgtttggaaaacagtaaaaaagatgtggcattctgttattcatgccagttgttctgccaaaaatattttagctgtggaagagagtcatttgcaacccacggaacttctaattggaaaaaaaccctggaaaaattcagaaagcatgaaaaaagtgaaatgcatttgaagtcattggaattttggagagaataccaattttgtgatggagctgtcagtgacgatttatctattcattcgaaacagattgagggaaataaaaagtacctaaagcttataattgaaaatattttatttcttggaaagcagtgtttacccttaagaggaaacgaccagtcagtttcatctgtgaataaaggcaattttttagaattgttagaaatgagagcaaaagataaaggagaagaaacatttcgacttatgaattcacaagttgacttctataacagtacacaaattcaaagtgatattatcgaaataataaagactgaaatgttgcaggatattgtgaatgagatcaatgactcctcagcattttcaatcatatgtgatgagacaatcaatagtgccatgaaagaacagctttcaatttgtgtaagatacccacaaaaatcatcaaaggctatcttaattaaggaaagattcttgggttttgttgatactgaggagatgactgggacccacttacataggactatcaaaacttatctgcagcaaattggagttgatatggataaaatacatggccaggcctatgatagcaccactaatttgaagataaaatttaataaaatagcagcagaattcaagaaagaagaaccaagagctttatacatacattgttatgcacactttttggatttatcaataattaggttttgtaaagaagtaaaagaactccgaagtgctctaaaaactctcagttctttgttcaacactatttgtatgtctggggaaatgttggcaaattttcgaaacatttataggctaagtcaaaacaaaacatgcaagaaacatatatcacaatcatgttggacagtccatgatcgtacattactatctgtgattgacagtcttccagagattattgaaacattggaagttatagcaagccattcttcaaatacaagtttcgccgatgaattgagtcatttgctgacattggtttccaaatttgaatttgtcttttgtttgaaattcctgtatcgagtgctgagtgttacaggaattctttccaaagagcttcaaaataaaaccatagacattttttctttgtcttcaaaaatagaagcaattttggaatgtttatcatctgaaagaaatgacgtatactttaaaacaatctgggatggaacagaggaaatatgtcaaaaaataacctgtaaaggttttaaagttgaaaaaccttctcttcagaaaagaagaaaaattcagaaatcagtagatcttggcaattcagataatatgttttttcctacttcaacagaagaacaatataaaattaatatctattaccaaggattagatactatattacaaaatttaaagttatgtttttcggagtttgattattgcaaaataaagcaaatttcagaactgttatttaaatggaatgaaccattaaatgaaacaacagcaaaacatgttcaggaattttataaacttgatgaggacattatcccagaacttagattttatcgacattatgcaaagcttaactttgtcatagatgatagttgcataaacttcgtcagtctcggctgtttgtttattcagcatggtcttcacagtaatattccttgtctctcaaagctattatatattgctttgtcttggccaattacttcagcaagtactgagaactcattttctaccctgcctcgtcttaagacatatttatgtaataccatgggacaagagaagcttactggcccagccctaatggctgttgagcaggagttggtaaataaactaatggagcctgaaagactcaatgaaattgtggaaaagtttatcagtcagatgaaagaaatataatacatgctcatttgaacttacctaaaagacttgtatttccattgggatgttttcatttcaaaattgttcaaaattcaaaagacacagaacgataaacagtgaagtctccttccctcctttagaactcattttctcttcccaaaaagtgttatcttttccttaaatatccctctagaggtatttttcctaagtggtattgtacggtgtatactgttcttcagcttgtcttctctgtgtaacatatttttgagattgtcccatgtcgttacatgaagagtttcttgattcttggtctataattgcagatgttattgtatgaatgtaccataatatatttgagcagtccctgctgacatttttttcctaaccttttgctattataaataatgattcattttataaccttttatataggtcacattgcacatgagtgagtttactgtaagctggaaatctaaagttagaattactaggttaagatatgtgcatttttacttttgatagatattggcaagttgccatctataaggattgtgccagtttacagtcccacccacaatgcatgagagtgcctattaaatctttgtaagtgttatcaaa

SEQ ID NO: 204615 - DNA, 1825 bp, Homo sapiens
  Payload ID: 20361
  Gene Name: zinc finger, MYM-type 1
  ENST ID: ENST00000417119
  CDS Start-End: 441-1825
agcattcttataggagtctccagcctctctttgcagttttcaagacaggaagttgacttcttccttgcagctccttccacagtgaacaacttggctgtcagagaggttctgattacaaaacccagtccagccacaaaaagcttctgcagaagcctgcctaatgtttacaaacctacgatgcagccactacaattatccccatttcaaggtcgaagaaatggagatttatagaagttgtcaaatcgcttactagcacacagctaataagtagtaaagccatctctcaaatccaggaaatctaactgccctgcctgagctctgagtcaagggtcctactttggctgccagccagcgacgacttcaagggaatctggaaactgttcttcaggaagaaacccattagtttggaactggagaattcctttgcatcagatactaaaatgaaagaaccacttttaggtggtgagtgtgacaaggcagtggcatcacagctggggctgctagatgaaattaagacagaacccgacaatgctcaagagtattgtcataggcaacagtccagaactcaggagaatgaactgaaaataaatgctgtgttttcagagagtgcttcacagttgactgcaggcattcagctttctctggcatcatctggcgtgaataaaatgcttccttcagtttcaaccacagctattcaggtttcctgtgctggttgtaaaaaaattctccagaaggggcaaactgcttatcagaggaaaggatctgctcaacttttctgctccataccatgcatcactgaatacatttcatctgccagttcaccagttccttctaagagaacttgttcaaactgctcaaaagacattttaaatccaaaggatgtgattagtgtccagctggaagacactacctcttgcaaaactttttgcagcctatcttgtctttcatcatatgaagaaaaaagaaaaccatttgttaccatatgtactaatagcattttgaccaagtgcagcatgtgccagaagactgctattattcagtatgaagtaaaataccaaaatgtgaaacataatctttgcagtaatgcctgcctttcaaagtttcactctgctaacaacttcatcatgaactgctgtgagaactgtggcacttactgttacaccagctctagtctgtcccacatacttcagatggaaggacagtctcattactttaatagttcaaagagtattacagcatataagcagaaacctgccaaaccacttatatctgttccttgcaaaccattgaagccctcagatgaaatgattgagactacgagtgatttggggaagacagagcttttctgctctattaattgtttctctgcatacagtaaagctaagatggaatcttcttcagtaagtgttgtttctgtggtgcatgatacttcaacagagcttctttctccaaagaaagatacgactccagttataagcaatatagtgtcattggcagacaccgatgttgccttgcccatcatgaacactgatgtcttacaagatacagtttcttcagtaacagcaacagcagatgtcattgtggatctttctaagagttcacctagtgaacccagtaatgctgttgctagtagtagtacggaacagccaagcgtttcaccatcttcatcagtattcagtcagcatgcaattggttccagtacagaagtacaaaaagacaatatgaaatctatgaaaataagtgatgaactatgtcacccaaaatgtacatccaaagtacaaaaagttaaaggtaaatcacgaagtattaaaaaatcttgttgtgc

SEQ ID NO: 204616 - DNA, 4466 bp, Homo sapiens
  Payload ID: 20361
  Gene Name: zinc finger, MYM-type 1
  Uniprot ID: Q5SVZ6
  ENST ID: ENST00000611874
  CDS Start-End: 441-3869
agcattcttataggagtctccagcctctctttgcagttttcaagacaggaagttgacttcttccttgcagctccttccacagtgaacaacttggctgtcagagaggttctgattacaaaacccagtccagccacaaaaagcttctgcagaagcctgcctaatgtttacaaacctacgatgcagccactacaattatccccatttcaaggtcgaagaaatggagatttatagaagttgtcaaatcgcttactagcacacagctaataagtagtaaagccatctctcaaatccaggaaatctaactgccctgcctgagctctgagtcaagggtcctactttggctgccagccagcgacgacttcaagggaatctggaaactgttcttcaggaagaaacccattagtttggaactggagaattcctttgcatcagatactaaaatgaaagaaccacttttaggtggtgagtgtgacaaggcagtggcatcacagctggggctgctagatgaaattaagacagaacccgacaatgctcaagagtattgtcataggcaacagtccagaactcaggagaatgaactgaaaataaatgctgtgttttcagagagtgcttcacagttgactgcaggcattcagctttctctggcatcatctggcgtgaataaaatgcttccttcagtttcaaccacagctattcaggtttcctgtgctggttgtaaaaaaattctccagaaggggcaaactgcttatcagaggaaaggatctgctcaacttttctgctccataccatgcatcactgaatacatttcatctgccagttcaccagttccttctaagagaacttgttcaaactgctcaaaagacattttaaatccaaaggatgtgattagtgtccagctggaagacactacctcttgcaaaactttttgcagcctatcttgtctttcatcatatgaagaaaaaagaaaaccatttgttaccatatgtactaatagcattttgaccaagtgcagcatgtgccagaagactgctattattcagtatgaagtaaaataccaaaatgtgaaacataatctttgcagtaatgcctgcctttcaaagtttcactctgctaacaacttcatcatgaactgctgtgagaactgtggcacttactgttacaccagctctagtctgtcccacatacttcagatggaaggacagtctcattactttaatagttcaaagagtattacagcatataagcagaaacctgccaaaccacttatatctgttccttgcaaaccattgaagccctcagatgaaatgattgagactacgagtgatttggggaagacagagcttttctgctctattaattgtttctctgcatacagtaaagctaagatggaatcttcttcagtaagtgttgtttctgtggtgcatgatacttcaacagagcttctttctccaaagaaagatacgactccagttataagcaatatagtgtcattggcagacaccgatgttgccttgcccatcatgaacactgatgtcttacaagatacagtttcttcagtaacagcaacagcagatgtcattgtggatctttctaagagttcacctagtgaacccagtaatgctgttgctagtagtagtacggaacagccaagcgtttcaccatcttcatcagtattcagtcagcatgcaattggttccagtacagaagtacaaaaagacaatatgaaatctatgaaaataagtgatgaactatgtcacccaaaatgtacatccaaagtacaaaaagttaaaggtaaatcacgaagtattaaaaaatcttgttgtgcagattttgagtgtttggaaaacagtaaaaaagatgtggcattctgttattcatgccagttgttctgccaaaaatattttagctgtggaagagagtcatttgcaacccacggaacttctaattggaaaaaaaccctggaaaaattcagaaagcatgaaaaaagtgaaatgcatttgaagtcattggaattttggagagaataccaattttgtgatggagctgtcagtgacgatttatctattcattcgaaacagattgagggaaataaaaagtacctaaagcttataattgaaaatattttatttcttggaaagcagtgtttacccttaagaggaaacgaccagtcagtttcatctgtgaataaaggcaattttttagaattgttagaaatgagagcaaaagataaaggagaagaaacatttcgacttatgaattcacaagttgacttctataacagtacacaaattcaaagtgatattatcgaaataataaagactgaaatgttgcaggatattgtgaatgagatcaatgactcctcagcattttcaatcatatgtgatgagacaatcaatagtgccatgaaagaacagctttcaatttgtgtaagatacccacaaaaatcatcaaaggctatcttaattaaggaaagattcttgggttttgttgatactgaggagatgactgggacccacttacataggactatcaaaacttatctgcagcaaattggagttgatatggataaaatacatggccaggcctatgatagcaccactaatttgaagataaaatttaataaaatagcagcagaattcaagaaagaagaaccaagagctttatacatacattgttatgcacactttttggatttatcaataattaggttttgtaaagaagtaaaagaactccgaagtgctctaaaaactctcagttctttgttcaacactatttgtatgtctggggaaatgttggcaaattttcgaaacatttataggctaagtcaaaacaaaacatgcaagaaacatatatcacaatcatgttggacagtccatgatcgtacattactatctgtgattgacagtcttccagagattattgaaacattggaagttatagcaagccattcttcaaatacaagtttcgccgatgaattgagtcatttgctgacattggtttccaaatttgaatttgtcttttgtttgaaattcctgtatcgagtgctgagtgttacaggaattctttccaaagagcttcaaaataaaaccatagacattttttctttgtcttcaaaaatagaagcaattttggaatgtttatcatctgaaagaaatgacgtatactttaaaacaatctgggatggaacagaggaaatatgtcaaaaaataacctgtaaaggttttaaagttgaaaaaccttctcttcagaaaagaagaaaaattcagaaatcagtagatcttggcaattcagataatatgttttttcctacttcaacagaagaacaatataaaattaatatctattaccaaggattagatactatattacaaaatttaaagttatgtttttcggagtttgattattgcaaaataaagcaaatttcagaactgttatttaaatggaatgaaccattaaatgaaacaacagcaaaacatgttcaggaattttataaacttgatgaggacattatcccagaacttagattttatcgacattatgcaaagcttaactttgtcatagatgatagttgcataaacttcgtcagtctcggctgtttgtttattcagcatggtcttcacagtaatattccttgtctctcaaagctattatatattgctttgtcttggccaattacttcagcaagtactgagaactcattttctaccctgcctcgtcttaagacatatttatgtaataccatgggacaagagaagcttactggcccagccctaatggctgttgagcaggagttggtaaataaactaatggagcctgaaagactcaatgaaattgtggaaaagtttatcagtcagatgaaagaaatataatacatgctcatttgaacttacctaaaagacttgtatttccattgggatgttttcatttcaaaattgttcaaaattcaaaagacacagaacgataaacagtgaagtctccttccctcctttagaactcattttctcttcccaaaaagtgttatcttttccttaaatatccctctagaggtatttttcctaagtggtattgtacggtgtatactgttcttcagcttgtcttctctgtgtaacatatttttgagattgtcccatgtcgttacatgaagagtttcttgattcttggtctataattgcagatgttattgtatgaatgtaccataatatatttgagcagtccctgctgacatttttttcctaaccttttgctattataaataatgattcattttataaccttttatataggtcacattgcacatgagtgagtttactgtaagctggaaatctaaagttagaattactaggttaagatatgtgcatttttacttttgatagatattggcaagttgccatctataaggattgtgccagtttacagtcccacccacaatgcatgagagtgcctattaaatctttgtaagtgttatc

SEQ ID NO: 204617 - DNA, 5051 bp, Homo sapiens
  Payload ID: 20362
  Gene Name: zinc finger, MYM-type 2
  Uniprot ID: Q9UBW7
  ENST ID: ENST00000382871
  CDS Start-End: 186-4319
cgaaggggggtgggccgggggaggggaggttcgttccgcggagccccagccagaaccgggaccaagaatcgccttcagccctgtctggtgcatccttggcagaaagtgaggaggaaaacacccccattgttagatgaggtcttaatcatggaacatttgaagtcacgtaaagaaggttctttggcatggacacaagttcagtgggaggattagaattgactgatcagactcctgttttattagggagtacggccatggcaactagtctcacgaatgtaggaaactcatttagtggtccagctaatcctttagtgtctagatctaataagtttcagaactcgtcagtggaagatgatgatgatgttgtttttatcgaacctgtacaacctcccccaccttctgtaccagtggtagctgatcaaagaaccataacatttacatcatcaaaaaatgaagaactacaaggaaatgattccaaaattactccttcctcaaaagagttggcatctcagaagggaagtgtaagtgagacaattgtcattgatgatgaagaggacatggaaacaaatcaagggcaagagaaaaattcctccaattttattgaacgaagacctcctgagactaaaaacagaaccaatgatgtggatttctccacttccagtttttcaagaagtaaggtaaatgcaggaatgggtaatagtggtatcaccacagaaccagactctgaaattcagattgctaatgttacaactttagaaacaggtgtaagctctgtgaatgatggccaattagaaaatactgacgggcgagatatgaacttaatgattacacatgtaacatcactgcagaataccaacttgggagatgtctctaacggactgcagtcaagtaattttggtgttaatatacaaacatacaccccatctttaacttcacagaccaagactggagtaggaccttttaatcctggtagaatgaatgtggcaggagacgtttttcagaatggagaatctgcaactcatcataatcctgattcttggatctcccagtcagcttcatttccccgtaatcagaaacaaccaggggtggactctttatcaccagtggcctcacttcctaaacagattttccagccgtctgtccaacagcagcctactaaaccagttaaagtcacttgtgcaaactgcaaaaaacctttacagaagggccagacagcttatcaacgaaaaggatcagctcacctcttttgttctaccacctgcctttcttccttctcccacaagcctgctccaaagaaactctgtgttatgtgtaaaaaagatataactacaatgaaaggaaccattgttgctcaagtggattcaagtgagtccttccaggaattctgtagtacatcttgtttatctctctatgaagacaaacagaatcctactaaaggagctctaaataaatcaagatgtacaatctgtggtaaactaactgagattcgccatgaagtcagctttaaaaatatgactcataagctgtgcagtgaccactgctttaatagatatagaatggccaatggtttaataatgaattgctgtgaacagtgtggagagtacttgcccagtaaaggtgctggaaataatgttctggtgattgatggtcaacagaaaagattttgctgtcaaagttgtgtcagtgaatacaaacaggtaggtagccatccaagcttcctgaaggaggttcgagatcacatgcaggactctttcttaatgcagcctgagaaatatggaaaactgacaacttgtactggttgccgaacacagtgcaggttttttgatatgactcagtgtataggtcctaatggatatatggagccatattgttcaactgcttgtatgaacagtcacaagacaaaatatgcaaaatcacaaagtttgggaattatttgccatttttgtaagcgaaactctttacctcaataccaagccacaatgcctgatggaaaactgtacaacttttgcaattccagttgtgtggctaaatttcaggctctaagtatgcagtcatctccaaatggccagtttgtagcgccaagtgatattcagttgaaatgcaactactgcaaaaattccttttgttcaaaaccagaaatcctggaatgggagaacaaagtgcatcagttctgcagcaaaacttgttcagatgactataagaagttgcattgcatagttacatattgcgaatactgtcaagaggagaagactcttcatgaaacagtaaatttctctggcgttaagagacctttctgtagtgaaggctgcaaattattatacaaacaggattttgccagacgtttaggattgagatgtgttacttgcaactattgttctcagctatgtaagaagggagcaactaaagaactcgatggtgttgtgagagatttctgcagtgaagattgctgtaaaaaatttcaggattggtactacaaggctgcaaggtgtgactgttgtaaatctcaaggaactcttaaagagcgagttcagtggcgtggggaaatgaaacatttctgtgatcaacattgcttactgcgtttctactgtcaacaaaatgagcccaacatgacaactcagaaaggacctgaaaacttacattatgatcagggttgtcagacatctcgaaccaaaatgacaggttcagcaccacccccttctccaacacctaacaaagagatgaagaacaaagcagttctttgcaaacctttaacaatgacaaaagctacttactgtaaacctcacatgcagaccaaatcttgtcagacagatgatacttggaggacagaatatgttccagtgcctatccctgtgcctgtgtatatcccagttcctatgcacatgtacagtcagaatattcctgttcctactacagttcctgttcctgtgccagttcctgtttttctgcctgctccattggacagcagtgagaagattcctgcagcaattgaggagctaaaaagcaaggtttcttcagatgctcttgatacagagttgcttacaatgacggatatgatgagtgaagacgaggggaaaacagagacaaccaacatcaacagtgtaattattgaaacagatataattggttcagaccttttgaagaactctgacccagagacacagtccagcatgcctgatgtaccatatgaaccagatttggatatcgaaatagattttcccagagctgctgaggagcttgatatggaaaatgaatttttattaccacctgtttttggcgaagaatatgaggaacagcccagacctcgatctaaaaaaaagggagccaagagaaaggctgtatcaggataccagtctcatgatgatagttctgacaattcagaatgcagctttcctttcaaatatacgtatggcgtaaatgcatggaaacactgggtcaaaactaggcaacttgatgaagatcttctggtattagatgagttaaaatcttctaaatcagtaaagttaaaagaggatctactctctcacaccacagctgagcttaactatgggttagctcattttgtcaatgagatccgacggccaaatggagagaattatgcacctgacagcatctattacctttgccttggaatacaggagtatttgtgtggaagtaatcgaaaagacaacatatttattgatcctggataccaaacatttgagcaagaattgaataaaatactgcgaagctggcaaccaagcatacttccagatgggtcaatattctctcgagttgaagaagactatctctggaggataaaacaactaggatcacactctccagtagctcttctgaatacactgttctactttaacactaagtattttggcctgaaaacagtggaacaacacttaagactttcctttggcactgtgtttaggcattggaaaaaaaatcctttaacgatggaaaacaaagcgtgtcttcgataccaagtgtcttccttgtgtggaacagataatgaagataaaattactactggaaaaagaaaacatgaagatgatgagccagtatttgaacaaattgaaaacacagccaatccttccagatgtcctgtgaaaatgtttgaatgctacttgtctaaaagtccacagaatcttaatcagaggatggatgttttttatttgcaaccagaatgctctagttctacagatagccctgtctggtatacgtctacttcactggaccgaaacaccttggaaaatatgcttgtacgggttcttctagtaaaagatatttatgataaagacaattatgaactggatgaagacacagactaaaaaggaacgttgcagaagcaatcgggataaaacagcattagatagtcatgctgctagatctttattatggaaaacatttcaagtttactccttctgttttgagttttgtagcagtgtacccacgctgggtattaccatgtaaataatctgtgagtgaaagttgccattattctatgtagtggttttaggatacttaacaaatacattcaaattctttttttattattatttatttgattaggtatgtttgtaactttttacattacagaatatgaatgagaatgtgccatgtataatttttttcttgtagtaagaaacatccatattgcacaactctactgttgcaaagcttccttggaagggggctcttttactgggttcttaaccagatggttgtgtatgggtagcactactaaaagtttagaacttgcagtgtctttcggaatttttaaaataaactgtaaactaataggctggggtttttgttttgttttggggttttgttttgtttggttttacattttagttactgaagccttacaaggttatgtagagagataccatcttctgtaccaaaaatagacaagagaatgctgtcaatattggtgtactgtaatgtgaatctatgctggtgaaaacaattttttgttccccttattaaaaccttagtgtccttttctcatttgtggctttctgcatcacccaatcaataaaaaacaaatatatatatgt

SEQ ID NO: 204618 - DNA, 10139 bp, Homo sapiens
  Payload ID: 20362
  Gene Name: zinc finger, MYM-type 2
  Uniprot ID: Q9UBW7
  ENST ID: ENST00000382874
  CDS Start-End: 191-4324
ccgccgcctcctccgcctcctcctcctcaccagcgctaaagccgggactggaccgagcggagttgaccaagaatcgccttcagccctgtctggtgcatccttggcagaaagtgaggaggaaaacacccccattgttagatgaggtcttaatcatggaacatttgaagtcacgtaaagaaggttctttggcatggacacaagttcagtgggaggattagaattgactgatcagactcctgttttattagggagtacggccatggcaactagtctcacgaatgtaggaaactcatttagtggtccagctaatcctttagtgtctagatctaataagtttcagaactcgtcagtggaagatgatgatgatgttgtttttatcgaacctgtacaacctcccccaccttctgtaccagtggtagctgatcaaagaaccataacatttacatcatcaaaaaatgaagaactacaaggaaatgattccaaaattactccttcctcaaaagagttggcatctcagaagggaagtgtaagtgagacaattgtcattgatgatgaagaggacatggaaacaaatcaagggcaagagaaaaattcctccaattttattgaacgaagacctcctgagactaaaaacagaaccaatgatgtggatttctccacttccagtttttcaagaagtaaggtaaatgcaggaatgggtaatagtggtatcaccacagaaccagactctgaaattcagattgctaatgttacaactttagaaacaggtgtaagctctgtgaatgatggccaattagaaaatactgacgggcgagatatgaacttaatgattacacatgtaacatcactgcagaataccaacttgggagatgtctctaacggactgcagtcaagtaattttggtgttaatatacaaacatacaccccatctttaacttcacagaccaagactggagtaggaccttttaatcctggtagaatgaatgtggcaggagacgtttttcagaatggagaatctgcaactcatcataatcctgattcttggatctcccagtcagcttcatttccccgtaatcagaaacaaccaggggtggactctttatcaccagtggcctcacttcctaaacagattttccagccgtctgtccaacagcagcctactaaaccagttaaagtcacttgtgcaaactgcaaaaaacctttacagaagggccagacagcttatcaacgaaaaggatcagctcacctcttttgttctaccacctgcctttcttccttctcccacaagcctgctccaaagaaactctgtgttatgtgtaaaaaagatataactacaatgaaaggaaccattgttgctcaagtggattcaagtgagtccttccaggaattctgtagtacatcttgtttatctctctatgaagacaaacagaatcctactaaaggagctctaaataaatcaagatgtacaatctgtggtaaactaactgagattcgccatgaagtcagctttaaaaatatgactcataagctgtgcagtgaccactgctttaatagatatagaatggccaatggtttaataatgaattgctgtgaacagtgtggagagtacttgcccagtaaaggtgctggaaataatgttctggtgattgatggtcaacagaaaagattttgctgtcaaagttgtgtcagtgaatacaaacaggtaggtagccatccaagcttcctgaaggaggttcgagatcacatgcaggactctttcttaatgcagcctgagaaatatggaaaactgacaacttgtactggttgccgaacacagtgcaggttttttgatatgactcagtgtataggtcctaatggatatatggagccatattgttcaactgcttgtatgaacagtcacaagacaaaatatgcaaaatcacaaagtttgggaattatttgccatttttgtaagcgaaactctttacctcaataccaagccacaatgcctgatggaaaactgtacaacttttgcaattccagttgtgtggctaaatttcaggctctaagtatgcagtcatctccaaatggccagtttgtagcgccaagtgatattcagttgaaatgcaactactgcaaaaattccttttgttcaaaaccagaaatcctggaatgggagaacaaagtgcatcagttctgcagcaaaacttgttcagatgactataagaagttgcattgcatagttacatattgcgaatactgtcaagaggagaagactcttcatgaaacagtaaatttctctggcgttaagagacctttctgtagtgaaggctgcaaattattatacaaacaggattttgccagacgtttaggattgagatgtgttacttgcaactattgttctcagctatgtaagaagggagcaactaaagaactcgatggtgttgtgagagatttctgcagtgaagattgctgtaaaaaatttcaggattggtactacaaggctgcaaggtgtgactgttgtaaatctcaaggaactcttaaagagcgagttcagtggcgtggggaaatgaaacatttctgtgatcaacattgcttactgcgtttctactgtcaacaaaatgagcccaacatgacaactcagaaaggacctgaaaacttacattatgatcagggttgtcagacatctcgaaccaaaatgacaggttcagcaccacccccttctccaacacctaacaaagagatgaagaacaaagcagttctttgcaaacctttaacaatgacaaaagctacttactgtaaacctcacatgcagaccaaatcttgtcagacagatgatacttggaggacagaatatgttccagtgcctatccctgtgcctgtgtatatcccagttcctatgcacatgtacagtcagaatattcctgttcctactacagttcctgttcctgtgccagttcctgtttttctgcctgctccattggacagcagtgagaagattcctgcagcaattgaggagctaaaaagcaaggtttcttcagatgctcttgatacagagttgcttacaatgacggatatgatgagtgaagacgaggggaaaacagagacaaccaacatcaacagtgtaattattgaaacagatataattggttcagaccttttgaagaactctgacccagagacacagtccagcatgcctgatgtaccatatgaaccagatttggatatcgaaatagattttcccagagctgctgaggagcttgatatggaaaatgaatttttattaccacctgtttttggcgaagaatatgaggaacagcccagacctcgatctaaaaaaaagggagccaagagaaaggctgtatcaggataccagtctcatgatgatagttctgacaattcagaatgcagctttcctttcaaatatacgtatggcgtaaatgcatggaaacactgggtcaaaactaggcaacttgatgaagatcttctggtattagatgagttaaaatcttctaaatcagtaaagttaaaagaggatctactctctcacaccacagctgagcttaactatgggttagctcattttgtcaatgagatccgacggccaaatggagagaattatgcacctgacagcatctattacctttgccttggaatacaggagtatttgtgtggaagtaatcgaaaagacaacatatttattgatcctggataccaaacatttgagcaagaattgaataaaatactgcgaagctggcaaccaagcatacttccagatgggtcaatattctctcgagttgaagaagactatctctggaggataaaacaactaggatcacactctccagtagctcttctgaatacactgttctactttaacactaagtattttggcctgaaaacagtggaacaacacttaagactttcctttggcactgtgtttaggcattggaaaaaaaatcctttaacgatggaaaacaaagcgtgtcttcgataccaagtgtcttccttgtgtggaacagataatgaagataaaattactactggaaaaagaaaacatgaagatgatgagccagtatttgaacaaattgaaaacacagccaatccttccagatgtcctgtgaaaatgtttgaatgctacttgtctaaaagtccacagaatcttaatcagaggatggatgttttttatttgcaaccagaatgctctagttctacagatagccctgtctggtatacgtctacttcactggaccgaaacaccttggaaaatatgcttgtacgggttcttctagtaaaagatatttatgataaagacaattatgaactggatgaagacacagactaaaaaggaacgttgcagaagcaatcgggataaaacagcattagatagtcatgctgctagatctttattatggaaaacatttcaagtttactccttctgttttgagttttgtagcagtgtacccacgctgggtattaccatgtaaataatctgtgagtgaaagttgccattattctatgtagtggttttaggatacttaacaaatacattcaaattctttttttattattatttatttgattaggtatgtttgtaactttttacattacagaatatgaatgagaatgtgccatgtataatttttttcttgtagtaagaaacatccatattgcacaactctactgttgcaaagcttccttggaagggggctcttttactgggttcttaaccagatggttgtgtatgggtagcactactaaaagtttagaacttgcagtgtctttcggaatttttaaaataaactgtaaactaataggctggggtttttgttttgttttggggttttgttttgtttggttttacattttagttactgaagccttacaaggttatgtagagagataccatcttctgtaccaaaaatagacaagagaatgctgtcaatattggtgtactgtaatgtgaatctatgctggtgaaaacaattttttgttccccttattaaaaccttagtgtccttttctcatttgtggctttctgcatcacccaatcaataaaaaacaaatatatatatgtatatatatgtatgtatgtgtgtgtgtatatatatatatatatatatatatataaatgattgtaagttgaaaacaagatcatcaagacatttcctttgtaaaaatgtctggtgaaagtataaaattctgttttcttctatgccagccataagtatctgaaatcctcttcatttatagaggtttgatttttatttctttttttccctcttaaggatacagatcatgctgcaatgttagctgtgtagtactctaaaacttagcaattttatcagaattcttgtgcctgtttacattggataaaattgtttttagaaattccactcctgaaatagttacagaaagtcaagctatgttaaataagataggatcacattttataatgaagattaccagtgtagtaattctgatattgcaaatgattgaggaacaaacaaagaaactaatagagaaagtcagtctcagaggaaatcccatttaatgttagattgtttggcttttgaaattacttcttatagaagattgcattaaaaaaaaaaacaactttgtgcttctgcatagcaatttatccattcagaccttttcttttagaataaggaaacttaaaatctactttctaaagactgaacaaagtgctagctgcaaattatcttgaaatcatttggctcttttctagcatgtgtgtaatcatgttttcttctgattcctgaatgaccatggtagcattagtgtttagaaattgttcaggggaaaattgagctattttccatagtggctagcaattgctacacatccttagatactcctctctcccataggataaatgttacagcacacaaaagaaattttctcaattctgatttggaaaatttcacaggtgtcattattgtatatctaagcaataattatctgaatgttttggcataaaaaattataatgttctaacttgttttataagttgaatgacttttcagtcccttgattttatattgttgagtgataatcagactgatagtagcaaatctgatcatacattactaaaatagattgctgattgtctatttaacgaagacaagtgggtaacatttaaaatatataatacaaaaattttctctaacttacctttttccagaactacttctttaagcacttttcctattaatgcctattgttgattaaaaggtggttaattctaaccatcttttagtcttcaaagtggtgctatattccatcaagagcaataaagtttttcccaggtgtcacttattgtatatgttaccaaataccatgaatttctgccatagtactactatcaagcaccttgtcttgctatttacagtttcttcatttgtatatttttagcttttctaagtggaaatgtctacataattttgatcttgacatgattgaggatttagagctcttgtctttgtcttgattgcaatccaacgatagattaacttgattctcagggggaaaagaaaaacttattttatgagaattgtttgttctgtgaaactcacttcacctagaacacatttcattgattcttggatcttagtttatgtggtcatagttgactgctgagaaaaggacaatgaaatgatagcaatttccttttgcttctaggtgatctctgattatagatagcatcctgtaaatataactttattgtcttgaaatgtttattgaagatgctatatttttctgttctgttttctgaagattttgccatttaaaatgatccagtgaaaaatatttatccacattgaagaaagtggatttcccatgcaaattgaatcttcattaacacattttaaaaggctttactgtattaggtaacatagatattaaaggatttttctaggcaagaagctcaactttttttttccataaaaataatttttgcttaaatagtaactcatggttttcttttattaaatggggttgttgtcagtatgttaaacattgaagtaggaggaggatgcatattgtactatgcattcaaatttatcactgttttttctgacagactttccctttgtcctttctagttatgacttgggaatggggtaacttctttatgcatagtattaagggttatagtatgaagaaatcataaaattgcaagttttggtttgcattactctaatgtgggttcatttaatctgagatcttaaatatcttgcagccttaaatcactacaaacatttgcatttttattatgccagttatttccaaaatgtattgttatacatgtcacttatgtttttaagctaatattgactgtaggataatctccttgttcccctcaaaatagtcatgaaagtgtacatgaaaatatttttaaagaataaatttctttaaattacatacttttggatttcccccttaataagccccttactcatgtttagagaagattttgaatttcatttattccattctactgtgttctgaggattatatcaatttagaagttgatgtccagaacaggttatctgtatcagttctgagaatagaaacaacctacagtgctgtcccaatttgtacttttttttctttactcggaagttagatgtcagagggacacctcaaataagtgactgtgatcccctgccttgtaatgaagtggaaaagagagggtccctaaaaatctgggcaagtggtgtcctaattagttactgagttaaaacaagttcatgaatttaggccttttgggaaagaaagagaatgtaagatttaacctgtaaatgttaagaatagaaccaaagagagggccacagaccattagttgttaagaggtatcaatcttaacagcatattttctcttgtgcaatgaaaagaacaatcgtagctcttttgggcatcttaggtcttttattctttctggatggcttacatcgaatccttgtgatttatttaaagacacatttttcctggagaggagaaagatcttctctaaaatagccttaacactgagaacatattaggcctaattttaaaagtccaattcagataactcctcagaagtaaatgcagcacactaaaattcattatcacaaaacttaatatttgttaatatgtttcctctgtgctaaaaggctgctgctaaccatggtagttagggaggaagagaaagtaaaagacattagtgttcaaaaacttacatctttgggggtaaacaagacatatagtacatttaactcctagggaacttagaatatttatggtaggatagaaagagatgattgtggacacacacaagtaccccaaaaggccattatggtctagaataggtttcatagagaggattactaccacctgtgattatatggtatatgaaacatgagattttgtaacctggacattgcttttagctctgttggaaatggtcagtagagcaatttctgaatattttgatggtacggtgttgatggcatcagtccttttctgtggctttcagcccaacttaatacaagaggagttaaaaatagcacccaaaaggggtagctagagcaccctcaccatgcactaaagataaatctaaaaggtgttcaagtacattgaatcaagatgagtaatccaacttctatgttatgtaggatggatggagcacacaaattcttgcaaacattgtagaggtttttttaaacttcatccactaaggatttttttataataattacttttgaaaataaaatctcaactattttccaagttatgagtgtgctgctcttaaccctgtgagatgaaatcttcccatttggattacatatttgtagttctatatcgacatcagcagatggcaatagtatacaaatagtatacagcatgagccttccattgcttttatttctttgtttataagtatactataatccttcatctgaaacccttagggttttagaattcagaattttccccttttcagagagaatatatataatgtagattacataacaccctcaatggggcctggggcaacaccccataatcaaacattagtacattcatagtaactgggattaactatgtaaggcagtaagctacctgccttacatagtttaggtcaatttttgtcacaaacttatggaaaaactaggtttttagaaattttttggatctcagaattcgtgattagggattgctgacctctgtaaggaaactggtgtcaggtctagaattttccttctaatgaaatacgtagtcattttccccctttttaaattgcttagctttggtagaggtaactgaaggctttctttagaattcgtgtgttagattttaagaaaaatgcatgaaattgttaggacaggcataaatacaaatggcaattctagagccattacggaattttgaaacacttaacaattgctttcttttacttttcatcttgcctcaatacttgtagcattacaagtattccacgtaaataaacgtttatgaagagctgcagtcatgtcatggagccaggcatttattcattcaacaaataggttagtcttccacacacaatttcaggtgctgggaacacagaattaagacccagcccttcctctcaaggacttcgcgtagtttgggagaaacgggaatgggctggaatgtcagaataagatgggcacttaggccttattgagcatgatcacacttgtattttgaagtaaaataccctgatcaagtaatttaccaagaagctactttttgtgacacagctccgtctcctgaccgcggttccagacttcaccattacaccagtctattcccattctggaaagggagaggtatcagctcttagggggcagagattagcaaattgaaaaatagcagtgaaccagatggaaggctctcgatctttagaggttattaatcagtgtttgttcgttcaatttttaaccagtcaccttgctgttaagagcagaacataattggctggaatgtaatgtagggaatttttccctgttggatccctagcacctagaaaagttcctagcacctattaggtgttaataaatgattgttgaatgaatcagtgattacaagtacttttaagaattttgaaaataaaggaaccattggaaatacga

SEQ ID NO: 204619 - DNA, 10200 bp, Homo sapiens
  Payload ID: 20362
  Gene Name: zinc finger, MYM-type 2
  Uniprot ID: Q9UBW7
  ENST ID: ENST00000610343
  CDS Start-End: 252-4385
agcgcgcggagggcggggcctccccgggctcggccgcgccgccgcctcctccgcctcctcctcctcaccagcgctaaagccgggactggaccgagcggagttgtgcgtgtcgccgaaggggggtgggccgggggaggggaggttcgttccgcggagccccagccagaaccgggaccaagaatcgccttcagccctgtctggtgcatccttggcagaaagtgaggaggaaaacacccccattgttctttggcatggacacaagttcagtgggaggattagaattgactgatcagactcctgttttattagggagtacggccatggcaactagtctcacgaatgtaggaaactcatttagtggtccagctaatcctttagtgtctagatctaataagtttcagaactcgtcagtggaagatgatgatgatgttgtttttatcgaacctgtacaacctcccccaccttctgtaccagtggtagctgatcaaagaaccataacatttacatcatcaaaaaatgaagaactacaaggaaatgattccaaaattactccttcctcaaaagagttggcatctcagaagggaagtgtaagtgagacaattgtcattgatgatgaagaggacatggaaacaaatcaagggcaagagaaaaattcctccaattttattgaacgaagacctcctgagactaaaaacagaaccaatgatgtggatttctccacttccagtttttcaagaagtaaggtaaatgcaggaatgggtaatagtggtatcaccacagaaccagactctgaaattcagattgctaatgttacaactttagaaacaggtgtaagctctgtgaatgatggccaattagaaaatactgacgggcgagatatgaacttaatgattacacatgtaacatcactgcagaataccaacttgggagatgtctctaacggactgcagtcaagtaattttggtgttaatatacaaacatacaccccatctttaacttcacagaccaagactggagtaggaccttttaatcctggtagaatgaatgtggcaggagacgtttttcagaatggagaatctgcaactcatcataatcctgattcttggatctcccagtcagcttcatttccccgtaatcagaaacaaccaggggtggactctttatcaccagtggcctcacttcctaaacagattttccagccgtctgtccaacagcagcctactaaaccagttaaagtcacttgtgcaaactgcaaaaaacctttacagaagggccagacagcttatcaacgaaaaggatcagctcacctcttttgttctaccacctgcctttcttccttctcccacaagcctgctccaaagaaactctgtgttatgtgtaaaaaagatataactacaatgaaaggaaccattgttgctcaagtggattcaagtgagtccttccaggaattctgtagtacatcttgtttatctctctatgaagacaaacagaatcctactaaaggagctctaaataaatcaagatgtacaatctgtggtaaactaactgagattcgccatgaagtcagctttaaaaatatgactcataagctgtgcagtgaccactgctttaatagatatagaatggccaatggtttaataatgaattgctgtgaacagtgtggagagtacttgcccagtaaaggtgctggaaataatgttctggtgattgatggtcaacagaaaagattttgctgtcaaagttgtgtcagtgaatacaaacaggtaggtagccatccaagcttcctgaaggaggttcgagatcacatgcaggactctttcttaatgcagcctgagaaatatggaaaactgacaacttgtactggttgccgaacacagtgcaggttttttgatatgactcagtgtataggtcctaatggatatatggagccatattgttcaactgcttgtatgaacagtcacaagacaaaatatgcaaaatcacaaagtttgggaattatttgccatttttgtaagcgaaactctttacctcaataccaagccacaatgcctgatggaaaactgtacaacttttgcaattccagttgtgtggctaaatttcaggctctaagtatgcagtcatctccaaatggccagtttgtagcgccaagtgatattcagttgaaatgcaactactgcaaaaattccttttgttcaaaaccagaaatcctggaatgggagaacaaagtgcatcagttctgcagcaaaacttgttcagatgactataagaagttgcattgcatagttacatattgcgaatactgtcaagaggagaagactcttcatgaaacagtaaatttctctggcgttaagagacctttctgtagtgaaggctgcaaattattatacaaacaggattttgccagacgtttaggattgagatgtgttacttgcaactattgttctcagctatgtaagaagggagcaactaaagaactcgatggtgttgtgagagatttctgcagtgaagattgctgtaaaaaatttcaggattggtactacaaggctgcaaggtgtgactgttgtaaatctcaaggaactcttaaagagcgagttcagtggcgtggggaaatgaaacatttctgtgatcaacattgcttactgcgtttctactgtcaacaaaatgagcccaacatgacaactcagaaaggacctgaaaacttacattatgatcagggttgtcagacatctcgaaccaaaatgacaggttcagcaccacccccttctccaacacctaacaaagagatgaagaacaaagcagttctttgcaaacctttaacaatgacaaaagctacttactgtaaacctcacatgcagaccaaatcttgtcagacagatgatacttggaggacagaatatgttccagtgcctatccctgtgcctgtgtatatcccagttcctatgcacatgtacagtcagaatattcctgttcctactacagttcctgttcctgtgccagttcctgtttttctgcctgctccattggacagcagtgagaagattcctgcagcaattgaggagctaaaaagcaaggtttcttcagatgctcttgatacagagttgcttacaatgacggatatgatgagtgaagacgaggggaaaacagagacaaccaacatcaacagtgtaattattgaaacagatataattggttcagaccttttgaagaactctgacccagagacacagtccagcatgcctgatgtaccatatgaaccagatttggatatcgaaatagattttcccagagctgctgaggagcttgatatggaaaatgaatttttattaccacctgtttttggcgaagaatatgaggaacagcccagacctcgatctaaaaaaaagggagccaagagaaaggctgtatcaggataccagtctcatgatgatagttctgacaattcagaatgcagctttcctttcaaatatacgtatggcgtaaatgcatggaaacactgggtcaaaactaggcaacttgatgaagatcttctggtattagatgagttaaaatcttctaaatcagtaaagttaaaagaggatctactctctcacaccacagctgagcttaactatgggttagctcattttgtcaatgagatccgacggccaaatggagagaattatgcacctgacagcatctattacctttgccttggaatacaggagtatttgtgtggaagtaatcgaaaagacaacatatttattgatcctggataccaaacatttgagcaagaattgaataaaatactgcgaagctggcaaccaagcatacttccagatgggtcaatattctctcgagttgaagaagactatctctggaggataaaacaactaggatcacactctccagtagctcttctgaatacactgttctactttaacactaagtattttggcctgaaaacagtggaacaacacttaagactttcctttggcactgtgtttaggcattggaaaaaaaatcctttaacgatggaaaacaaagcgtgtcttcgataccaagtgtcttccttgtgtggaacagataatgaagataaaattactactggaaaaagaaaacatgaagatgatgagccagtatttgaacaaattgaaaacacagccaatccttccagatgtcctgtgaaaatgtttgaatgctacttgtctaaaagtccacagaatcttaatcagaggatggatgttttttatttgcaaccagaatgctctagttctacagatagccctgtctggtatacgtctacttcactggaccgaaacaccttggaaaatatgcttgtacgggttcttctagtaaaagatatttatgataaagacaattatgaactggatgaagacacagactaaaaaggaacgttgcagaagcaatcgggataaaacagcattagatagtcatgctgctagatctttattatggaaaacatttcaagtttactccttctgttttgagttttgtagcagtgtacccacgctgggtattaccatgtaaataatctgtgagtgaaagttgccattattctatgtagtggttttaggatacttaacaaatacattcaaattctttttttattattatttatttgattaggtatgtttgtaactttttacattacagaatatgaatgagaatgtgccatgtataatttttttcttgtagtaagaaacatccatattgcacaactctactgttgcaaagcttccttggaagggggctcttttactgggttcttaaccagatggttgtgtatgggtagcactactaaaagtttagaacttgcagtgtctttcggaatttttaaaataaactgtaaactaataggctggggtttttgttttgttttggggttttgttttgtttggttttacattttagttactgaagccttacaaggttatgtagagagataccatcttctgtaccaaaaatagacaagagaatgctgtcaatattggtgtactgtaatgtgaatctatgctggtgaaaacaattttttgttccccttattaaaaccttagtgtccttttctcatttgtggctttctgcatcacccaatcaataaaaaacaaatatatatatgtatatatatgtatgtatgtgtgtgtgtatatatatatatatatatatatatataaatgattgtaagttgaaaacaagatcatcaagacatttcctttgtaaaaatgtctggtgaaagtataaaattctgttttcttctatgccagccataagtatctgaaatcctcttcatttatagaggtttgatttttatttctttttttccctcttaaggatacagatcatgctgcaatgttagctgtgtagtactctaaaacttagcaattttatcagaattcttgtgcctgtttacattggataaaattgtttttagaaattccactcctgaaatagttacagaaagtcaagctatgttaaataagataggatcacattttataatgaagattaccagtgtagtaattctgatattgcaaatgattgaggaacaaacaaagaaactaatagagaaagtcagtctcagaggaaatcccatttaatgttagattgtttggcttttgaaattacttcttatagaagattgcattaaaaaaaaaaacaactttgtgcttctgcatagcaatttatccattcagaccttttcttttagaataaggaaacttaaaatctactttctaaagactgaacaaagtgctagctgcaaattatcttgaaatcatttggctcttttctagcatgtgtgtaatcatgttttcttctgattcctgaatgaccatggtagcattagtgtttagaaattgttcaggggaaaattgagctattttccatagtggctagcaattgctacacatccttagatactcctctctcccataggataaatgttacagcacacaaaagaaattttctcaattctgatttggaaaatttcacaggtgtcattattgtatatctaagcaataattatctgaatgttttggcataaaaaattataatgttctaacttgttttataagttgaatgacttttcagtcccttgattttatattgttgagtgataatcagactgatagtagcaaatctgatcatacattactaaaatagattgctgattgtctatttaacgaagacaagtgggtaacatttaaaatatataatacaaaaattttctctaacttacctttttccagaactacttctttaagcacttttcctattaatgcctattgttgattaaaaggtggttaattctaaccatcttttagtcttcaaagtggtgctatattccatcaagagcaataaagtttttcccaggtgtcacttattgtatatgttaccaaataccatgaatttctgccatagtactactatcaagcaccttgtcttgctatttacagtttcttcatttgtatatttttagcttttctaagtggaaatgtctacataattttgatcttgacatgattgaggatttagagctcttgtctttgtcttgattgcaatccaacgatagattaacttgattctcagggggaaaagaaaaacttattttatgagaattgtttgttctgtgaaactcacttcacctagaacacatttcattgattcttggatcttagtttatgtggtcatagttgactgctgagaaaaggacaatgaaatgatagcaatttccttttgcttctaggtgatctctgattatagatagcatcctgtaaatataactttattgtcttgaaatgtttattgaagatgctatatttttctgttctgttttctgaagattttgccatttaaaatgatccagtgaaaaatatttatccacattgaagaaagtggatttcccatgcaaattgaatcttcattaacacattttaaaaggctttactgtattaggtaacatagatattaaaggatttttctaggcaagaagctcaactttttttttccataaaaataatttttgcttaaatagtaactcatggttttcttttattaaatggggttgttgtcagtatgttaaacattgaagtaggaggaggatgcatattgtactatgcattcaaatttatcactgttttttctgacagactttccctttgtcctttctagttatgacttgggaatggggtaacttctttatgcatagtattaagggttatagtatgaagaaatcataaaattgcaagttttggtttgcattactctaatgtgggttcatttaatctgagatcttaaatatcttgcagccttaaatcactacaaacatttgcatttttattatgccagttatttccaaaatgtattgttatacatgtcacttatgtttttaagctaatattgactgtaggataatctccttgttcccctcaaaatagtcatgaaagtgtacatgaaaatatttttaaagaataaatttctttaaattacatacttttggatttcccccttaataagccccttactcatgtttagagaagattttgaatttcatttattccattctactgtgttctgaggattatatcaatttagaagttgatgtccagaacaggttatctgtatcagttctgagaatagaaacaacctacagtgctgtcccaatttgtacttttttttctttactcggaagttagatgtcagagggacacctcaaataagtgactgtgatcccctgccttgtaatgaagtggaaaagagagggtccctaaaaatctgggcaagtggtgtcctaattagttactgagttaaaacaagttcatgaatttaggccttttgggaaagaaagagaatgtaagatttaacctgtaaatgttaagaatagaaccaaagagagggccacagaccattagttgttaagaggtatcaatcttaacagcatattttctcttgtgcaatgaaaagaacaatcgtagctcttttgggcatcttaggtcttttattctttctggatggcttacatcgaatccttgtgatttatttaaagacacatttttcctggagaggagaaagatcttctctaaaatagccttaacactgagaacatattaggcctaattttaaaagtccaattcagataactcctcagaagtaaatgcagcacactaaaattcattatcacaaaacttaatatttgttaatatgtttcctctgtgctaaaaggctgctgctaaccatggtagttagggaggaagagaaagtaaaagacattagtgttcaaaaacttacatctttgggggtaaacaagacatatagtacatttaactcctagggaacttagaatatttatggtaggatagaaagagatgattgtggacacacacaagtaccccaaaaggccattatggtctagaataggtttcatagagaggattactaccacctgtgattatatggtatatgaaacatgagattttgtaacctggacattgcttttagctctgttggaaatggtcagtagagcaatttctgaatattttgatggtacggtgttgatggcatcagtccttttctgtggctttcagcccaacttaatacaagaggagttaaaaatagcacccaaaaggggtagctagagcaccctcaccatgcactaaagataaatctaaaaggtgttcaagtacattgaatcaagatgagtaatccaacttctatgttatgtaggatggatggagcacacaaattcttgcaaacattgtagaggtttttttaaacttcatccactaaggatttttttataataattacttttgaaaataaaatctcaactattttccaagttatgagtgtgctgctcttaaccctgtgagatgaaatcttcccatttggattacatatttgtagttctatatcgacatcagcagatggcaatagtatacaaatagtatacagcatgagccttccattgcttttatttctttgtttataagtatactataatccttcatctgaaacccttagggttttagaattcagaattttccccttttcagagagaatatatataatgtagattacataacaccctcaatggggcctggggcaacaccccataatcaaacattagtacattcatagtaactgggattaactatgtaaggcagtaagctacctgccttacatagtttaggtcaatttttgtcacaaacttatggaaaaactaggtttttagaaattttttggatctcagaattcgtgattagggattgctgacctctgtaaggaaactggtgtcaggtctagaattttccttctaatgaaatacgtagtcattttccccctttttaaattgcttagctttggtagaggtaactgaaggctttctttagaattcgtgtgttagattttaagaaaaatgcatgaaattgttaggacaggcataaatacaaatggcaattctagagccattacggaattttgaaacacttaacaattgctttcttttacttttcatcttgcctcaatacttgtagcattacaagtattccacgtaaataaacgtttatgaagagctgcagtcatgtcatggagccaggcatttattcattcaacaaataggttagtcttccacacacaatttcaggtgctgggaacacagaattaagacccagcccttcctctcaaggacttcgcgtagtttgggagaaacgggaatgggctggaatgtcagaataagatgggcacttaggccttattgagcatgatcacacttgtattttgaagtaaaataccctgatcaagtaatttaccaagaagctactttttgtgacacagctccgtctcctgaccgcggttccagacttcaccattacaccagtctattcccattctggaaagggagaggtatcagctcttagggggcagagattagcaaattgaaaaatagcagtgaaccagatggaaggctctcgatctttagaggttattaatcagtgtttgttcgttcaatttttaaccagtcaccttgctgttaagagcagaacataattggctggaatgtaatgtagggaatttttccctgttggatccctagcacctagaaaagttcctagcacctattaggtgttaataaatgattgttgaatgaatcagtgattacaagtacttttaagaattttgaaaataaaggaaccattggaaatacga

SEQ ID NO: 204620 - DNA, 1069 bp, Homo sapiens
  Payload ID: 20362
  Gene Name: zinc finger, MYM-type 2
  ENST ID: ENST00000620447
  CDS Start-End: 241-1069
ctcttattcccttctctgcctccttctggcagaaagggttgggttctcccaccaggttgtgtgtttttgatacatttttcttttttcctcctatcccaggaccaagaatcgccttcagccctgtctggtgcatccttggcagaaagtgaggaggaaaacacccccattccatacatgtgtatattactctctgccgtagtcacctggataccatctctggacttactagtgttctttggcatggacacaagttcagtgggaggattagaattgactgatcagactcctgttttattagggagtacggccatggcaactagtctcacgaatgtaggaaactcatttagtggtccagctaatcctttagtgtctagatctaataagtttcagaactcgtcagtggaagatgatgatgatgttgtttttatcgaacctgtacaacctcccccaccttctgtaccagtggtagctgatcaaagaaccataacatttacatcatcaaaaaatgaagaactacaaggaaatgattccaaaattactccttcctcaaaagagttggcatctcagaagggaagtgtaagtgagacaattgtcattgatgatgaagaggacatggaaacaaatcaagggcaagagaaaaattcctccaattttattgaacgaagacctcctgagactaaaaacagaaccaatgatgtggatttctccacttccagtttttcaagaagtaagaccaagactggagtaggaccttttaatcctggtagaatgaatgtggcaggagacgtttttcagaatggagaatctgcaactcatcataatcctgattcttggatctcccagtcagcttcatttccccgtaatcagaaacaaccaggggtggactctttatcaccagtggcctcacttcctaaacagattttccagccgtctgtccaacagcagcctactaaaccagttaaagtcacttgtgcaaactgcaaaaaacctttacagaagggccagacagcttatcaacgaaaaggatcagctcacctcttttgttctaccacctgcctttcttccttct

SEQ ID NO: 204621 - DNA, 5536 bp, Homo sapiens
  Payload ID: 20363
  Gene Name: zinc finger, MYM-type 3
  Uniprot ID: Q14202
  ENST ID: ENST00000314425
  CDS Start-End: 132-4244
aaaggggccgcgacccctgtcccggctgctagggagggaggtagagaaggagcgcggggccgtcgctgtctgcagttctaggcttgtagcctttgcactaaccctgccgcagtacatatccagccatactcatggaccccagtgatttccccagtccatttgacccattgaccctgccagagaagcccctggctggagacctaccagtagacatggaatttggagaggatctactggaatcccagactgccccaactcgaggatgggccccccctggcccttctccatcctcgggagccctggacctgcttgatacccctgctggcctggaaaaagaccctggagtcctggatggagccactgagttgctggggctgggggggctgctctataaagccccctctcccccggaggtggaccacggtcctgagggaaccctggcatgggatgcaggagatcagaccctagagcctggaccagggggccagacccctgaggtggtaccacctgatccaggggctggggcaaattcctgttcacctgaggggctactagagcctttggctccagattctccaataacactgcagtccccacatattgaagaggaggagaccacctccatagctactgcaagaaggggctcccctgggcaggaggaggagcttccccaagggcagccacagagcccaaatgccccgcctagcccttcagtgggagagactctgggggatggaatcaacagttctcagaccaaacctgggggctctagcccccctgcacatccttccttgccaggagatggcctgactgcgaaggcgagtgagaagccgcctgaacggaagagaagcgagcgcgttaggagagcagaacctccaaaacctgaggttgtagattccactgagagcattccagtgtcagatgaggattctgatgccatggtagatgaccccaatgatgaggactttgtgccattccggccccggcgctctcctcgcatgtccctacgctcaagtgtgtcacaaagggccgggcgctctgcagtgggcaccaagatgacttgtgcacattgccggacaccactgcagaaggggcagactgcctatcagcgcaaggggctgcctcagctcttctgctcgtcatcctgcctcaccactttctccaagaagccctcgggcaaaaagacctgtaccttctgcaagaaggagatctggaacaccaaggactcggttgtggcgcagactggttctggaggctccttccatgagttctgcacatccgtctgtctctccctgtatgaggcccagcagcagcgcccgatcccccagtctggggatcccgccgacgctactcgctgcagcatatgccagaagactggagaggtcctgcacgaggtcagcaatggcagcgtggtacaccggctctgcagcgattcttgcttctccaaattccgggccaacaagggactgaaaaccaactgttgtgaccagtgtggggcttacatctacaccaagaccgggagtcctggccctgagctcctcttccacgagggccaacaaaagcggttctgcaacacaacctgcttgggggcgtacaagaagaaaaacacacgtgtgtacccatgtgtctggtgcaagaccctgtgtaagaactttgagatgctatcacatgtggatcgtaatggcaagaccagcttgttctgttccctgtgctgtaccacttcttacaaagtgaagcaggcagggctcactggccctccccgaccctgcagcttctgccgccgcagcctctctgacccctgttactacaacaaggttgaccgcacagtctaccagttctgcagccccagctgctggaccaagttccagcgcacaagccctgaggggggcattcacctgagctgtcactactgtcacagcctcttcagtggcaagcctgaggtcttggactggcaggaccaagtgttccagttctgctgccgtgattgctgtgaggacttcaagcggcttcggggtgtggtgtcccagtgtgagcactgtcggcaggagaaactcttgcatgagaaactccgattcagcggagtggagaaaagcttctgcagcgaaggctgtgtgctgctgtacaaacaggacttcactaagaagctgggcttgtgctgtatcacttgtacttactgctcccagacctgccagcgcggagtcaccgagcaactggatggcagcacctgggacttctgcagtgaggactgtaagagcaagtacctgctgtggtactgcaaggctgcccggtgccatgcgtgtaagcgccaggggaagctgctggagaccatccactggcgtgggcagatccgtcatttctgcaaccagcagtgtcttctgcgtttctatagccagcagaaccaacccaacctggatacccagagtgggcccgagagcctcctgaacagtcagtctcctgagtcaaaaccccagacaccctctcaaaccaaagtggagaacagcaacacagtgaggaccccagaggaaaatgggaatttgggcaagatccctgtgaagacccgatcagctcccactgctcccacccctccacccccaccacccccagcaacaccccgcaaaaacaaggctgccatgtgtaagccactgatgcagaatcggggcgtctcctgcaaggtggagatgaagtccaaaggaagtcaaacagaagagtggaagccacaggtgatcgtgctgcccatcccagtgcccatcttcgtgccagtgcctatgcatctgtactgccagaaagtcccggtgcctttctcgatgcctatcccggtgcctgtgcccatgttcttgcccactaccttggagagcacagacaagattgtagagaccattgaggagctgaaggtgaagatcccttccaaccccttggaggccgacatcctggctatggcagaaatgattgcagaggctgaggagttagacaaggcctcatctgacctttgtgatcttgtgagcaaccagagtgcagagggactcctggaagactgtgacctgtttgggcctgctcgagatgatgtcctggccatggcagtcaagatggccaatgtcttggatgagcctgggcaagacttggaggcagacttccctaagaatcctctggacattaatcccagtgtagacttcctctttgattgtggcctggtagggcctgaggatgtgtctactgaacaagaccttccccgaaccatgaggaagggtcaaaagcggctggtgctttccgaaagctgctcccgggactccatgagcagtcagcctagttgtaccgggctcaactattcatatggtgtcaatgcttggaagtgctgggtgcagtcaaaatatgccaatggagaaaccagcaagggtgatgagctgcgctttggccccaaacccatgcgtatcaaagaggatattctcgcctgctcagctgctgagctcaactacggtctggcccagtttgtgagagaaatcactcggcccaatggtgaacgatatgaacctgacagtatctactatttgtgtcttggcatccagcagtacttgctggaaaataaccggatggtgaacattttcacggacctttactacctgacttttgttcaagaactcaacaagtctctgagtacctggcagcccacactcctccccaacaatacggtgttctctcgagtggaggaggagcacctctgggagtgtaagcaactgggggtctactcgccctttgtcctcctcaacaccctcatgttcttcaacactaagttttttgggctgcagacagctgaggaacacatgcaactctccttcaccaatgtggtgcggcagtcccgcaagtgtaccacccctcggggcaccaccaaggtggtgagcatccgctactatgccccagtccgccagaggaaagggcgagacacgggtcctggaaaacggaagagagaagatgaagcccctatcttagagcagcgtgagaaccgcatgaatcccctccgctgccctgtcaagttctatgaattctatctctcaaaatgtcctgaaagcctccggactcgcaacgatgtgttctacctgcaacctgaacggtcctgcatcgccgagtcacctctctggtattctgtgatccccatggaccgcagcatgttggagagcatgctcaatcgcatcctggctgtgcgcgagatttatgaggaactgggtcgtcctggggaggaagacctggactgagctcgtgtgccatccatatccatctttcacatcaatgtctgtcctgtggccatgtccctcagggtgacaggcccaggaaccaatgctactcattctgaagggccctgactgctcctttccgctcacccattccctgccttctctaggaaccctggcttttatcttcttccgtaccacttgacaaccatggggccctggtcttctgtactcaggggctggtctcccagtgatgggcaaaagccagcttgcccgttttctttatgcttcagagtaaacccctccttctgggtccagactctgggtggagtgttaatagctctggtgatcctgttggctttgggtttcctgacccatcccgcataggtagagcctcttgttcctaggcatgacctagggaaaaacccagctgccttctctgccctgtgcccactcccttctctactcttccccagcaccatgccaaaaggtcttatctgaaaggtaagaaataaacaatgaaagcgatgaggggaccatttacataaaacacagagcttagacactcttcccctcctatgaaataattggttgttggcaccatctcaccaccgcatatccctcaccccctcggcaagcaccaatccttggtgctgccgtttttaaaatcttccaaatgcctttttttcctcagaggcagagaatgactaagtacggggagcagactcctgttgtgcagactcctgtccccttggtttctgtgtttgtctctctgccatcttaggttgccatgagccatggtgtcaacatgcttagccccctctgtaactgcctccctttagttcaatggacagacctcccaaggcaaaaactaccttctgacttgggttgaggctgggttcccctctattgttcccctatcataagagctaggccaagcctatgggaccttgagtcatgcaggatgggatctgtggtcaaaggacaggcgaggagctgtgggcgcagggcctgccgccactgcctacatcttctctcttccccatcttgcattggaggtcccagaaaacaattagcttctggcaaagggggtacccacttctttccctgttgactttgctgtttcccaggctcctttttgtgtttttataactgtcaccagttagccactgtttaaattgtatatattgttctgaggcgcctggcctgtcccttcagtgagccatgcccacccttgtgttgtagtgagaagctgttgtcacgactaaccttctgtctctgaaattgtttgtttcaaataaagagttaaaattgtc

SEQ ID NO: 204622 - DNA, 1511 bp, Homo sapiens
  Payload ID: 20363
  Gene Name: zinc finger, MYM-type 3
  ENST ID: ENST00000373978
  CDS Start-End: 79-1128
gagtgggctccaggaggtagggcgagcagggtgtgacgggggccagactcttgagccagtacatatccagccatactcatggaccccagtgatttccccagtccatttgacccattgaccctgccagagaagcccctggctggagacctaccagtagacatggaatttggagaggatctactggaatcccagactgccccaactcgaggatgggccccccctggcccttctccatcctcgggagccctggacctgcttgatacccctgctggcctggaaaaagaccctggagtcctggatggagccactgagttgctggggctgggggggctgctctataaagccccctctcccccggaggtggaccacggtcctgagggaaccctggcatgggatgcaggagatcagaccctagagcctggaccagggggccagacccctgaggtggtaccacctgatccaggggctggggcaaattcctgttcacctgaggggctactagagcctttggctccagattctccaataacactgcagtccccacatattgaagaggaggagaccacctccatagctactgcaagaaggggctcccctgggcaggaggaggagcttccccaagggcagccacagagcccaaatgccccgcctagcccttcagtgggagagactctgggggatggaatcaacagttctcagaccaaacctgggggctctagcccccctgcacatccttccttgccaggagatggcctgactgcgaaggcgagtgagaagccgcctgaacgggtacagaagagaagcgagcgcgttaggagagcagaacctccaaaacctgaggttgtagattccactgagagcaggagatctggaacaccaaggactcggttgtggcgcagactggttctggaggctccttccatgagttctgcacatccgtctgtctctccctgtatgaggcccagcagcagcgcccgatcccccagtctggggatcccgccgacgctactcgctgcagcatatgccagaagactggagaggtcctgcacgaggtcagcaatggcagcgtggtacaccggctctgcagcgattcttgcttctccaaattccgggccaacaagggactgaaaaccaactgttgtgaccagtgtggggcttacatctacaccaagaccgggagtcctggccctgagctcctcttccacgagggccaacaaaagcggttctgcaacacaacctgcttgggggcgtacaagaaggtggggccgagggagtagtgcattagagggctgtggaagggggtgtggttcttgggttataaataaaggtggctgatgggtcaagggctgggagaaataaaacaaataaagggggtttcaattgtatccgttatgttttatttttgaagctggctggtggatacacaggtctttgttacatcatcatctatactttttttgtatgcctgaaatatttcatgtttaaaacatttaaaaaataaaagtgaaggg

SEQ ID NO: 204623 - DNA, 1841 bp, Homo sapiens
  Payload ID: 20363
  Gene Name: zinc finger, MYM-type 3
  Uniprot ID: Q14202
  ENST ID: ENST00000373981
  CDS Start-End: 115-1602
gggaaccatttgaatgagaggaggggatcacgggtagagtgggctccaggaggtagggcgagcagggtgtgacgggggccagactcttgagccagtacatatccagccatactcatggaccccagtgatttccccagtccatttgacccattgaccctgccagagaagcccctggctggagacctaccagtagacatggaatttggagaggatctactggaatcccagactgccccaactcgaggatgggccccccctggcccttctccatcctcgggagccctggacctgcttgatacccctgctggcctggaaaaagaccctggagtcctggatggagccactgagttgctggggctgggggggctgctctataaagccccctctcccccggaggtggaccacggtcctgagggaaccctggcatgggatgcaggagatcagaccctagagcctggaccagggggccagacccctgaggtggtaccacctgatccaggggctggggcaaattcctgttcacctgaggggctactagagcctttggctccagattctccaataacactgcagtccccacatattgaagaggaggagaccacctccatagctactgcaagaaggggctcccctgggcaggaggaggagcttccccaagggcagccacagagcccaaatgccccgcctagcccttcagtgggagagactctgggggatggaatcaacagttctcagaccaaacctgggggctctagcccccctgcacatccttccttgccaggagatggcctgactgcgaaggcgagtgagaagccgcctgaacggaagagaagcgagcgcgttaggagagcagaacctccaaaacctgaggttgtagattccactgagagcattccagtgtcagatgaggattctgatgccatggtagatgaccccaatgatgaggactttgtgccattccggccccggcgctctcctcgcatgtccctacgctcaagtgtgtcacaaagggccgggcgctctgcagtgggcaccaagatgacttgtgcacattgccggacaccactgcagaaggggcagactgcctatcagcgcaaggggctgcctcagctcttctgctcgtcatcctgcctcaccactttctccaagaagccctcgggcaaaaagacctgtaccttctgcaagaaggagatctggaacaccaaggactcggttgtggcgcagactggttctggaggctccttccatgagttctgcacatccgtctgtctctccctgtatgaggcccagcagcagcgcccgatcccccagtctggggatcccgccgacgctactcgctgcagcatatgccagaagactggagaggtcctgcacgaggtcagcaatggcagcgtggtacaccggctctgcagcgattcttgcttctccaaattccgggccaacaagggactgaaaaccaactgttgtgaccagtgtggggcttacatctacaccaagaccgggagtcctggccctgagctcctcttccacgagggccaacaaaagcggttctgcaacacaacctgcttgggggcgtacaagaaggtggggccgagggagtagtgcattagagggctgtggaagggggtgtggttcttgggttataaataaaggtggctgatgggtcaagggctgggagaaataaaacaaataaagggggtttcaattgtatccgttatgttttatttttgaagctggctggtggatacacaggtctttgttacatcatcatctatactttttttgtatgcctgaaatatttcatgtttaaaacatttaaaaaataaaagtgaagggacaaa

SEQ ID NO: 204624 - DNA, 1867 bp, Homo sapiens
  Payload ID: 20363
  Gene Name: zinc finger, MYM-type 3
  ENST ID: ENST00000373982
  CDS Start-End: 132-1625
aaaggggccgcgacccctgtcccggctgctagggagggaggtagagaaggagcgcggggccgtcgctgtctgcagttctaggcttgtagcctttgcactaaccctgccgcagtacatatccagccatactcatggaccccagtgatttccccagtccatttgacccattgaccctgccagagaagcccctggctggagacctaccagtagacatggaatttggagaggatctactggaatcccagactgccccaactcgaggatgggccccccctggcccttctccatcctcgggagccctggacctgcttgatacccctgctggcctggaaaaagaccctggagtcctggatggagccactgagttgctggggctgggggggctgctctataaagccccctctcccccggaggtggaccacggtcctgagggaaccctggcatgggatgcaggagatcagaccctagagcctggaccagggggccagacccctgaggtggtaccacctgatccaggggctggggcaaattcctgttcacctgaggggctactagagcctttggctccagattctccaataacactgcagtccccacatattgaagaggaggagaccacctccatagctactgcaagaaggggctcccctgggcaggaggaggagcttccccaagggcagccacagagcccaaatgccccgcctagcccttcagtgggagagactctgggggatggaatcaacagttctcagaccaaacctgggggctctagcccccctgcacatccttccttgccaggagatggcctgactgcgaaggcgagtgagaagccgcctgaacgggtacagaagagaagcgagcgcgttaggagagcagaacctccaaaacctgaggttgtagattccactgagagcattccagtgtcagatgaggattctgatgccatggtagatgaccccaatgatgaggactttgtgccattccggccccggcgctctcctcgcatgtccctacgctcaagtgtgtcacaaagggccgggcgctctgcagtgggcaccaagatgacttgtgcacattgccggacaccactgcagaaggggcagactgcctatcagcgcaaggggctgcctcagctcttctgctcgtcatcctgcctcaccactttctccaagaagccctcgggcaaaaagacctgtaccttctgcaagaaggagatctggaacaccaaggactcggttgtggcgcagactggttctggaggctccttccatgagttctgcacatccgtctgtctctccctgtatgaggcccagcagcagcgcccgatcccccagtctggggatcccgccgacgctactcgctgcagcatatgccagaagactggagaggtcctgcacgaggtcagcaatggcagcgtggtacaccggctctgcagcgattcttgcttctccaaattccgggccaacaagggactgaaaaccaactgttgtgaccagtgtggggcttacatctacaccaagaccgggagtcctggccctgagctcctcttccacgagggccaacaaaagcggttctgcaacacaacctgcttgggggcgtacaagaaggtggggccgagggagtagtgcattagagggctgtggaagggggtgtggttcttgggttataaataaaggtggctgatgggtcaagggctgggagaaataaaacaaataaagggggtttcaattgtatccgttatgttttatttttgaagctggctggtggatacacaggtctttgttacatcatcatctatactttttttgtatgcctgaaatatttcatgtttaaaacatttaaaaaataaaagtgaagggacaaatcc

SEQ ID NO: 204625 - DNA, 5253 bp, Homo sapiens
  Payload ID: 20363
  Gene Name: zinc finger, MYM-type 3
  ENST ID: ENST00000373984
  CDS Start-End: 121-3963
gacccctgtcccggctgctagggagggaggtagagaaggagcgcggggccgtcgctgtctgcagttctaggcttgtagcctttgcactaaccctgccgcagtacatatccagccatactcatggaccccagtgatttccccagtccatttgacccattgaccctgccagagaagcccctggctggagacctaccagtagacatggaatttggagaggatctactggaatcccagactgccccaactcgaggatgggccccccctggcccttctccatcctcgggagccctggacctgcttgatacccctgctggcctggaaaaagaccctggagtcctggatggagccactgagttgctggggctgggggggctgctctataaagccccctctcccccggaggtggaccacggtcctgagggaaccctggcatgggatgcaggagatcagaccctagagcctggaccagggggccagacccctgaggtggtaccacctgatccaggggctggggcaaattcctgttcacctgaggggctactagagcctttggctccagattctccaataacactgcagtccccacatattgaagaggaggagaccacctccatagctactgcaagaaggggctcccctgggcaggaggaggagcttccccaagggcagccacagagcccaaatgccccgcctagcccttcagtgggagagactctgggggatggaatcaacagttctcagaccaaacctgggggctctagcccccctgcacatccttccttgccaggagatggcctgactgcgaaggcgagtgagaagccgcctgaacgggtacagaagagaagcgagcgcgttaggagagcagaacctccaaaacctgaggttgtagattccactgagagcattccagtgtcagatgaggattctgatgccatggtagatgaccccaatgatgaggactttgtgccattccggccccggcgctctcctcgcatgtccctacgctcaagtgtgtcacaaagggccgggcgctctgcagtgggcaccaagatgacttgtgcacattgccggacaccactgcagaaggggcagactgcctatcagcgcaaggggctgcctcagctcttctgctcgtcatcctgcctcaccactttctccaagaagccctcgggcaaaaagacctgtaccttctgcaagaaggagatctggaacaccaaggactcggttgtggcgcagactggttctggaggctccttccatgagttctgcacatccgtctgtctctccctgtatgaggcccagcagcagcgcccgatcccccagtctggggatcccgccgacgctactcgctgcagcatatgccagaagactggagaggtcctgcacgaggtcagcaatggcagcgtggtacaccggctctgcagcgattcttgcttctccaaattccgggccaacaagggactgaaaaccaactgttgtgaccagtgtggggcttacatctacaccaagaccgggagtcctggccctgagctcctcttccacgagggccaacaaaagcggttctgcaacacaacctgcttgggggcgtacaagaagaaaaacacacgtgtgtacccatgtgtctggtgcaagaccctgtgtaagaactttgagatgctatcacatgtggatcgtaatggcaagaccagcttgttctgttccctgtgctgtaccacttcttacaaagtgaagcaggcagggctcactggccctccccgaccctgcagcttctgccgccgcagcctctctgacccctgttactacaacaaggttgaccgcacagtctaccagttctgcagccccagctgctggaccaagttccagcgcacaagccctgaggggggcattcacctgagctgtcactactgtcacagcctcttcagtggcaagcctgaggtcttggactggcaggaccaagtgttccagttctgctgccgtgattgctgtgaggacttcaagcggcttcggggtgtggtgtcccagtgtgagcactgtcggcaggagaaactcttgcatgagaaactccgattcagcggagtggagaaaagcttctgcagcgaaggctgtgtgctgctgtacaaacaggacttcactaagaagctgggcttgtgctgtatcacttgtacttactgctcccagacctgccagcgcggagtcaccgagcaactggatggcagcacctgggacttctgcagtgaggactgtaagagcaagtacctgctgtggtactgcaaggctgcccggtgccatgcgtgtaagcgccaggggaagctgctggagaccatccactggcgtgggcagatccgtcatttctgcaaccagcagtgtcttctgcgtttctatagccagcagaaccaacccaacctggatacccagagtgggcccgagagcctcctgaacagtcagtctcctgagtcaaaaccccagacaccctctcaaaccaaagtggagaacagcaacacagtgaggaccccagaggaaaatgggaatttgggcaagatccctgtgaagacccgatcagctcccactgctcccacccctccacccccaccacccccagcaacaccccgcaaaaacaaggctgccatgtgtaagccactgatgcagaatcggggcgtctcctgcaaggtggagatgaagtccaaaggaagtcaaacagaagagtggaagccacaggtgatcgtgctgcccatcccagtgcccatcttcgtgccagtgcctatgcatctgtactgccagaaagtcccggtgcctttctcgatgcctatcccggtgcctgtgcccatgttcttgcccactaccttggagagcacagacaagattgtagagaccattgaggagctgaaggtgaagatcccttccaaccccttggaggccgacatcctggctatggcagaaatgattgcagaggctgaggagttagacaaggcctcatctgacctttgtgatcttgtgagcaaccagagtgcagagggactcctggaagactgtgacctgtttgggcctgctcgagatgatgtcctggccatggcagtcaagatggccaatgtcttggatgagcctgggcaagacttggaggcagacttccctaagaatcctctggacattaatcccagtgtagacttcctctttgattgtggcctggtagggcctgaggatgtgtctactgaacaagaccttccccgaaccatgaggaagggtcaaaagcggctggtgctttccgaaagctgctcccgggactccatgagcagtcagcctagttgtaccgggctcaactattcatatggtgtcaatgcttggaagtgctgggtgcagtcaaaatatgccaatggagaaaccagcaaggccaaacccatgcgtatcaaagaggatattctcgcctgctcagctgctgagctcaactacggtctggcccagtttgtgagagaaatcactcggcccaatggtgaacgatatgaacctgacagtatctactatttgtgtcttggcatccagcagtacttgctggaaaataaccggatggtgaacattttcacggacctttactacctgacttttgttcaagaactcaacaagtctctgagtacctggcagcccacactcctccccaacaacacgggtcctggaaaacggaagagagaagatgaagcccctatcttagagcagcgtgagaaccgcatgaatcccctccgctgccctgtcaagttctatgaattctatctctcaaaatgtcctgaaagcctccggactcgcaacgatgtgttctacctgcaacctgaacggtcctgcatcgccgagtcacctctctggtattctgtgatccccatggaccgcagcatgttggagagcatgctcaatcgcatcctggctgtgcgcgagatttatgaggaactgggtcgtcctggggaggaagacctggactgagctcgtgtgccatccatatccatctttcacatcaatgtctgtcctgtggccatgtccctcagggtgacaggcccaggaaccaatgctactcattctgaagggccctgactgctcctttccgctcacccattccctgccttctctaggaaccctggcttttatcttcttccgtaccacttgacaaccatggggccctggtcttctgtactcaggggctggtctcccagtgatgggcaaaagccagcttgcccgttttctttatgcttcagagtaaacccctccttctgggtccagactctgggtggagtgttaatagctctggtgatcctgttggctttgggtttcctgacccatcccgcataggtagagcctcttgttcctaggcatgacctagggaaaaacccagctgccttctctgccctgtgcccactcccttctctactcttccccagcaccatgccaaaaggtcttatctgaaaggtaagaaataaacaatgaaagcgatgaggggaccatttacataaaacacagagcttagacactcttcccctcctatgaaataattggttgttggcaccatctcaccaccgcatatccctcaccccctcggcaagcaccaatccttggtgctgccgtttttaaaatcttccaaatgcctttttttcctcagaggcagagaatgactaagtacggggagcagactcctgttgtgcagactcctgtccccttggtttctgtgtttgtctctctgccatcttaggttgccatgagccatggtgtcaacatgcttagccccctctgtaactgcctccctttagttcaatggacagacctcccaaggcaaaaactaccttctgacttgggttgaggctgggttcccctctattgttcccctatcataagagctaggccaagcctatgggaccttgagtcatgcaggatgggatctgtggtcaaaggacaggcgaggagctgtgggcgcagggcctgccgccactgcctacatcttctctcttccccatcttgcattggaggtcccagaaaacaattagcttctggcaaagggggtacccacttctttccctgttgactttgctgtttcccaggctcctttttgtgtttttataactgtcaccagttagccactgtttaaattgtatatattgttctgaggcgcctggcctgtcccttcagtgagccatgcccacccttgtgttgtagtgagaagctgttgtcacgactaaccttctgtctctgaaattgtttgtttcaaataaagagttaaaattg

SEQ ID NO: 204626 - DNA, 6021 bp, Homo sapiens
  Payload ID: 20363
  Gene Name: zinc finger, MYM-type 3
  ENST ID: ENST00000373988
  CDS Start-End: 613-4731
tccatagataatacagggagctcctgcaggaagactcagggagaagatcccagaacttaccctaagactgttgagagagtagggggtagctttgcaggacctggtttgggggtcatcaagcagtaacggttactgcacaggcgttgccactgagccagagccatttaacccgacctgtgtggctggggatcaagcttcagataccccataactctgactctcagactgttttgggggccccgtggctgcagacaagggaaggaggggcacgtgagggctgggtccctgcctccccccgtcctccgctgtcactcactaccccaacagtcgcccagggggcgggacccggagaggtggggatgggggagggtaatcttggcaggcgcctgctgcatggcgtaggtagggactattgaggggggcggacgccgagggggtgaacacgagtgggaagctaagagagacacggggagggggaggggaccgggaaccatttgaatgagaggaggggatcacgggtagagtgggctccaggaggtagggcgagcagggtgtgacgggggccagactcttgagccaggtaaggggagcagtacatatccagccatactcatggaccccagtgatttccccagtccatttgacccattgaccctgccagagaagcccctggctggagacctaccagtagacatggaatttggagaggatctactggaatcccagactgccccaactcgaggatgggccccccctggcccttctccatcctcgggagccctggacctgcttgatacccctgctggcctggaaaaagaccctggagtcctggatggagccactgagttgctggggctgggggggctgctctataaagccccctctcccccggaggtggaccacggtcctgagggaaccctggcatgggatgcaggagatcagaccctagagcctggaccagggggccagacccctgaggtggtaccacctgatccaggggctggggcaaattcctgttcacctgaggggctactagagcctttggctccagattctccaataacactgcagtccccacatattgaagaggaggagaccacctccatagctactgcaagaaggggctcccctgggcaggaggaggagcttccccaagggcagccacagagcccaaatgccccgcctagcccttcagtgggagagactctgggggatggaatcaacagttctcagaccaaacctgggggctctagcccccctgcacatccttccttgccaggagatggcctgactgcgaaggcgagtgagaagccgcctgaacgggtacagaagagaagcgagcgcgttaggagagcagaacctccaaaacctgaggttgtagattccactgagagcattccagtgtcagatgaggattctgatgccatggtagatgaccccaatgatgaggactttgtgccattccggccccggcgctctcctcgcatgtccctacgctcaagtgtgtcacaaagggccgggcgctctgcagtgggcaccaagatgacttgtgcacattgccggacaccactgcagaaggggcagactgcctatcagcgcaaggggctgcctcagctcttctgctcgtcatcctgcctcaccactttctccaagaagccctcgggcaaaaagacctgtaccttctgcaagaaggagatctggaacaccaaggactcggttgtggcgcagactggttctggaggctccttccatgagttctgcacatccgtctgtctctccctgtatgaggcccagcagcagcgcccgatcccccagtctggggatcccgccgacgctactcgctgcagcatatgccagaagactggagaggtcctgcacgaggtcagcaatggcagcgtggtacaccggctctgcagcgattcttgcttctccaaattccgggccaacaagggactgaaaaccaactgttgtgaccagtgtggggcttacatctacaccaagaccgggagtcctggccctgagctcctcttccacgagggccaacaaaagcggttctgcaacacaacctgcttgggggcgtacaagaagaaaaacacacgtgtgtacccatgtgtctggtgcaagaccctgtgtaagaactttgagatgctatcacatgtggatcgtaatggcaagaccagcttgttctgttccctgtgctgtaccacttcttacaaagtgaagcaggcagggctcactggccctccccgaccctgcagcttctgccgccgcagcctctctgacccctgttactacaacaaggttgaccgcacagtctaccagttctgcagccccagctgctggaccaagttccagcgcacaagccctgaggggggcattcacctgagctgtcactactgtcacagcctcttcagtggcaagcctgaggtcttggactggcaggaccaagtgttccagttctgctgccgtgattgctgtgaggacttcaagcggcttcggggtgtggtgtcccagtgtgagcactgtcggcaggagaaactcttgcatgagaaactccgattcagcggagtggagaaaagcttctgcagcgaaggctgtgtgctgctgtacaaacaggacttcactaagaagctgggcttgtgctgtatcacttgtacttactgctcccagacctgccagcgcggagtcaccgagcaactggatggcagcacctgggacttctgcagtgaggactgtaagagcaagtacctgctgtggtactgcaaggctgcccggtgccatgcgtgtaagcgccaggggaagctgctggagaccatccactggcgtgggcagatccgtcatttctgcaaccagcagtgtcttctgcgtttctatagccagcagaaccaacccaacctggatacccagagtgggcccgagagcctcctgaacagtcagtctcctgagtcaaaaccccagacaccctctcaaaccaaagtggagaacagcaacacagtgaggaccccagaggaaaatgggaatttgggcaagatccctgtgaagacccgatcagctcccactgctcccacccctccacccccaccacccccagcaacaccccgcaaaaacaaggctgccatgtgtaagccactgatgcagaatcggggcgtctcctgcaaggtggagatgaagtccaaaggaagtcaaacagaagagtggaagccacaggtgatcgtgctgcccatcccagtgcccatcttcgtgccagtgcctatgcatctgtactgccagaaagtcccggtgcctttctcgatgcctatcccggtgcctgtgcccatgttcttgcccactaccttggagagcacagacaagattgtagagaccattgaggagctgaaggtgaagatcccttccaaccccttggaggccgacatcctggctatggcagaaatgattgcagaggctgaggagttagacaaggcctcatctgacctttgtgatcttgtgagcaaccagagtgcagagggactcctggaagactgtgacctgtttgggcctgctcgagatgatgtcctggccatggcagtcaagatggccaatgtcttggatgagcctgggcaagacttggaggcagacttccctaagaatcctctggacattaatcccagtgtagacttcctctttgattgtggcctggtagggcctgaggatgtgtctactgaacaagaccttccccgaaccatgaggaagggtcaaaagcggctggtgctttccgaaagctgctcccgggactccatgagcagtcagcctagttgtaccgggctcaactattcatatggtgtcaatgcttggaagtgctgggtgcagtcaaaatatgccaatggagaaaccagcaagggtgatgagctgcgctttggccccaaacccatgcgtatcaaagaggatattctcgcctgctcagctgctgagctcaactacggtctggcccagtttgtgagagaaatcactcggcccaatggtgaacgatatgaacctgacagtatctactatttgtgtcttggcatccagcagtacttgctggaaaataaccggatggtgaacattttcacggacctttactacctgacttttgttcaagaactcaacaagtctctgagtacctggcagcccacactcctccccaacaatacggtgttctctcgagtggaggaggagcacctctgggagtgtaagcaactgggggtctactcgccctttgtcctcctcaacaccctcatgttcttcaacactaagttttttgggctgcagacagctgaggaacacatgcaactctccttcaccaatgtggtgcggcagtcccgcaagtgtaccacccctcggggcaccaccaaggtggtgagcatccgctactatgccccagtccgccagaggaaagggcgagacacgggtcctggaaaacggaagagagaagatgaagcccctatcttagagcagcgtgagaaccgcatgaatcccctccgctgccctgtcaagttctatgaattctatctctcaaaatgtcctgaaagcctccggactcgcaacgatgtgttctacctgcaacctgaacggtcctgcatcgccgagtcacctctctggtattctgtgatccccatggaccgcagcatgttggagagcatgctcaatcgcatcctggctgtgcgcgagatttatgaggaactgggtcgtcctggggaggaagacctggactgagctcgtgtgccatccatatccatctttcacatcaatgtctgtcctgtggccatgtccctcagggtgacaggcccaggaaccaatgctactcattctgaagggccctgactgctcctttccgctcacccattccctgccttctctaggaaccctggcttttatcttcttccgtaccacttgacaaccatggggccctggtcttctgtactcaggggctggtctcccagtgatgggcaaaagccagcttgcccgttttctttatgcttcagagtaaacccctccttctgggtccagactctgggtggagtgttaatagctctggtgatcctgttggctttgggtttcctgacccatcccgcataggtagagcctcttgttcctaggcatgacctagggaaaaacccagctgccttctctgccctgtgcccactcccttctctactcttccccagcaccatgccaaaaggtcttatctgaaaggtaagaaataaacaatgaaagcgatgaggggaccatttacataaaacacagagcttagacactcttcccctcctatgaaataattggttgttggcaccatctcaccaccgcatatccctcaccccctcggcaagcaccaatccttggtgctgccgtttttaaaatcttccaaatgcctttttttcctcagaggcagagaatgactaagtacggggagcagactcctgttgtgcagactcctgtccccttggtttctgtgtttgtctctctgccatcttaggttgccatgagccatggtgtcaacatgcttagccccctctgtaactgcctccctttagttcaatggacagacctcccaaggcaaaaactaccttctgacttgggttgaggctgggttcccctctattgttcccctatcataagagctaggccaagcctatgggaccttgagtcatgcaggatgggatctgtggtcaaaggacaggcgaggagctgtgggcgcagggcctgccgccactgcctacatcttctctcttccccatcttgcattggaggtcccagaaaacaattagcttctggcaaagggggtacccacttctttccctgttgactttgctgtttcccaggctcctttttgtgtttttataactgtcaccagttagccactgtttaaattgtatatattgttctgaggcgcctggcctgtcccttcagtgagccatgcccacccttgtgttgtagtgagaagctgttgtcacgactaaccttctgtctctgaaattgtttgtttcaaataaagagttaaaattg

SEQ ID NO: 204627 - DNA, 6067 bp, Homo sapiens
  Payload ID: 20363
  Gene Name: zinc finger, MYM-type 3
  Uniprot ID: Q14202
  ENST ID: ENST00000373998
  CDS Start-End: 699-4775
gagagagagagagagagagagagagagagagagagagagagagagagagagagagagagagatcagccctggtgagggaggaaaactccatagataatacagggagctcctgcaggaagactcagggagaagatcccagaacttaccctaagactgttgagagagtagggggtagctttgcaggacctggtttgggggtcatcaagcagtaacggttactgcacaggcgttgccactgagccagagccatttaacccgacctgtgtggctggggatcaagcttcagataccccataactctgactctcagactgttttgggggccccgtggctgcagacaagggaaggaggggcacgtgagggctgggtccctgcctccccccgtcctccgctgtcactcactaccccaacagtcgcccagggggcgggacccggagaggtggggatgggggagggtaatcttggcaggcgcctgctgcatggcgtaggtagggactattgaggggggcggacgccgagggggtgaacacgagtgggaagctaagagagacacggggagggggaggggaccgggaaccatttgaatgagaggaggggatcacgggtagagtgggctccaggaggtagggcgagcagggtgtgacgggggccagactcttgagccaggtaaggggagcagtacatatccagccatactcatggaccccagtgatttccccagtccatttgacccattgaccctgccagagaagcccctggctggagacctaccagtagacatggaatttggagaggatctactggaatcccagactgccccaactcgaggatgggccccccctggcccttctccatcctcgggagccctggacctgcttgatacccctgctggcctggaaaaagaccctggagtcctggatggagccactgagttgctggggctgggggggctgctctataaagccccctctcccccggaggtggaccacggtcctgagggaaccctggcatgggatgcaggagatcagaccctagagcctggaccagggggccagacccctgaggtggtaccacctgatccaggggctggggcaaattcctgttcacctgaggggctactagagcctttggctccagattctccaataacactgcagtccccacatattgaagaggaggagaccacctccatagctactgcaagaaggggctcccctgggcaggaggaggagcttccccaagggcagccacagagcccaaatgccccgcctagcccttcagtgggagagactctgggggatggaatcaacagttctcagaccaaacctgggggctctagcccccctgcacatccttccttgccaggagatggcctgactgcgaaggcgagtgagaagccgcctgaacggaagagaagcgagcgcgttaggagagcagaacctccaaaacctgaggttgtagattccactgagagcattccagtgtcagatgaggattctgatgccatggtagatgaccccaatgatgaggactttgtgccattccggccccggcgctctcctcgcatgtccctacgctcaagtgtgtcacaaagggccgggcgctctgcagtgggcaccaagatgacttgtgcacattgccggacaccactgcagaaggggcagactgcctatcagcgcaaggggctgcctcagctcttctgctcgtcatcctgcctcaccactttctccaagaagccctcgggcaaaaagacctgtaccttctgcaagaaggagatctggaacaccaaggactcggttgtggcgcagactggttctggaggctccttccatgagttctgcacatccgtctgtctctccctgtatgaggcccagcagcagcgcccgatcccccagtctggggatcccgccgacgctactcgctgcagcatatgccagaagactggagaggtcctgcacgaggtcagcaatggcagcgtggtacaccggctctgcagcgattcttgcttctccaaattccgggccaacaagggactgaaaaccaactgttgtgaccagtgtggggcttacatctacaccaagaccgggagtcctggccctgagctcctcttccacgagggccaacaaaagcggttctgcaacacaacctgcttgggggcgtacaagaagaaaaacacacgtgtgtacccatgtgtctggtgcaagaccctgtgtaagaactttgagatgctatcacatgtggatcgtaatggcaagaccagcttgttctgttccctgtgctgtaccacttcttacaaagtgaagcaggcagggctcactggccctccccgaccctgcagcttctgccgccgcagcctctctgacccctgttactacaacaaggttgaccgcacagtctaccagttctgcagccccagctgctggaccaagttccagcgcacaagccctgaggggggcattcacctgagctgtcactactgtcacagcctcttcagtggcaagcctgaggtcttggactggcaggaccaagtgttccagttctgctgccgtgattgctgtgaggacttcaagcggcttcggggtgtggtgtcccagtgtgagcactgtcggcaggagaaactcttgcatgagaaactccgattcagcggagtggagaaaagcttctgcagcgaaggctgtgtgctgctgtacaaacaggacttcactaagaagctgggcttgtgctgtatcacttgtacttactgctcccagacctgccagcgcggagtcaccgagcaactggatggcagcacctgggacttctgcagtgaggactgtaagagcaagtacctgctgtggtactgcaaggctgcccggtgccatgcgtgtaagcgccaggggaagctgctggagaccatccactggcgtgggcagatccgtcatttctgcaaccagcagtgtcttctgcgtttctatagccagcagaaccaacccaacctggatacccagagtgggcccgagagcctcctgaacagtcagtctcctgagtcaaaaccccagacaccctctcaaaccaaagtggagaacagcaacacaatccctgtgaagacccgatcagctcccactgctcccacccctccacccccaccacccccagcaacaccccgcaaaaacaaggctgccatgtgtaagccactgatgcagaatcggggcgtctcctgcaaggtggagatgaagtccaaaggaagtcaaacagaagagtggaagccacaggtgatcgtgctgcccatcccagtgcccatcttcgtgccagtgcctatgcatctgtactgccagaaagtcccggtgcctttctcgatgcctatcccggtgcctgtgcccatgttcttgcccactaccttggagagcacagacaagattgtagagaccattgaggagctgaaggtgaagatcccttccaaccccttggaggccgacatcctggctatggcagaaatgattgcagaggctgaggagttagacaaggcctcatctgacctttgtgatcttgtgagcaaccagagtgcagagggactcctggaagactgtgacctgtttgggcctgctcgagatgatgtcctggccatggcagtcaagatggccaatgtcttggatgagcctgggcaagacttggaggcagacttccctaagaatcctctggacattaatcccagtgtagacttcctctttgattgtggcctggtagggcctgaggatgtgtctactgaacaagaccttccccgaaccatgaggaagggtcaaaagcggctggtgctttccgaaagctgctcccgggactccatgagcagtcagcctagttgtaccgggctcaactattcatatggtgtcaatgcttggaagtgctgggtgcagtcaaaatatgccaatggagaaaccagcaagggtgatgagctgcgctttggccccaaacccatgcgtatcaaagaggatattctcgcctgctcagctgctgagctcaactacggtctggcccagtttgtgagagaaatcactcggcccaatggtgaacgatatgaacctgacagtatctactatttgtgtcttggcatccagcagtacttgctggaaaataaccggatggtgaacattttcacggacctttactacctgacttttgttcaagaactcaacaagtctctgagtacctggcagcccacactcctccccaacaatacggtgttctctcgagtggaggaggagcacctctgggagtgtaagcaactgggggtctactcgccctttgtcctcctcaacaccctcatgttcttcaacactaagttttttgggctgcagacagctgaggaacacatgcaactctccttcaccaatgtggtgcggcagtcccgcaagtgtaccacccctcggggcaccaccaaggtggtgagcatccgctactatgccccagtccgccagaggaaagggcgagacacgggtcctggaaaacggaagagagaagatgaagcccctatcttagagcagcgtgagaaccgcatgaatcccctccgctgccctgtcaagttctatgaattctatctctcaaaatgtcctgaaagcctccggactcgcaacgatgtgttctacctgcaacctgaacggtcctgcatcgccgagtcacctctctggtattctgtgatccccatggaccgcagcatgttggagagcatgctcaatcgcatcctggctgtgcgcgagatttatgaggaactgggtcgtcctggggaggaagacctggactgagctcgtgtgccatccatatccatctttcacatcaatgtctgtcctgtggccatgtccctcagggtgacaggcccaggaaccaatgctactcattctgaagggccctgactgctcctttccgctcacccattccctgccttctctaggaaccctggcttttatcttcttccgtaccacttgacaaccatggggccctggtcttctgtactcaggggctggtctcccagtgatgggcaaaagccagcttgcccgttttctttatgcttcagagtaaacccctccttctgggtccagactctgggtggagtgttaatagctctggtgatcctgttggctttgggtttcctgacccatcccgcataggtagagcctcttgttcctaggcatgacctagggaaaaacccagctgccttctctgccctgtgcccactcccttctctactcttccccagcaccatgccaaaaggtcttatctgaaaggtaagaaataaacaatgaaagcgatgaggggaccatttacataaaacacagagcttagacactcttcccctcctatgaaataattggttgttggcaccatctcaccaccgcatatccctcaccccctcggcaagcaccaatccttggtgctgccgtttttaaaatcttccaaatgcctttttttcctcagaggcagagaatgactaagtacggggagcagactcctgttgtgcagactcctgtccccttggtttctgtgtttgtctctctgccatcttaggttgccatgagccatggtgtcaacatgcttagccccctctgtaactgcctccctttagttcaatggacagacctcccaaggcaaaaactaccttctgacttgggttgaggctgggttcccctctattgttcccctatcataagagctaggccaagcctatgggaccttgagtcatgcaggatgggatctgtggtcaaaggacaggcgaggagctgtgggcgcagggcctgccgccactgcctacatcttctctcttccccatcttgcattggaggtcccagaaaacaattagcttctggcaaagggggtacccacttctttccctgttgactttgctgtttcccaggctcctttttgtgtttttataactgtcaccagttagccactgtttaaattgtatatattgttctgaggcgcctggcctgtcccttcagtgagccatgcccacccttgtgttgtagtgagaagctgttgtcacgactaaccttctgtctctgaaattgtttgtttcaaataaagagttaaaattgtc

SEQ ID NO: 204628 - DNA, 6994 bp, Homo sapiens
  Payload ID: 20364
  Gene Name: zinc finger, MYM-type 4
  Uniprot ID: Q5VZL5
  ENST ID: ENST00000314607
  CDS Start-End: 81-4727
agtgtgggcgggggccggggggccgagaggtaccgccgccaccgcgcggggagccgcagcggttccgagcggggcccaacatggcggagagagaggtggagtccggcccccgaaagaggtttgaacaaaaaagtggtgcagtttttgatgaaattgtagagaactgtggtggtatcatggatacagaaatgtctgaagatatagaccacaacttaactcctacccttgacagcatgtcttatggaatgccgaatcaaacaggatctgaaaattcattgctggatgaagatgattattttttgaactctggggatcttgcaggaattccagtcgttggtagtgacaatgaggatgaacaggattttagttcaaaggacaatcttgtttcttcaattcatactgatgatagcttggaagtagagagaagagtcacacagcatgaatcagacaatgaaaatgaaatacaaattcaaaataagttaaaaaaagactttcctaaacaatttgatcaggtttctgtctttaaatcaatacggaaagattttagtctagtaagagaaaacagcaaagagacattttctggaaaggagaaaaatagagacctaacttatgaacgtgaaaaacggttggataaaccccataaagatttggattcaaggttgaaaagcagtttttttgataaagcagctaatcaagttgaagaaacattacatacccatttaccacaaaccccagaaacaaactttagggattccagctacccatttgccaataaagaatccattggttcggaactggggaattcctttgcatcaaatattagaattaaagaagaacctttggatgatgagtatgacaaagcaatggcaccacagcagggactactagacaaaataaaagatgaacctgacaatgctcaagagtatagtcatggccaacagcaaaaaactcaagagggggaactgaaaattagtgctgtgttttcagtcagtggcagccctcttgctccacagttgactactggctttcagccctcactggcgtcatctggcatgaataaaatgcttccttcagttccagccacagctgttcgagtttcctgttctggttgtaaaaaaatcctccagaaggggcaaactgcttatcagaggaaagggtctactcagctattctgctccacactgtgcctcactggatatacagttccacctgcccgcccaccgcctcctctcaccaagaaaacttgttcaagttgctcaaaagacattttaaatccaaaggatgtgatcagtgcccagtttgaaaacaccaccactagtaaagatttttgcagtcagtcatgtttgtcaacatatgaactgaaaaaaaaacctattgttaccataaatacaaatagtatttcaaccaaatgcagcatgtgtcagaagaatgctgttattcgacatgaagttaattaccagaatgtggtccataaactttgcagtgatgcctgcttctctaagtttcgttctgctaacaacctcaccatgaactgttgtgagaactgtgggggttactgttacagtgggtcgggacaatgccacatgcttcagatagagggacagtctaagaagttttgtagttcatcgtgtatcacggcatacaagcagaaatcagccaaaattacaccgtgtgcgctttgcaaatcattgagatcctcagcagaaatgattgaaaataccaatagcttggggaagacagagcttttctgttctgttaattgcttatctgcttacagagttaaaatggttacttctgcaggtgtacaagttcagtgtaacagttgtaaaacctcagcaattcctcagtatcacctagccatgtcagatggaagtatacgcaacttctgcagctacagctgtgtggtagctttccagaatttattcaacaaaccaactggaatgaattcttcagtagtgcccttgtctcagggccaagtaattgtaagcatccccacaggttccacagtgtcagccggaggaggtagcacatctgctgtttctcccacctccatcagtagctctgctgcagctggtctccagcgtctcgctgcccagtcccagcatgttgggtttgcacgaagtgttgtgaaactcaaatgtcaacactgtaaccgtctttttgccacaaaaccagaacttcttgactataagggcaaaatgtttcagttctgtggcaagaattgttctgatgaatataagaaaataaataatgtaatggcaatgtgtgaatattgtaaaattgagaaaattgtaaaggagactgttcggttctcaggtgctgacaagtcattctgtagtgaaggttgcaaattgctttataaacatgacttggcaaaacgctggggaaatcactgtaaaatgtgcagttattgtttacagacatctcccaaattggtacagaataatttaggagggaaagtggaagagttctgttgtgaagaatgcatgtccaaatatacagttttgttctatcagatggccaaatgtgatgcttgtaagcgacagggtaaactcagtgagtccttgaaatggcgaggggaaatgaaacatttctgtaacctgctttgtatcttgatgttctgtaatcagcaaagtgtatgtgacccgccttcacaaaataatgcagcaaatatttccatggttcaagctgcttcagcaggacccccatctctgagaaaagattcgactccagttatagccaatgtagtatcattggcaagtgcccctgctgctcagcctacagtgaattctaacagtgtcttacaaggtgcagttccaacagtaacagcgaaaatcatcggtgatgcaagtactcaaacagatgccctgaaactgccaccttcccaacctccaaggcttttgaagaacaaagctttattatgcaaacccatcacacagactaaagccacctcttgcaaaccacatacccaaaacaaagaatgccagacagaagacactccaagtcagccccagattattgtggtgccagttcccgtaccagtgtttgttcccatacctcttcacctttatactcaatatgctccagtcccatttggaattccagttccaatgcctgtccctatgcttattccatcttcaatggatagtgaagataaagtcacagagagtattgaagacattaaagaaaagcttcccacacatccatttgaagctgatctccttgagatggcagaaatgattgcagaagatgaagagaagaagactctatctcagggagagtcccaaacttctgaacacgaactctttctagacaccaagatatttgaaaaagaccaaggaagtacatacagtggtgatcttgaatcagaggcagtatctactccacatagctgggaggaagagctgaatcactatgccttaaagtcaaatgctgtgcaagaggctgattcagaattgaagcagttctcaaaaggggaaactgaacaggacctggaagcagattttccatcagactcctttgacccacttaataaaggacagggaatccaggcacgttcccgaacaagacgacgacacagagatggcttcccccaacccagacgaagaggacggaagaagtctatagtggctgtggagcccaggagtcttattcaaggagcctttcaaggctgctcagtgtccgggatgacactgaaatacatgtatggggtaaatgcttggaagaactgggttcagtggaaaaatgccaaggaagagcagggggatctaaaatgtggaggggttgaacaggcctcatctagcccacgttctgaccccttaggaagtactcaagaccatgcactctctcaagaatcctcagagccaggctgtagagtccgctctatcaagctgaaggaagacattctgtcctgcacttttgctgagttgagtttgggcttatgccagtttatccaagaggtgcggagaccaaatggtgaaaaatatgatccagacagtatcttatacttgtgccttggaattcaacagtacctgtttgaaaatggtagaatagataacatttttactgagccctattccagatttatgattgaacttaccaaactcttgaaaatatgggaacctacaatacttcctaatggttacatgttctctcgcattgaggaagagcatttgtgggagtgcaaacagctgggcgcttactcaccaatcgtccttttaaacaccctccttttcttcaataccaaatacttccaactaaagaatgttactgagcacttgaagctttcctttgcccatgtgatgagacggaccaggactctgaagtacagtaccaagatgacatatctgaggttcttcccacctttacagaagcaggagtcagaaccagataaactgactgttggcaagaggaaacgaaatgaagatgatgaggttccagtgggggtggagatggcagagaatactgacaatccactaagatgcccagtccgactttatgagttttacctgtcaaaatgttctgaaagtgtgaagcaaaggaatgatgtgttttaccttcaacctgagcgctcctgtgtcccgaatagccccatgtggtactccacattcccgatagaccctggaaccctggacaccatgttaacacgtattctcatggtgagggaggtacatgaagaacttgccaaagccaaatctgaagactctgatgttgaattatcagattaaaacggaagtgaggttcttattttcatacatattggtatgcaccaaactgtgaatgcatccagctgttggaaaatgatgtataagtctaagtcctcttgacttgaccataagatcatggaaaacagatgacttgtgaaccccacagtgtggatgtgcaaatgaaaattgaaggaaagaatatgaactgagaaatgttctttggcagtgatatagttcttagacatcttcagaatgactaatttctccgagtggtgcataatcttattttgtttgggagtaacaaatcgtggaatatttttaaggaaaactgttgtataaaactttaccatagtaaccttagaccttagagaggtagctttggagtgaaactttggctgcaataggctactttggcaagccctccgtaaaagtcagaggagagatcagtacagagctaagagtgacatcaaatgaggactgtgggacccagatttgaagacccaataaaaatactcaactttttaaaaaagatagtgaagtggtcttgattgattttgattttcactgccaagccaatcatgtgaaggacagaagcttttgccatgggcccctcacatcagggaaaatgaccttcactgctgttaacagtaatgtgtccctttcattttctggatcaagccttctcagcggtgggtctggatgtgggtaaactaaggtaaaggggatgatattccacaaactaattatgcacacagaaaatctgtggagcctatcagaccccaagtgtcttgaaatgtttgtagaaacccactaaaatgccccttctctgggtgtgggcccttattgcagctgtctcacagcctgagctgtggtacagagaaatgggggttctccttttattttcattttttttccccaatggcagcttttctcccgttgttttaccttcctatttcccaaacagttcctcttattttgtcttttgcaccagtttctggaggcccttgtcatttcaaaaaggatagtctcttttcttactctggcaaacctgtgagtgattccacaaagatacagtattacttagctatctgaattatgatagaaaaggtcctagttaggttcctatataaagcatttggaagatgaccttgttgcccttgaaacttgaaaatagggattctggggtgaggatacaaagacattgtcttgcatatccataagcaggtcttagagcattattccaaactctagctgtttcagtagttctatgaggattgcaagtcataggtgtgtgtggcatatcagtccatctccctcatctccattctcagtttcttccccacaaaatttggaatcaaagcttttatgacgtttgccaattgcagaacttcttcagctaaggttaatttgacgctatgataaaactgagagatgtcaaaaagcctcttagaaattttaatcttgaaagacttttcagggtatctcattttttaggtgggggtggcaggtgtatttcttttttaacaaataaaaggcatttaagtaaaactaaaatgaaaaaagtaggccttctgacattgtgtacttggtggttctgtccctctgcctgtaacaaatctcatttttgttaccaagaactgtatgaaagaagtaaatccaccccgattctgtatgattaattccatctgtgtttgtcatttctgactggaaaacttcttactccataccttgttcgatatggaggacaaataattggattgtctgataagtctgccaataaactatccagaaatagcaagtgtaatagtccccactatacgaattttatggtttgtataaacactaacattttccccttctgtagttgtatgaaaaaacaaatattgttagcatagtagataaattgttatgaaataccagaaaaaaaaatctgtatcttttactgagaacacccaatacccagataaatgactgtatcaggatttcatttgcatgttagtccacagagttgcccagaaccctaaatttattcataagagaaaatattgattaattattggtcattcctcataagtgtagctgttgatgtgtgcgtctgattattgcttttttaattttatgaaaattgtgtaaaattacattttttttccaggggagaaaaaaacatcaaacaaaaacatctaaatcatcctttttgttctttttcagtttttaaccacttttaggttttccccttacagaaaccacagaaatattcccttagaataaaatagtatatttgtatttga

SEQ ID NO: 204629 - DNA, 466 bp, Homo sapiens
  Payload ID: 20364
  Gene Name: zinc finger, MYM-type 4
  ENST ID: ENST00000441447
  CDS Start-End: 173-466
gagcggggcccaacatggcggagagagaggtggagtccggcccccgaaagagggaacatcgtgatcaattagccactgccaaagatccctgctggccaaaacattctgattaccgtttgaacaaaaaagtggtgcagtttttgatgaaattgtagagaactgtggtggtatcatggatacagaaatgtctgaagatatagaccacaacttaactcctacccttgacagcatgtcttatggaatgccgaatcaaacaggatctgaaaattcattgctggatgaagatgattattttttgaactctggggatcttgcaggaattccagtcgttggtagtgacaatgaggatgaacaggattttagttcaaaggacaatcttgtttcttcaattcatactgatgatagcttggaagtagagagaagagtcacacagcatgaatcagacaatgaaaatgaaatacaaatt

SEQ ID NO: 204630 - DNA, 6003 bp, Homo sapiens
  Payload ID: 20364
  Gene Name: zinc finger, MYM-type 4
  ENST ID: ENST00000457946
  CDS Start-End: 1-3622
acctttggatgatgagtatgacaaagcaatggcaccacagcagggactactagacaaaataaaagatgaacctgacaatgctcaagagtatagtcatggccaacagcaaaaaactcaagagggggaactgaaaattagtgctgtgttttcagtcagtggcagccctcttgctccacagttgactactggctttcagccctcactggcgtcatctggcatgaataaaatgcttccttcagttccagccacagctgttcgagtttcctgttctggttgtaaaaaaatcctccagaaggggcaaactgcttatcagaggaaagggtctactcagctattctgctccacactgtgcctcactggatatacagttccacctgcccgcccaccgcctcctctcaccaagaaaacttgttcaagttgctcaaaagacattttaaatccaaaggatgtgatcagtgcccagtttgaaaacaccaccactagtaaagatttttgcagtcagtcatgtttgtcaacatatgaactgaaaaaaaaacctattgttaccataaatacaaatagtatttcaaccaaatgcagcatgtgtcagaagaatgctgttattcgacatgaagttaattaccagaatgtggtccataaactttgcagtgatgcctgcttctctaagtttcgttctgctaacaacctcaccatgaactgttgtgagaactgtgggggttactgttacagtgggtcgggacaatgccacatgcttcagatagagggacagtctaagaagttttgtagttcatcgtgtatcacggcatacaagcagaatttattcaacaaaccaactggaatgaattcttcagtagtgcccttgtctcagggccaagtaattgtaagcatccccacaggttccacagtgtcagccggaggaggtagcacatctgctgtttctcccacctccatcagtagctctgctgcagctggtctccagcgtctcgctgcccagtcccagcatgttgggtttgcacgaagtgttgtgaaactcaaatgtcaacactgtaaccgtctttttgccacaaaaccagaacttcttgactataagggcaaaatgtttcagttctgtggcaagaattgttctgatgaatataagaaaataaataatgtaatggcaatgtgtgaatattgtaaaattgagaaaattgtaaaggagactgttcggttctcaggtgctgacaagtcattctgtagtgaaggttgcaaattgctttataaacatgacttggcaaaacgctggggaaatcactgtaaaatgtgcagttattgtttacagacatctcccaaattggtacagaataatttaggagggaaagtggaagagttctgttgtgaagaatgcatgtccaaatatacagttttgttctatcagatggccaaatgtgatgcttgtaagcgacagggtaaactcagtgagtccttgaaatggcgaggggaaatgaaacatttctgtaacctgctttgtatcttgatgttctgtaatcagcaaagtgtatgtgacccgccttcacaaaataatgcagcaaatatttccatggttcaagctgcttcagcaggacccccatctctgagaaaagattcgactccagttatagccaatgtagtatcattggcaagtgcccctgctgctcagcctacagtgaattctaacagtgtcttacaaggtgcagttccaacagtaacagcgaaaatcatcggtgatgcaagtactcaaacagatgccctgaaactgccaccttcccaacctccaaggcttttgaagaacaaagctttattatgcaaacccatcacacagactaaagccacctcttgcaaaccacatacccaaaacaaagaatgccagacagacactccaagtcagccccagattattgtggtgccagttcccgtaccagtgtttgttcccatacctcttcacctttatactcaatatgctccagtcccatttggaattccagttccaatgcctgtccctatgcttattccatcttcaatggatagtgaagataaagtcacagagagtattgaagacattaaagaaaagcttcccacacatccatttgaagctgatctccttgagatggcagaaatgattgcagaagatgaagagaagaagactctatctcagggagagtcccaaacttctgaacacgaactctttctagacaccaagatatttgaaaaagaccaaggaagtacatacagtggtgatcttgaatcagaggcagtatctactccacatagctgggaggaagagctgaatcactatgccttaaagtcaaatgctgtgcaagaggctgattcagaattgaagcagttctcaaaaggggaaactgaacaggacctggaagcagattttccatcagactcctttgacccacttaataaaggacagggaatccaggcacgttcccgaacaagacgacgacacagagatggcttcccccaacccagacgaagaggacggaagaagtctatagtggctgtggagcccaggagtcttattcaaggagcctttcaaggctgctcagtgtccgggatgacactgaaatacatgtatggggtaaatgcttggaagaactgggttcagtggaaaaatgccaaggaagagcagggggatctaaaatgtggaggggttgaacaggcctcatctagcccacgttctgaccccttaggaagtactcaagaccatgcactctctcaagaatcctcagagccaggctgtagagtccgctctatcaagctgaaggaagacattctgtcctgcacttttgctgagttgagtttgggcttatgccagtttatccaagaggtgcggagaccaaatggtgaaaaatatgatccagacagtatcttatacttgtgccttggaattcaacagtacctgtttgaaaatggtagaatagataacatttttactgagccctattccagatttatgattgaacttaccaaactcttgaaaatatgggaacctacaatacttcctaatggttacatgttctctcgcattgaggaagagcatttgtgggagtgcaaacagctgggcgcttactcaccaatcgtccttttaaacaccctccttttcttcaataccaaatacttccaactaaagaatgttactgagcacttgaagctttcctttgcccatgtgatgagacggaccaggactctgaagtacagtaccaagatgacatatctgaggttcttcccacctttacagaagcaggagtcagaaccagataaactgactgttggcaagaggaaacgaaatgaagatgatgaggttccagtgggggtggagatggcagagaatactgacaatccactaagatgcccagtccgactttatgagttttacctgtcaaaatgttctgaaagtgtgaagcaaaggaatgatgtgttttaccttcaacctgagcgctcctgtgtcccgaatagccccatgtggtactccacattcccgatagaccctggaaccctggacaccatgttaacacgtattctcatggtgagggaggtacatgaagaacttgccaaagccaaatctgaagactctgatgttgaattatcagattaaaacggaagtgaggttcttattttcatacatattggtatgcaccaaactgtgaatgcatccagctgttggaaaatgatgtataagtctaagtcctcttgacttgaccataagatcatggaaaacagatgacttgtgaaccccacagtgtggatgtgcaaatgaaaattgaaggaaagaatatgaactgagaaatgttctttggcagtgatatagttcttagacatcttcagaatgactaatttctccgagtggtgcataatcttattttgtttgggagtaacaaatcgtggaatatttttaaggaaaactgttgtataaaactttaccatagtaaccttagaccttagagaggtagctttggagtgaaactttggctgcaataggctactttggcaagccctccgtaaaagtcagaggagagatcagtacagagctaagagtgacatcaaatgaggactgtgggacccagatttgaagacccaataaaaatactcaactttttaaaaaagatagtgaagtggtcttgattgattttgattttcactgccaagccaatcatgtgaaggacagaagcttttgccatgggcccctcacatcagggaaaatgaccttcactgctgttaacagtaatgtgtccctttcattttctggatcaagccttctcagcggtgggtctggatgtgggtaaactaaggtaaaggggatgatattccacaaactaattatgcacacagaaaatctgtggagcctatcagaccccaagtgtcttgaaatgtttgtagaaacccactaaaatgccccttctctgggtgtgggcccttattgcagctgtctcacagcctgagctgtggtacagagaaatgggggttctccttttattttcattttttttccccaatggcagcttttctcccgttgttttaccttcctatttcccaaacagttcctcttattttgtcttttgcaccagtttctggaggcccttgtcatttcaaaaaggatagtctcttttcttactctggcaaacctgtgagtgattccacaaagatacagtattacttagctatctgaattatgatagaaaaggtcctagttaggttcctatataaagcatttggaagatgaccttgttgcccttgaaacttgaaaatagggattctggggtgaggatacaaagacattgtcttgcatatccataagcaggtcttagagcattattccaaactctagctgtttcagtagttctatgaggattgcaagtcataggtgtgtgtggcatatcagtccatctccctcatctccattctcagtttcttccccacaaaatttggaatcaaagcttttatgacgtttgccaattgcagaacttcttcagctaaggttaatttgacgctatgataaaactgagagatgtcaaaaagcctcttagaaattttaatcttgaaagacttttcagggtatctcattttttaggtgggggtggcaggtgtatttcttttttaacaaataaaaggcatttaagtaaaactaaaatgaaaaaagtaggccttctgacattgtgtacttggtggttctgtccctctgcctgtaacaaatctcatttttgttaccaagaactgtatgaaagaagtaaatccaccccgattctgtatgattaattccatctgtgtttgtcatttctgactggaaaacttcttactccataccttgttcgatatggaggacaaataattggattgtctgataagtctgccaataaactatccagaaatagcaagtgtaatagtccccactatacgaattttatggtttgtataaacactaacattttccccttctgtagttgtatgaaaaaacaaatattgttagcatagtagataaattgttatgaaataccagaaaaaaaaatctgtatcttttactgagaacacccaatacccagataaatgactgtatcaggatttcatttgcatgttagtccacagagttgcccagaaccctaaatttattcataagagaaaatattgattaattattggtcattcctcataagtgtagctgttgatgtgtgcgtctgattattgcttttttaattttatgaaaattgtgtaaaattacattttttttccaggggagaaaaaaacatcaaacaaaaacatctaaatcatcctttttgttctttttcagtttttaaccacttttaggttttccccttacagaaaccacagaaatattcccttagaataaaatagtatatttgtatttgatgggtgagttcttcttctttacgtcttaaaagaatttgaaatctctttttctgattgaccttattggtatgacccagcaattagtaaaattacaaagaaagagagcagtttccg

SEQ ID NO: 204631 - DNA, 3268 bp, Homo sapiens
  Payload ID: 20365
  Gene Name: zinc finger, MYM-type 5
  Uniprot ID: Q9UJ78
  ENST ID: ENST00000337963
  CDS Start-End: 266-2275
cgcgaaaagccgggactggacctcgcggagttgtgcttgtcgccgaagcggggtgggcttgttcgttccgcgcagccgcagccagaaccgggtgacgcttatccccgctgtctttccagtccagggccgctgagagtgggggtggctgggagcagcgcagcctccggaggaggaggcggaggccgaggaccaggaatcaccttcaagcctatgtcgtgaggctttggcagaaattaagaaggaaatatctccattgttcattggcatggaaaaatgttcagtgggaggattagagttgactgaacagactcctgctttattagggaatatggccatggcaactagtctcatggacataggggattcatttggtcatccagcttgtcctttagtcagtagatctaggaactcaccagtggaagatgatgatgatgatgatgatgttgtgtttattgaatctatacaacctccttcaatttctgctccagcaatagctgatcaaagaaacttcatatttgcatcatcaaaaaatgaaaagcctcaaggaaattattctgtaattcctccttcttcaagagatttggcatctcagaaaggaaatataagtgagacaattgttattgatgatgaagaggacatagaaacaaatggaggagcagagaaaaagtcttcctgttttatcgaatggggacttcctggaactaaaaacaaaaccaacgatttggatttctccacttccagtctttcaagaagtaagaccaagactggagtaagaccttttaaccctggtagaatgaatgtggcaggagacttatttcagaatggagaatttgcaactcatcatagtcctgattcttggatctcccagtcagcttcatttcccagtaatcagaaacagccaggggtggattctttatcaccagtggccttacttcgtaagcagaatttccagcctacagcccaacaacaacttactaaaccagctaaaatcacttgtgcaaattgcaaaaagcctttacagaagggacagacagcttatcaacgaaaaggatcagctcacctcttttgctctaccacctgcctttcttccttctctcataaacgtactcaaaacacacgaagcataatatgtaaaaaagatgcatctacaaagaaggctaatgtcattcttccagtagaatcaagcaaatccttccaagaattttatagtacatcttgtttgtctccctgtgaaaacaactggaatcttaaaaaaggagtttttaataagtcaagatgtacaatttgtagtaaattagcagagattcgccatgaagtcagcgtaaataatgtaacacataaactgtgcagtaaccattgctttaataagtacagattggccaatggtctaataatgaactgctgtgaacactgtggagagtacatgcctagtaagagtactggaaacaacatcctggtgattggaggtcagcagaagagattttgctgccaaagttgtattaacgaatataaacagatgatggaaacaaaatcaaaaaaattaacagcatcagaaaatagaaaaaggaatgcttttagagaagaaaatgagaaacaattatatggatcgtcaaatacacttttgaaaaaaatagagggaatcccagaaaaaaaggaaaagacttcacagctacagctttcagtagaatgtggcacggatacattactgatccaagagaatgtgaatttacctccttcttccacgtcaaccatagctgatacatttcaagagcaactggaagagaaaaattttgaagactccattgtaccagttgtgctttccgcagatccaggtacgtggccccgaattttgaatattaaacaacgggacactcttgttgaaaatgttccgcctcaagtaagaaattttaactttccaaaagataatacagggaggaagttttcagaaacttattatacacggattcttccaaatggtgaaaaaaccactagatcctggttactttattcaacctcaaaagattctgtgttttgtctatattgcaaactctttggggaaggaaaaaatcaactgaaaaatgaaaatgggtgcaaagattggcaacatttatcacatattcttagtaaacatgaagaaagtgaaatgcacgtcaacaatagtgttaagtactcaaaattaaaatctgatctgaaaaaaaataaagctattgatgctgcagaacacagattatatgaaaatgagaaaaatgatggtgtgctgttgttgtacacgtaatatacctgagttgttttttggcatgatgatcagaatcttacattactcagaaaacatctgtcctgcaatagtcagtactattgtgttgtaagtctcctctacagagtaacttgcagcagttccttagcaataagtatgatagcaaataaatagcaaagaatgtttccattctaaatctaaaactaattagattcaatcatcattaggcaatgacttcattaggcaatgaagattaacaataggtaattgttaatcttcaaaatctatcaatttacacctatttaaaaattggcatttaatgactgccatttgatgggtttggttaatattctgttcttggccgggcgcaatggctcacgcctgtaatccaagaactttgggaggctcaggcgggtagatcaattgaggtcagaagttcaagaccagcctggccaacgtggcaaaacctcgtctttactaaaaatacaaaaattagccaggtgtggtggcacacacctgtagtcccagctactcaggaggctgaggcaggagaatcgcttgaacccaggaggcagaggttgcagtgagctgagattgcaccactgcagtccagcctgagcaacagagcgagagtcagtctcaaaagaaagaaaaatattatgttctaattaccttgaaagaggaaagaaaggcttgaattgatcaataccagtttgaataagatacttatgtgaacaagcattctcaacattattattaaagtaaaactactcagtttacagaatgggatctgaaactacagctttttgctattaaaccaaatacttgtgatctactttgtttgagcaaaacagcattatttgttatgttaatgatggttaatttccattttattggttttatgtttattttaatttgtaaatgttttagcatttattattgtatgtgaactatatttacctattttatgttgataaaaatataaaaaatattaaaataagtatatattaagtt

SEQ ID NO: 204632 - DNA, 1382 bp, Homo sapiens
  Payload ID: 20365
  Gene Name: zinc finger, MYM-type 5
  Uniprot ID: Q9UJ78
  ENST ID: ENST00000382905
  CDS Start-End: 154-1302
tttccagtccagggccgctgagagtgggggtggctgggagcagcgcagcctccggaggaggaggcggaggccgaggaccaggaatcaccttcaagcctatgtcgtgaggctttggcagaaattaagaaggaaatatctccattgttcattggcatggaaaaatgttcagtgggaggattagagttgactgaacagactcctgctttattagggaatatggccatggcaactagtctcatggacataggggattcatttggtcatccagcttgtcctttagtcagtagatctaggaactcaccagtggaagatgatgatgatgatgatgatgttgtgtttattgaatctatacaacctccttcaatttctgctccagcaatagctgatcaaagaaacttcatatttgcatcatcaaaaaatgaaaagcctcaaggaaattattctgtaattcctccttcttcaagagatttggcatctcagaaaggaaatataagtgagacaattgttattgatgatgaagaggacatagaaacaaatggaggagcagagaaaaagtcttcctgttttatcgaatggggacttcctggaactaaaaacaaaaccaacgatttggatttctccacttccagtctttcaagaagtaagaccaagactggagtaagaccttttaaccctggtagaatgaatgtggcaggagacttatttcagaatggagaatttgcaactcatcatagtcctgattcttggatctcccagtcagcttcatttcccagtaatcagaaacagccaggggtggattctttatcaccagtggccttacttcgtaagcagaatttccagcctacagcccaacaacaacttactaaaccagctaaaatcacttgtgcaaattgcaaaaagcctttacagaagggacagacagcttatcaacgaaaaggatcagctcacctcttttgctctaccacctgcctttcttccttctctcataaacgtactcaaaacacacgaagcataatatgtaaaaaagatgcatctacaaagaaggctaatgtcattcttccagtagaatcaagcaaatccttccaagaattttatagtacatcttgtttgtctccctgtgaaaacaactggaatcttaaaaaaggagtttttaataagtcaagatgtacaatttgtagtaaattagcagaggtctggatttttatacctaagttgttgtttaggctaacagtgataattttaacttttaagtgctattatgtactctttcatctacataatgcacgtgttctggatgtataacatgaagctgaaaggaagaataaggatatgttagaactatcttatgggatattttataaataaaattccatttgcatagc

SEQ ID NO: 204633 - DNA, 1092 bp, Homo sapiens
  Payload ID: 20365
  Gene Name: zinc finger, MYM-type 5
  Uniprot ID: Q9UJ78
  ENST ID: ENST00000382907
  CDS Start-End: 138-764
gctgagagtgggggtggctgggagcagcgcagcctccggaggaggaggcggaggccgaggaccaggaatcaccttcaagcctatgtcgtgaggctttggcagaaattaagaaggaaatatctccattgttcattggcatggaaaaatgttcagtgggaggattagagttgactgaacagactcctgctttattagggaatatggccatggcaactagtctcatggacataggggattcatttggtcatccagcttgtcctttagtcagtagatctaggaactcaccagtggaagatgatgatgatgatgatgatgttgtgtttattgaatctatacaacctccttcaatttctgctccagcaatagctgatcaaagaaacttcatatttgcatcatcaaaaaatgaaaagcctcaaggaaattattctgtaattcctccttcttcaagagatttggcatctcagaaaggaaatataagtgagacaattgttattgatgatgaagaggacatagaaacaaatggaggagcagagaaaaagtcttcctgttttatcgaatggggacttcctggaactaaaaacaaaaccaacgatttggatttctccacttccagtctttcaagaagtaagaccaagactggagtaagaccttttaaccctggtagaatgaatgtggcaggagacttatttcagaatggagaatttgcaactcatcatagtcctgagatgcatctacaaagaaggctaatgtcattcttccagtagaatcaagcaaatccttccaagaattttatagtacatcttgtttgtctccctgtgaaaacaactggaatcttaaaaaaggagtttttaataagtcaagatgtacaatttgtagtaaattagcagaggtctggatttttatacctaagttgttgtttaggctaacagtgataattttaacttttaagtgctattatgtactctttcatctacataatgcacgtgttctggatgtataacatgaagctgaaaggaagaataaggatatgttagaactatcttatgggatattttataaataaaattccatttgcatagcatggaaagtaca

SEQ ID NO: 204634 - DNA, 2604 bp, Homo sapiens
  Payload ID: 20365
  Gene Name: zinc finger, MYM-type 5
  ENST ID: ENST00000502168
  CDS Start-End: 1-1980
ttgactgaacagactcctgctttattagggaatatggccatggcaactagtctcatggacataggggattcatttggtcatccagcttgtcctttagtcagtagatctaggaactcaccagtggaagatgatgatgatgatgatgatgttgtgtttattgaatctatacaacctccttcaatttctgctccagcaatagctgatcaaagaaacttcatatttgcatcatcaaaaaatgaaaagcctcaaggaaattattctgtaattcctccttcttcaagagatttggcatctcagaaaggaaatataagtgagacaattgttattgatgatgaagaggacatagaaacaaatggaggagcagagaaaaagtcttcctgttttatcgaatggggacttcctggaactaaaaacaaaaccaacgatttggatttctccacttccagtctttcaagaagtaagaccaagactggagtaagaccttttaaccctggtagaatgaatgtggcaggagacttatttcagaatggagaatttgcaactcatcatagtcctgattcttggatctcccagtcagcttcatttcccagtaatcagaaacagccaggggtggattctttatcaccagtggccttacttcgtaagcagaatttccagcctacagcccaacaacaacttactaaaccagctaaaatcacttgtgcaaattgcaaaaagcctttacagaagggacagacagcttatcaacgaaaaggatcagctcacctcttttgctctaccacctgcctttcttccttctctcataaacgtactcaaaacacacgaagcataatatgtaaaaaagatgcatctacaaagaaggctaatgtcattcttccagtagaatcaagcaaatccttccaagaattttatagtacatcttgtttgtctccctgtgaaaacaactggaatcttaaaaaaggagtttttaataagtcaagatgtacaatttgtagtaaattagcagagattcgccatgaagtcagcgtaaataatgtaacacataaactgtgcagtaaccattgctttaataagtacagattggccaatggtctaataatgaactgctgtgaacactgtggagagtacatgcctagtaagagtactggaaacaacatcctggtgattggaggtcagcagaagagattttgctgccaaagttgtattaacgaatataaacagatgatggaaacaaaatcaaaaaaattaacagcatcagaaaatagaaaaaggaatgcttttagagaagaaaatgagaaacaattatatggatcgtcaaatacacttttgaaaaaaatagagggaatcccagaaaaaaaggaaaagacttcacagctacagctttcagtagaatgtggcacggatacattactgatccaagagaatgtgaatttacctccttcttccacgtcaaccatagctgatacatttcaagagcaactggaagagaaaaattttgaagactccattgtaccagttgtgctttccgcagatccaggtacgtggccccgaattttgaatattaaacaacgggacactcttgttgaaaatgttccgcctcaagtaagaaattttaactttccaaaagataatacagggaggaagttttcagaaacttattatacacggattcttccaaatggtgaaaaaaccactagatcctggttactttattcaacctcaaaagattctgtgttttgtctatattgcaaactctttggggaaggaaaaaatcaactgaaaaatgaaaatgggtgcaaagattggcaacatttatcacatattcttagtaaacatgaagaaagtgaaatgcacgtcaacaatagtgttaagtactcaaaattaaaatctgatctgaaaaaaaataaagctattgatgctgcagaacacagattatatgaaaatgagaaaaatgatggtgtgctgttgttgtacacgtaatatacctgagttgttttttggcatgatgatcagaatcttacattactcagaaaacatctgtcctgcaatagtcagtactattgtgttgtaagtctcctctacagagtaacttgcagcagttccttagcaataagtatgatagcaaataaatagcaaagaatgtttccattctaaatctaaaactaattagattcaatcatcattaggcaatgacttcattaggcaatgaagattaacaataggtaattgttaatcttcaaaatctatcaatttacacctatttaaaaattggcatttaatgactgccatttgatgggtttggttaatattctgttcttggccgggcgcaatggctcacgcctgtaatccaagaactttgggaggctcaggcgggtagatcaattgaggtcagaagttcaagaccagcctggccaacgtggcaaaacctcgtctttactaaaaatacaaaaattagccaggtgtggtggcacacacctgtagtcccagctactcaggaggctgaggcaggagaatcgcttgaacccaggaggcagaggttgcagtgagctgagattgcaccactgcagtccagcctgagcaacagagcgagagtcagtctcaaaa

SEQ ID NO: 204635 - DNA, 2702 bp, Homo sapiens
  Payload ID: 20366
  Gene Name: zinc finger, MYM-type 6
  Uniprot ID: O95789
  ENST ID: ENST00000317538
  CDS Start-End: 166-678
ggaattccagaagagaaaataatccctgtctagatgcagaggacttggttcctattccagtgctcctccggtagcagggaggcgacagaaggtgtccaactatccattaccaagaagaaatctattcgtttgagcctgagacactctttgaggtaaaaaattagaatgaaagaacctttggatggtgaatgtggcaaagcagtggtaccacagcaggagcttctggacaaaattaaagaagaaccagacaatgctcaagagtatggatgtgtccaacagccaaaaactcaagaaagtaaattgaaaattggtggtgtgtcttcagttaatgagagacctattgcccagcagttgaacccaggctttcagctttcttttgcatcatctggcccaagtgtgttgcttccttcagttccagctgttgctattaaggttttttgttctggttgtaaaaaaatgctttataagggccaaactgcatatcataagacaggatctactcagctcttctgctccacacgatgcatcaccagacattcttcacctgcctgcctgccacctcctcccaagaaaacctgcacaaactgctcgaagtataaaattcttaacatccctttttactttaccttttttttagtgtgtatattgtttagttcaaacatactgttgatactttaaatctcttcagcatgtatctgtagaaataactttttagttaatggaagaattcaccaattttaaagttttgcaacattaaataagtgacttggtgttagaatattgcctaaaccagttttctatcactttaaattttactatggaaagaaataacaaatgacatgtgggaattgcaggactatcctgtaattgtagacacccaccatttaaatttatttaacagttatcttgaaagctattgggtatagcataaaataatatcactcttttaatagtatacaaaagctatttaattctttaaaaagtaaaaactctacatggtcgcaaaaatgtgtttatttctaatgtccttgtggggtcattgttgctttacaataatgcttagatgcagagagaggaaaaaacagcaacaaagtcacataaatctttccctgacttagtacatttgaaggatttggcatattttgcctatttctgtggtagtgtaatttgaggaatacagtgtgttgttaatagtcactacaggcaaaaaacagtaagagcttgcttttaaattgtggctctgtcatttatctctgtgacttcgggctagatgtttaactttctaagcctccatttctcatcagtaaataatagttgcttcctaggactttaatgagacagtgttagcaaatggcctagcacatagcaagtacttaaaaaatggaatcctgttattattaataataaaaattatatcgtgcgattatttataattaacataaataaatataataaatatatgtgtatataatacatattactatgtatacttaacatatcacttgtaggcccctattttgtctttggctgtgtttatctgctttgtgtcttgacttaaactatttaaaagtagatcctgctatatggaaatttccaagtaaagaggagagaggatttttttttttctttgttgcccatggtagagtgatcacagctcactgcagccttgaactccccgggctcagatgatcctcccacctcagcctttcaaatagctgggaccacaggcgcataccaccatgcccgactaatttttgtatttttttgtagagatggttttgctatgttgcccaggctggtctcaaactcctgggctcaagcaattagcctgcctcagcctcctaaagtgctgggactattggtgtgagccatcacatgtggccaggagagaggaattttaaaatatttatatactctaaattagtttgttgcaaaataccattctaattaatgcttttatgtcattctcatgaaactaatctgaaagagtaaacttagttttctatttttagatattgtttcaacataccaaataccaaaataaaattaaataattttaaagaacataacacaacttatacatccaaatgcctattgttttcttaaaagtagtcacccccgtcagtgactttttagcataaggttaggagacagattcttatcttttcagcatgcatttgatttttacaaattttcaaaggctgcttgataccttaatcaggccaatatattagctaattaaattaagtcatactgttaaaacatgatatttataaaattaaaagttaaaaaatagtctaagggtttatcttaagttttatcttaaaaaaattagaaaaatgttttgagctatgttattgttggaaggtgtggtttttctacggtaaatgttacgatataacactcatttgcatgtgtaaggttcagagtacacttataatttatgtgcacagattttcattataaagtcattctctttgatttacatatttttacttgctatttttgtacttattatgccactggcagattcaccttattaagtgaaactctttattgctctgttttcagtagaaaaatcacttttcaaaattaatacttcatctgtgtataagcatattcttttggtttctaagatttgctgtcatatttttaaagttgagttttaaagaattaaaataatttttgttgttgttattttc

SEQ ID NO: 204636 - DNA, 4330 bp, Homo sapiens
  Payload ID: 20366
  Gene Name: zinc finger, MYM-type 6
  Uniprot ID: O95789
  ENST ID: ENST00000357182
  CDS Start-End: 229-4206
gagggcggagaccaaggctgcgcaggcgtggttggccggtcgttgcgttgggatggatcaggcggaattccagaagagaaaataatccctgtctagatgcagaggacttggttcctattccagtgctcctccggtagcagggaggcgacagaaggtgtccaactatccattaccaagaagaaatctattcgtttgagcctgagacactctttgaggtaaaaaattagaatgaaagaacctttggatggtgaatgtggcaaagcagtggtaccacagcaggagcttctggacaaaattaaagaagaaccagacaatgctcaagagtatggatgtgtccaacagccaaaaactcaagaaagtaaattgaaaattggtggtgtgtcttcagttaatgagagacctattgcccagcagttgaacccaggctttcagctttcttttgcatcatctggcccaagtgtgttgcttccttcagttccagctgttgctattaaggttttttgttctggttgtaaaaaaatgctttataagggccaaactgcatatcataagacaggatctactcagctcttctgctccacacgatgcatcaccagacattcttcacctgcctgcctgccacctcctcccaagaaaacctgcacaaactgctcgaaagacattttaaatcctaaggatgtgatcacaactcgctttgagaattcctatcctagcaaagatttctgcagccaatcatgcttgtcatcttatgagctaaagaaaaaacctgttgttaccatatataccaaaagcatttcaactaagtgcagtatgtgtcagaagaatgctgatactcgatttgaagttaaatatcaaaatgtggtacatggtctttgtagtgatgcctgtttttcaaaatttcactctacaaacaacctcaccatgaactgttgtgagaactgtgggagctattgctatagtagctctggtccttgccaatcccagaaggtttttagttcaacaagtgtcacggcatacaagcagaattctgcccaaattcctccatatgccctggggaagtcattgaggccctcagctgaaatgattgagactacaaatgattcaggaaaaacagagcttttctgctctattaattgcttatctgcttacagagttaagactgttacttcttcaggtgtccaggtttcatgtcatagttgtaaaacctcagcaatccctcagtatcacctagccatgtcaaatggaactatatacagcttctgcagctccagttgtgtggttgctttccagaatgtatttagcaagccaaaaggaacaaactcttcggcggtgcccctgtctcagggccaagtggttgtaagcccgccctcctccaggtcagcagtgtcaataggaggaggtaacacctctgccgtttcccccagctccatccgtggctctgctgcagccagcctccaacctcttgctgaacaatcccagcaagttgctttaacccatacagttgttaaactcaagtgtcagcactgtaaccatctatttgccacaaaaccagaacttcttttttacaagggtaaaatgtttctgttttgtggcaagaattgctctgatgaatacaagaagaaaaataaagttgtggcaatgtgtgactactgtaaactgcagaaaattataaaggagactgtgcgattctcaggggttgataagccattctgtagtgaagtttgcaaattcctctctgcccgtgactttggagaacgatggggaaactactgtaagatgtgcagctactgttcacagacatccccaaatttggtagaaaatcgattggagggcaagttagaagagttttgttgtgaagattgtatgtccaaatttacagttctgttttatcagatggccaagtgtgatggttgtaaacgacagggtaaactaagcgagtccataaagtggcgaggcaacattaaacatttctgtaacctattttgtgtcttggagttttgtcatcagcaaattatgaatgactgtcttccacaaaataaagtaaatatttctaaagcaaaaactgctgtgacggagctcccttctgcaaggacagatacaacaccagttataaccagtgtgatgtcattggcaaaaatacctgctaccttatctacagggaacactaacagtgttttaaaaggtgcagttactaaagaggcagcaaagatcattcaagatgaaagtacacaggaagatgctatgaaatttccatcttcccaatcttcccagccttccaggcttttaaagaacaaaggcatatcatgcaaacccgtcacacagaccaaggccacttcttgcaaaccacatacacagcacaaagaatgtcagacagatttacctatgcctaatgaaaaaaatgatgcagaacttgattctccaccttcaaagaaaaaaagattaggttttttccagacttatgatacagaatatttaaaagttggttttattatctgtcctggatcaaaagaaagttcaccaaggccacagtgtgtcatttgtggagagatcttatccagtgaaaacatgaagccagcaaatctttctcatcatttgaagacaaaacattcagaattagaaaacaaaccagtagatttttttgaacaaaaatctttagaaatggaatgtcaaaatagttctttaaaaaagtgtttactagttgaaaagtcacttgtgaaagcttcttatttaattgctttccaaactgctgcaagcaagaagccattctccattgctgaagaattaattaaaccatatttagtagaaatgtgttcagaagttttgggttcaagtgctggagacaaaatgaaaactattccactttctaatgttacaattcaacacaggattgatgaactatctgcagacattgaagaccagctgattcaaaaggtcagagagtcaaagtggtttgcccttcagatagatgagtcatcagaaatctcaaatatcacacttcttttgtgctatattcgtttcattgattatgattgtcgtgatgtaaaagaagaattattattttgcattgaaatgcctactcaaataactggctttgaaatatttgaactaataaataaatatattgatagtaaatctctgaattggaaacattgtgttggtctctgtaccgatggggctgcaagcatgactggcaggtattctggtttaaaagcaaaaattcaagaagttgccatgaatacagcggcatttacacattgttttattcaccgtgaacgtttagtggcagaaaagttgtctccatgtttacataaaattcttttgcagtcagcacaaattttaagttttataaagagcaatgcattaaattcacgtatgttaacaattttgtgtgaagagatgggatctgagcatgtgagtttaccgcttcatgctgaagtacgttggatatcaagagggagaatgttaaaaagattatttgaattacgacatgagattgaaatatttttaagtcaaaagcattcagatttggccaagtattttcatgatgaggaatgggttggaaagctggcctacttatcagatatattttcacttataaatgaattaaatttaagtctccaaggaactttgactactttcttcaatttgtgtaataaaattgatgtatttaagagaaagttaaaaatgtggttgaagcgcacacaagagaatgattatgacatgttcccttcattttctgaattctcaaattcatcaggcttaaatatgacagacatcacaaggattatttttgagcacctggaaggactttctcaagtgttcagtgactgttttccaccagaacaagacttgcgttcaggaaatttgtggataattcacccttttatgaatcaccaaaataataatctcaccgacttcgaagaagaaaagctaacagagctatcttcagatttaggattacaagcactatttaaatcagtgtctgtaactcagttttggataaatgcaaagacaagttacccagaactccatgaaagggcaatgaaatttttattacccttttcaactgtttatttatgtgatgctgccttttcagctttgactgagtcaaaacaaaaaaatctgttgggttctggccctgccctaagacttgcagtcacatctttaattccaaggatagaaaaattagtgaaggagaaagagtagcaatatgcacattgcttaacagtgaagtcaataatcctgtgttaagttttgtataagtatcctaaaagataatttcctaatgtggatttgtgttttcagtgattaaatgttttaataatttttc

SEQ ID NO: 204637 - DNA, 1473 bp, Homo sapiens
  Payload ID: 20366
  Gene Name: zinc finger, MYM-type 6
  Uniprot ID: O95789
  ENST ID: ENST00000373333
  CDS Start-End: 206-718
agggacgcgttgacattcactggctagtccaccgctctcagtcggagaccacattgcctcgaaggcgattgtgaagcggggctctgaggggcttgatgccccccacccctcacacggagaccttgaaagaggtgtccaactatccattaccaagaagaaatctattcgtttgagcctgagacactctttgaggtaaaaaattagaatgaaagaacctttggatggtgaatgtggcaaagcagtggtaccacagcaggagcttctggacaaaattaaagaagaaccagacaatgctcaagagtatggatgtgtccaacagccaaaaactcaagaaagtaaattgaaaattggtggtgtgtcttcagttaatgagagacctattgcccagcagttgaacccaggctttcagctttcttttgcatcatctggcccaagtgtgttgcttccttcagttccagctgttgctattaaggttttttgttctggttgtaaaaaaatgctttataagggccaaactgcatatcataagacaggatctactcagctcttctgctccacacgatgcatcaccagacattcttcacctgcctgcctgccacctcctcccaagaaaacctgcacaaactgctcgaagtataaaattcttaacatccctttttactttaccttttttttagtgtgtatattgtttagttcaaacatactgttgatactttaaatctcttcagcatgtatctgtagaaataactttttagttaatggaagaattcaccaattttaaagttttgcaacattaaataagtgacttggtgttagaatattgcctaaaccagttttctatcactttaaattttactatggaaagaaataacaaatgacatgtgggaattgcaggactatcctgtaattgtagacacccaccatttaaatttatttaacagttatcttgaaagctattgggtatagcataaaataatatcactcttttaatagtatacaaaagctatttaattctttaaaaagtaaaaactctacatggtcgcaaaaatgtgtttatttctaatgtccttgtggggtcattgttgctttacaataatgcttagatgcagagagaggaaaaaacagcaacaaagtcacataaatctttccctgacttagtacatttgaaggatttggcatattttgcctatttctgtggtagtgtaatttgaggaatacagtgtgttgttaatagtcactacaggcaaaaaacagtaagagcttgcttttaaattgtggctctgtcatttatctctgtgacttcgggctagatgtttaactttctaagcctccatttctcatcagtaaataatagttgcttcctaggactttaatgagacagtgttagcaaatggcctagcacatagcaagtacttaaaaaatggaatcctgttattattaataataaaaattatatcgtgcgattatttataa

SEQ ID NO: 204638 - DNA, 807 bp, Homo sapiens
  Payload ID: 20366
  Gene Name: zinc finger, MYM-type 6
  ENST ID: ENST00000415531
  CDS Start-End: 182-807
tcgttagtcctcaatgatgggagtgggaattcttggtgggaaggagaatttcggaaagcgtgcggttctcagaggagggatgagcgcccgtagatattttgtggcgagtgtccaactatccattaccaagaagaaatctattcgtttgagcctgagacactctttgaggtaaaaaattagaatgaaagaacctttggatggtgaatgtggcaaagcagtggtaccacagcaggagcttctggacaaaattaaagaagaaccagacaatgctcaagagtatggatgtgtccaacagccaaaaactcaagaaagtaaattgaaaattggtggtgtgtcttcagttaatgagagacctattgcccagcagttgaacccaggctttcagctttcttttgcatcatctggcccaagtgtgttgcttccttcagttccagctgttgctattaaggttttttgttctggttgtaaaaaaatgctttataagggccaaactgcatatcataagacaggatctactcagctcttctgctccacacgatgcatcaccagacattcttcacctgcctgcctgccacctcctcccaagaaaacctgcacaaactgctcgaaagacattttaaatcctaaggatgtgatcacaactcgctttgagaattcctatcctagcaaagatttctgcagccaatcatgcttgtcatcttatgagctaaagaaaaaacctgttgttaccatatataccaaaagcatttcaactaagtgcagtatgtgtcagaagaatgctgatactcgatttgaagttaaatatca

SEQ ID NO: 204639 - DNA, 2896 bp, Homo sapiens
  Payload ID: 20367
  Gene Name: zinc finger, MYND-type containing 10
  Uniprot ID: O75800
  ENST ID: ENST00000231749
  CDS Start-End: 1274-2596
aaaaagatgtgatcaagagtgagttgggttggaggcagggactgctctggattaaatggccaagaaaggccatgctgaggtgtaaactgagccctgaaggaaaagtattccaggcaaagtgcaaaactctgaggcaaaaacctctttggaatgtatgagggaggttcagggaagcaaggaggagaggaaagaatccaagtcccgaggtacaggagaggacaagaagtagatcttgcagagctgctagtaagcggcatcccacctaacattttgagggccagaagtagccacagagcccctctcacgcaagggagtaatgtctatatgctttttttttttttttgagacggtctccctttgttgtccaggctggagtgcggtggtgcaatcttgcctcactgcaaactccacctcctgtgctcaagcgattctcctgcctcagtctcccatgtagctgggactacaggtgtgtgctaccacacctgtctaatttttgtacttttagtagagacagggtttcaccatgttgcccaggctggtctcaaactcctgacctcaagtgatccgcctgcctcggcctcccaaagtgctgagattacaggtgtcagccaccgcgcccggcctgatatacacttttaaggctccgggctgtccatgaggatcaagcgtggaagtaggtctacagaaaaggctgccgcagttcacccatgacaggtgatgacagtctggacatagggaggatggagagaagtcgtgcgccctggcagtatttcaggagccaactagtggagccgggacgcgagaaatagaggaaccaagaagccataaggaggaggaagagcagcgggtaggtcaagatgccacagccgcaggaggggctgttggggtcggggttacccccatccctgtgcaggcggacttggcgtctgaggacagagtccagaccacaaggatctggagctcaggagagactcgtgggccacagcccgagaaagcgctgggaatccaaatactatggcgattggcagtcgcgtaggcgaggcgggctagagacccgcccggatttaggcgcgagccacctccaggggcggggcccaggccgcactgcgcaggcgcggctaacccgtttccatggctgcgagaactgacgctccccaaccgtcccgcaactgtcctgtcccagactttggcaccgtcggggtccgtcgtccccgaatgtgacagcatccccaccccggctgctgcccaggatccgccggaccccggcctcgatatgggagacctggaactgctgctgcccggggaagctgaagtgctggtgcggggtctgcgcagcttcccgctacgcgagatgggctccgaagggtggaaccagcagcatgagaacctggagaagctgaacatgcaagccatcctcgatgccacagtcagccagggcgagcccattcaggagctgctggtcacccatgggaaggtcccaacactggtggaggagctgatcgcagtggagatgtggaagcagaaggtgttccctgtgttctgcagggtggaggacttcaagccccagaacaccttccccatctacatggtggtgcaccacgaggcctccatcatcaacctcttggagacagtgttcttccacaaggaggtgtgtgagtcagcagaagacactgtcttggacttggtagactattgccaccgcaaactgaccctgctggtggcccagagtggctgtggtggcccccctgagggggagggatcccaggacagcaaccccatgcaggagctgcagaagcaggcagagctgatggaatttgagattgcactgaaggccctctcagtactacgctacatcacagactgtgtggacagcctctctctcagcaccttgagccgtatgcttagcacacacaacctgccctgcctcctggtggaactgctggagcatagtccctggagccggcgggaaggaggcaagctgcagcagttcgagggcagccgttggcatactgtggccccctcagagcagcaaaagctgagcaagttggacgggcaagtgtggatcgccctgtacaacctgctgctaagccctgaggctcaggcgcgctactgcctcacaagttttgccaagggacggctactcaagcttcgggccttcctcacagacacactgctggaccagctgcccaacctggcccacttgcagagtttcctggcccatctgaccctaactgaaacccagcctcctaagaaggacctggtgttggaacagatcccagaaatctgggagcggctggagcgagaaaacagaggcaagtggcaggcaattgccaagcaccagctccagcatgtgttcagcccctcagagcaggacctgcggctgcaggcgcgaaggtgggctgagacctacaggctggatgtgctagaggcagtggctccagagcggccccgctgtgcttactgcagtgcagaggcttctaagcgctgctcacgatgccagaatgagtggtattgctgcagggagtgccaagtcaagcactgggaaaagcatggaaagacttgtgtcctggcagcccagggtgacagagccaaatgagggctgcagttgctgagggccgaccacccatgccaagggaatccacccagaatgcacccctgaacctcaagatcacggtccagcctctgccggagccccagtctccgcagtggagagcagagcgggcggtaaagctgctgaccgatctccctcctcctcaccccaagtgaaggctcgagacttcctgccccacccagtgggtaggccaagtgtgttgcttcagcaaaccggaccaggagggccagggccggatgtggggaccctcttcctctagcacagtaaagctggcctccagaaaca

SEQ ID NO: 204640 - DNA, 1757 bp, Homo sapiens
  Payload ID: 20367
  Gene Name: zinc finger, MYND-type containing 10
  Uniprot ID: O75800
  ENST ID: ENST00000360165
  CDS Start-End: 154-1461
aacccgtttccatggctgcgagaactgacgctccccaaccgtcccgcaactgtcctgtcccagactttggcaccgtcggggtccgtcgtccccgaatgtgacagcatccccaccccggctgctgcccaggatccgccggaccccggcctcgatatgggagacctggaactgctgctgcccggggaagctgaagtgctggtgcggggtctgcgcagcttcccgctacgcgagatgggctccgaagggtggaaccagcagcatgagaacctggagaagctgaacatgcaagccatcctcgatgccacagtcagccagggcgagcccattcaggagctgctggtcacccatgggaaggtcccaacactggtggaggagctgatcgcagtggagatgtggaagcagaaggtgttccctgtgttctgcagggtggaggacttcaagccccagaacaccttccccatctacatggtggtgcaccacgaggcctccatcatcaacctcttggagacagtgttcttccacaaggaggtgtgtgagtcagcagaagacactgtcttggacttggtagactattgccaccgcaaactgaccctgctggtggcccagagtggctgtggtggcccccctgagggggagggatcccaggacagcaaccccatgcaggagctgcagaagcaggcagagctgatggaatttgagattgcactgaaggccctctcagtactacgctacatcacagactgtgtggacaggcagtggtcagtctcccagcccccacagctggctcacttgaagagaattcaacgtctgcacccagtgtgctggttcctctccccaggcaagctgcagcagttcgagggcagccgttggcatactgtggccccctcagagcagcaaaagctgagcaagttggacgggcaagtgtggatcgccctgtacaacctgctgctaagccctgaggctcaggcgcgctactgcctcacaagttttgccaagggacggctactcaagcttcgggccttcctcacagacacactgctggaccagctgcccaacctggcccacttgcagagtttcctggcccatctgaccctaactgaaacccagcctcctaagaaggacctggtgttggaacagatcccagaaatctgggagcggctggagcgagaaaacagaggcaagtggcaggcaattgccaagcaccagctccagcatgtgttcagcccctcagagcaggacctgcggctgcaggcgcgaaggtgggctgagacctacaggctggatgtgctagaggcagtggctccagagcggccccgctgtgcttactgcagtgcagaggcttctaagcgctgctcacgatgccagaatgagtggtattgctgcagggagtgccaagtcaagcactgggaaaagcatggaaagacttgtgtcctggcagcccagggtgacagagccaaatgagggctgcagttgctgagggccgaccacccatgccaagggaatccacccagaatgcacccctgaacctcaagatcacggtccagcctctgccggagccccagtctccgcagtggagagcagagcgggcggtaaagctgctgaccgatctccctcctcctcaccccaagtgaaggctcgagacttcctgccccacccagtgggtaggccaagtgtgttgcttcagcaaaccggaccaggagggccagggccggatgtggggaccctcttcctctagcacagtaaagctggcctccaga

SEQ ID NO: 204641 - DNA, 562 bp, Homo sapiens
  Payload ID: 20367
  Gene Name: zinc finger, MYND-type containing 10
  ENST ID: ENST00000431869
  CDS Start-End: 143-256
atggctgcgagaactgacgctccccaaccgtcccgcaactgtcctgtcccagactttggcaccgtcggggtccgtcgtccccgaatgtgacagcatccccaccccggctgctgcccaggatccgccggaccccggcctcgatatgggagacctggaactgctgctgcccggggaagctgaagtgctggtgcggggtctgcgcagcttcccgctacgcgagatgggctccgaagggcaggtggaaccagcagcatgagaacctggagaagctgaacatgcaagccatcctcgatgccacagtcagccagggcgagcccattcaggagctgctggtcacccatgggaaggtcccaacactggtggaggagctgatcgcagtggagatgtggaagcagaaggtgttccctgtgttctgcagggtggaggacttcaagccccagaacaccttccccatctacatggtggtgcaccacgaggcctccatcatcaacctcttggagacagtgttcttccacaaggaggtgtgtgagtcagcagaagacactgtcttggacttggtaga

SEQ ID NO: 204642 - DNA, 1072 bp, Homo sapiens
  Payload ID: 20367
  Gene Name: zinc finger, MYND-type containing 10
  ENST ID: ENST00000442887
  CDS Start-End: 225-1072
atggctgcgagaactgacgctccccaaccgtcccgcaactgtcctgtcccagactttggcaccgtcggggtccgtcgtccccgaatgtgacagcatccccaccccggctgctgcccaggatccgccggaccccggcctcgatatgggagacctggaactgctgctgcccggggaagctgaagtgctggtggaaccagcagcatgagaacctggagaagctgaacatgcaagccatcctcgatgccacagtcagccagggcgagcccattcaggagctgctggtcacccatgggaaggtcccaacactggtggaggagctgatcgcagtggagatgtggaagcagaaggtgttccctgtgttctgcagggtggaggacttcaagccccagaacaccttccccatctacatggtggtgcaccacgaggcctccatcatcaacctcttggagacagtgttcttccacaaggaggtgtgtgagtcagcagaagacactgtcttggacttggtagactattgccaccgcaaactgaccctgctggtggcccagagtggctgtggtggcccccctgagggggagggatcccaggacagcaaccccatgcaggagctgcagaagcaggcagagctgatggaatttgagattgcactgaaggccctctcagtactacgctacatcacagactgtgtggacagcctctctctcagcaccttgagccgtatgcttagcacacacaacctgccctgcctcctggtggaactgctggagcatagtccctggagccggcgggaaggaggcaagctgcagcagttcgagggcagccgttggcatactgtggccccctcagagcagcaaaagctgagcaagttggacgggcaagtgtggatcgccctgtacaacctgctgctaagccctgaggctcaggcgcgctactgcctcacaagttttgccaagggacggctactcaagcttcgggccttcctcacagacacactgctggaccagctgcccaacctggcccacttgcagagtttcctggcccatctgaccctaactgaaacccagcctcctaa

SEQ ID NO: 204643 - DNA, 707 bp, Homo sapiens
  Payload ID: 20367
  Gene Name: zinc finger, MYND-type containing 10
  ENST ID: ENST00000443080
  CDS Start-End: 94-207
cagactttggcaccgtcggggtccgtcgtccccgaatgtgacagcatccccaccccggctgctgcccaggatccgccggaccccggcctcgatatgggagacctggaactgctgctgcccggggaagctgaagtgctggtgcggggtctgcgcagcttcccgctacgcgagatgggctccgaagggcaggtggaaccagcagcatgagaacctggagaagctgaacatgcaagccatcctcgatgccacagtcagccagggcgagcccattcaggagctgctggtcacccatgggaaggtcccaacactggtggaggagctgatcgcagtggagatgtggaagcagaaggtgttccctgtgttctgcagggtggaggacttcaagccccagaacaccttccccatctacatggtggtgcaccacgaggcctccatcatcaacctcttggagacagtgttcttccacaaggagctgcagaagcaggcagagctgatggaatttgagattgcactgaaggccctctcagtactacgctacatcacagactgtgtggacagcctctctctcagcaccttgagccgtatgcttagcacacacaacctgccctgcctcctggtggaactgctggagcatagtccctggagccggcgggaaggaggcaagctgcagcagttcgagggcagccgttggcatactgtggccccct

SEQ ID NO: 204644 - DNA, 4228 bp, Homo sapiens
  Payload ID: 20368
  Gene Name: zinc finger, MYND-type containing 11
  ENST ID: ENST00000309776
  CDS Start-End: 429-2072
agtgttcttgcagggctgctgatgggtggtcctgttcttttcgcggtcctgtttgcgcagagatgaaacggggaacttagcgtatccctaccgctctttttgatgacaggagtaaagggctgttcagactacctaaacaatgttgttaagagaagcactcgtacttctcagacttcgctgttccggaccccgcgagccaggggcaggcaccgggtccacccggggctgagctgcggcggcgcctgacaatgccccctcgcgccccggcctcggcgcccgctcccggctccagcgcgcctgcacgtacgtagccttcacgtgtgtgtggatacggagtgcatgtgtggagacagaggaatatgctccaacaaatttcggatagaggcgccgaagacaggacgtggggaagctaaagaagtaaacaggtcatggcacgtttaacaaaaagacgacaggcggatacaaaagctatccagcatctttgggcagccattgagattatacggaaccagaagcagattgccaacattgaccgtattacaaagtatatgtctcgagtccacggtatgcaccctaaagagaccacccgtcagctgagcttagctgtgaaagatggtcttattgtcgaaactctaacagtgggctgcaaaggttcaaaagctggtattgaacaagaaggatattggttgccaggagatgagattagcattaagaagaagaatacaaacaaacaggagatgggcacatacctcagattcattgtctcccgcatgaaggagagggctatagatcttaataaaaaggggaaggacaataaacacccgatgtacaggaggctggtgcactcagctgtggacgttcccaccattcaagagaaagtgaatgaagggaaataccgaagttatgaagagttcaaagctgatgcccaattgcttctccacaataccgtgattttctatggagacagtgagcaagctgacattgcgaggatgctatataaagacacatgtcatgagctggatgaactgcagctttgcaagaattgcttttacttgtcaaatgctcgtcctgacaactggttctgttatccttgtatacctaatcatgagctggtttgggctaaaatgaaaggttttgggttttggccagccaaagtcatgcagaaagaagacaatcaagtcgacgttcgcttctttggccaccaccaccagagggcctggattccttctgaaaacattcaagatatcacagtcaacattcatcggctgcacgtgaagcgcagtatgggttggaaaaaggcctgtgatgagctggagctgcatcagcgtttcctacgagaagggagattttggaaatctaagaatgaggaccgaggtgaggaagaggcagaatccagtatctcctccaccagtaatgagcagctaaaggtcactcaagaaccaagagcaaagaaaggacgacgtaatcaaagtgtggagcccaaaaaggaagaaccagagcctgaaacagaagcagtaagttctagccaggaaatacccacgatgcctcagcccatcgaaaaagtctccgtgtcaactcagacaaagaagttaagtgcctcttcaccaagaatgctgcatcggagcacccagaccacaaacgacggcgtgtgtcagagcatgtgccatgacaaatacaccaagatcttcaatgacttcaaagaccggatgaagtcggaccacaagcgggagacagagcgtgttgtccgagaagctctggagaagctgcgttctgaaatggaagaagaaaagagacaagctgtaaataaagctgtagccaacatgcagggtgagatggacagaaaatgtaagcaagtaaaggaaaagtgtaaggaagaatttgtagaagaaatcaagaagctggcaacacagcacaagcaactgatttctcagaccaagaagaagcagtggtgctacaactgtgaggaggaggccatgtaccactgctgctggaacacatcctactgctccatcaagtgccagcaggagcactggcacgcggagcacaagcgcacctgccgccggaaaagatgaagctggcccttcccggagtcaccccgatgattactcttttcagacacagcggtttttgtttccaagaagccaaaattgtttagaatttgcttcccattttgcaccagcctttaaacacttttcgtgaagaaattttgcacagtagtttaaatcttttgttaatgctcctccgaagtttttcagggggtaaaagtaacatcagtggagggtattattttaaataaattttaattgagaatttgttgcattttcagcaaattttaaaacatttttaggttttacagagattttaacctttaaacaacagatctttaaaaaacaggtgaatacaagtgagtttaacaaagaaacatttagaatagatctgaatgtaagaactacagaactgtttcagaaataaaacatactaccttgatgtgacatttttttcttaaccttgttgagctggttttgttcagcttaatttactgttcaaaggcattatctgttggtcacaccagtgggtatatgattgaatttagggaacagggttgacacagcagggctagtcctgcatattttttcttaaatatttcccaattgtgtttttcattatttcttttcaatatataacttttataacaaattattagctttgatcttgtagtttaaaattgcagggaactggggtaatcttttactgagctggatcttagagaaaatgaatatttaaattttaaagtttgcacatttcatctttgtcctaacatgagtgcttgtaacaaaataaacaacaaaaacaaagccaaaaactacctttatccatatgtgaaattatagatgaggcatacgaatttgtttaatgcttcccttcccttcccacatatcatctcactgcctattatctggtgtcacctcatgtatcgtaagttaatactaaaagaagagaaagcacttaagtttcacagaagccgttatgtttgtagtaatgggtcattgcctactaatgaactccatcactgtacacagaatgaagaataatgcatgttaattttcttgtattaaagatgccgtgatttgtaaaaagtctgtattttgcggaatgtctggattaagaagcattaccaataggaatggatcgatagttgaataatgattttttatacatagatatataaaatacagccaggaaaacttaaattacttttcttttaaaatatctcacaatttatgtggtatttttaaagactgatcttagaccaagtcaaattcccatttatcatttagttattttttgaggttagagaataatttgtacatatttatttagacctttgatatttattaaagcaattactcacaatggaagtgaaagaatcaggagaaaagccttttaaaaagtattctccaggtttgtcagggtcactctaaagataaaaatgtaactaagtcttctgtgaaatatcatccatctaatcttgatgctgttgcagatggtggtgacacaagttaattgacaaactactgccaaatggtgcacaatattttgtaaaaagtacccagtagccccatttcatacaatgtacctaaattatgcagtaacttggcatcatcgttccctccttgttgctgtgtaattagtcagtgttgccacagtgtgtggcgctgatggagatgtcagaaccgagaacacttaaccttctttgattgtttttcaagttttaagacttcgatccacccctatgagagcaagtaattgtggaaatatttttggtgtaaaatcattccagagtatgtaatatttaactgatagctgcatgaaagtgagattcgtgttactttggcttttctgtctctgttgacacggttgcacatttccaagttactacagcgtgaaaactgtgtgtttaaaaaaaaacaaaattaaaaaaagagattgtggcctggttttgtaaaagttttaggtaaaattacaattgattgttttaggaatcattattaaaaattttctgcaaatcataaagctatatcgaggtgttgagcttagccactatgcacattgtaattattcattgtggctgtccagttctatgatgcattctggcattttgtaagctgctctgactagcaatatatagattcatttaatgtgttaacattggttaataaatgtattt

SEQ ID NO: 204645 - DNA, 2709 bp, Homo sapiens
  Payload ID: 20368
  Gene Name: zinc finger, MYND-type containing 11
  ENST ID: ENST00000381584
  CDS Start-End: 166-1923
ctaaagaagtaaacaggtcatggcacgtttaacaaaaagacgacaggcggatacaaaagctatccagcatctttgggcagccattgagattatacggaaccagaagcagattgccaacattgaccgtattacaaaatgtgaaacaactacattattcttgaacctatggtgatttttacatcattacacagatatgtcattttcattagttgtatcattgttataaactggtatatgtctcgagtccacggtatgcaccctaaagagaccacccgtcagctgagcttagctgtgaaagatggtcttattgtcgaaactctaacagtgggctgcaaaggttcaaaagctggtattgaacaagaaggatattggttgccaggagatgagattgactgggaaacagaaaatcatgactggtattgttttgaatgccatttgcctggagaggtgttgatatgtgacctgtgttttcgtgtgtatcattccaagtgtttgtctgatgagttcaggcttagagacagcagtagtccctggcagtgcccagtttgcaggagcattaagaagaagaatacaaacaaacaggagatgggcacatacctcagattcattgtctcccgcatgaaggagagggctatagatcttaataaaaaggggaaggacaataaacacccgatgtacaggaggctggtgcactcagctgtggacgttcccaccattcaagagaaagtgaatgaagggaaataccgaagttatgaagagttcaaagctgatgcccaattgcttctccacaataccgtgattttctatggagcagacagtgagcaagctgacattgcgaggatgctatataaagacacatgtcatgagctggatgaactgcagctttgcaagaattgcttttacttgtcaaatgctcgtcctgacaactggttctgttatccttgtatacctaatcatgagctggtttgggctaaaatgaaaggttttgggttttggccagccaaagtcatgcagaaagaagacaatcaagtcgacgttcgcttctttggccaccaccaccagagggcctggattccttctgaaaacattcaagatatcacagtcaacattcatcggctgcacgtgaagcgcagtatgggttggaaaaaggcctgtgatgagctggagctgcatcagcgtttcctacgagaagggagattttggaaatctaagaatgaggaccgaggtgaggaagaggcagaatccagtatctcctccaccagtaatgagcagctaaaggtcactcaagaaccaagagcaaagaaaggacgacgtaatcaaagtgtggagcccaaaaaggaagaaccagagcctgaaacagaagcagtaagttctagccaggaaatacccacgatgcctcagcccatcgaaaaagtctccgtgtcaactcagacaaagaagttaagtgcctcttcaccaagaatgctgcatcggagcacccagaccacaaacgacggcgtgtgtcagagcatgtgccatgacaaatacaccaagatcttcaatgacttcaaagaccggatgaagtcggaccacaagcgggagacagagcgtgttgtccgagaagctctggagaagctgcgttctgaaatggaagaagaaaagagacaagctgtaaataaagctgtagccaacatgcagggtgagatggacagaaaatgtaagcaagtaaaggaaaagtgtaaggaagaatttgtagaagaaatcaagaagctggcaacacagcacaagcaactgatttctcagaccaagaagaagcagtggtgctacaactgtgaggaggaggccatgtaccactgctgctggaacacatcctactgctccatcaagtgccagcaggagcactggcacgcggagcacaagcgcacctgccgccggaaaagatgaagctggcccttcccggagtcaccccgatgattactcttttcagacacagcggtttttgtttccaagaagccaaaattgtttagaatttgcttcccattttgcaccagcctttaaacacttttcgtgaagaaattttgcacagtagtttaaatcttttgttaatgctcctccgaagtttttcagggggtaaaagtaacatcagtggagggtattattttaaataaattttaattgagaatttgttgcattttcagcaaattttaaaacatttttaggttttacagagattttaacctttaaacaacagatctttaaaaaacaggtgaatacaagtgagtttaacaaagaaacatttagaatagatctgaatgtaagaactacagaactgtttcagaaataaaacatactaccttgatgtgacatttttttcttaaccttgttgagctggttttgttcagcttaatttactgttcaaaggcattatctgttggtcacaccagtgggtatatgattgaatttagggaacagggttgacacagcagggctagtcctgcatattttttcttaaatatttcccaattgtgtttttcattatttcttttcaatatataacttttataacaaattattagctttgatcttgtagtttaaaattgcagggaactggggtaatcttttactgagctggatcttagagaaaatgaatatttaaattttaaagtttgcacatttcatctttgtcctaacatgagtgcttgtaacaaaataaacaacaaaaacaaagcc

SEQ ID NO: 204646 - DNA, 4229 bp, Homo sapiens
  Payload ID: 20368
  Gene Name: zinc finger, MYND-type containing 11
  Uniprot ID: Q15326
  ENST ID: ENST00000381591
  CDS Start-End: 254-2062
gcggccgccccgcgcgcatcgccatgtgagcggctgccgcggcttcgcggggacccaactttcccgggcggcggcgcccaacttcccgccgcccgctccggccccgcaggcccgcggcgccaggggaagacgcgagtaagtgcgggcggcggtgccctcccggccctcaccccgcacgcggcgacccggccgcctagcctccctcgctcaggcgcgaccgcggcgttctctgagctaaagaagtaaacaggtcatggcacgtttaacaaaaagacgacaggcggatacaaaagctatccagcatctttgggcagccattgagattatacggaaccagaagcagattgccaacattgaccgtattacaaagtatatgtctcgagtccacggtatgcaccctaaagagaccacccgtcagctgagcttagctgtgaaagatggtcttattgtcgaaactctaacagtgggctgcaaaggttcaaaagctggtattgaacaagaaggatattggttgccaggagatgagattgactgggaaacagaaaatcatgactggtattgttttgaatgccatttgcctggagaggtgttgatatgtgacctgtgttttcgtgtgtatcattccaagtgtttgtctgatgagttcaggcttagagacagcagtagtccctggcagtgcccagtttgcaggagcattaagaagaagaatacaaacaaacaggagatgggcacatacctcagattcattgtctcccgcatgaaggagagggctatagatcttaataaaaaggggaaggacaataaacacccgatgtacaggaggctggtgcactcagctgtggacgttcccaccattcaagagaaagtgaatgaagggaaataccgaagttatgaagagttcaaagctgatgcccaattgcttctccacaataccgtgattttctatggagcagacagtgagcaagctgacattgcgaggatgctatataaagacacatgtcatgagctggatgaactgcagctttgcaagaattgcttttacttgtcaaatgctcgtcctgacaactggttctgttatccttgtatacctaatcatgagctggtttgggctaaaatgaaaggttttgggttttggccagccaaagtcatgcagaaagaagacaatcaagtcgacgttcgcttctttggccaccaccaccagagggcctggattccttctgaaaacattcaagatatcacagtcaacattcatcggctgcacgtgaagcgcagtatgggttggaaaaaggcctgtgatgagctggagctgcatcagcgtttcctacgagaagggagattttggaaatctaagaatgaggaccgaggtgaggaagaggcagaatccagtatctcctccaccagtaatgagcagctaaaggtcactcaagaaccaagagcaaagaaaggacgacgtaatcaaagtgtggagcccaaaaaggaagaaccagagcctgaaacagaagcagtaagttctagccaggaaatacccacgatgcctcagcccatcgaaaaagtctccgtgtcaactcagacaaagaagttaagtgcctcttcaccaagaatgctgcatcggagcacccagaccacaaacgacggcgtgtgtcagagcatgtgccatgacaaatacaccaagatcttcaatgacttcaaagaccggatgaagtcggaccacaagcgggagacagagcgtgttgtccgagaagctctggagaagctgcgttctgaaatggaagaagaaaagagacaagctgtaaataaagctgtagccaacatgcagggtgagatggacagaaaatgtaagcaagtaaaggaaaagtgtaaggaagaatttgtagaagaaatcaagaagctggcaacacagcacaagcaactgatttctcagaccaagaagaagcagtggtgctacaactgtgaggaggaggccatgtaccactgctgctggaacacatcctactgctccatcaagtgccagcaggagcactggcacgcggagcacaagcgcacctgccgccggaaaagatgaagctggcccttcccggagtcaccccgatgattactcttttcagacacagcggtttttgtttccaagaagccaaaattgtttagaatttgcttcccattttgcaccagcctttaaacacttttcgtgaagaaattttgcacagtagtttaaatcttttgttaatgctcctccgaagtttttcagggggtaaaagtaacatcagtggagggtattattttaaataaattttaattgagaatttgttgcattttcagcaaattttaaaacatttttaggttttacagagattttaacctttaaacaacagatctttaaaaaacaggtgaatacaagtgagtttaacaaagaaacatttagaatagatctgaatgtaagaactacagaactgtttcagaaataaaacatactaccttgatgtgacatttttttcttaaccttgttgagctggttttgttcagcttaatttactgttcaaaggcattatctgttggtcacaccagtgggtatatgattgaatttagggaacagggttgacacagcagggctagtcctgcatattttttcttaaatatttcccaattgtgtttttcattatttcttttcaatatataacttttataacaaattattagctttgatcttgtagtttaaaattgcagggaactggggtaatcttttactgagctggatcttagagaaaatgaatatttaaattttaaagtttgcacatttcatctttgtcctaacatgagtgcttgtaacaaaataaacaacaaaaacaaagccaaaaactacctttatccatatgtgaaattatagatgaggcatacgaatttgtttaatgcttcccttcccttcccacatatcatctcactgcctattatctggtgtcacctcatgtatcgtaagttaatactaaaagaagagaaagcacttaagtttcacagaagccgttatgtttgtagtaatgggtcattgcctactaatgaactccatcactgtacacagaatgaagaataatgcatgttaattttcttgtattaaagatgccgtgatttgtaaaaagtctgtattttgcggaatgtctggattaagaagcattaccaataggaatggatcgatagttgaataatgattttttatacatagatatataaaatacagccaggaaaacttaaattacttttcttttaaaatatctcacaatttatgtggtatttttaaagactgatcttagaccaagtcaaattcccatttatcatttagttattttttgaggttagagaataatttgtacatatttatttagacctttgatatttattaaagcaattactcacaatggaagtgaaagaatcaggagaaaagccttttaaaaagtattctccaggtttgtcagggtcactctaaagataaaaatgtaactaagtcttctgtgaaatatcatccatctaatcttgatgctgttgcagatggtggtgacacaagttaattgacaaactactgccaaatggtgcacaatattttgtaaaaagtacccagtagccccatttcatacaatgtacctaaattatgcagtaacttggcatcatcgttccctccttgttgctgtgtaattagtcagtgttgccacagtgtgtggcgctgatggagatgtcagaaccgagaacacttaaccttctttgattgtttttcaagttttaagacttcgatccacccctatgagagcaagtaattgtggaaatatttttggtgtaaaatcattccagagtatgtaatatttaactgatagctgcatgaaagtgagattcgtgttactttggcttttctgtctctgttgacacggttgcacatttccaagttactacagcgtgaaaactgtgtgtttaaaaaaaaacaaaattaaaaaaagagattgtggcctggttttgtaaaagttttaggtaaaattacaattgattgttttaggaatcattattaaaaattttctgcaaatcataaagctatatcgaggtgttgagcttagccactatgcacattgtaattattcattgtggctgtccagttctatgatgcattctggcattttgtaagctgctctgactagcaatatatagattcatttaatgtgttaacattggttaataaatgtatttaaaaaaaacta

SEQ ID NO: 204647 - DNA, 4066 bp, Homo sapiens
  Payload ID: 20368
  Gene Name: zinc finger, MYND-type containing 11
  ENST ID: ENST00000381604
  CDS Start-End: 462-1910
acttctcgcgcaaatctgcagtgttcttgcagggctgctgatgggtggtcctgttcttttcgcggtcctgtttgcgcagagatgaaacggggaacttagcgtatccctaccgctctttttgatgacaggagtaaagggctgttcagactacctaaacaatgttgttaagagaagcactcgtacttctcagacttcgctgttccggaccccgcgagccaggggcaggcaccgggtccacccggggctgagctgcggcggcgcctgacaatgccccctcgcgccccggcctcggcgcccgctcccggctccagcgcgcctgcacctaaagaagtaaacaggtcatggcacgtttaacaaaaagacgacaggcggatacaaaagctatccagcatctttgggcagccattgagattatacggaaccagaagcagattgccaacattgaccgtattacaaagtatatgtctcgagtccacggtatgcaccctaaagagaccacccgtcagctgagcttagctgtgaaagatggtcttattgtcgaaactctaacagtgggctgcaaaggttcaaaagctggtattgaacaagaaggatattggttgccaggagatgagattagcattaagaagaagaatacaaacaaacaggagatgggcacatacctcagattcattgtctcccgcatgaaggagagggctatagatcttaataaaaaggggaaggacaataaacacccgatgtacaggaggctggtgcactcagctgtggacgttcccaccattcaagagaaagtgaatgaagggaaataccgaagttatgaagagttcaaagctgatgcccaattgcttctccacaataccgtgattttctatggagcagacagtgagcaagctgacattgcgaggatgctatataaagacacatgtcatgagatacctaatcatgagctggtttgggctaaaatgaaaggttttgggttttggccagccaaagtcatgcagaaagaagacaatcaagtcgacgttcgcttctttggccaccaccaccagagggcctggattccttctgaaaacattcaagatatcacagtcaacattcatcggctgcacgtgaagcgcagtatgggttggaaaaaggcctgtgatgagctggagctgcatcagcgtttcctacgagaagggagattttggaaatctaagaatgaggaccgaggtgaggaagaggcagaatccagtatctcctccaccagtaatgagcagctaaaggtcactcaagaaccaagagcaaagaaaggacgacgtaatcaaagtgtggagcccaaaaaggaagaaccagagcctgaaacagaagcagtaagttctagccaggaaatacccacgatgcctcagcccatcgaaaaagtctccgtgtcaactcagacaaagaagttaagtgcctcttcaccaagaatgctgcatcggagcacccagaccacaaacgacggcgtgtgtcagagcatgtgccatgacaaatacaccaagatcttcaatgacttcaaagaccggatgaagtcggaccacaagcgggagacagagcgtgttgtccgagaagctctggagaagctgcgttctgaaatggaagaagaaaagagacaagctgtaaataaagctgtagccaacatgcagggtgagatggacagaaaatgtaagcaagtaaaggaaaagtgtaaggaagaatttgtagaagaaatcaagaagctggcaacacagcacaagcaactgatttctcagaccaagaagaagcagtggtgctacaactgtgaggaggaggccatgtaccactgctgctggaacacatcctactgctccatcaagtgccagcaggagcactggcacgcggagcacaagcgcacctgccgccggaaaagatgaagctggcccttcccggagtcaccccgatgattactcttttcagacacagcggtttttgtttccaagaagccaaaattgtttagaatttgcttcccattttgcaccagcctttaaacacttttcgtgaagaaattttgcacagtagtttaaatcttttgttaatgctcctccgaagtttttcagggggtaaaagtaacatcagtggagggtattattttaaataaattttaattgagaatttgttgcattttcagcaaattttaaaacatttttaggttttacagagattttaacctttaaacaacagatctttaaaaaacaggtgaatacaagtgagtttaacaaagaaacatttagaatagatctgaatgtaagaactacagaactgtttcagaaataaaacatactaccttgatgtgacatttttttcttaaccttgttgagctggttttgttcagcttaatttactgttcaaaggcattatctgttggtcacaccagtgggtatatgattgaatttagggaacagggttgacacagcagggctagtcctgcatattttttcttaaatatttcccaattgtgtttttcattatttcttttcaatatataacttttataacaaattattagctttgatcttgtagtttaaaattgcagggaactggggtaatcttttactgagctggatcttagagaaaatgaatatttaaattttaaagtttgcacatttcatctttgtcctaacatgagtgcttgtaacaaaataaacaacaaaaacaaagccaaaaactacctttatccatatgtgaaattatagatgaggcatacgaatttgtttaatgcttcccttcccttcccacatatcatctcactgcctattatctggtgtcacctcatgtatcgtaagttaatactaaaagaagagaaagcacttaagtttcacagaagccgttatgtttgtagtaatgggtcattgcctactaatgaactccatcactgtacacagaatgaagaataatgcatgttaattttcttgtattaaagatgccgtgatttgtaaaaagtctgtattttgcggaatgtctggattaagaagcattaccaataggaatggatcgatagttgaataatgattttttatacatagatatataaaatacagccaggaaaacttaaattacttttcttttaaaatatctcacaatttatgtggtatttttaaagactgatcttagaccaagtcaaattcccatttatcatttagttattttttgaggttagagaataatttgtacatatttatttagacctttgatatttattaaagcaattactcacaatggaagtgaaagaatcaggagaaaagccttttaaaaagtattctccaggtttgtcagggtcactctaaagataaaaatgtaactaagtcttctgtgaaatatcatccatctaatcttgatgctgttgcagatggtggtgacacaagttaattgacaaactactgccaaatggtgcacaatattttgtaaaaagtacccagtagccccatttcatacaatgtacctaaattatgcagtaacttggcatcatcgttccctccttgttgctgtgtaattagtcagtgttgccacagtgtgtggcgctgatggagatgtcagaaccgagaacacttaaccttctttgattgtttttcaagttttaagacttcgatccacccctatgagagcaagtaattgtggaaatatttttggtgtaaaatcattccagagtatgtaatatttaactgatagctgcatgaaagtgagattcgtgttactttggcttttctgtctctgttgacacggttgcacatttccaagttactacagcgtgaaaactgtgtgtttaaaaaaaaacaaaattaaaaaaagagattgtggcctggttttgtaaaagttttaggtaaaattacaattgattgttttaggaatcattattaaaaattttctgcaaatcataaagctatatcgaggtgttgagcttagccactatgcacattgtaattattcattgtggctgtccagttctatgatgcattctggcattttgtaagctgctctgactagcaatatatagattcatttaatgtgttaacattggttaataaatgtattt

SEQ ID NO: 204648 - DNA, 3898 bp, Homo sapiens
  Payload ID: 20368
  Gene Name: zinc finger, MYND-type containing 11
  Uniprot ID: Q15326
  ENST ID: ENST00000381607
  CDS Start-End: 96-1742
gcggcgggaaggaggcggcaccggaggggagggccgggcgcggcggcggcggcggtggaggagccggagcataatgctaaagaagtaaacaggtcatggcacgtttaacaaaaagacgacaggcggatacaaaagctatccagcatctttgggcagccattgagattatacggaaccagaagcagattgccaacattgaccgtattacaaagtatatgtctcgagtccacggtatgcaccctaaagagaccacccgtcagctgagcttagctgtgaaagatggtcttattgtcgaaactctaacagtgggctgcaaaggttcaaaagctggtattgaacaagaaggatattggttgccaggagatgagattagcattaagaagaagaatacaaacaaacaggagatgggcacatacctcagattcattgtctcccgcatgaaggagagggctatagatcttaataaaaaggggaaggacaataaacacccgatgtacaggaggctggtgcactcagctgtggacgttcccaccattcaagagaaagtgaatgaagggaaataccgaagttatgaagagttcaaagctgatgcccaattgcttctccacaataccgtgattttctatggagcagacagtgagcaagctgacattgcgaggatgctatataaagacacatgtcatgagctggatgaactgcagctttgcaagaattgcttttacttgtcaaatgctcgtcctgacaactggttctgttatccttgtatacctaatcatgagctggtttgggctaaaatgaaaggttttgggttttggccagccaaagtcatgcagaaagaagacaatcaagtcgacgttcgcttctttggccaccaccaccagagggcctggattccttctgaaaacattcaagatatcacagtcaacattcatcggctgcacgtgaagcgcagtatgggttggaaaaaggcctgtgatgagctggagctgcatcagcgtttcctacgagaagggagattttggaaatctaagaatgaggaccgaggtgaggaagaggcagaatccagtatctcctccaccagtaatgagcagctaaaggtcactcaagaaccaagagcaaagaaaggacgacgtaatcaaagtgtggagcccaaaaaggaagaaccagagcctgaaacagaagcagtaagttctagccaggaaatacccacgatgcctcagcccatcgaaaaagtctccgtgtcaactcagacaaagaagttaagtgcctcttcaccaagaatgctgcatcggagcacccagaccacaaacgacggcgtgtgtcagagcatgtgccatgacaaatacaccaagatcttcaatgacttcaaagaccggatgaagtcggaccacaagcgggagacagagcgtgttgtccgagaagctctggagaagctgcgttctgaaatggaagaagaaaagagacaagctgtaaataaagctgtagccaacatgcagggtgagatggacagaaaatgtaagcaagtaaaggaaaagtgtaaggaagaatttgtagaagaaatcaagaagctggcaacacagcacaagcaactgatttctcagaccaagaagaagcagtggtgctacaactgtgaggaggaggccatgtaccactgctgctggaacacatcctactgctccatcaagtgccagcaggagcactggcacgcggagcacaagcgcacctgccgccggaaaagatgaagctggcccttcccggagtcaccccgatgattactcttttcagacacagcggtttttgtttccaagaagccaaaattgtttagaatttgcttcccattttgcaccagcctttaaacacttttcgtgaagaaattttgcacagtagtttaaatcttttgttaatgctcctccgaagtttttcagggggtaaaagtaacatcagtggagggtattattttaaataaattttaattgagaatttgttgcattttcagcaaattttaaaacatttttaggttttacagagattttaacctttaaacaacagatctttaaaaaacaggtgaatacaagtgagtttaacaaagaaacatttagaatagatctgaatgtaagaactacagaactgtttcagaaataaaacatactaccttgatgtgacatttttttcttaaccttgttgagctggttttgttcagcttaatttactgttcaaaggcattatctgttggtcacaccagtgggtatatgattgaatttagggaacagggttgacacagcagggctagtcctgcatattttttcttaaatatttcccaattgtgtttttcattatttcttttcaatatataacttttataacaaattattagctttgatcttgtagtttaaaattgcagggaactggggtaatcttttactgagctggatcttagagaaaatgaatatttaaattttaaagtttgcacatttcatctttgtcctaacatgagtgcttgtaacaaaataaacaacaaaaacaaagccaaaaactacctttatccatatgtgaaattatagatgaggcatacgaatttgtttaatgcttcccttcccttcccacatatcatctcactgcctattatctggtgtcacctcatgtatcgtaagttaatactaaaagaagagaaagcacttaagtttcacagaagccgttatgtttgtagtaatgggtcattgcctactaatgaactccatcactgtacacagaatgaagaataatgcatgttaattttcttgtattaaagatgccgtgatttgtaaaaagtctgtattttgcggaatgtctggattaagaagcattaccaataggaatggatcgatagttgaataatgattttttatacatagatatataaaatacagccaggaaaacttaaattacttttcttttaaaatatctcacaatttatgtggtatttttaaagactgatcttagaccaagtcaaattcccatttatcatttagttattttttgaggttagagaataatttgtacatatttatttagacctttgatatttattaaagcaattactcacaatggaagtgaaagaatcaggagaaaagccttttaaaaagtattctccaggtttgtcagggtcactctaaagataaaaatgtaactaagtcttctgtgaaatatcatccatctaatcttgatgctgttgcagatggtggtgacacaagttaattgacaaactactgccaaatggtgcacaatattttgtaaaaagtacccagtagccccatttcatacaatgtacctaaattatgcagtaacttggcatcatcgttccctccttgttgctgtgtaattagtcagtgttgccacagtgtgtggcgctgatggagatgtcagaaccgagaacacttaaccttctttgattgtttttcaagttttaagacttcgatccacccctatgagagcaagtaattgtggaaatatttttggtgtaaaatcattccagagtatgtaatatttaactgatagctgcatgaaagtgagattcgtgttactttggcttttctgtctctgttgacacggttgcacatttccaagttactacagcgtgaaaactgtgtgtttaaaaaaaaacaaaattaaaaaaagagattgtggcctggttttgtaaaagttttaggtaaaattacaattgattgttttaggaatcattattaaaaattttctgcaaatcataaagctatatcgaggtgttgagcttagccactatgcacattgtaattattcattgtggctgtccagttctatgatgcattctggcattttgtaagctgctctgactagcaatatatagattcatttaatgtgttaacattggttaataaatgtattt

SEQ ID NO: 204649 - DNA, 659 bp, Homo sapiens
  Payload ID: 20368
  Gene Name: zinc finger, MYND-type containing 11
  ENST ID: ENST00000397955
  CDS Start-End: 20-659
ctaaagaagtaaacaggtcatggcacgtttaacaaaaagacgacaggcggatacaaaagctatccagcatctttgggcagccattgagattatacggaaccagaagcagattgccaacattgaccgtattacaaagtatatgtctcgagtccacggtatgcaccctaaagagaccacccgtcagctgagcttagctgtgaaagatggtcttattgtcgaaactctaacagtgggctgcaaaggttcaaaagctggtattgaacaagaaggatattggttgccaggagatgagattgcctatagtatgcagcctttctccaggacagcagccccaaacaaggactgggaaacagaaaatcatgactggtattgttttgaatgccatttgcctggagaggtgttgatatgtgacctgtgttttcgtgtgtatcattccaagtgtttgtctgatgagttcaggcttagagacagcagtagtccctggcagtgcccagtttgcaggagcattaagaagaagaatacaaacaaacaggagatgggcacatacctcagattcattgtctcccgcatgaaggagagggctatagatcttaataaaaaggggaaggacaataaacacccgatgtacaggaggctggtgcactcagctgtggacgttc

SEQ ID NO: 204650 - DNA, 4138 bp, Homo sapiens
  Payload ID: 20368
  Gene Name: zinc finger, MYND-type containing 11
  Uniprot ID: Q15326
  ENST ID: ENST00000397959
  CDS Start-End: 429-1982
agtgttcttgcagggctgctgatgggtggtcctgttcttttcgcggtcctgtttgcgcagagatgaaacggggaacttagcgtatccctaccgctctttttgatgacaggagtaaagggctgttcagactacctaaacaatgttgttaagagaagcactcgtacttctcagacttcgctgttccggaccccgcgagccaggggcaggcaccgggtccacccggggctgagctgcggcggcgcctgacaatgccccctcgcgccccggcctcggcgcccgctcccggctccagcgcgcctgcacgtacgtagccttcacgtgtgtgtggatacggagtgcatgtgtggagacagaggaatatgctccaacaaatttcggatagaggcgccgaagacaggacgtggggaagctaaagaagtaaacaggtcatggcacgtttaacaaaaagacgacaggcggatacaaaagctatccagcatctttgggcagccattgagattatacggaaccagaagcagattgccaacattgaccgtattacaaagtatatgtctcgagtccacggtatgcaccctaaagagaccacccgtcagctgagcttagctgtgaaagatggtcttattgtcgaaactctaacagtgggctgcaaaggttcaaaagctggtattgaacaagaaggatattggttgccaggagatgagattagcattaagaagaagaatacaaacaaacaggagatgggcacatacctcagattcattgtctcccgcatgaaggagaggaaagtgaatgaagggaaataccgaagttatgaagagttcaaagctgatgcccaattgcttctccacaataccgtgattttctatggagcagacagtgagcaagctgacattgcgaggatgctatataaagacacatgtcatgagctggatgaactgcagctttgcaagaattgcttttacttgtcaaatgctcgtcctgacaactggttctgttatccttgtatacctaatcatgagctggtttgggctaaaatgaaaggttttgggttttggccagccaaagtcatgcagaaagaagacaatcaagtcgacgttcgcttctttggccaccaccaccagagggcctggattccttctgaaaacattcaagatatcacagtcaacattcatcggctgcacgtgaagcgcagtatgggttggaaaaaggcctgtgatgagctggagctgcatcagcgtttcctacgagaagggagattttggaaatctaagaatgaggaccgaggtgaggaagaggcagaatccagtatctcctccaccagtaatgagcagctaaaggtcactcaagaaccaagagcaaagaaaggacgacgtaatcaaagtgtggagcccaaaaaggaagaaccagagcctgaaacagaagcagtaagttctagccaggaaatacccacgatgcctcagcccatcgaaaaagtctccgtgtcaactcagacaaagaagttaagtgcctcttcaccaagaatgctgcatcggagcacccagaccacaaacgacggcgtgtgtcagagcatgtgccatgacaaatacaccaagatcttcaatgacttcaaagaccggatgaagtcggaccacaagcgggagacagagcgtgttgtccgagaagctctggagaagctgcgttctgaaatggaagaagaaaagagacaagctgtaaataaagctgtagccaacatgcagggtgagatggacagaaaatgtaagcaagtaaaggaaaagtgtaaggaagaatttgtagaagaaatcaagaagctggcaacacagcacaagcaactgatttctcagaccaagaagaagcagtggtgctacaactgtgaggaggaggccatgtaccactgctgctggaacacatcctactgctccatcaagtgccagcaggagcactggcacgcggagcacaagcgcacctgccgccggaaaagatgaagctggcccttcccggagtcaccccgatgattactcttttcagacacagcggtttttgtttccaagaagccaaaattgtttagaatttgcttcccattttgcaccagcctttaaacacttttcgtgaagaaattttgcacagtagtttaaatcttttgttaatgctcctccgaagtttttcagggggtaaaagtaacatcagtggagggtattattttaaataaattttaattgagaatttgttgcattttcagcaaattttaaaacatttttaggttttacagagattttaacctttaaacaacagatctttaaaaaacaggtgaatacaagtgagtttaacaaagaaacatttagaatagatctgaatgtaagaactacagaactgtttcagaaataaaacatactaccttgatgtgacatttttttcttaaccttgttgagctggttttgttcagcttaatttactgttcaaaggcattatctgttggtcacaccagtgggtatatgattgaatttagggaacagggttgacacagcagggctagtcctgcatattttttcttaaatatttcccaattgtgtttttcattatttcttttcaatatataacttttataacaaattattagctttgatcttgtagtttaaaattgcagggaactggggtaatcttttactgagctggatcttagagaaaatgaatatttaaattttaaagtttgcacatttcatctttgtcctaacatgagtgcttgtaacaaaataaacaacaaaaacaaagccaaaaactacctttatccatatgtgaaattatagatgaggcatacgaatttgtttaatgcttcccttcccttcccacatatcatctcactgcctattatctggtgtcacctcatgtatcgtaagttaatactaaaagaagagaaagcacttaagtttcacagaagccgttatgtttgtagtaatgggtcattgcctactaatgaactccatcactgtacacagaatgaagaataatgcatgttaattttcttgtattaaagatgccgtgatttgtaaaaagtctgtattttgcggaatgtctggattaagaagcattaccaataggaatggatcgatagttgaataatgattttttatacatagatatataaaatacagccaggaaaacttaaattacttttcttttaaaatatctcacaatttatgtggtatttttaaagactgatcttagaccaagtcaaattcccatttatcatttagttattttttgaggttagagaataatttgtacatatttatttagacctttgatatttattaaagcaattactcacaatggaagtgaaagaatcaggagaaaagccttttaaaaagtattctccaggtttgtcagggtcactctaaagataaaaatgtaactaagtcttctgtgaaatatcatccatctaatcttgatgctgttgcagatggtggtgacacaagttaattgacaaactactgccaaatggtgcacaatattttgtaaaaagtacccagtagccccatttcatacaatgtacctaaattatgcagtaacttggcatcatcgttccctccttgttgctgtgtaattagtcagtgttgccacagtgtgtggcgctgatggagatgtcagaaccgagaacacttaaccttctttgattgtttttcaagttttaagacttcgatccacccctatgagagcaagtaattgtggaaatatttttggtgtaaaatcattccagagtatgtaatatttaactgatagctgcatgaaagtgagattcgtgttactttggcttttctgtctctgttgacacggttgcacatttccaagttactacagcgtgaaaactgtgtgtttaaaaaaaaacaaaattaaaaaaagagattgtggcctggttttgtaaaagttttaggtaaaattacaattgattgttttaggaatcattattaaaaattttctgcaaatcataaagctatatcgaggtgttgagcttagccactatgcacattgtaattattcattgtggctgtccagttctatgatgcattctggcattttgtaagctgctctgactagcaatatatagattcatttaatgtgttaacattggttaataaatgtattt

SEQ ID NO: 204651 - DNA, 4306 bp, Homo sapiens
  Payload ID: 20368
  Gene Name: zinc finger, MYND-type containing 11
  Uniprot ID: Q15326
  ENST ID: ENST00000397962
  CDS Start-End: 342-2150
acttctcgcgcaaatctgcagtgttcttgcagggctgctgatgggtggtcctgttcttttcgcggtcctgtttgcgcagagatgaaacggggaacttagcgtatccctaccgctctttttgatgacaggagtaaagggctgttcagactacctaaacaatgttgttaagagaagcactcgtacttctcagacttcgctgttccggaccccgcgagccaggggcaggcaccgggtccacccggggctgagctgcggcggcgcctgacaatgccccctcgcgccccggcctcggcgcccgctcccggctccagcgcgcctgcacctaaagaagtaaacaggtcatggcacgtttaacaaaaagacgacaggcggatacaaaagctatccagcatctttgggcagccattgagattatacggaaccagaagcagattgccaacattgaccgtattacaaagtatatgtctcgagtccacggtatgcaccctaaagagaccacccgtcagctgagcttagctgtgaaagatggtcttattgtcgaaactctaacagtgggctgcaaaggttcaaaagctggtattgaacaagaaggatattggttgccaggagatgagattgactgggaaacagaaaatcatgactggtattgttttgaatgccatttgcctggagaggtgttgatatgtgacctgtgttttcgtgtgtatcattccaagtgtttgtctgatgagttcaggcttagagacagcagtagtccctggcagtgcccagtttgcaggagcattaagaagaagaatacaaacaaacaggagatgggcacatacctcagattcattgtctcccgcatgaaggagagggctatagatcttaataaaaaggggaaggacaataaacacccgatgtacaggaggctggtgcactcagctgtggacgttcccaccattcaagagaaagtgaatgaagggaaataccgaagttatgaagagttcaaagctgatgcccaattgcttctccacaataccgtgattttctatggagcagacagtgagcaagctgacattgcgaggatgctatataaagacacatgtcatgagctggatgaactgcagctttgcaagaattgcttttacttgtcaaatgctcgtcctgacaactggttctgttatccttgtatacctaatcatgagctggtttgggctaaaatgaaaggttttgggttttggccagccaaagtcatgcagaaagaagacaatcaagtcgacgttcgcttctttggccaccaccaccagagggcctggattccttctgaaaacattcaagatatcacagtcaacattcatcggctgcacgtgaagcgcagtatgggttggaaaaaggcctgtgatgagctggagctgcatcagcgtttcctacgagaagggagattttggaaatctaagaatgaggaccgaggtgaggaagaggcagaatccagtatctcctccaccagtaatgagcagctaaaggtcactcaagaaccaagagcaaagaaaggacgacgtaatcaaagtgtggagcccaaaaaggaagaaccagagcctgaaacagaagcagtaagttctagccaggaaatacccacgatgcctcagcccatcgaaaaagtctccgtgtcaactcagacaaagaagttaagtgcctcttcaccaagaatgctgcatcggagcacccagaccacaaacgacggcgtgtgtcagagcatgtgccatgacaaatacaccaagatcttcaatgacttcaaagaccggatgaagtcggaccacaagcgggagacagagcgtgttgtccgagaagctctggagaagctgcgttctgaaatggaagaagaaaagagacaagctgtaaataaagctgtagccaacatgcagggtgagatggacagaaaatgtaagcaagtaaaggaaaagtgtaaggaagaatttgtagaagaaatcaagaagctggcaacacagcacaagcaactgatttctcagaccaagaagaagcagtggtgctacaactgtgaggaggaggccatgtaccactgctgctggaacacatcctactgctccatcaagtgccagcaggagcactggcacgcggagcacaagcgcacctgccgccggaaaagatgaagctggcccttcccggagtcaccccgatgattactcttttcagacacagcggtttttgtttccaagaagccaaaattgtttagaatttgcttcccattttgcaccagcctttaaacacttttcgtgaagaaattttgcacagtagtttaaatcttttgttaatgctcctccgaagtttttcagggggtaaaagtaacatcagtggagggtattattttaaataaattttaattgagaatttgttgcattttcagcaaattttaaaacatttttaggttttacagagattttaacctttaaacaacagatctttaaaaaacaggtgaatacaagtgagtttaacaaagaaacatttagaatagatctgaatgtaagaactacagaactgtttcagaaataaaacatactaccttgatgtgacatttttttcttaaccttgttgagctggttttgttcagcttaatttactgttcaaaggcattatctgttggtcacaccagtgggtatatgattgaatttagggaacagggttgacacagcagggctagtcctgcatattttttcttaaatatttcccaattgtgtttttcattatttcttttcaatatataacttttataacaaattattagctttgatcttgtagtttaaaattgcagggaactggggtaatcttttactgagctggatcttagagaaaatgaatatttaaattttaaagtttgcacatttcatctttgtcctaacatgagtgcttgtaacaaaataaacaacaaaaacaaagccaaaaactacctttatccatatgtgaaattatagatgaggcatacgaatttgtttaatgcttcccttcccttcccacatatcatctcactgcctattatctggtgtcacctcatgtatcgtaagttaatactaaaagaagagaaagcacttaagtttcacagaagccgttatgtttgtagtaatgggtcattgcctactaatgaactccatcactgtacacagaatgaagaataatgcatgttaattttcttgtattaaagatgccgtgatttgtaaaaagtctgtattttgcggaatgtctggattaagaagcattaccaataggaatggatcgatagttgaataatgattttttatacatagatatataaaatacagccaggaaaacttaaattacttttcttttaaaatatctcacaatttatgtggtatttttaaagactgatcttagaccaagtcaaattcccatttatcatttagttattttttgaggttagagaataatttgtacatatttatttagacctttgatatttattaaagcaattactcacaatggaagtgaaagaatcaggagaaaagccttttaaaaagtattctccaggtttgtcagggtcactctaaagataaaaatgtaactaagtcttctgtgaaatatcatccatctaatcttgatgctgttgcagatggtggtgacacaagttaattgacaaactactgccaaatggtgcacaatattttgtaaaaagtacccagtagccccatttcatacaatgtacctaaattatgcagtaacttggcatcatcgttccctccttgttgctgtgtaattagtcagtgttgccacagtgtgtggcgctgatggagatgtcagaaccgagaacacttaaccttctttgattgtttttcaagttttaagacttcgatccacccctatgagagcaagtaattgtggaaatatttttggtgtaaaatcattccagagtatgtaatatttaactgatagctgcatgaaagtgagattcgtgttactttggcttttctgtctctgttgacacggttgcacatttccaagttactacagcgtgaaaactgtgtgtttaaaaaaaaacaaaattaaaaaaagagattgtggcctggttttgtaaaagttttaggtaaaattacaattgattgttttaggaatcattattaaaaattttctgcaaatcataaagctatatcgaggtgttgagcttagccactatgcacattgtaattattcattgtggctgtccagttctatgatgcattctggcattttgtaagctgctctgactagcaatatatagattcatttaatgtgttaacattggttaataaatgtattt

SEQ ID NO: 204652 - DNA, 1664 bp, Homo sapiens
  Payload ID: 20368
  Gene Name: zinc finger, MYND-type containing 11
  ENST ID: ENST00000403354
  CDS Start-End: 96-1664
gcggcgggaaggaggcggcaccggaggggagggccgggcgcggcggcggcggcggtggaggagccggagcataatgctaaagaagtaaacaggtcatggcacgtttaacaaaaagacgacaggcggatacaaaagctatccagcatctttgggcagccattgagattatacggaaccagaagcagattgccaacattgaccgtattacaaagtatatgtctcgagtccacggtatgcaccctaaagagaccacccgtcagctgagcttagctgtgaaagatggtcttattgtcgaaactctaacagtgggctgcaaaggttcaaaagctggtattgaacaagaaggatattggttgccaggagatgagattagcattaagaagaagaatacaaacaaacaggagatgggcacatacctcagattcattgtctcccgcatgaaggagagggctatagatcttaataaaaaggggaaggacaataaacacccgatgtacaggaggctggtgcactcagctgtggacgttcccaccattcaagagaaagtgaatgaagggaaataccgaagttatgaagagttcaaagctgatgcccaattgcttctccacaataccgtgattttctatggagcagacagtgagcaagctgacattgcgaggatgctatataaagacacatgtcatgagatacctaatcatgagctggtttgggctaaaatgaaaggttttgggttttggccagccaaagtcatgcagaaagaagacaatcaagtcgacgttcgcttctttggccaccaccaccagagggcctggattccttctgaaaacattcaagatatcacagtcaacattcatcggctgcacgtgaagcgcagtatgggttggaaaaaggcctgtgatgagctggagctgcatcagcgtttcctacgagaagggagattttggaaatctaagaatgaggaccgaggtgaggaagaggcagaatccagtatctcctccaccagtaatgagcagctaaaggtcactcaagaaccaagagcaaagaaaggacgacgtaatcaaagtgtggagcccaaaaaggaagaaccagagcctgaaacagaagcagtaagttctagccaggaaatacccacgatgcctcagcccatcgaaaaagtctccgtgtcaactcagacaaagaagttaagtgcctcttcaccaagaatgctgcatcggagcacccagaccacaaacgacggcgtgtgtcagagcatgtgccatgacaaatacaccaagatcttcaatgacttcaaagaccggatgaagtcggaccacaagcgggagacagagcgtgttgtccgagaagctctggagaagctgcgttctgaaatggaagaagaaaagagacaagctgtaaataaagctgtagccaacatgcagggtgagatggacagaaaatgtaagcaagtaaaggaaaagtgtaaggaagaatttgtagaagaaatcaagaagctggcaacacagcacaagcaactgatttctcagaccaagaagaagcagtggtgctacaactgtgaggaggaggccatgtaccactgctgctggaacacatcctactgctccatcaagtgccagcaggagcactggcacgcggagcacaagcgcacctgccgccggaaaagatga

SEQ ID NO: 204653 - DNA, 3950 bp, Homo sapiens
  Payload ID: 20368
  Gene Name: zinc finger, MYND-type containing 11
  ENST ID: ENST00000402736
  CDS Start-End: 71-1786
ggggagggccgggcgcggcggcggcggcggtggaggagccggagcataatgctaaagaagtaaacaggtcatggcacgtttaacaaaaagacgacaggcggatacaaaagctatccagcatctttgggcagccattgagattatacggaaccagaagcagattgccaacattgaccgtattacaaagtatatgtctcgagtccacggtatgcaccctaaagagaccacccgtcagctgagcttagctgtgaaagatggtcttattgtcgaaactctaacagtgggctgcaaaggttcaaaagctggtattgaacaagaaggatattggttgccaggagatgagattgactgggaaacagaaaatcatgactggtattgttttgaatgccatttgcctggagaggtgttgatatgtgacctgtgttttcgtgtgtatcattccaagtgtttgtctgatgagttcaggcttagagacagcagtagtccctggcagtgcccagtttgcaggagcattaagaagaagaatacaaacaaacaggagatgggcacatacctcagattcattgtctcccgcatgaaggagaggaaagtgaatgaagggaaataccgaagttatgaagagttcaaagctgatgcccaattgcttctccacaataccgtgattttctatggagcagacagtgagcaagctgacattgcgaggatgctatataaagacacatgtcatgagctggatgaactgcagctttgcaagaattgcttttacttgtcaaatgctcgtcctgacaactggttctgttatccttgtatacctaatcatgagctggtttgggctaaaatgaaaggttttgggttttggccagccaaagtcatgcagaaagaagacaatcaagtcgacgttcgcttctttggccaccaccaccagagggcctggattccttctgaaaacattcaagatatcacagtcaacattcatcggctgcacgtgaagcgcagtatgggttggaaaaaggcctgtgatgagctggagctgcatcagcgtttcctacgagaagggagattttggaaatctaagaatgaggaccgaggtgaggaagaggcagaatccagtatctcctccaccagtaatgagcagctaaaggtcactcaagaaccaagagcaaagaaaggacgacgtaatcaaagtgtggagcccaaaaaggaagaaccagagcctgaaacagaagcagtaagttctagccaggaaatacccacgatgcctcagcccatcgaaaaagtctccgtgtcaactcagacaaagaagttaagtgcctcttcaccaagaatgctgcatcggagcacccagaccacaaacgacggcgtgtgtcagagcatgtgccatgacaaatacaccaagatcttcaatgacttcaaagaccggatgaagtcggaccacaagcgggagacagagcgtgttgtccgagaagctctggagaagctgcgttctgaaatggaagaagaaaagagacaagctgtaaataaagctgtagccaacatgcagggtgagatggacagaaaatgtaagcaagtaaaggaaaagtgtaaggaagaatttgtagaagaaatcaagaagctggcaacacagcacaagcaactgatttctcagaccaagaagaagcagtggtgctacaactgtgaggaggaggccatgtaccactgctgctggaacacatcctactgctccatcaagtgccagcaggagcactggcacgcggagcacaagcgcacctgccgccggaaaagatgaagctggcccttcccggagtcaccccgatgattactcttttcagacacagcggtttttgtttccaagaagccaaaattgtttagaatttgcttcccattttgcaccagcctttaaacacttttcgtgaagaaattttgcacagtagtttaaatcttttgttaatgctcctccgaagtttttcagggggtaaaagtaacatcagtggagggtattattttaaataaattttaattgagaatttgttgcattttcagcaaattttaaaacatttttaggttttacagagattttaacctttaaacaacagatctttaaaaaacaggtgaatacaagtgagtttaacaaagaaacatttagaatagatctgaatgtaagaactacagaactgtttcagaaataaaacatactaccttgatgtgacatttttttcttaaccttgttgagctggttttgttcagcttaatttactgttcaaaggcattatctgttggtcacaccagtgggtatatgattgaatttagggaacagggttgacacagcagggctagtcctgcatattttttcttaaatatttcccaattgtgtttttcattatttcttttcaatatataacttttataacaaattattagctttgatcttgtagtttaaaattgcagggaactggggtaatcttttactgagctggatcttagagaaaatgaatatttaaattttaaagtttgcacatttcatctttgtcctaacatgagtgcttgtaacaaaataaacaacaaaaacaaagccaaaaactacctttatccatatgtgaaattatagatgaggcatacgaatttgtttaatgcttcccttcccttcccacatatcatctcactgcctattatctggtgtcacctcatgtatcgtaagttaatactaaaagaagagaaagcacttaagtttcacagaagccgttatgtttgtagtaatgggtcattgcctactaatgaactccatcactgtacacagaatgaagaataatgcatgttaattttcttgtattaaagatgccgtgatttgtaaaaagtctgtattttgcggaatgtctggattaagaagcattaccaataggaatggatcgatagttgaataatgattttttatacatagatatataaaatacagccaggaaaacttaaattacttttcttttaaaatatctcacaatttatgtggtatttttaaagactgatcttagaccaagtcaaattcccatttatcatttagttattttttgaggttagagaataatttgtacatatttatttagacctttgatatttattaaagcaattactcacaatggaagtgaaagaatcaggagaaaagccttttaaaaagtattctccaggtttgtcagggtcactctaaagataaaaatgtaactaagtcttctgtgaaatatcatccatctaatcttgatgctgttgcagatggtggtgacacaagttaattgacaaactactgccaaatggtgcacaatattttgtaaaaagtacccagtagccccatttcatacaatgtacctaaattatgcagtaacttggcatcatcgttccctccttgttgctgtgtaattagtcagtgttgccacagtgtgtggcgctgatggagatgtcagaaccgagaacacttaaccttctttgattgtttttcaagttttaagacttcgatccacccctatgagagcaagtaattgtggaaatatttttggtgtaaaatcattccagagtatgtaatatttaactgatagctgcatgaaagtgagattcgtgttactttggcttttctgtctctgttgacacggttgcacatttccaagttactacagcgtgaaaactgtgtgtttaaaaaaaaacaaaattaaaaaaagagattgtggcctggttttgtaaaagttttaggtaaaattacaattgattgttttaggaatcattattaaaaattttctgcaaatcataaagctatatcgaggtgttgagcttagccactatgcacattgtaattattcattgtggctgtccagttctatgatgcattctggcattttgtaagctgctctgactagcaatatatagattcatttaatgtgttaacattggttaataaatgtatttaaaaaaaa

SEQ ID NO: 204654 - DNA, 762 bp, Homo sapiens
  Payload ID: 20368
  Gene Name: zinc finger, MYND-type containing 11
  ENST ID: ENST00000439456
  CDS Start-End: 342-762
acttctcgcgcaaatctgcagtgttcttgcagggctgctgatgggtggtcctgttcttttcgcggtcctgtttgcgcagagatgaaacggggaacttagcgtatccctaccgctctttttgatgacaggagtaaagggctgttcagactacctaaacaatgttgttaagagaagcactcgtacttctcagacttcgctgttccggaccccgcgagccaggggcaggcaccgggtccacccggggctgagctgcggcggcgcctgacaatgccccctcgcgccccggcctcggcgcccgctcccggctccagcgcgcctgcacctaaagaagtaaacaggtcatggcacgtttaacaaaaagacgacaggcggatacaaaagctatccagcatctttgggcagccattgagattatacggaaccagaagcagattgccaacattgaccgtattacaaagtatatgtctcgagtccacggtatgcaccctaaagagaccacccgtcagctgagcttagctgtgaaagatggtcttattgtcgaaactctaacagtgggctgcaaaggttcaaaagctggtattgaacaagaaggatattggttgccaggagatgagattagcattaagaagaagaatacaaacaaacaggagatgggcacatacctcagattcattgtctcccgcatgaaggagagggctatagatcttaataaaaaggggaaggacaataaacacccgatgtacaggaggctggtgcactcag

SEQ ID NO: 204655 - DNA, 2065 bp, Homo sapiens
  Payload ID: 20368
  Gene Name: zinc finger, MYND-type containing 11
  Uniprot ID: Q15326
  ENST ID: ENST00000509513
  CDS Start-End: 210-1913
ccggggctgagctgcggcggcgcctgacaatgccccctcgcgccccggcctcggcgcccgctcccggctccagcgcgcctgcacgtacgtagccttcacgtgtgtgtggatacggagtgcatgtgtggagacagaggaatatgctccaacaaatttcggatagaggcgccgaagacaggacgtggggaagctaaagaagtaaacaggtcatggcacgtttaacaaaaagacgacaggcggatacaaaagctatccagcatctttgggcagccattgagattatacggaaccagaagcagattgccaacattgaccgtattacaaagtatatgtctcgagtccacggtatgcaccctaaagagaccacccgtcagctgagcttagctgtgaaagatggtcttattgtcgaaactctaacagtgggctgcaaaggttcaaaagctggtattgaacaagaaggatattggttgccaggagatgagattgactgggaaacagaaaatcatgactggtattgttttgaatgccatttgcctggagaggtgttgatatgtgacctgtgttttcgtgtgtatcattccaagtgtttgtctgatgagttcaggcttagagacagcagtagtccctggcagtgcccagtttgcaggagcattaagaagaagaatacaaacaaacaggagatgggcacatacctcagattcattgtctcccgcatgaaggagagggctatagatcttaataaaaaggggaaggacaataaacacccgatgtacaggaggctggtgcactcagctgtggacgttcccaccattcaagagaaagtgaatgaagggaaataccgaagttatgaagagttcaaagctgatgcccaattgcttctccacaataccgtgattttctatggagacagtgagcaagctgacattgcgaggatgctatataaagacacatgtcatgagctggatgaactgcagctttgcaagaattgcttttacttgtcaaatgctcgtcctgacaactggttctgttatccttgtatacctaatcatgagctggtttgggctaaaatgaaaggttttgggttttggccagccaaagtcatgcagaaagaagacaatcaagtcgacgttcgcttctttggccaccaccaccagagggcctggattccttctgaaaacattcaagatatcacagtcaacattcatcggctgcacgtgaagcgcagtatgggttggaaaaaggcctgtgatgagctggagctgcatcagcgtttcctacgagaagggagattttggaaatctaagaatgaggaccgaggtgaggaagaggcagaatccagtatctcctccaccagtaatgagcagctaaaggtcactcaagaaccaagagcaaagaaaggacgacgtaatcaaagtgtggagcccaaaaaggaagaaccagagcctgaaacagaagcagtaagttctagccaggaaatacccacgatgcctcagcccatcgaaaaagtctccgtgtcaactcagacaaagaagttaagtgcctcttcaccaagaatgctgcatcggagcacccagaccacaaacgacggcgtgtgtcagagcatgtgccatgacaaatacaccaagatcttcaatgacttcaaagaccggatgaagtcggaccacaagcgggagacagagcgtgttgtccgagaagctctggagaagctgcgttctgaaatggaagaagaaaagagacaagctgtaaataaagctgtagccaacatgcagggtgagatggacagaaaatgtaagcaagtaaaggaaaagtgtaaggaagaatttgtagaagaaatcaagaagctggcaacacagcacaagcaactgatttctcagaccaagaagaagcagtgggtaaataccagtcttttttagacccttatttctgaaaatgtaccacaggtatgatgcccgttaattcagaaggtagctgtggcacatgcagaagatgtttctgaaataagatcaaatgtgaaatggtcagctttagttttaaaaattttattaaaagtcctatgatctctcaa

SEQ ID NO: 204656 - DNA, 1859 bp, Homo sapiens
  Payload ID: 20368
  Gene Name: zinc finger, MYND-type containing 11
  Uniprot ID: Q15326
  ENST ID: ENST00000558098
  CDS Start-End: 1-1707
atggcacgtttaacaaaaagacgacaggcggatacaaaagctatccagcatctttgggcagccattgagattatacggaaccagaagcagattgccaacattgaccgtattacaaagtatatgtctcgagtccacggtatgcaccctaaagagaccacccgtcagctgagcttagctgtgaaagatggtcttattgtcgaaactctaacagtgggctgcaaaggttcaaaagctggtattgaacaagaaggatattggttgccaggagatgagattgactgggaaacagaaaatcatgactggtattgttttgaatgccatttgcctggagaggtgttgatatgtgacctgtgttttcgtgtgtatcattccaagtgtttgtctgatgagttcaggcttagagacagcagtagtccctggcagtgcccagtttgcaggagcattaagaagaagaatacaaacaaacaggagatgggcacatacctcagattcattgtctcccgcatgaaggagagggctatagatcttaataaaaaggggaaggacaataaacacccgatgtacaggaggctggtgcactcagctgtggacgttcccaccattcaagagaaagtgaatgaagggaaataccgaagttatgaagagttcaaagctgatgcccaattgcttctccacaataccgtgattttctatggagcagacagtgagcaagctgacattgcgaggatgctatataaagacacatgtcatgagctggatgaactgcagctttgcaagaattgcttttacttgtcaaatgctcgtcctgacaactggttctgttatccttgtatacctaatcatgagctggtttgggctaaaatgaaaggttttgggttttggccagccaaagtcatgcagaaagaagacaatcaagtcgacgttcgcttctttggccaccaccaccagagggcctggattccttctgaaaacattcaagatatcacagtcaacattcatcggctgcacgtgaagcgcagtatgggttggaaaaaggcctgtgatgagctggagctgcatcagcgtttcctacgagaagggagattttggaaatctaagaatgaggaccgaggtgaggaagaggcagaatccagtatctcctccaccagtaatgagcagctaaaggtcactcaagaaccaagagcaaagaaaggacgacgtaatcaaagtgtggagcccaaaaaggaagaaccagagcctgaaacagaagcagtaagttctagccaggaaatacccacgatgcctcagcccatcgaaaaagtctccgtgtcaactcagacaaagaagttaagtgcctcttcaccaagaatgctgcatcggagcacccagaccacaaacgacggcgtgtgtcagagcatgtgccatgacaaatacaccaagatcttcaatgacttcaaagaccggatgaagtcggaccacaagcgggagacagagcgtgttgtccgagaagctctggagaagctgcgttctgaaatggaagaagaaaagagacaagctgtaaataaagctgtagccaacatgcagggtgagatggacagaaaatgtaagcaagtaaaggaaaagtgtaaggaagaatttgtagaagaaatcaagaagctggcaacacagcacaagcaactgatttctcagaccaagaagaagcagtgggtaaataccagtcttttttagacccttatttctgaaaatgtaccacaggtatgatgcccgttaattcagaaggtagctgtggcacatgcagaagatgtttctgaaataagatcaaatgtgaaatggtcagctttagttttaaaaattttattaaaagtcctatgatctctcaa

SEQ ID NO: 204657 - DNA, 1687 bp, Homo sapiens
  Payload ID: 20368
  Gene Name: zinc finger, MYND-type containing 11
  Uniprot ID: Q15326
  ENST ID: ENST00000602682
  CDS Start-End: 24-1577
gcagctaaagaagtaaacaggtcatggcacgtttaacaaaaagacgacaggcggatacaaaagctatccagcatctttgggcagccattgagattatacggaaccagaagcagattgccaacattgaccgtattacaaagtatatgtctcgagtccacggtatgcaccctaaagagaccacccgtcagctgagcttagctgtgaaagatggtcttattgtcgaaactctaacagtgggctgcaaaggttcaaaagctggtattgaacaagaaggatattggttgccaggagatgagattagcattaagaagaagaatacaaacaaacaggagatgggcacatacctcagattcattgtctcccgcatgaaggagaggaaagtgaatgaagggaaataccgaagttatgaagagttcaaagctgatgcccaattgcttctccacaataccgtgattttctatggagcagacagtgagcaagctgacattgcgaggatgctatataaagacacatgtcatgagctggatgaactgcagctttgcaagaattgcttttacttgtcaaatgctcgtcctgacaactggttctgttatccttgtatacctaatcatgagctggtttgggctaaaatgaaaggttttgggttttggccagccaaagtcatgcagaaagaagacaatcaagtcgacgttcgcttctttggccaccaccaccagagggcctggattccttctgaaaacattcaagatatcacagtcaacattcatcggctgcacgtgaagcgcagtatgggttggaaaaaggcctgtgatgagctggagctgcatcagcgtttcctacgagaagggagattttggaaatctaagaatgaggaccgaggtgaggaagaggcagaatccagtatctcctccaccagtaatgagcagctaaaggtcactcaagaaccaagagcaaagaaaggacgacgtaatcaaagtgtggagcccaaaaaggaagaaccagagcctgaaacagaagcagtaagttctagccaggaaatacccacgatgcctcagcccatcgaaaaagtctccgtgtcaactcagacaaagaagttaagtgcctcttcaccaagaatgctgcatcggagcacccagaccacaaacgacggcgtgtgtcagagcatgtgccatgacaaatacaccaagatcttcaatgacttcaaagaccggatgaagtcggaccacaagcgggagacagagcgtgttgtccgagaagctctggagaagctgcgttctgaaatggaagaagaaaagagacaagctgtaaataaagctgtagccaacatgcagggtgagatggacagaaaatgtaagcaagtaaaggaaaagtgtaaggaagaatttgtagaagaaatcaagaagctggcaacacagcacaagcaactgatttctcagaccaagaagaagcagtggtgctacaactgtgaggaggaggccatgtaccactgctgctggaacacatcctactgctccatcaagtgccagcaggagcactggcacgcggagcacaagcgcacctgccgccggaaaagatgaagctggcccttcccggagtcaccccgatgattactcttttcagacacagcggtttttgtttccaagaagccaaaattgtttagaatttgcttcccattttgcaccagcct

SEQ ID NO: 204658 - DNA, 3914 bp, Homo sapiens
  Payload ID: 20368
  Gene Name: zinc finger, MYND-type containing 11
  ENST ID: ENST00000627286
  CDS Start-End: 1-1758
atggtgatttttacatcattacacagatatgtcattttcattagttgtatcattgttataaactggtatatgtctcgagtccacggtatgcaccctaaagagaccacccgtcagctgagcttagctgtgaaagatggtcttattgtcgaaactctaacagtgggctgcaaaggttcaaaagctggtattgaacaagaaggatattggttgccaggagatgagattgactgggaaacagaaaatcatgactggtattgttttgaatgccatttgcctggagaggtgttgatatgtgacctgtgttttcgtgtgtatcattccaagtgtttgtctgatgagttcaggcttagagacagcagtagtccctggcagtgcccagtttgcaggagcattaagaagaagaatacaaacaaacaggagatgggcacatacctcagattcattgtctcccgcatgaaggagagggctatagatcttaataaaaaggggaaggacaataaacacccgatgtacaggaggctggtgcactcagctgtggacgttcccaccattcaagagaaagtgaatgaagggaaataccgaagttatgaagagttcaaagctgatgcccaattgcttctccacaataccgtgattttctatggagcagacagtgagcaagctgacattgcgaggatgctatataaagacacatgtcatgagctggatgaactgcagctttgcaagaattgcttttacttgtcaaatgctcgtcctgacaactggttctgttatccttgtatacctaatcatgagctggtttgggctaaaatgaaaggttttgggttttggccagccaaagtcatgcagaaagaagacaatcaagtcgacgttcgcttctttggccaccaccaccagagggcctggattccttctgaaaacattcaagatatcacagtcaacattcatcggctgcacgtgaagcgcagtatgggttggaaaaaggcctgtgatgagctggagctgcatcagcgtttcctacgagaagggagattttggaaatctaagaatgaggaccgaggtgaggaagaggcagaatccagtatctcctccaccagtaatgagcagctaaaggtcactcaagaaccaagagcaaagaaaggacgacgtaatcaaagtgtggagcccaaaaaggaagaaccagagcctgaaacagaagcagtaagttctagccaggaaatacccacgatgcctcagcccatcgaaaaagtctccgtgtcaactcagacaaagaagttaagtgcctcttcaccaagaatgctgcatcggagcacccagaccacaaacgacggcgtgtgtcagagcatgtgccatgacaaatacaccaagatcttcaatgacttcaaagaccggatgaagtcggaccacaagcgggagacagagcgtgttgtccgagaagctctggagaagctgcgttctgaaatggaagaagaaaagagacaagctgtaaataaagctgtagccaacatgcagggtgagatggacagaaaatgtaagcaagtaaaggaaaagtgtaaggaagaatttgtagaagaaatcaagaagctggcaacacagcacaagcaactgatttctcagaccaagaagaagcagtggtgctacaactgtgaggaggaggccatgtaccactgctgctggaacacatcctactgctccatcaagtgccagcaggagcactggcacgcggagcacaagcgcacctgccgccggaaaagatgaagctggcccttcccggagtcaccccgatgattactcttttcagacacagcggtttttgtttccaagaagccaaaattgtttagaatttgcttcccattttgcaccagcctttaaacacttttcgtgaagaaattttgcacagtagtttaaatcttttgttaatgctcctccgaagtttttcagggggtaaaagtaacatcagtggagggtattattttaaataaattttaattgagaatttgttgcattttcagcaaattttaaaacatttttaggttttacagagattttaacctttaaacaacagatctttaaaaaacaggtgaatacaagtgagtttaacaaagaaacatttagaatagatctgaatgtaagaactacagaactgtttcagaaataaaacatactaccttgatgtgacatttttttcttaaccttgttgagctggttttgttcagcttaatttactgttcaaaggcattatctgttggtcacaccagtgggtatatgattgaatttagggaacagggttgacacagcagggctagtcctgcatattttttcttaaatatttcccaattgtgtttttcattatttcttttcaatatataacttttataacaaattattagctttgatcttgtagtttaaaattgcagggaactggggtaatcttttactgagctggatcttagagaaaatgaatatttaaattttaaagtttgcacatttcatctttgtcctaacatgagtgcttgtaacaaaataaacaacaaaaacaaagccaaaaactacctttatccatatgtgaaattatagatgaggcatacgaatttgtttaatgcttcccttcccttcccacatatcatctcactgcctattatctggtgtcacctcatgtatcgtaagttaatactaaaagaagagaaagcacttaagtttcacagaagccgttatgtttgtagtaatgggtcattgcctactaatgaactccatcactgtacacagaatgaagaataatgcatgttaattttcttgtattaaagatgccgtgatttgtaaaaagtctgtattttgcggaatgtctggattaagaagcattaccaataggaatggatcgatagttgaataatgattttttatacatagatatataaaatacagccaggaaaacttaaattacttttcttttaaaatatctcacaatttatgtggtatttttaaagactgatcttagaccaagtcaaattcccatttatcatttagttattttttgaggttagagaataatttgtacatatttatttagacctttgatatttattaaagcaattactcacaatggaagtgaaagaatcaggagaaaagccttttaaaaagtattctccaggtttgtcagggtcactctaaagataaaaatgtaactaagtcttctgtgaaatatcatccatctaatcttgatgctgttgcagatggtggtgacacaagttaattgacaaactactgccaaatggtgcacaatattttgtaaaaagtacccagtagccccatttcatacaatgtacctaaattatgcagtaacttggcatcatcgttccctccttgttgctgtgtaattagtcagtgttgccacagtgtgtggcgctgatggagatgtcagaaccgagaacacttaaccttctttgattgtttttcaagttttaagacttcgatccacccctatgagagcaagtaattgtggaaatatttttggtgtaaaatcattccagagtatgtaatatttaactgatagctgcatgaaagtgagattcgtgttactttggcttttctgtctctgttgacacggttgcacatttccaagttactacagcgtgaaaactgtgtgtttaaaaaaaaacaaaattaaaaaaagagattgtggcctggttttgtaaaagttttaggtaaaattacaattgattgttttaggaatcattattaaaaattttctgcaaatcataaagctatatcgaggtgttgagcttagccactatgcacattgtaattattcattgtggctgtccagttctatgatgcattctggcattttgtaagctgctctgactagcaatatatagattcatttaatgtgttaacattggttaataaatgtattt

SEQ ID NO: 204659 - DNA, 1775 bp, Homo sapiens
  Payload ID: 20369
  Gene Name: zinc finger, MYND-type containing 12
  Uniprot ID: Q9H0C1
  ENST ID: ENST00000372565
  CDS Start-End: 271-1368
actgtacgggcctttctggacttggactccttgggagtcgtttctcggccatttgacccgtgggacttgtgggttttgtgctgctttttctttctttcttccccttttccaacttcagcaatacacccagatgttagtcgagtcacgtcccgccgccctctgcccttgaaatgctggcaagtacgcagccccgcgatcgtcacgtgacgccggggttcagcgtatccttgctgggcaaccgtcttagagaccagcactgctggctgcaccatgaatgtgatctacccactggcagtccccaaggggcgcagactctgctgtgaggtgtgcgaagccccagccgagcgggtgtgcgcggcctgcacagtcacttattactgtggggtggtacatcagaaggctgactgggacagcatccatgagaaaatatgtcagctcttgattccactgcgcacttccatgcccttctacaattcagaggaagaacggcagcatggcctgcagcagctgcagcagcggcagaagtatttgattgaattctgctacaccatagcccagaaatacctctttgaagggaaacacgaagatgctgtaccagcagctttgcagtcccttcgcttccgtgtgaagctgtatggcctgagctccgtagagcttgtgcctgcttacctgctgttggccgaggccagccttggtctgggccgaatcgttcaggctgaagaatatctattccaagcccagtggacagtcctcaaatcaactgactgtagtaatgccacccactctttactgcatcggaatctgggacttctctatatagctaagaaaaactatgaagaggcccgttatcatctggccaatgatatttattttgccagttgtgcatttggaacagaggacattaggacttcaggaggctacttccacctggctaatatattctatgaccttaaaaagttggacctggcagacacattgtacaccaaggtctctgagatctggcatgcatatttgaacaatcactatcaagtcctctcacaggctcacatccaacaaatggatttactgggcaaactatttgagaatgacactggcttggatgaagcccaagaagcagaagccattcgcatcctgacttcaatcttgaacattcgagaatctacatctgacaaagccccccaaaaaaccatctttgttctgaagatcctggtcatgttttactacctgatgatgaattcttcaaaggcacaggaatatggcatgagggccctcagtctagccaaagaacaacagcttgatgtccatgagcaaagcaccattcaagagttattaagtctcatttcaactgaagaccatcccattacttagtgacccatgagctctgcatcaagggttattccaggggctactgaagatctaatatattccagccttgcacaactgctttgaggtactgtagactgctgaagtttccaccctcttcccctgggattgcacacatagctgttatttttttcttacacagcatattaagggaatataaagctttaggcatagaaatcactaaaaactgtgtttgtcatgacctttgtacttgatttatcatgactttgtatgactgagtaatatgtagtcagatcactaatatggtatttgtaattaaactacaaatagtttgtcatttcccagaagtcttccaacgatgcatgtttcatacacttttgctaaaggaggggtaaaggagggggtagggaataaagctatattggaacaaa

SEQ ID NO: 204660 - DNA, 1503 bp, Homo sapiens
  Payload ID: 20369
  Gene Name: zinc finger, MYND-type containing 12
  ENST ID: ENST00000611861
  CDS Start-End: 257-634
tctggacttggactccttgggagtcgtttctcggccatttgacccgtgggacttgtgggttttgtgctgctttttctttctttcttccccttttccaacttcagcaatacacccagatgttagtcgagtcacgtcccgccgccctctgcccttgaaatgctggcaagtacgcagccccgcgatcgtcacgtgacgccggggttcagcgtatccttgctgggcaaccgtcttagagaccagcactgctggctgcaccatgaatgtgatctacccactggcagtccccaaggggcgcagactctgctgtgaggtgtgcgaagccccagccgagcgggtgtgcgcggcctgcacagtcacttattactgtggggtggtacatcagaaggctgactgggacagcatccatgagaaaatatgtcagctcttgattccactgcgcacttccatgcccttctacaattcagaggaagaacggcagcatggcctgcagcagctgcagcagcggcaggtctgggccgaatcgttcaggctgaagaatatctattccaagcccagtggacagtcctcaaatcaactgactgtagtaatgccacccactctttactgcatcggaatctgggacttctctatatagctaagaaaaactatgaagaggcccgttatcatctggccaatgatatttattttgccagttgtgcatttggaacagaggacattaggacttcaggaggctacttccacctggctaatatattctatgaccttaaaaagttggacctggcagacacattgtacaccaaggtctctgagatctggcatgcatatttgaacaatcactatcaagtcctctcacaggctcacatccaacaaatggatttactgggcaaactatttgagaatgacactggcttggatgaagcccaagaagcagaagccattcgcatcctgacttcaatcttgaacattcgagaatctacatctgacaaagccccccaaaaaaccatctttgttctgaagatcctggtcatgttttactacctgatgatgaattcttcaaaggcacaggaatatggcatgagggccctcagtctagccaaagaacaacagcttgatgtccatgagcaaagcaccattcaagagttattaagtctcatttcaactgaagaccatcccattacttagtgacccatgagctctgcatcaagggttattccaggggctactgaagatctaatatattccagccttgcacaactgctttgaggtactgtagactgctgaagtttccaccctcttcccctgggattgcacacatagctgttatttttttcttacacagcatattaagggaatataaagctttaggcatagaaatcactaaaaactgtgtttgtcatgacctttgtacttgatttatcatgactttgtatgactgagtaatatgtagtcagatcactaatatggtatttgtaattaaactacaaatagtttgtcatttcccag

SEQ ID NO: 204661 - DNA, 417 bp, Homo sapiens
  Payload ID: 20369
  Gene Name: zinc finger, MYND-type containing 12
  ENST ID: ENST00000461083
  CDS Start-End: 15-149
ctgctggctgcaccatgaatgtgatctacccactggcagtccccaaggggcgcagactctgctgtgaggtgtgcgaagccccagccgagcgggtgtgcgcggcctgcacagtcacttattactggtctgggccgaatcgttcaggctgaagaatatctattccaagcccagtggacagtcctcaaatcaactgactgtagtaatgccacccactctttactgcatcggaatctgggacttctctatatagctaagaaaaactatgaagaggcccgttatcatctggccaatgatatttattttgccagttgtgcatttggaacagaggacattaggacttcaggaggctacttccacctggctaatatattctatgaccttaaaaagttggacctggcagacacattgtacaccaag

SEQ ID NO: 204662 - DNA, 2448 bp, Homo sapiens
  Payload ID: 20370
  Gene Name: zinc finger, MYND-type containing 15
  Uniprot ID: Q9H091
  ENST ID: ENST00000269289
  CDS Start-End: 67-2319
gaggtatttaccttcgaaaagtggtggcggctgcagtctgggccggggccctgtgccgctgaagacatggagtttgtgtctggataccgggatgagttccttgatttcactgcccttctcttcggctggttccgaaagtttgtggcagagcgtggagctgtagggactagccttgagggccgctgccggcagctggaggcccagatcagaaggctaccccaggaccctgccctttgggtgctccatgtcctgcccaaccatagtgtgggcatcagcctggggcaaggggcagaaccaggtcctggaccaggcctggggactgcctggctcctgggagacaaccctccactccacctgcgagacctgagcccctacatcagctttgtcagcctagaggatggggaggaaggggaggaggaagaggaggaagatgaagaagaagagaagagagaggacgggggtgcaggcagcacagagaaggtggaaccagaggaggaccgggagctagcccctaccagcagggagtccccccaggaaacaaaccctccaggagagtcagaggaggctgcccgggaggcaggaggtggcaaggatggctgccgagaggacagggtggagaacgaaacaagaccccagaagaggaagggacagaggagtgaggctgcccccctgcacgtttcctgtctcttacttgtgacggatgagcatggcaccatcttgggcattgatctgctagtggatggagcccagggaaccgcaagctggggctcagggaccaaggacctggctccttgggcctatgctctcctctgtcacagcatggcctgtcccatgggctctggggatccccgaaagccccgacagcttactgtgggagatgcccggctgcatcgagagctggagagcttggtcccaaggctaggtgtgaagttagccaaaaccccaatgcggacatggggtccccggccaggcttcacctttgcttcccttcgtgctcgaacctgccatgtgtgtcacaggcacagctttgaagcgaagctgacaccttgcccccagtgtagtgctgtcttgtattgtggagaggcttgtctccgggctgactggcagcggtgcccagatgatgtgagtcaccgattttggtgcccaaggcttgcagccttcatggagcgggcaggagaactggcaaccctgccttttacctacaccgcagaggtgaccagtgaaaccttcaacaaagaggccttcctggcctctcggggcctcactcgtggctattggacccagctcagcatgctgattccaggcccgggcttctccagacacccccgaggcaacacgccatccctcagccttcttcgcggtggagacccctaccagcttctccagggagacgggactgccctgatgcctcctgtgcccccacatccaccccggggtgtttttggctcatggcaggattactacacatggcggggcctcagcttggactcccccatagccgtgcttctcacctacccgctgaccgtgtactacgtcatcacccacctggtgccccagtccttccctgagctcaacatccaaaacaaacagtcactgaagatccacgtggtggaggccgggaaggagtttgaccttgtcatggtgttttgggagcttttggtcctgctcccccatgtggccctggagctgcagtttgtaggtgatggcctgccccccgaaagcgacgagcagcattttaccctgcagagggacagcctggaggtgtctgtccggcctggttccggcatatcagcacggcccagctctggcactaaggagaaagggggccgcagggacctgcagatcaaggtgtcagcaaggccctaccacctgttccaggggcccaagcctgacctggttattgcttctccctcctctctgtctgcaggatttaactccgggtttgctctcaaggatacgtggctgaggtctctgccccggttacagtccctccgagtgccagccttcttcaccgagagcagcgagtacagctgtgtgatggacggccagaccatggcggtggccactggagggggcaccagccctccccagcccaaccccttccgctccccctttcgcctcagagcggccgacaactgcatgtcctggtactgcaatgccttcatcttccacctggtttacaagcctgctcaagggagcggggcccgcccggcgcccgggcccccacccccatccccaactccctctgctcctcctgcccccacccgaaggcgccgaggagaaaagaaacctgggcggggggcccgccggcggaaatgaatgctgataccctagtagtccccagctcccaaacactgaaaggaaaacgtgaaaacactcaaggcctagggggaggacaggttggtaaaacatgaaaaggtaaataaaattacttgtttgaaaccactg

SEQ ID NO: 204663 - DNA, 2411 bp, Homo sapiens
  Payload ID: 20370
  Gene Name: zinc finger, MYND-type containing 15
  Uniprot ID: Q9H091
  ENST ID: ENST00000433935
  CDS Start-End: 58-2286
accttcgaaaagtggtggcggctgcagtctgggccggggccctgtgccgctgaagacatggagtttgtgtctggataccgggatgagttccttgatttcactgcccttctcttcggctggttccgaaagtttgtggcagagcgtggagctgtagggactagccttgagggccgctgccggcagctggaggcccagatcagaaggctaccccaggaccctgccctttgggtgctccatgtcctgcccaaccatagtgtgggcatcagcctggggcaaggggcagaaccaggtcctggaccaggcctggggactgcctggctcctgggagacaaccctccactccacctgcgagacctgagcccctacatcagctttgtcagcctagaggatggggaggaaggggaggaggaagaggaggaagatgaagaagaagagaagagagaggacgggggtgcaggcagcacagagaaggtggaaccagaggaggaccgggagctagcccctaccagcagggagtccccccaggaaacaaaccctccaggagagtcagaggaggctgcccgggaggcaggaggtggcaaggatggctgccgagaggacagggtggagaacgaaacaagaccccagaagaggaagggacagaggagtgaggctgcccccctgcacgtttcctgtctcttacttgtgacggatgagcatggcaccatcttgggcattgatctgctagtggatggagcccagggaaccgcaagctggggctcagggaccaaggacctggctccttgggcctatgctctcctctgtcacagcatggcctgtcccatgggctctggggatccccgaaagccccgacagcttactgtgggagatgcccggctgcatcgagagctggagagcttggtcccaaggctaggtgtgaagttagccaaaaccccaatgcggacatggggtccccggccaggcttcacctttgcttcccttcgtgctcgaacctgccatgtgtgtcacaggcacagctttgaagcgaagctgacaccttgcccccagtgtagtgctgtcttgtattgtggagaggcttgtctccgggctgactggcagcggtgcccagatgatgtgagtcaccgattttggtgcccaaggcttgcagccttcatggagcgggcaggagaactggcaaccctgccttttacctacaccgcagaggtgaccagtgaaaccttcaacaaagaggccttcctggcctctcggggcctcactcgtggctattggacccagctcagcatgctgattccaggcccgggcttctccagacacccccgaggcaacacgccatccctcagccttcttcgcggtggagacccctaccagcttctccagggagacgggactgccctgatgcctcctgtgcccccacatccaccccggggtgtttttggctcatggcaggattactacacatggcggggcctcagcttggactcccccatagccgtgcttctcacctacccgctgaccgtgtactacgtcatcacccacctggtgccccagtccttccctgagctcaacatccaaaacaaacagtcactgaagatccacgtggtggaggccgggaaggagtttgaccttgtcatggtgttttgggagcttttggtcctgctcccccatgtggccctggagctgcagtttgtaggtgatggcctgccccccgaaagcgacgagcagcattttaccctgcagagggacagcctggaggtgtctgtccggcctggttccggcatatcagcacggcccagctctggcactaaggagaaagggggccgcagggacctgcagatcaaggtgtcagcaaggccctaccacctgttccaggggcccaagcctgacctggttattggatttaactccgggtttgctctcaaggatacgtggctgaggtctctgccccggttacagtccctccgagtgccagccttcttcaccgagagcagcgagtacagctgtgtgatggacggccagaccatggcggtggccactggagggggcaccagccctccccagcccaaccccttccgctccccctttcgcctcagagcggccgacaactgcatgtcctggtactgcaatgccttcatcttccacctggtttacaagcctgctcaagggagcggggcccgcccggcgcccgggcccccacccccatccccaactccctctgctcctcctgcccccacccgaaggcgccgaggagaaaagaaacctgggcggggggcccgccggcggaaatgaatgctgataccctagtagtccccagctcccaaacactgaaaggaaaacgtgaaaacactcaaggcctagggggaggacaggttggtaaaacatgaaaaggtaaataaaattacttgtttgaaacc

SEQ ID NO: 204664 - DNA, 2409 bp, Homo sapiens
  Payload ID: 20370
  Gene Name: zinc finger, MYND-type containing 15
  Uniprot ID: Q9H091
  ENST ID: ENST00000573751
  CDS Start-End: 31-2283
tctgggccggggccctgtgccgctgaagacatggagtttgtgtctggataccgggatgagttccttgatttcactgcccttctcttcggctggttccgaaagtttgtggcagagcgtggagctgtagggactagccttgagggccgctgccggcagctggaggcccagatcagaaggctaccccaggaccctgccctttgggtgctccatgtcctgcccaaccatagtgtgggcatcagcctggggcaaggggcagaaccaggtcctggaccaggcctggggactgcctggctcctgggagacaaccctccactccacctgcgagacctgagcccctacatcagctttgtcagcctagaggatggggaggaaggggaggaggaagaggaggaagatgaagaagaagagaagagagaggacgggggtgcaggcagcacagagaaggtggaaccagaggaggaccgggagctagcccctaccagcagggagtccccccaggaaacaaaccctccaggagagtcagaggaggctgcccgggaggcaggaggtggcaaggatggctgccgagaggacagggtggagaacgaaacaagaccccagaagaggaagggacagaggagtgaggctgcccccctgcacgtttcctgtctcttacttgtgacggatgagcatggcaccatcttgggcattgatctgctagtggatggagcccagggaaccgcaagctggggctcagggaccaaggacctggctccttgggcctatgctctcctctgtcacagcatggcctgtcccatgggctctggggatccccgaaagccccgacagcttactgtgggagatgcccggctgcatcgagagctggagagcttggtcccaaggctaggtgtgaagttagccaaaaccccaatgcggacatggggtccccggccaggcttcacctttgcttcccttcgtgctcgaacctgccatgtgtgtcacaggcacagctttgaagcgaagctgacaccttgcccccagtgtagtgctgtcttgtattgtggagaggcttgtctccgggctgactggcagcggtgcccagatgatgtgagtcaccgattttggtgcccaaggcttgcagccttcatggagcgggcaggagaactggcaaccctgccttttacctacaccgcagaggtgaccagtgaaaccttcaacaaagaggccttcctggcctctcggggcctcactcgtggctattggacccagctcagcatgctgattccaggcccgggcttctccagacacccccgaggcaacacgccatccctcagccttcttcgcggtggagacccctaccagcttctccagggagacgggactgccctgatgcctcctgtgcccccacatccaccccggggtgtttttggctcatggcaggattactacacatggcggggcctcagcttggactcccccatagccgtgcttctcacctacccgctgaccgtgtactacgtcatcacccacctggtgccccagtccttccctgagctcaacatccaaaacaaacagtcactgaagatccacgtggtggaggccgggaaggagtttgaccttgtcatggtgttttgggagcttttggtcctgctcccccatgtggccctggagctgcagtttgtaggtgatggcctgccccccgaaagcgacgagcagcattttaccctgcagagggacagcctggaggtgtctgtccggcctggttccggcatatcagcacggcccagctctggcactaaggagaaagggggccgcagggacctgcagatcaaggtgtcagcaaggccctaccacctgttccaggggcccaagcctgacctggttattgcttctccctcctctctgtctgcaggatttaactccgggtttgctctcaaggatacgtggctgaggtctctgccccggttacagtccctccgagtgccagccttcttcaccgagagcagcgagtacagctgtgtgatggacggccagaccatggcggtggccactggagggggcaccagccctccccagcccaaccccttccgctccccctttcgcctcagagcggccgacaactgcatgtcctggtactgcaatgccttcatcttccacctggtttacaagcctgctcaagggagcggggcccgcccggcgcccgggcccccacccccatccccaactccctctgctcctcctgcccccacccgaaggcgccgaggagaaaagaaacctgggcggggggcccgccggcggaaatgaatgctgataccctagtagtccccagctcccaaacactgaaaggaaaacgtgaaaacactcaaggcctagggggaggacaggttggtaaaacatgaaaaggtaaataaaattacttgtttgaaacca

SEQ ID NO: 204665 - DNA, 2274 bp, Homo sapiens
  Payload ID: 20370
  Gene Name: zinc finger, MYND-type containing 15
  Uniprot ID: Q9H091
  ENST ID: ENST00000592813
  CDS Start-End: 40-2151
cggctgcagtctgggccggggccctgtgccgctgaagacatggagtttgtgtctggataccgggatgagttccttgatttcactgcccttctcttcggctggttccgaaagtttgtggcagagcgtggagctgtagggactagccttgagggccgctgccggcagctggaggcccagatcagaaggctaccccaggaccctgccctttgggtgctccatgtcctgcccaaccatagtgtgggcatcagcctggggcaaggggcagaaccaggtcctggaccaggcctggggactgcctggctcctgggagacaaccctccactccacctgcgagacctgagcccctacatcagctttgtcagcctagaggatggggaggaaggggaggaggaagaggaggaagatgaagaagaagagaagagagaggacgggggtgcaggcagcacagagaaggtggaaccagaggaggaccgggagctagcccctaccagcagggagtccccccaggaaacaaaccctccaggagagtcagaggaggctgcccgggaggcaggaggtggcaaggatggctgccgagaggacagggtggagaacgaaacaagaccccagaagaggaagggacagaggagtgaggctgcccccctgcacgtttcctgtctcttacttgtgacggatgagcatggcaccatcttgggcattgatctgctagtggatggagcccagggaaccgcaagctggggctcagggaccaaggacctggctccttgggcctatgctctcctctgtcacagcatggcctgtcccatgggctctggggatccccgaaagccccgacagcttactgtgggagatgcccggctgcatcgagagctggagagcttggtcccaaggctaggtgtgaagttagccaaaaccccaatgcggacatggggtccccggccaggcttcacctttgcttcccttcgtgctcgaacctgccatgtgtgtcacaggcacagctttgaagcgaagctgacaccttgcccccagtgtagtgctgtcttgtattgtggagaggcttgtctccgggctgactggcagcggtgcccagatgatgtgagtcaccgattttggtgcccaaggcttgcagccttcatggagcgggcaggagaactggcaaccctgccttttacctacaccgcagaggtgaccagtgaaaccttcaacaaagaggccttcctggcctctcggggcctcactcgtggctattggacccagctcagcatgctgattccaggcccgggcttctccagacacccccgaggcaacacgccatccctcagccttcttcgcggtggagacccctaccagcttctccagggagacgggactgccctgatgcctcctgtgcccccacatccaccccggggtgtttttgtccctgagctcaacatccaaaacaaacagtcactgaagatccacgtggtggaggccgggaaggagtttgaccttgtcatggtgttttgggagcttttggtcctgctcccccatgtggccctggagctgcagtttgtaggtgatggcctgccccccgaaagcgacgagcagcattttaccctgcagagggacagcctggaggtgtctgtccggcctggttccggcatatcagcacggcccagctctggcactaaggagaaagggggccgcagggacctgcagatcaaggtgtcagcaaggccctaccacctgttccaggggcccaagcctgacctggttattggatttaactccgggtttgctctcaaggatacgtggctgaggtctctgccccggttacagtccctccgagtgccagccttcttcaccgagagcagcgagtacagctgtgtgatggacggccagaccatggcggtggccactggagggggcaccagccctccccagcccaaccccttccgctccccctttcgcctcagagcggccgacaactgcatgtcctggtactgcaatgccttcatcttccacctggtttacaagcctgctcaagggagcggggcccgcccggcgcccgggcccccacccccatccccaactccctctgctcctcctgcccccacccgaaggcgccgaggagaaaagaaacctgggcggggggcccgccggcggaaatgaatgctgataccctagtagtccccagctcccaaacactgaaaggaaaacgtgaaaacactcaaggcctagggggaggacaggttggtaaaacatgaaaaggtaaataaaattacttgtttgaaa

SEQ ID NO: 204666 - DNA, 1375 bp, Homo sapiens
  Payload ID: 20371
  Gene Name: zinc finger, MYND-type containing 19
  Uniprot ID: Q96E35
  ENST ID: ENST00000298585
  CDS Start-End: 228-911
cggtggcggtggcggcggcggcggcggcgcgtggcaggtccggcgggcgcgaggcggcggcggaggcccgagcccggcccagcctcgtcccgcccggagcccgcctggctgctaccccgaccccggctccggtcccgtcctgtcccggcgcgccgcggcctcgccccggcccccgctcggcgcctcccgagggagcggcgctgccggccgagagcgcaggcccggccatgaccgacttcaaattgggtatcgtgcggctcggccgggtggccgggaagaccaaatacacgctgatcgatgagcaggacatcccgctggtggagagctactcctttgaggcccgaatggaagtggatgcagatggaaatggtgctaagatatttgcctatgcctttgacaagaaccgaggaaggggctctgggagactccttcatgagctgctgtgggagcggcaccgggggggcgtggccccgggcttccaggtggtgcacctcaacgctgtgaccgtggacaatcgcctggacaacctgcaactggtgccgtggggctggcggcccaaggctgaagagacctccagcaagcagagggagcaaagcttgtattggcttgcaattcagcagctgcctacagaccctatagaagaacagtttcctgtcctaaatgtgacccggtattataatgccaacggggatgtagtggaagaggaggagaactcttgcacctactatgagtgccactaccctccctgcacagtgattgagaagcagctccgggagttcaacatctgtgggcgctgccaggtggcccggtactgcggctcccagtgccagcagaaggactggcctgcccacaagaagcactgtcgggagaggaagcgtcccttccagcatgagcttgagccagagcgatgacgggcaggggagccacacatactcacagcccccgggctctaccctgggcacagcagagacagactggtggttgaacctggaggtgccaaaaaagccagctgcgggcccaggacagctgccgtgagactcccgatgtcacaggcagtctgtgtggttacagcgcccctcagtgttcatctccagcagagacaacggaggaggctcccaccaggacggttctcattatttatatgttaatatgtttgtaaactcatgtacagttttttttgggggggaggcaatgggaagggtagaaattacaaatagaatcatttgctgtaatccttaaatggcaaacggtcaggccacgtgactaaaaactgtcctgttgtcgaagcttctcccctgggccgccgggagccccgtggagcgcggcctgcacgggagttgtgtccacaaaggcaaagtaaaggggtggaatcatc

SEQ ID NO: 204667 - DNA, 4139 bp, Homo sapiens
  Payload ID: 20372
  Gene Name: zinc finger, MYND-type containing 8
  Uniprot ID: Q9ULU4
  ENST ID: ENST00000262975
  CDS Start-End: 285-3791
cggctttacactccgatttgccggggcagccaatcggggatgagcttttattaggcggccagatcatcagccgaagtgccaaaccctttttctgtgagaactaggagcctgtcctccatgttttataagtattgacattacacagtgttaacaatgcatccacagagtcccaaatctgccagcctgttctctcttcctaactgtggaaaaatgagacggttgcttgaacatttgttggcttggctgaagaggaaataaaaacagaacaggaggtggtagagggcatggatatctctactcgctccaaagatcctggctctgcagagagaacagcccagaaaagaaagttccccagccctccacattcttccaatggccactcgccgcaggacacatcaacaagccccattaaaaagaaaaagaaacctggcttactgaacagtaacaataaggagcagtcagaactaagacatggtccgttttactatatgaagcagccactcaccacagaccctgttgatgttgtaccgcaggatggacggaatgatttctactgctgggtttgtcaccgggaaggccaagtcctttgctgtgagctctgtccccgggtttatcacgctaagtgtctgagactgacatcggaaccagagggggactggttttgtcctgaatgtgagaaaattacagtagcagaatgcatcgagacccagagtaaagccatgacaatgctcaccattgaacagttatcctacctgctcaagtttgccattcagaaaatgaaacagccagggacagatgcattccagaagcccgttccattggaacagcaccctgactatgcggaatacatcttccatccaatggacctttgtacattggaaaagaatgcgaaaaagaaaatgtatggctgcacagaagccttcctggctgatgcaaagtggattttgcacaactgcatcatttataatgggggaaatcacaaattgacgcaaatagcgaaagtagtcatcaaaatctgtgaacatgagatgaatgaaatcgaagtatgtccagaatgttatctagctgcttgccaaaaacgagataactggttttgtgagccttgtagcaatccacatcctttggtctgggccaaactgaaggggtttccattctggcctgcaaaagctctaagggataaagacgggcaggtcgatgcccgattctttggacaacatgacagggcctgggttccaataaataattgctacctcatgtctaaagaaattcctttttctgtgaaaaagactaagagcatcttcaacagtgccatgcaagagatggaggtttacgtggagaacatccgcaggaagtttggggtttttaattactctccatttaggacaccctacacacccaacagccagtatcaaatgctgctcgatcccaccaaccccagcgccggcactgccaagatagacaagcaggagaaggtcaagctcaactttgacatgacggcatcccccaagatcctgatgagcaagcctgtgctgagtgggggcacaggccgccggatttccttgtcggatatgccgcgctcccccatgagcacaaactcttctgtgcacacgggctccgacgtggagcaggatgctgagaagaaggccacgtcgagccacttcagtgcgagcgaggagtccatggacttcctggataagagcacagcttcaccagcctccaccaagacgggacaagcagggagtttatccggcagcccaaagcccttctctcctcaactgtcagctcctatcacgacgaaaacggacaaaacctccaccaccggcagcatcctgaatcttaacctggatcgaagcaaagctgagatggatttgaaggagctgagcgagtcggtccagcaacagtccacccctgttcctctcatctctcccaagcgccagattcgtagcaggttccagctgaatcttgacaagaccatagagagttgcaaagcacaattaggcataaatgaaatctcggaagatgtctatacggccgtagagcacagcgattcggaggattctgagaagtcagatagtagcgatagtgagtatatcagtgatgatgagcagaagtctaagaacgagccagaagacacagaggacaaagaaggttgtcagatggacaaagagccatctgctgttaaaaaaaagcccaagcctacaaacccagtggagattaaagaggagctgaaaagcacgtcaccagccagcgagaaggcagaccctggagcagtcaaggacaaggccagccctgagcctgagaaggacttttccgaaaaggcaaaaccttcacctcaccccataaaggataaactgaagggaaaagatgagacggattccccaacagtccatttgggcctggactctgattcagagagcgaacttgtcatagatttaggagaagaccattctgggcgggagggtcgaaaaaataagaaggaacccaaagaaccatctcccaaacaggatgttgtaggtaaaactccaccatccacgacggtgggcagccattctcccccggaaacaccggtgctcacccgctcttccgcccaaacttccgcggctggcgccacagccaccaccagcacgtcctccacggtcaccgtcacggccccggcccccgccgccacaggaagcccagtgaaaaagcagaggccgcttttaccgaaggagactgccccggccgtgcagcgggtcgtgtggaactcatcaactgtccagcagaaggagatcacacagagcccatccacgtccaccatcaccctggtgaccagcacacagtcatcgcccctggtcaccagctcggggtccatgagcacccttgtgtcctcagtcaacgctgacctgcccatcgccactgcctcagctgatgtcgccgctgatattgccaagtacactagcaaaatgatggatgcaataaaaggaacaatgacagaaatatacaacgatctttctaaaaacactactggaagcacaatagctgagattcgcaggctgaggatcgagatagagaagctccagtggctgcaccagcaagagctctccgaaatgaaacacaacttagagctgaccatggcggagatgcggcagagcctggagcaggagcgggaccggctcatcgccgaggtgaagaagcagctggagttggagaagcagcaggcggtggatgagaccaagaagaagcagtggtgcgccaactgcaagaaggaggccatcttttactgctgttggaacaccagctactgtgactacccctgccagcaagcccactggcctgagcacatgaagtcctgcacccagtcagctactgctcctcagcaggaagcggatgctgaggtgaacacagaaacactaaataagtcctcccaggggagctcctcgagcacacaatcagcaccttcagaaacggccagcgcctccaaagagaaggagacgtcagctgagaaaagcaaggagagtggctcgacccttgacctttctggctccagagagacgccctcctccattctcttaggctccaaccaaggctctgttagcaaaaggtgtgacaagcaacctgcctatgccccaaccaccacagaccaccagccgcaccccaactaccccgcccagaagtaccattcccggagtaataaatccagttggagcagcagtgatgagaagaggggatcgacacgttccgatcacaacaccagtaccagcacgaagagcctcctcccgaaagagtctcggctggacaccttctgggactagcagtgaatcgggacacaaaccacccaccccattgggagaaaaacccagacgccaggaaaagaagaaacaacaaaggcaggagaacagccactttcagacttgaaaatgacaaaaccctcagttgagcctgagcccccggcgcgggggctgctacactacaggacacccagcatcggctttgactgcagactgttcacccacacgagccctgtgcttttggtgtaaataatgtacaatttgtggatgtcattgaatctagaggactttcccctttttatatttgtattaactttaacttattaaaaaaaaaaaaagaaaaagaaaaacgatttaaaaaaaaaaaaaaaa

SEQ ID NO: 204668 - DNA, 5362 bp, Homo sapiens
  Payload ID: 20372
  Gene Name: zinc finger, MYND-type containing 8
  Uniprot ID: Q9ULU4
  ENST ID: ENST00000311275
  CDS Start-End: 255-3815
ggagtgtagaggaaataaaatcatgtctgtggctcatgacagcattccatattcagttgttgggttgtgttgttgttgttgtgtgtgtttttaataataccatgtaactgtttaaaaaaatttcctttttgatcaagtcccaaatctgccagcctgttctctcttcctaactgtggaaaaatgagacggttgcttgaacatttgttggcttggctgaagaggaaataaaaacagaacaggaggtggtagagggcatggatatctctactcgctccaaagatcctggctctgcagagagaacagcccagaaaagaaagttccccagccctccacattcttccaatggccactcgccgcaggacacatcaacaagccccattaaaaagaaaaagaaacctggcttactgaacagtaacaataaggagcagtcagaactaagacatggtccgttttactatatgaagcagccactcaccacagaccctgttgatgttgtaccgcaggatggacggaatgatttctactgctgggtttgtcaccgggaaggccaagtcctttgctgtgagctctgtccccgggtttatcacgctaagtgtctgagactgacatcggaaccagagggggactggttttgtcctgaatgtgagaaaattacagtagcagaatgcatcgagacccagagtaaagccatgacaatgctcaccattgaacagttatcctacctgctcaagtttgccattcagaaaatgaaacagccagggacagatgcattccagaagcccgttccattggaacagcaccctgactatgcggaatacatcttccatccaatggacctttgtacattggaaaagaatgcgaaaaagaaaatgtatggctgcacagaagccttcctggctgatgcaaagtggattttgcacaactgcatcatttataatgggggaaatcacaaattgacgcaaatagcgaaagtagtcatcaaaatctgtgaacatgagatgaatgaaatcgaagtatgtccagaatgttatctagctgcttgccaaaaacgagataactggttttgtgagccttgtagcaatccacatcctttggtctgggccaaactgaaggggtttccattctggcctgcaaaagctctaagggataaagacgggcaggtcgatgcccgattctttggacaacatgacagggcctgggttccaataaataattgctacctcatgtctaaagaaattcctttttctgtgaaaaagactaagagcatcttcaacagtgccatgcaagagatggaggtttacgtggagaacatccgcaggaagtttggggtttttaattactctccatttaggacaccctacacacccaacagccagtatcaaatgctgctcgatcccaccaaccccagcgccggcactgccaagatagacaagcaggagaaggtcaagctcaactttgacatgacggcatcccccaagatcctgatgagcaagcctgtgctgagtgggggcacaggccgccggatttccttgtcggatatgccgcgctcccccatgagcacaaactcttctgtgcacacgggctccgacgtggagcaggatgctgagaagaaggccacgtcgagccacttcagtgcgagcgaggagtccatggacttcctggataagagcacagcttcaccagcctccaccaagacgggacaagcagggagtttatccggcagcccaaagcccttctctcctcaactgtcagctcctatcacgacgaaaacggacaaaacctccaccaccggcagcatcctgaatcttaacctggatcgaagcaaagctgagatggatttgaaggagctgagcgagtcggtccagcaacagtccacccctgttcctctcatctctcccaagcgccagattcgtagcaggttccagctgaatcttgacaagaccatagagagttgcaaagcacaattaggcataaatgaaatctcggaagatgtctatacggccgtagagcacagcgattcggaggattctgagaagtcagatagtagcgatagtgagtatatcagtgatgatgagcagaagtctaagaacgagccagaagacacagaggacaaagaaggttgtcagatggacaaagagccatctgctgttaaaaaaaagcccaagcctacaaacccagtggagattaaagaggagctgaaaagcacgtcaccagccagcgagaaggcagaccctggagcagtcaaggacaaggccagccctgagcctgagaaggacttttccgaaaaggcaaaaccttcacctcaccccataaaggataaactgaagggaaaagatgagacggattccccaacagtccatttgggcctggactctgattcagagagcgaacttgtcatagatttaggagaagaccattctgggcgggagggtcgaaaaaataagaaggaacccaaagaaccatctcccaaacaggatgttgtaggtaaaactccaccatccacgacggtgggcagccattctcccccggaaacaccggtgctcacccgctcttccgcccaaacttccgcggctggcgccacagccaccaccagcacgtcctccacggtcaccgtcacggccccggcccccgccgccacaggaagcccagtgaaaaagcagaggccgcttttaccgaaggagactgccccggccgtgcagcgggtcgtgtggaactcatcaagtaagtttcaaacgtcctcccaaaagtggcacatgcagaagatgcagcgtcagcagcagcagcagcagcagcaaaaccagcagcagcagcctcagtcttcccaggggacgagatatcagaccagacaggctgtgaaagctgtccagcagaaggagatcacacagagcccatccacgtccaccatcaccctggtgaccagcacacagtcatcgcccctggtcaccagctcggggtccatgagcacccttgtgtcctcagtcaacgctgacctgcccatcgccactgcctcagctgatgtcgccgctgatattgccaagtacactagcaaaatgatggatgcaataaaaggaacaatgacagaaatatacaacgatctttctaaaaacactactggaagcacaatagctgagattcgcaggctgaggatcgagatagagaagctccagtggctgcaccagcaagagctctccgaaatgaaacacaacttagagctgaccatggcggagatgcggcagagcctggagcaggagcgggaccggctcatcgccgaggtgaagaagcagctggagttggagaagcagcaggcggtggatgagaccaagaagaagcagtggtgcgccaactgcaagaaggaggccatcttttactgctgttggaacaccagctactgtgactacccctgccagcaagcccactggcctgagcacatgaagtcctgcacccagtcagctactgctcctcagcaggaagcggatgctgaggtgaacacagaaacactaaataagtcctcccaggggagctcctcgagcacacaatcagcaccttcagaaacggccagcgcctccaaagagaaggagacgtcagctgagaaaagcaaggagagtggctcgacccttgacctttctggctccagagagacgccctcctccattctcttaggctccaaccaaggctctgaccattcccggagtaataaatccagttggagcagcagtgatgagaagaggggatcgacacgttccgatcacaacaccagtaccagcacgaagagcctcctcccgaaagagtctcggctggacaccttctgggactagcagtgaatcgggacacaaaccacccaccccattgggagaaaaacccagacgccaggaaaagaagaaacaacaaaggcaggagaacagccactttcagacttgaaaatgacaaaaccctcagttgagcctgagcccccggcgcgggggctgctacactacaggacacccagcatcggctttgactgcagactgttcacccacacgagccctgtgcttttggtgtaaataatgtacaatttgtggatgtcattgaatctagaggactttcccctttttatatttgtattaactttaacttattaaaaaaaaaaaaagaaaaagaaaaacgatttaaaaaaaaaaaaaaaagcaaccaaccccaacaacaaaaaagaatgttttggtattggagaagggatggtcagttagcctgtctgtcacacgacggaatggatactgggcccggggaccactttcatactcacgtcctcatccttggatacccaggggagggcgaaccgttttcgctcgtgtgtctgtacgcagcatgttgggatcgggagtttcggcacagactatcccatcaagccgttggctcctttcagctactacgttaccacgttcctaaaacgcaagctctccggaccagacggacacagggagaagctagtttctttcatgtgattgaaatgatgactctactcctaaaagggaaaaaacaatatccttgtttacagaagagaaacaaacaagccccactcagctcagtcacaggagagaacacagaaagtcttaggatcatgaactctgaaaaaaagagaaaccttatctttgctttgtggttcctttaaacacactcacacacacttggtcagagatgctgtgcttcttggaagcaaggactcaaaggcaaggtgcacgcagaggacgtttgagtctgggatgaagcatgtacgtattatttatatgatggaatttcacgtttttatgtaagcatgaaacacaggcagtatgagagaaagcaaggcccgtcatgctgtccgtacactacgtatgctgtagagccattttgtatgttgtgtaaaacaaaaagcattgatgaaaaagcaaaaggtgatgtatgtatatgagaaaattaattgtacgatatcattccagtacgttttgttgtacattttagtcttgtttactttctcttcattgttaagaggatgcgaactgtacagtttccagctagttacccatattagagaagaaataagagagtattagaagaaaacaggagagaaagaacatttgtgaattgcagttgtcaaaaaaaaaaaatagcctagctggccttatttgtgaagcataattgcttttagcatatggaagtattttttcacattttctttgtataaaatttgtattaaacttaaatatctttttgatggtggtgtttctttgtgactgagccagtagactcacactatatgcttttttgggtttgcccgttccttcccccacccccccagttttttcagatttctttacctttttttaattaaactgttttggaaaaatgc

SEQ ID NO: 204669 - DNA, 3832 bp, Homo sapiens
  Payload ID: 20372
  Gene Name: zinc finger, MYND-type containing 8
  Uniprot ID: Q9ULU4
  ENST ID: ENST00000352431
  CDS Start-End: 30-3512
ataagtattgacattacacagtgttaacaatgcatccacagagcttggctgaagaggaaataaaaacagaacaggaggtggtagagggcatggatatctctactcgctccaaagatcctggctctgcagagagaacagcccagaaaagaaagttccccagccctccacattcttccaatggccactcgccgcaggacacatcaacaagccccattaaaaagaaaaagaaacctggcttactgaacagtaacaataaggagcagtcagaactaagacatggtccgttttactatatgaagcagccactcaccacagaccctgttgatgttgtaccgcaggatggacggaatgatttctactgctgggtttgtcaccgggaaggccaagtcctttgctgtgagctctgtccccgggtttatcacgctaagtgtctgagactgacatcggaaccagagggggactggttttgtcctgaatgtgagaaaattacagtagcagaatgcatcgagacccagagtaaagccatgacaatgctcaccattgaacagttatcctacctgctcaagtttgccattcagaaaatgaaacagccagggacagatgcattccagaagcccgttccattggaacagcaccctgactatgcggaatacatcttccatccaatggacctttgtacattggaaaagaatgcgaaaaagaaaatgtatggctgcacagaagccttcctggctgatgcaaagtggattttgcacaactgcatcatttataatgggggaaatcacaaattgacgcaaatagcgaaagtagtcatcaaaatctgtgaacatgagatgaatgaaatcgaagtatgtccagaatgttatctagctgcttgccaaaaacgagataactggttttgtgagccttgtagcaatccacatcctttggtctgggccaaactgaaggggtttccattctggcctgcaaaagctctaagggataaagacgggcaggtcgatgcccgattctttggacaacatgacagggcctgggttccaataaataattgctacctcatgtctaaagaaattcctttttctgtgaaaaagactaagagcatcttcaacagtgccatgcaagagatggaggtttacgtggagaacatccgcaggaagtttggggtttttaattactctccatttaggacaccctacacacccaacagccagtatcaaatgctgctcgatcccaccaaccccagcgccggcactgccaagatagacaagcaggagaaggtcaagctcaactttgacatgacggcatcccccaagatcctgatgagcaagcctgtgctgagtgggggcacaggccgccggatttccttgtcggatatgccgcgctcccccatgagcacaaactcttctgtgcacacgggctccgacgtggagcaggatgctgagaagaaggccacgtcgagccacttcagtgcgagcgaggagtccatggacttcctggataagagcacagcttcaccagcctccaccaagacgggacaagcagggagtttatccggcagcccaaagcccttctctcctcaactgtcagctcctatcacgacgaaaacggacaaaacctccaccaccggcagcatcctgaatcttaacctggatcgaagcaaagctgagatggatttgaaggagctgagcgagtcggtccagcaacagtccacccctgttcctctcatctctcccaagcgccagattcgtagcaggttccagctgaatcttgacaagaccatagagagttgcaaagcacaattaggcataaatgaaatctcggaagatgtctatacggccgtagagcacagcgattcggaggattctgagaagtcagatagtagcgatagtgagtatatcagtgatgatgagcagaagtctaagaacgagccagaagacacagaggacaaagaaggttgtcagatggacaaagagccatctgctgttaaaaaaaagcccaagcctacaaacccagtggagattaaagaggagctgaaaagcacgtcaccagccagcgagaaggcagaccctggagcagtcaaggacaaggccagccctgagcctgagaaggacttttccgaaaaggcaaaaccttcacctcaccccataaaggataaactgaagggaaaagatgagacggattccccaacagtccatttgggcctggactctgattcagagagcgaacttgtcatagatttaggagaagaccattctgggcgggagggtcgaaaaaataagaaggaacccaaagaaccatctcccaaacaggatgttgtaggtaaaactccaccatccacgacggtgggcagccattctcccccggaaacaccggtgctcacccgctcttccgcccaaacttccgcggctggcgccacagccaccaccagcacgtcctccacggtcaccgtcacggccccggcccccgccgccacaggaagcccagtgaaaaagcagaggccgcttttaccgaaggagactgccccggccgtgcagcgggtcgtgtggaactcatcaactgtccagcagaaggagatcacacagagcccatccacgtccaccatcaccctggtgaccagcacacagtcatcgcccctggtcaccagctcggggtccatgagcacccttgtgtcctcagtcaacgctgacctgcccatcgccactgcctcagctgatgtcgccgctgatattgccaagtacactagcaaaatgatggatgcaataaaaggaacaatgacagaaatatacaacgatctttctaaaaacactactggaagcacaatagctgagattcgcaggctgaggatcgagatagagaagctccagtggctgcaccagcaagagctctccgaaatgaaacacaacttagagctgaccatggcggagatgcggcagagcctggagcaggagcgggaccggctcatcgccgaggtgaagaagcagctggagttggagaagcagcaggcggtggatgagaccaagaagaagcagtggtgcgccaactgcaagaaggaggccatcttttactgctgttggaacaccagctactgtgactacccctgccagcaagcccactggcctgagcacatgaagtcctgcacccagtcagctactgctcctcagcaggaagcggatgctgaggtgaacacagaaacactaaataagtcctcccaggggagctcctcgagcacacaatcagcaccttcagaaacggccagcgcctccaaagagaaggagacgtcagctgagaaaagcaaggagagtggctcgacccttgacctttctggctccagagagacgccctcctccattctcttaggctccaaccaaggctctgaccattcccggagtaataaatccagttggagcagcagtgatgagaagaggggatcgacacgttccgatcacaacaccagtaccagcacgaagagcctcctcccgaaagagtctcggctggacaccttctgggactagcagtgaatcgggacacaaaccacccaccccattgggagaaaaacccagacgccaggaaaagaagaaacaacaaaggcaggagaacagccactttcagacttgaaaatgacaaaaccctcagttgagcctgagcccccggcgcgggggctgctacactacaggacacccagcatcggctttgactgcagactgttcacccacacgagccctgtgcttttggtgtaaataatgtacaatttgtggatgtcattgaatctagaggactttcccctttttatatttgtattaactttaacttattaaaaaaaaaaaaagaaaaa

SEQ ID NO: 204670 - DNA, 5542 bp, Homo sapiens
  Payload ID: 20372
  Gene Name: zinc finger, MYND-type containing 8
  Uniprot ID: Q9ULU4
  ENST ID: ENST00000355972
  CDS Start-End: 351-3995
gatggctcttgctcacccgagcctcacaaagataatcgctcaggaagtgtttcagccaatccggggcggctttacactccgatttgccggggcagccaatcggggatgagcttttattaggcggccagatcatcagccgaagtgccaaaccctttttctgtgagaactaggagcctgtcctccatgttttataagtattgacattacacagtgttaacaatgcatccacagagtcccaaatctgccagcctgttctctcttcctaactgtggaaaaatgagacggttgcttgaacatttgttggcttggctgaagaggaaataaaaacagaacaggaggtggtagagggcatggatatctctactcgctccaaagatcctggctctgcagagagaacagcccagaaaagaaagttccccagccctccacattcttccaatggccactcgccgcaggacacatcaacaagccccattaaaaagaaaaagaaacctggcttactgaacagtaacaataaggagcagtcagaactaagacatggtccgttttactatatgaagcagccactcaccacagaccctgttgatgttgtaccgcaggatggacggaatgatttctactgctgggtttgtcaccgggaaggccaagtcctttgctgtgagctctgtccccgggtttatcacgctaagtgtctgagactgacatcggaaccagagggggactggttttgtcctgaatgtgagaaaattacagtagcagaatgcatcgagacccagagtaaagccatgacaatgctcaccattgaacagttatcctacctgctcaagtttgccattcagaaaatgaaacagccagggacagatgcattccagaagcccgttccattggaacagcaccctgactatgcggaatacatcttccatccaatggacctttgtacattggaaaagaatgcgaaaaagaaaatgtatggctgcacagaagccttcctggctgatgcaaagtggattttgcacaactgcatcatttataatgggggaaatcacaaattgacgcaaatagcgaaagtagtcatcaaaatctgtgaacatgagatgaatgaaatcgaagtatgtccagaatgttatctagctgcttgccaaaaacgagataactggttttgtgagccttgtagcaatccacatcctttggtctgggccaaactgaaggggtttccattctggcctgcaaaagctctaagggataaagacgggcaggtcgatgcccgattctttggacaacatgacagggcctgggttccaataaataattgctacctcatgtctaaagaaattcctttttctgtgaaaaagactaagagcatcttcaacagtgccatgcaagagatggaggtttacgtggagaacatccgcaggaagtttggggtttttaattactctccatttaggacaccctacacacccaacagccagtatcaaatgctgctcgatcccaccaaccccagcgccggcactgccaagatagacaagcaggagaaggtcaagctcaactttgacatgacggcatcccccaagatcctgatgagcaagcctgtgctgagtgggggcacaggccgccggatttccttgtcggatatgccgcgctcccccatgagcacaaactcttctgtgcacacgggctccgacgtggagcaggatgctgagaagaaggccacgtcgagccacttcagtgcgagcgaggagtccatggacttcctggataagagcacagcttcaccagcctccaccaagacgggacaagcagggagtttatccggcagcccaaagcccttctctcctcaactgtcagctcctatcacgacgaaaacggacaaaacctccaccaccggcagcatcctgaatcttaacctggatcgaagcaaagctgagatggatttgaaggagctgagcgagtcggtccagcaacagtccacccctgttcctctcatctctcccaagcgccagattcgtagcaggttccagctgaatcttgacaagaccatagagagttgcaaagcacaattaggcataaatgaaatctcggaagatgtctatacggccgtagagcacagcgattcggaggattctgagaagtcagatagtagcgatagtgagtatatcagtgatgatgagcagaagtctaagaacgagccagaagacacagaggacaaagaaggttgtcagatggacaaagagccatctgctgttaaaaaaaagcccaagcctacaaacccagtggagattaaagaggagctgaaaagcacgtcaccagccagcgagaaggcagaccctggagcagtcaaggacaaggccagccctgagcctgagaaggacttttccgaaaaggcaaaaccttcacctcaccccataaaggataaactgaagggaaaagatgagacggattccccaacagtccatttgggcctggactctgattcagagagcgaacttgtcatagatttaggagaagaccattctgggcgggagggtcgaaaaaataagaaggaacccaaagaaccatctcccaaacaggatgttgtaggtaaaactccaccatccacgacggtgggcagccattctcccccggaaacaccggtgctcacccgctcttccgcccaaacttccgcggctggcgccacagccaccaccagcacgtcctccacggtcaccgtcacggccccggcccccgccgccacaggaagcccagtgaaaaagcagaggccgcttttaccgaaggagactgccccggccgtgcagcgggtcgtgtggaactcatcaagtaagtttcaaacgtcctcccaaaagtggcacatgcagaagatgcagcgtcagcagcagcagcagcagcagcaaaaccagcagcagcagcctcagtcttcccaggggacgagatatcagaccagacaggctgtgaaagctgtccagcagaaggagatcacacagagcccatccacgtccaccatcaccctggtgaccagcacacagtcatcgcccctggtcaccagctcggggtccatgagcacccttgtgtcctcagtcaacgctgacctgcccatcgccactgcctcagctgatgtcgccgctgatattgccaagtacactagcaaaatgatggatgcaataaaaggaacaatgacagaaatatacaacgatctttctaaaaacactactggaagcacaatagctgagattcgcaggctgaggatcgagatagagaagctccagtggctgcaccagcaagagctctccgaaatgaaacacaacttagagctgaccatggcggagatgcggcagagcctggagcaggagcgggaccggctcatcgccgaggtgaagaagcagctggagttggagaagcagcaggcggtggatgagaccaagaagaagcagtggtgcgccaactgcaagaaggaggccatcttttactgctgttggaacaccagctactgtgactacccctgccagcaagcccactggcctgagcacatgaagtcctgcacccagtcagctactgctcctcagcaggaagcggatgctgaggtgaacacagaaacactaaataagtcctcccaggggagctcctcgagcacacaatcagcaccttcagaaacggccagcgcctccaaagagaaggagacgtcagctgagaaaagcaaggagagtggctcgacccttgacctttctggctccagagagacgccctcctccattctcttaggctccaaccaaggctctgttagcaaaaggtgtgacaagcaacctgcctatgccccaaccaccacagaccaccagccgcaccccaactaccccgcccagaagtaccattcccggagtaataaatccagttggagcagcagtgatgagaagaggggatcgacacgttccgatcacaacaccagtaccagcacgaagagcctcctcccgaaagagtctcggctggacaccttctgggactagcagtgaatcgggacacaaaccacccaccccattgggagaaaaacccagacgccaggaaaagaagaaacaacaaaggcaggagaacagccactttcagacttgaaaatgacaaaaccctcagttgagcctgagcccccggcgcgggggctgctacactacaggacacccagcatcggctttgactgcagactgttcacccacacgagccctgtgcttttggtgtaaataatgtacaatttgtggatgtcattgaatctagaggactttcccctttttatatttgtattaactttaacttattaaaaaaaaaaaaagaaaaagaaaaacgatttaaaaaaaaaaaaaaaagcaaccaaccccaacaacaaaaaagaatgttttggtattggagaagggatggtcagttagcctgtctgtcacacgacggaatggatactgggcccggggaccactttcatactcacgtcctcatccttggatacccaggggagggcgaaccgttttcgctcgtgtgtctgtacgcagcatgttgggatcgggagtttcggcacagactatcccatcaagccgttggctcctttcagctactacgttaccacgttcctaaaacgcaagctctccggaccagacggacacagggagaagctagtttctttcatgtgattgaaatgatgactctactcctaaaagggaaaaaacaatatccttgtttacagaagagaaacaaacaagccccactcagctcagtcacaggagagaacacagaaagtcttaggatcatgaactctgaaaaaaagagaaaccttatctttgctttgtggttcctttaaacacactcacacacacttggtcagagatgctgtgcttcttggaagcaaggactcaaaggcaaggtgcacgcagaggacgtttgagtctgggatgaagcatgtacgtattatttatatgatggaatttcacgtttttatgtaagcatgaaacacaggcagtatgagagaaagcaaggcccgtcatgctgtccgtacactacgtatgctgtagagccattttgtatgttgtgtaaaacaaaaagcattgatgaaaaagcaaaaggtgatgtatgtatatgagaaaattaattgtacgatatcattccagtacgttttgttgtacattttagtcttgtttactttctcttcattgttaagaggatgcgaactgtacagtttccagctagttacccatattagagaagaaataagagagtattagaagaaaacaggagagaaagaacatttgtgaattgcagttgtcaaaaaaaaaaaatagcctagctggccttatttgtgaagcataattgcttttagcatatggaagtattttttcacattttctttgtataaaatttgtattaaacttaaatatctttttgatggtggtgtttctttgtgactgagccagtagactcacactatatgcttttttgggtttgcccgttccttcccccacccccccagttttttcagatttctttacctttttttaattaaactgttttggaaaaatgc

SEQ ID NO: 204671 - DNA, 4991 bp, Homo sapiens
  Payload ID: 20372
  Gene Name: zinc finger, MYND-type containing 8
  Uniprot ID: Q9ULU4
  ENST ID: ENST00000360911
  CDS Start-End: 37-3444
atgttttataagtattgacattacacagtgttaacaatgcatccacagagcttggctgaagaggaaataaaaacagaacaggaggtggtagagggcatggatatctctactcgctccaaagatcctggctctgcagagagaacagcccagaaaagaaagttccccagccctccacattcttccaatggccactcgccgcaggacacatcaacaagccccattaaaaagaaaaagaaacctggcttactgaacagtaacaataaggagcaggatggacggaatgatttctactgctgggtttgtcaccgggaaggccaagtcctttgctgtgagctctgtccccgggtttatcacgctaagtgtctgagactgacatcggaaccagagggggactggttttgtcctgaatgtgagaaaattacagtagcagaatgcatcgagacccagagtaaagccatgacaatgctcaccattgaacagttatcctacctgctcaagtttgccattcagaaaatgaaacagccagggacagatgcattccagaagcccgttccattggaacagcaccctgactatgcggaatacatcttccatccaatggacctttgtacattggaaaagaatgcgaaaaagaaaatgtatggctgcacagaagccttcctggctgatgcaaagtggattttgcacaactgcatcatttataatgggggaaatcacaaattgacgcaaatagcgaaagtagtcatcaaaatctgtgaacatgagatgaatgaaatcgaagtatgtccagaatgttatctagctgcttgccaaaaacgagataactggttttgtgagccttgtagcaatccacatcctttggtctgggccaaactgaaggggtttccattctggcctgcaaaagctctaagggataaagacgggcaggtcgatgcccgattctttggacaacatgacagggcctgggttccaataaataattgctacctcatgtctaaagaaattcctttttctgtgaaaaagactaagagcatcttcaacagtgccatgcaagagatggaggtttacgtggagaacatccgcaggaagtttggggtttttaattactctccatttaggacaccctacacacccaacagccagtatcaaatgctgctcgatcccaccaaccccagcgccggcactgccaagatagacaagcaggagaaggtcaagctcaactttgacatgacggcatcccccaagatcctgatgagcaagcctgtgctgagtgggggcacaggccgccggatttccttgtcggatatgccgcgctcccccatgagcacaaactcttctgtgcacacgggctccgacgtggagcaggatgctgagaagaaggccacgtcgagccacttcagtgcgagcgaggagtccatggacttcctggataagagcacagcttcaccagcctccaccaagacgggacaagcagggagtttatccggcagcccaaagcccttctctcctcaactgtcagctcctatcacgacgaaaacggacaaaacctccaccaccggcagcatcctgaatcttaacctggatcgaagcaaagctgagatggatttgaaggagctgagcgagtcggtccagcaacagtccacccctgttcctctcatctctcccaagcgccagattcgtagcaggttccagctgaatcttgacaagaccatagagagttgcaaagcacaattaggcataaatgaaatctcggaagatgtctatacggccgtagagcacagcgattcggaggattctgagaagtcagatagtagcgatagtgagtatatcagtgatgatgagcagaagtctaagaacgagccagaagacacagaggacaaagaaggttgtcagatggacaaagagccatctgctgttaaaaaaaagcccaagcctacaaacccagtggagattaaagaggagctgaaaagcacgtcaccagccagcgagaaggcagaccctggagcagtcaaggacaaggccagccctgagcctgagaaggacttttccgaaaaggcaaaaccttcacctcaccccataaaggataaactgaagggaaaagatgagacggattccccaacagtccatttgggcctggactctgattcagagagcgaacttgtcatagatttaggagaagaccattctgggcgggagggtcgaaaaaataagaaggaacccaaagaaccatctcccaaacaggatgttgtaggtaaaactccaccatccacgacggtgggcagccattctcccccggaaacaccggtgctcacccgctcttccgcccaaacttccgcggctggcgccacagccaccaccagcacgtcctccacggtcaccgtcacggccccggcccccgccgccacaggaagcccagtgaaaaagcagaggccgcttttaccgaaggagactgccccggccgtgcagcgggtcgtgtggaactcatcaactgtccagcagaaggagatcacacagagcccatccacgtccaccatcaccctggtgaccagcacacagtcatcgcccctggtcaccagctcggggtccatgagcacccttgtgtcctcagtcaacgctgacctgcccatcgccactgcctcagctgatgtcgccgctgatattgccaagtacactagcaaaatgatggatgcaataaaaggaacaatgacagaaatatacaacgatctttctaaaaacactactggaagcacaatagctgagattcgcaggctgaggatcgagatagagaagctccagtggctgcaccagcaagagctctccgaaatgaaacacaacttagagctgaccatggcggagatgcggcagagcctggagcaggagcgggaccggctcatcgccgaggtgaagaagcagctggagttggagaagcagcaggcggtggatgagaccaagaagaagcagtggtgcgccaactgcaagaaggaggccatcttttactgctgttggaacaccagctactgtgactacccctgccagcaagcccactggcctgagcacatgaagtcctgcacccagtcagctactgctcctcagcaggaagcggatgctgaggtgaacacagaaacactaaataagtcctcccaggggagctcctcgagcacacaatcagcaccttcagaaacggccagcgcctccaaagagaaggagacgtcagctgagaaaagcaaggagagtggctcgacccttgacctttctggctccagagagacgccctcctccattctcttaggctccaaccaaggctctgaccattcccggagtaataaatccagttggagcagcagtgatgagaagaggggatcgacacgttccgatcacaacaccagtaccagcacgaagagcctcctcccgaaagagtctcggctggacaccttctgggactagcagtgaatcgggacacaaaccacccaccccattgggagaaaaacccagacgccaggaaaagaagaaacaacaaaggcaggagaacagccactttcagacttgaaaatgacaaaaccctcagttgagcctgagcccccggcgcgggggctgctacactacaggacacccagcatcggctttgactgcagactgttcacccacacgagccctgtgcttttggtgtaaataatgtacaatttgtggatgtcattgaatctagaggactttcccctttttatatttgtattaactttaacttattaaaaaaaaaaaaagaaaaagaaaaacgatttaaaaaaaaaaaaaaaagcaaccaaccccaacaacaaaaaagaatgttttggtattggagaagggatggtcagttagcctgtctgtcacacgacggaatggatactgggcccggggaccactttcatactcacgtcctcatccttggatacccaggggagggcgaaccgttttcgctcgtgtgtctgtacgcagcatgttgggatcgggagtttcggcacagactatcccatcaagccgttggctcctttcagctactacgttaccacgttcctaaaacgcaagctctccggaccagacggacacagggagaagctagtttctttcatgtgattgaaatgatgactctactcctaaaagggaaaaaacaatatccttgtttacagaagagaaacaaacaagccccactcagctcagtcacaggagagaacacagaaagtcttaggatcatgaactctgaaaaaaagagaaaccttatctttgctttgtggttcctttaaacacactcacacacacttggtcagagatgctgtgcttcttggaagcaaggactcaaaggcaaggtgcacgcagaggacgtttgagtctgggatgaagcatgtacgtattatttatatgatggaatttcacgtttttatgtaagcatgaaacacaggcagtatgagagaaagcaaggcccgtcatgctgtccgtacactacgtatgctgtagagccattttgtatgttgtgtaaaacaaaaagcattgatgaaaaagcaaaaggtgatgtatgtatatgagaaaattaattgtacgatatcattccagtacgttttgttgtacattttagtcttgtttactttctcttcattgttaagaggatgcgaactgtacagtttccagctagttacccatattagagaagaaataagagagtattagaagaaaacaggagagaaagaacatttgtgaattgcagttgtcaaaaaaaaaaaatagcctagctggccttatttgtgaagcataattgcttttagcatatggaagtattttttcacattttctttgtataaaatttgtattaaacttaaatatctttttgatggtggtgtttctttgtgactgagccagtagactcacactatatgcttttttgggtttgcccgttccttcccccacccccccagttttttcagatttctttacctttttttaattaaactgttttggaaaaatgc

SEQ ID NO: 204672 - DNA, 5144 bp, Homo sapiens
  Payload ID: 20372
  Gene Name: zinc finger, MYND-type containing 8
  Uniprot ID: Q9ULU4
  ENST ID: ENST00000372023
  CDS Start-End: 280-3597
gatggctcttgctcacccgagcctcacaaagataatcgctcaggaagtgtttcagccaatccggggcggctttacactccgatttgccggggcagccaatcggggatgagcttttattaggcggccagatcatcagccgaagtgccaaaccctttttctgtgagaactaggagcctgtcctccatgttttataagtattgacattacacagtgttaacaatgcatccacagagcttggctgaagaggaaataaaaacagaacaggaggtggtagagggcatggatatctctactcgctccaaagatcctggctctgcagagagaacagcccagaaaagaaagttccccagccctccacattcttccaatggccactcgccgcaggacacatcaacaagccccattaaaaagaaaaagaaacctggcttactgaacagtaacaataaggagcaggatggacggaatgatttctactgctgggtttgtcaccgggaaggccaagtcctttgctgtgagctctgtccccgggtttatcacgctaagtgtctgagactgacatcggaaccagagggggactggttttgtcctgaatgtgagacagatgcattccagaagcccgttccattggaacagcaccctgactatgcggaatacatcttccatccaatggacctttgtacattggaaaagaatgcgaaaaagaaaatgtatggctgcacagaagccttcctggctgatgcaaagtggattttgcacaactgcatcatttataatgggggaaatcacaaattgacgcaaatagcgaaagtagtcatcaaaatctgtgaacatgagatgaatgaaatcgaagtatgtccagaatgttatctagctgcttgccaaaaacgagataactggttttgtgagccttgtagcaatccacatcctttggtctgggccaaactgaaggggtttccattctggcctgcaaaagctctaagggataaagacgggcaggtcgatgcccgattctttggacaacatgacagggcctgggttccaataaataattgctacctcatgtctaaagaaattcctttttctgtgaaaaagactaagagcatcttcaacagtgccatgcaagagatggaggtttacgtggagaacatccgcaggaagtttggggtttttaattactctccatttaggacaccctacacacccaacagccagtatcaaatgctgctcgatcccaccaaccccagcgccggcactgccaagatagacaagcaggagaaggtcaagctcaactttgacatgacggcatcccccaagatcctgatgagcaagcctgtgctgagtgggggcacaggccgccggatttccttgtcggatatgccgcgctcccccatgagcacaaactcttctgtgcacacgggctccgacgtggagcaggatgctgagaagaaggccacgtcgagccacttcagtgcgagcgaggagtccatggacttcctggataagagcacagcttcaccagcctccaccaagacgggacaagcagggagtttatccggcagcccaaagcccttctctcctcaactgtcagctcctatcacgacgaaaacggacaaaacctccaccaccggcagcatcctgaatcttaacctggatcgaagcaaagctgagatggatttgaaggagctgagcgagtcggtccagcaacagtccacccctgttcctctcatctctcccaagcgccagattcgtagcaggttccagctgaatcttgacaagaccatagagagttgcaaagcacaattaggcataaatgaaatctcggaagatgtctatacggccgtagagcacagcgattcggaggattctgagaagtcagatagtagcgatagtgagtatatcagtgatgatgagcagaagtctaagaacgagccagaagacacagaggacaaagaaggttgtcagatggacaaagagccatctgctgttaaaaaaaagcccaagcctacaaacccagtggagattaaagaggagctgaaaagcacgtcaccagccagcgagaaggcagaccctggagcagtcaaggacaaggccagccctgagcctgagaaggacttttccgaaaaggcaaaaccttcacctcaccccataaaggataaactgaagggaaaagatgagacggattccccaacagtccatttgggcctggactctgattcagagagcgaacttgtcatagatttaggagaagaccattctgggcgggagggtcgaaaaaataagaaggaacccaaagaaccatctcccaaacaggatgttgtaggtaaaactccaccatccacgacggtgggcagccattctcccccggaaacaccggtgctcacccgctcttccgcccaaacttccgcggctggcgccacagccaccaccagcacgtcctccacggtcaccgtcacggccccggcccccgccgccacaggaagcccagtgaaaaagcagaggccgcttttaccgaaggagactgccccggccgtgcagcgggtcgtgtggaactcatcaactgtccagcagaaggagatcacacagagcccatccacgtccaccatcaccctggtgaccagcacacagtcatcgcccctggtcaccagctcggggtccatgagcacccttgtgtcctcagtcaacgctgacctgcccatcgccactgcctcagctgatgtcgccgctgatattgccaagtacactagcaaaatgatggatgcaataaaaggaacaatgacagaaatatacaacgatctttctaaaaacactactggaagcacaatagctgagattcgcaggctgaggatcgagatagagaagctccagtggctgcaccagcaagagctctccgaaatgaaacacaacttagagctgaccatggcggagatgcggcagagcctggagcaggagcgggaccggctcatcgccgaggtgaagaagcagctggagttggagaagcagcaggcggtggatgagaccaagaagaagcagtggtgcgccaactgcaagaaggaggccatcttttactgctgttggaacaccagctactgtgactacccctgccagcaagcccactggcctgagcacatgaagtcctgcacccagtcagctactgctcctcagcaggaagcggatgctgaggtgaacacagaaacactaaataagtcctcccaggggagctcctcgagcacacaatcagcaccttcagaaacggccagcgcctccaaagagaaggagacgtcagctgagaaaagcaaggagagtggctcgacccttgacctttctggctccagagagacgccctcctccattctcttaggctccaaccaaggctctgttagcaaaaggtgtgacaagcaacctgcctatgccccaaccaccacagaccaccagccgcaccccaactaccccgcccagaagtaccattcccggagtaataaatccagttggagcagcagtgatgagaagaggggatcgacacgttccgatcacaacaccagtaccagcacgaagagcctcctcccgaaagagtctcggctggacaccttctgggactagcagtgaatcgggacacaaaccacccaccccattgggagaaaaacccagacgccaggaaaagaagaaacaacaaaggcaggagaacagccactttcagacttgaaaatgacaaaaccctcagttgagcctgagcccccggcgcgggggctgctacactacaggacacccagcatcggctttgactgcagactgttcacccacacgagccctgtgcttttggtgtaaataatgtacaatttgtggatgtcattgaatctagaggactttcccctttttatatttgtattaactttaacttattaaaaaaaaaaaaagaaaaagaaaaacgatttaaaaaaaaaaaaaaaagcaaccaaccccaacaacaaaaaagaatgttttggtattggagaagggatggtcagttagcctgtctgtcacacgacggaatggatactgggcccggggaccactttcatactcacgtcctcatccttggatacccaggggagggcgaaccgttttcgctcgtgtgtctgtacgcagcatgttgggatcgggagtttcggcacagactatcccatcaagccgttggctcctttcagctactacgttaccacgttcctaaaacgcaagctctccggaccagacggacacagggagaagctagtttctttcatgtgattgaaatgatgactctactcctaaaagggaaaaaacaatatccttgtttacagaagagaaacaaacaagccccactcagctcagtcacaggagagaacacagaaagtcttaggatcatgaactctgaaaaaaagagaaaccttatctttgctttgtggttcctttaaacacactcacacacacttggtcagagatgctgtgcttcttggaagcaaggactcaaaggcaaggtgcacgcagaggacgtttgagtctgggatgaagcatgtacgtattatttatatgatggaatttcacgtttttatgtaagcatgaaacacaggcagtatgagagaaagcaaggcccgtcatgctgtccgtacactacgtatgctgtagagccattttgtatgttgtgtaaaacaaaaagcattgatgaaaaagcaaaaggtgatgtatgtatatgagaaaattaattgtacgatatcattccagtacgttttgttgtacattttagtcttgtttactttctcttcattgttaagaggatgcgaactgtacagtttccagctagttacccatattagagaagaaataagagagtattagaagaaaacaggagagaaagaacatttgtgaattgcagttgtcaaaaaaaaaaaatagcctagctggccttatttgtgaagcataattgcttttagcatatggaagtattttttcacattttctttgtataaaatttgtattaaacttaaatatctttttgatggtggtgtttctttgtgactgagccagtagactcacactatatgcttttttgggtttgcccgttccttcccccacccccccagttttttcagatttctttacctttttttaattaaactgttttggaaaaatgc

SEQ ID NO: 204673 - DNA, 5511 bp, Homo sapiens
  Payload ID: 20372
  Gene Name: zinc finger, MYND-type containing 8
  Uniprot ID: Q9ULU4
  ENST ID: ENST00000396281
  CDS Start-End: 404-3964
gatggctcttgctcacccgagcctcacaaagataatcgctcaggaagtgtttcagccaatccggggcggctttacactccgatttgccggggcagccaatcggggatgagcttttattaggcggccagatcatcagccgaagtgccaaaccctttttctgtgagaactaggagcctgtcctccatgttttataagtattgacattacacagtgttaacaatgcatccacagagtcccaaatctgccagcctgttctctcttcctaactgtggaaaaatgagacggttgcttgaacatttgttggcagcattcctgcctgaagtattcagctcctctaggctgttacaagccaaataatggttcccttgaatgcagccttcctccatgatcaatacacctttgaatgttttcatcgctgcagaaatccttcaacttggctgaagaggaaataaaaacagaacaggaggtggtagagggcatggatatctctactcgctccaaagatcctggctctgcagagagaacagcccagaaaagaaagttccccagccctccacattcttccaatggccactcgccgcaggacacatcaacaagccccattaaaaagaaaaagaaacctggcttactgaacagtaacaataaggagcaggatggacggaatgatttctactgctgggtttgtcaccgggaaggccaagtcctttgctgtgagctctgtccccgggtttatcacgctaagtgtctgagactgacatcggaaccagagggggactggttttgtcctgaatgtgagaaaattacagtagcagaatgcatcgagacccagagtaaagccatgacaatgctcaccattgaacagttatcctacctgctcaagtttgccattcagaaaatgaaacagccagggacagatgcattccagaagcccgttccattggaacagcaccctgactatgcggaatacatcttccatccaatggacctttgtacattggaaaagaatgcgaaaaagaaaatgtatggctgcacagaagccttcctggctgatgcaaagtggattttgcacaactgcatcatttataatgggggaaatcacaaattgacgcaaatagcgaaagtagtcatcaaaatctgtgaacatgagatgaatgaaatcgaagtatgtccagaatgttatctagctgcttgccaaaaacgagataactggttttgtgagccttgtagcaatccacatcctttggtctgggccaaactgaaggggtttccattctggcctgcaaaagctctaagggataaagacgggcaggtcgatgcccgattctttggacaacatgacagggcctgggttccaataaataattgctacctcatgtctaaagaaattcctttttctgtgaaaaagactaagagcatcttcaacagtgccatgcaagagatggaggtttacgtggagaacatccgcaggaagtttggggtttttaattactctccatttaggacaccctacacacccaacagccagtatcaaatgctgctcgatcccaccaaccccagcgccggcactgccaagatagacaagcaggagaaggtcaagctcaactttgacatgacggcatcccccaagatcctgatgagcaagcctgtgctgagtgggggcacaggccgccggatttccttgtcggatatgccgcgctcccccatgagcacaaactcttctgtgcacacgggctccgacgtggagcaggatgctgagaagaaggccacgtcgagccacttcagtgcgagcgaggagtccatggacttcctggataagagcacagcttcaccagcctccaccaagacgggacaagcagggagtttatccggcagcccaaagcccttctctcctcaactgtcagctcctatcacgacgaaaacggacaaaacctccaccaccggcagcatcctgaatcttaacctggatcgaagcaaagctgagatggatttgaaggagctgagcgagtcggtccagcaacagtccacccctgttcctctcatctctcccaagcgccagattcgtagcaggttccagctgaatcttgacaagaccatagagagttgcaaagcacaattaggcataaatgaaatctcggaagatgtctatacggccgtagagcacagcgattcggaggattctgagaagtcagatagtagcgatagtgagtatatcagtgatgatgagcagaagtctaagaacgagccagaagacacagaggacaaagaaggttgtcagatggacaaagagccatctgctgttaaaaaaaagcccaagcctacaaacccagtggagattaaagaggagctgaaaagcacgtcaccagccagcgagaaggcagaccctggagcagtcaaggacaaggccagccctgagcctgagaaggacttttccgaaaaggcaaaaccttcacctcaccccataaaggataaactgaagggaaaagatgagacggattccccaacagtccatttgggcctggactctgattcagagagcgaacttgtcatagatttaggagaagaccattctgggcgggagggtcgaaaaaataagaaggaacccaaagaaccatctcccaaacaggatgttgtaggtaaaactccaccatccacgacggtgggcagccattctcccccggaaacaccggtgctcacccgctcttccgcccaaacttccgcggctggcgccacagccaccaccagcacgtcctccacggtcaccgtcacggccccggcccccgccgccacaggaagcccagtgaaaaagcagaggccgcttttaccgaaggagactgccccggccgtgcagcgggtcgtgtggaactcatcaagtaagtttcaaacgtcctcccaaaagtggcacatgcagaagatgcagcgtcagcagcagcagcagcagcagcaaaaccagcagcagcagcctcagtcttcccaggggacgagatatcagaccagacaggctgtgaaagctgtccagcagaaggagatcacacagagcccatccacgtccaccatcaccctggtgaccagcacacagtcatcgcccctggtcaccagctcggggtccatgagcacccttgtgtcctcagtcaacgctgacctgcccatcgccactgcctcagctgatgtcgccgctgatattgccaagtacactagcaaaatgatggatgcaataaaaggaacaatgacagaaatatacaacgatctttctaaaaacactactggaagcacaatagctgagattcgcaggctgaggatcgagatagagaagctccagtggctgcaccagcaagagctctccgaaatgaaacacaacttagagctgaccatggcggagatgcggcagagcctggagcaggagcgggaccggctcatcgccgaggtgaagaagcagctggagttggagaagcagcaggcggtggatgagaccaagaagaagcagtggtgcgccaactgcaagaaggaggccatcttttactgctgttggaacaccagctactgtgactacccctgccagcaagcccactggcctgagcacatgaagtcctgcacccagtcagctactgctcctcagcaggaagcggatgctgaggtgaacacagaaacactaaataagtcctcccaggggagctcctcgagcacacaatcagcaccttcagaaacggccagcgcctccaaagagaaggagacgtcagctgagaaaagcaaggagagtggctcgacccttgacctttctggctccagagagacgccctcctccattctcttaggctccaaccaaggctctgaccattcccggagtaataaatccagttggagcagcagtgatgagaagaggggatcgacacgttccgatcacaacaccagtaccagcacgaagagcctcctcccgaaagagtctcggctggacaccttctgggactagcagtgaatcgggacacaaaccacccaccccattgggagaaaaacccagacgccaggaaaagaagaaacaacaaaggcaggagaacagccactttcagacttgaaaatgacaaaaccctcagttgagcctgagcccccggcgcgggggctgctacactacaggacacccagcatcggctttgactgcagactgttcacccacacgagccctgtgcttttggtgtaaataatgtacaatttgtggatgtcattgaatctagaggactttcccctttttatatttgtattaactttaacttattaaaaaaaaaaaaagaaaaagaaaaacgatttaaaaaaaaaaaaaaaagcaaccaaccccaacaacaaaaaagaatgttttggtattggagaagggatggtcagttagcctgtctgtcacacgacggaatggatactgggcccggggaccactttcatactcacgtcctcatccttggatacccaggggagggcgaaccgttttcgctcgtgtgtctgtacgcagcatgttgggatcgggagtttcggcacagactatcccatcaagccgttggctcctttcagctactacgttaccacgttcctaaaacgcaagctctccggaccagacggacacagggagaagctagtttctttcatgtgattgaaatgatgactctactcctaaaagggaaaaaacaatatccttgtttacagaagagaaacaaacaagccccactcagctcagtcacaggagagaacacagaaagtcttaggatcatgaactctgaaaaaaagagaaaccttatctttgctttgtggttcctttaaacacactcacacacacttggtcagagatgctgtgcttcttggaagcaaggactcaaaggcaaggtgcacgcagaggacgtttgagtctgggatgaagcatgtacgtattatttatatgatggaatttcacgtttttatgtaagcatgaaacacaggcagtatgagagaaagcaaggcccgtcatgctgtccgtacactacgtatgctgtagagccattttgtatgttgtgtaaaacaaaaagcattgatgaaaaagcaaaaggtgatgtatgtatatgagaaaattaattgtacgatatcattccagtacgttttgttgtacattttagtcttgtttactttctcttcattgttaagaggatgcgaactgtacagtttccagctagttacccatattagagaagaaataagagagtattagaagaaaacaggagagaaagaacatttgtgaattgcagttgtcaaaaaaaaaaaatagcctagctggccttatttgtgaagcataattgcttttagcatatggaagtattttttcacattttctttgtataaaatttgtattaaacttaaatatctttttgatggtggtgtttctttgtgactgagccagtagactcacactatatgcttttttgggtttgcccgttccttcccccacccccccagttttttcagatttctttacctttttttaattaaactgttttggaaaaatgc

SEQ ID NO: 204674 - DNA, 3729 bp, Homo sapiens
  Payload ID: 20372
  Gene Name: zinc finger, MYND-type containing 8
  Uniprot ID: Q9ULU4
  ENST ID: ENST00000458360
  CDS Start-End: 51-3215
ggagcctgtcctccatgttttataagtattgacattacacagtgttaacaatgcatccacagagcttggctgaagaggaaataaaaacagaacaggaggtggtagagggcatggatatctctactcgctccaaagatcctggctctgcagagagaacagcccagaaaagaaagttccccagccctccacattcttccaatggccactcgccgcaggacacatcaacaagccccattaaaaagaaaaagaaacctggcttactgaacagtaacaataaggagcaggatggacggaatgatttctactgctgggtttgtcaccgggaaggccaagtcctttgctgtgagctctgtccccgggtttatcacgctaagtgtctgagactgacatcggaaccagagggggactggttttgtcctgaatgtgagaaaattacagtagcagaatgcatcgagacccagagtaaagccatgacaatgctcaccattgaacagttatcctacctgctcaagtttgccattcagaaaatgaaacagccagggacagatgcattccagaagcccgttccattggaacagcaccctgactatgcggaatacatcttccatccaatggacctttgtacattggaaaagaatgcgaaaaagaaaatgtatggctgcacagaagccttcctggctgatgcaaagtggattttgcacaactgcatcatttataatgggggaaatcacaaattgacgcaaatagcgaaagtagtcatcaaaatctgtgaacatgagatgaatgaaatcgaagtatgtccagaatgttatctagctgcttgccaaaaacgagataactggttttgtgagccttgtagcaatccacatcctttggtctgggccaaactgaaggggtttccattctggcctgcaaaagctctaagggataaagacgggcaggtcgatgcccgattctttggacaacatgacagggcctgggttccaataaataattgctacctcatgtctaaagaaattcctttttctgtgaaaaagactaagagcatcttcaacagtgccatgcaagagatggaggtttacgtggagaacatccgcaggaagtttggggtttttaattactctccatttaggacaccctacacacccaacagccagtatcaaatgctgctcgatcccaccaaccccagcgccggcactgccaagatagacaagcaggagaaggtcaagctcaactttgacatgacggcatcccccaagatcctgatgagcaagcctgtgctgagtgggggcacaggccgccggatttccttgtcggatatgccgcgctcccccatgagcacaaactcttctgtgcacacgggctccgacgtggagcaggatgctgagaagaaggccacgtcgagccacttcagtgcgagcgaggagtccatggacttcctggataagagcacagcttcaccagcctccaccaagacgggacaagcagggagtttatccggcagcccaaagcccttctctcctcaactgtcagctcctatcacgacgaaaacggacaaaacctccaccaccggcagcatcctgaatcttaacctggatcgaagcaaagctgagatggatttgaaggagctgagcgagtcggtccagcaacagtccacccctgttcctctcatctctcccaagcgccagattcgtagcaggttccagctgaatcttgacaagaccatagagagttgcaaagcacaattaggcataaatgaaatctcggaagatgtctatacggccgtagagcacagcgattcggaggattctgagaagtcagatagtagcgatagtgagtatatcagtgatgatgagcagaagtctaagaacgagccagaagacacagaggacaaagaaggttgtcagatggacaaagagccatctgctgttaaaaaaaagcccaagcctacaaacccagtggagattaaagaggagctgaaaagcacgtcaccagccagcgagaaggcagaccctggagcagtcaaggacaaggccagccctgagcctgagaaggacttttccgaaaaggcaaaaccttcacctcaccccataaaggataaactgaagggaaaagatgagacggattccccaacagtccatttgggcctggactctgattcagagagcgaacttgtcatagatttaggagaagaccattctgggcgggagggtcgaaaaaataagaaggaacccaaagaaccatctcccaaacaggatgctgtccagcagaaggagatcacacagagcccatccacgtccaccatcaccctggtgaccagcacacagtcatcgcccctggtcaccagctcggggtccatgagcacccttgtgtcctcagtcaacgctgacctgcccatcgccactgcctcagctgatgtcgccgctgatattgccaagtacactagcaaaatgatggatgcaataaaaggaacaatgacagaaatatacaacgatctttctaaaaacactactggaagcacaatagctgagattcgcaggctgaggatcgagatagagaagctccagtggctgcaccagcaagagctctccgaaatgaaacacaacttagagctgaccatggcggagatgcggcagagcctggagcaggagcgggaccggctcatcgccgaggtgaagaagcagctggagttggagaagcagcaggcggtggatgagaccaagaagaagcagtggtgcgccaactgcaagaaggaggccatcttttactgctgttggaacaccagctactgtgactacccctgccagcaagcccactggcctgagcacatgaagtcctgcacccagtcagctactgctcctcagcaggaagcggatgctgaggtgaacacagaaacactaaataagtcctcccaggggagctcctcgagcacacaatcagcaccttcagaaacggccagcgcctccaaagagaaggagacgtcagctgagaaaagcaaggagagtggctcgacccttgacctttctggctccagagagacgccctcctccattctcttaggctccaaccaaggctctgaccattcccggagtaataaatccagttggagcagcagtgatgagaagaggggatcgacacgttccgatcacaacaccagtaccagcacgaagagcctcctcccgaaagagtctcggctggacaccttctgggactagcagtgaatcgggacacaaaccacccaccccattgggagaaaaacccagacgccaggaaaagaagaaacaacaaaggcaggagaacagccactttcagacttgaaaatgacaaaaccctcagttgagcctgagcccccggcgcgggggctgctacactacaggacacccagcatcggctttgactgcagactgttcacccacacgagccctgtgcttttggtgtaaataatgtacaatttgtggatgtcattgaatctagaggactttcccctttttatatttgtattaactttaacttattaaaaaaaaaaaaagaaaaagaaaaacgatttaaaaaaaaaaaaaaaagcaaccaaccccaacaacaaaaaagaatgttttggtattggagaagggatggtcagttagcctgtctgtcacacgacggaatggatactgggcccggggaccactttcatactcacgtcctcatccttggatacccaggggagggcgaaccgttttcgctcgtgtg

SEQ ID NO: 204675 - DNA, 175 bp, Homo sapiens
  Payload ID: 20372
  Gene Name: zinc finger, MYND-type containing 8
  ENST ID: ENST00000441977
  CDS Start-End: 103-175
atcaggtgtgggtttcctcccccagccctggataaggatgagggaatgtctttaagcttggctgaagaggaaataaaaacagaacaggaggtggtagagggcatggatatctctactcgctccaaagatcctggctctgcagagagaacagcccagaaaagaaagttccccagcc

SEQ ID NO: 204676 - DNA, 341 bp, Homo sapiens
  Payload ID: 20372
  Gene Name: zinc finger, MYND-type containing 8
  ENST ID: ENST00000446894
  CDS Start-End: 215-341
tttaggaaggtggctttgaaactcgcagggctgcttaaacaagagctacagctattgaacaaactgctaccattttagcttcaacacaggaatgaggcagtgttgccagacgccattttaagaatcctgcataaatagcttagctaccgatgactctgcctgttttagcttggctgaagaggaaataaaaacagaacaggaggtggtagagggcatggatatctctactcgctccaaagatcctggctctgcagagagaacagcccagaaaagaaagttccccagccctccacattcttccaatggccactcgccgcaggacacatcaacaagccccatta

SEQ ID NO: 204677 - DNA, 5471 bp, Homo sapiens
  Payload ID: 20372
  Gene Name: zinc finger, MYND-type containing 8
  Uniprot ID: Q9ULU4
  ENST ID: ENST00000446994
  CDS Start-End: 280-3924
gatggctcttgctcacccgagcctcacaaagataatcgctcaggaagtgtttcagccaatccggggcggctttacactccgatttgccggggcagccaatcggggatgagcttttattaggcggccagatcatcagccgaagtgccaaaccctttttctgtgagaactaggagcctgtcctccatgttttataagtattgacattacacagtgttaacaatgcatccacagagcttggctgaagaggaaataaaaacagaacaggaggtggtagagggcatggatatctctactcgctccaaagatcctggctctgcagagagaacagcccagaaaagaaagttccccagccctccacattcttccaatggccactcgccgcaggacacatcaacaagccccattaaaaagaaaaagaaacctggcttactgaacagtaacaataaggagcagtcagaactaagacatggtccgttttactatatgaagcagccactcaccacagaccctgttgatgttgtaccgcaggatggacggaatgatttctactgctgggtttgtcaccgggaaggccaagtcctttgctgtgagctctgtccccgggtttatcacgctaagtgtctgagactgacatcggaaccagagggggactggttttgtcctgaatgtgagaaaattacagtagcagaatgcatcgagacccagagtaaagccatgacaatgctcaccattgaacagttatcctacctgctcaagtttgccattcagaaaatgaaacagccagggacagatgcattccagaagcccgttccattggaacagcaccctgactatgcggaatacatcttccatccaatggacctttgtacattggaaaagaatgcgaaaaagaaaatgtatggctgcacagaagccttcctggctgatgcaaagtggattttgcacaactgcatcatttataatgggggaaatcacaaattgacgcaaatagcgaaagtagtcatcaaaatctgtgaacatgagatgaatgaaatcgaagtatgtccagaatgttatctagctgcttgccaaaaacgagataactggttttgtgagccttgtagcaatccacatcctttggtctgggccaaactgaaggggtttccattctggcctgcaaaagctctaagggataaagacgggcaggtcgatgcccgattctttggacaacatgacagggcctgggttccaataaataattgctacctcatgtctaaagaaattcctttttctgtgaaaaagactaagagcatcttcaacagtgccatgcaagagatggaggtttacgtggagaacatccgcaggaagtttggggtttttaattactctccatttaggacaccctacacacccaacagccagtatcaaatgctgctcgatcccaccaaccccagcgccggcactgccaagatagacaagcaggagaaggtcaagctcaactttgacatgacggcatcccccaagatcctgatgagcaagcctgtgctgagtgggggcacaggccgccggatttccttgtcggatatgccgcgctcccccatgagcacaaactcttctgtgcacacgggctccgacgtggagcaggatgctgagaagaaggccacgtcgagccacttcagtgcgagcgaggagtccatggacttcctggataagagcacagcttcaccagcctccaccaagacgggacaagcagggagtttatccggcagcccaaagcccttctctcctcaactgtcagctcctatcacgacgaaaacggacaaaacctccaccaccggcagcatcctgaatcttaacctggatcgaagcaaagctgagatggatttgaaggagctgagcgagtcggtccagcaacagtccacccctgttcctctcatctctcccaagcgccagattcgtagcaggttccagctgaatcttgacaagaccatagagagttgcaaagcacaattaggcataaatgaaatctcggaagatgtctatacggccgtagagcacagcgattcggaggattctgagaagtcagatagtagcgatagtgagtatatcagtgatgatgagcagaagtctaagaacgagccagaagacacagaggacaaagaaggttgtcagatggacaaagagccatctgctgttaaaaaaaagcccaagcctacaaacccagtggagattaaagaggagctgaaaagcacgtcaccagccagcgagaaggcagaccctggagcagtcaaggacaaggccagccctgagcctgagaaggacttttccgaaaaggcaaaaccttcacctcaccccataaaggataaactgaagggaaaagatgagacggattccccaacagtccatttgggcctggactctgattcagagagcgaacttgtcatagatttaggagaagaccattctgggcgggagggtcgaaaaaataagaaggaacccaaagaaccatctcccaaacaggatgttgtaggtaaaactccaccatccacgacggtgggcagccattctcccccggaaacaccggtgctcacccgctcttccgcccaaacttccgcggctggcgccacagccaccaccagcacgtcctccacggtcaccgtcacggccccggcccccgccgccacaggaagcccagtgaaaaagcagaggccgcttttaccgaaggagactgccccggccgtgcagcgggtcgtgtggaactcatcaagtaagtttcaaacgtcctcccaaaagtggcacatgcagaagatgcagcgtcagcagcagcagcagcagcagcaaaaccagcagcagcagcctcagtcttcccaggggacgagatatcagaccagacaggctgtgaaagctgtccagcagaaggagatcacacagagcccatccacgtccaccatcaccctggtgaccagcacacagtcatcgcccctggtcaccagctcggggtccatgagcacccttgtgtcctcagtcaacgctgacctgcccatcgccactgcctcagctgatgtcgccgctgatattgccaagtacactagcaaaatgatggatgcaataaaaggaacaatgacagaaatatacaacgatctttctaaaaacactactggaagcacaatagctgagattcgcaggctgaggatcgagatagagaagctccagtggctgcaccagcaagagctctccgaaatgaaacacaacttagagctgaccatggcggagatgcggcagagcctggagcaggagcgggaccggctcatcgccgaggtgaagaagcagctggagttggagaagcagcaggcggtggatgagaccaagaagaagcagtggtgcgccaactgcaagaaggaggccatcttttactgctgttggaacaccagctactgtgactacccctgccagcaagcccactggcctgagcacatgaagtcctgcacccagtcagctactgctcctcagcaggaagcggatgctgaggtgaacacagaaacactaaataagtcctcccaggggagctcctcgagcacacaatcagcaccttcagaaacggccagcgcctccaaagagaaggagacgtcagctgagaaaagcaaggagagtggctcgacccttgacctttctggctccagagagacgccctcctccattctcttaggctccaaccaaggctctgttagcaaaaggtgtgacaagcaacctgcctatgccccaaccaccacagaccaccagccgcaccccaactaccccgcccagaagtaccattcccggagtaataaatccagttggagcagcagtgatgagaagaggggatcgacacgttccgatcacaacaccagtaccagcacgaagagcctcctcccgaaagagtctcggctggacaccttctgggactagcagtgaatcgggacacaaaccacccaccccattgggagaaaaacccagacgccaggaaaagaagaaacaacaaaggcaggagaacagccactttcagacttgaaaatgacaaaaccctcagttgagcctgagcccccggcgcgggggctgctacactacaggacacccagcatcggctttgactgcagactgttcacccacacgagccctgtgcttttggtgtaaataatgtacaatttgtggatgtcattgaatctagaggactttcccctttttatatttgtattaactttaacttattaaaaaaaaaaaaagaaaaagaaaaacgatttaaaaaaaaaaaaaaaagcaaccaaccccaacaacaaaaaagaatgttttggtattggagaagggatggtcagttagcctgtctgtcacacgacggaatggatactgggcccggggaccactttcatactcacgtcctcatccttggatacccaggggagggcgaaccgttttcgctcgtgtgtctgtacgcagcatgttgggatcgggagtttcggcacagactatcccatcaagccgttggctcctttcagctactacgttaccacgttcctaaaacgcaagctctccggaccagacggacacagggagaagctagtttctttcatgtgattgaaatgatgactctactcctaaaagggaaaaaacaatatccttgtttacagaagagaaacaaacaagccccactcagctcagtcacaggagagaacacagaaagtcttaggatcatgaactctgaaaaaaagagaaaccttatctttgctttgtggttcctttaaacacactcacacacacttggtcagagatgctgtgcttcttggaagcaaggactcaaaggcaaggtgcacgcagaggacgtttgagtctgggatgaagcatgtacgtattatttatatgatggaatttcacgtttttatgtaagcatgaaacacaggcagtatgagagaaagcaaggcccgtcatgctgtccgtacactacgtatgctgtagagccattttgtatgttgtgtaaaacaaaaagcattgatgaaaaagcaaaaggtgatgtatgtatatgagaaaattaattgtacgatatcattccagtacgttttgttgtacattttagtcttgtttactttctcttcattgttaagaggatgcgaactgtacagtttccagctagttacccatattagagaagaaataagagagtattagaagaaaacaggagagaaagaacatttgtgaattgcagttgtcaaaaaaaaaaaatagcctagctggccttatttgtgaagcataattgcttttagcatatggaagtattttttcacattttctttgtataaaatttgtattaaacttaaatatctttttgatggtggtgtttctttgtgactgagccagtagactcacactatatgcttttttgggtttgcccgttccttcccccacccccccagttttttcagatttctttacctttttttaattaaactgttttggaaaaatgc

SEQ ID NO: 204678 - DNA, 670 bp, Homo sapiens
  Payload ID: 20372
  Gene Name: zinc finger, MYND-type containing 8
  ENST ID: ENST00000435836
  CDS Start-End: 146-670
acacagtgttaacaatgcatccacagagtcccaaatctgccagcctgttctctcttcctaactgtggaaaaatgagacggttgcttgaacatttgttggcttggctgaagaggaaataaaaacagaacaggaggtggtagagggcatggatatctctactcgctccaaagatcctggctctgcagagagaacagcccagaaaagaaagttccccagccctccacattcttccaatggccactcgccgcaggacacatcaacaagccccattaaaaagaaaaagaaacctggcttactgaacagtaacaataaggagcaggatggacggaatgatttctactgctgggtttgtcaccgggaaggccaagtcctttgctgtgagctctgtccccgggtttatcacgctaagtgtctgagactgacatcggaaccagagggggactggttttgtcctgaatgtgagaaaattacagtagcagaatgcatcgagacccagagtaaagccatgacaatgctcaccattgaacagttatcctacctgctcaagtttgccattcagaaaatgaaacagccagggacagatgcattccagaagcccgttccattggaacagcaccctgactatgcggaatacatcttccatccaatggacctttgtacattggaaaag

SEQ ID NO: 204679 - DNA, 3567 bp, Homo sapiens
  Payload ID: 20372
  Gene Name: zinc finger, MYND-type containing 8
  Uniprot ID: Q9ULU4
  ENST ID: ENST00000461685
  CDS Start-End: 1-3567
atgcatccacagagcttggctgaagaggaaataaaaacagaacaggaggtggtagagggcatggatatctctactcgctccaaagatcctggctctgcagagagaacagcccagaaaagaaagttccccagccctccacattcttccaatggccactcgccgcaggacacatcaacaagccccattaaaaagaaaaagaaacctggcttactgaacagtaacaataaggagcagtcagaactaagacatggtccgttttactatatgaagcagccactcaccacagaccctgttgatgttgtaccgcaggatggacggaatgatttctactgctgggtttgtcaccgggaaggccaagtcctttgctgtgagctctgtccccgggtttatcacgctaagtgtctgagactgacatcggaaccagagggggactggttttgtcctgaatgtgagaaaattacagtagcagaatgcatcgagacccagagtaaagccatgacaatgctcaccattgaacagttatcctacctgctcaagtttgccattcagaaaatgaaacagccagggacagatgcattccagaagcccgttccattggaacagcaccctgactatgcggaatacatcttccatccaatggacctttgtacattggaaaagaatgcgaaaaagaaaatgtatggctgcacagaagccttcctggctgatgcaaagtggattttgcacaactgcatcatttataatgggggaaatcacaaattgacgcaaatagcgaaagtagtcatcaaaatctgtgaacatgagatgaatgaaatcgaagtatgtccagaatgttatctagctgcttgccaaaaacgagataactggttttgtgagccttgtagcaatccacatcctttggtctgggccaaactgaaggggtttccattctggcctgcaaaagctctaagggataaagacgggcaggtcgatgcccgattctttggacaacatgacagggcctgggttccaataaataattgctacctcatgtctaaagaaattcctttttctgtgaaaaagactaagagcatcttcaacagtgccatgcaagagatggaggtttacgtggagaacatccgcaggaagtttggggtttttaattactctccatttaggacaccctacacacccaacagccagtatcaaatgctgctcgatcccaccaaccccagcgccggcactgccaagatagacaagcaggagaaggtcaagctcaactttgacatgacggcatcccccaagatcctgatgagcaagcctgtgctgagtgggggcacaggccgccggatttccttgtcggatatgccgcgctcccccatgagcacaaactcttctgtgcacacgggctccgacgtggagcaggatgctgagaagaaggccacgtcgagccacttcagtgcgagcgaggagtccatggacttcctggataagagcacagcttcaccagcctccaccaagacgggacaagcagggagtttatccggcagcccaaagcccttctctcctcaactgtcagctcctatcacgacgaaaacggacaaaacctccaccaccggcagcatcctgaatcttaacctggatcgaagcaaagctgagatggatttgaaggagctgagcgagtcggtccagcaacagtccacccctgttcctctcatctctcccaagcgccagattcgtagcaggttccagctgaatcttgacaagaccatagagagttgcaaagcacaattaggcataaatgaaatctcggaagatgtctatacggccgtagagcacagcgattcggaggattctgagaagtcagatagtagcgatagtgagtatatcagtgatgatgagcagaagtctaagaacgagccagaagacacagaggacaaagaaggttgtcagatggacaaagagccatctgctgttaaaaaaaagcccaagcctacaaacccagtggagattaaagaggagctgaaaagcacgtcaccagccagcgagaaggcagaccctggagcagtcaaggacaaggccagccctgagcctgagaaggacttttccgaaaaggcaaaaccttcacctcaccccataaaggataaactgaagggaaaagatgagacggattccccaacagtccatttgggcctggactctgattcagagagcgaacttgtcatagatttaggagaagaccattctgggcgggagggtcgaaaaaataagaaggaacccaaagaaccatctcccaaacaggatgttgtaggtaaaactccaccatccacgacggtgggcagccattctcccccggaaacaccggtgctcacccgctcttccgcccaaacttccgcggctggcgccacagccaccaccagcacgtcctccacggtcaccgtcacggccccggcccccgccgccacaggaagcccagtgaaaaagcagaggccgcttttaccgaaggagactgccccggccgtgcagcgggtcgtgtggaactcatcaactgtccagcagaaggagatcacacagagcccatccacgtccaccatcaccctggtgaccagcacacagtcatcgcccctggtcaccagctcggggtccatgagcacccttgtgtcctcagtcaacgctgacctgcccatcgccactgcctcagctgatgtcgccgctgatattgccaagtacactagcaaaatgatggatgcaataaaaggaacaatgacagaaatatacaacgatctttctaaaaacactactggaagcacaatagctgagattcgcaggctgaggatcgagatagagaagctccagtggctgcaccagcaagagctctccgaaatgaaacacaacttagagctgaccatggcggagatgcggcagagcctggagcaggagcgggaccggctcatcgccgaggtgaagaagcagctggagttggagaagcagcaggcggtggatgagaccaagaagaagcagtggtgcgccaactgcaagaaggaggccatcttttactgctgttggaacaccagctactgtgactacccctgccagcaagcccactggcctgagcacatgaagtcctgcacccagtcagctactgctcctcagcaggaagcggatgctgaggtgaacacagaaacactaaataagtcctcccaggggagctcctcgagcacacaatcagcaccttcagaaacggccagcgcctccaaagagaaggagacgtcagctgagaaaagcaaggagagtggctcgacccttgacctttctggctccagagagacgccctcctccattctcttaggctccaaccaaggctctgttagcaaaaggtgtgacaagcaacctgcctatgccccaaccaccacagaccaccagccgcaccccaactaccccgcccagaagtaccattcccggagtaataaatccagttggagcagcagtgatgagaagaggggatcgacacgttccgatcacaacaccagtaccagcacgaagagcctcctcccgaaagagtctcggctggacaccttctgggactag

SEQ ID NO: 204680 - DNA, 3634 bp, Homo sapiens
  Payload ID: 20372
  Gene Name: zinc finger, MYND-type containing 8
  ENST ID: ENST00000467200
  CDS Start-End: 1-3286
cacagaccctgttgatgttgtaccgcaggatggacggaatgatttctactgctgggtttgtcaccgggaaggccaagtcctttgctgtgagctctgtccccgggtttatcacgctaagtgtctgagactgacatcggaaccagagggggactggttttgtcctgaatgtgagaaaattacagtagcagaatgcatcgagacccagagtaaagccatgacaatgctcaccattgaacagttatcctacctgctcaagtttgccattcagaaaatgaaacagccagggacagatgcattccagaagcccgttccattggaacagcaccctgactatgcggaatacatcttccatccaatggacctttgtacattggaaaagaatgcgaaaaagaaaatgtatggctgcacagaagccttcctggctgatgcaaagtggattttgcacaactgcatcatttataatgggggaaatcacaaattgacgcaaatagcgaaagtagtcatcaaaatctgtgaacatgagatgaatgaaatcgaagtatgtccagaatgttatctagctgcttgccaaaaacgagataactggttttgtgagccttgtagcaatccacatcctttggtctgggccaaactgaaggggtttccattctggcctgcaaaagctctaagggataaagacgggcaggtcgatgcccgattctttggacaacatgacagggcctgggttccaataaataattgctacctcatgtctaaagaaattcctttttctgtgaaaaagactaagagcatcttcaacagtgccatgcaagagatggaggtttacgtggagaacatccgcaggaagtttggggtttttaattactctccatttaggacaccctacacacccaacagccagtatcaaatgctgctcgatcccaccaaccccagcgccggcactgccaagatagacaagcaggagaaggtcaagctcaactttgacatgacggcatcccccaagatcctgatgagcaagcctgtgctgagtgggggcacaggccgccggatttccttgtcggatatgccgcgctcccccatgagcacaaactcttctgtgcacacgggctccgacgtggagcaggatgctgagaagaaggccacgtcgagccacttcagtgcgagcgaggagtccatggacttcctggataagagcacagcttcaccagcctccaccaagacgggacaagcagggagtttatccggcagcccaaagcccttctctcctcaactgtcagctcctatcacgacgaaaacggacaaaacctccaccaccggcagcatcctgaatcttaacctggatcgaagcaaagctgagatggatttgaaggagctgagcgagtcggtccagcaacagtccacccctgttcctctcatctctcccaagcgccagattcgtagcaggttccagctgaatcttgacaagaccatagagagttgcaaagcacaattaggcataaatgaaatctcggaagatgtctatacggccgtagagcacagcgattcggaggattctgagaagtcagatagtagcgatagtgagtatatcagtgatgatgagcagaagtctaagaacgagccagaagacacagaggacaaagaaggttgtcagatggacaaagagccatctgctgttaaaaaaaagcccaagcctacaaacccagtggagattaaagaggagctgaaaagcacgtcaccagccagcgagaaggcagaccctggagcagtcaaggacaaggccagccctgagcctgagaaggacttttccgaaaaggcaaaaccttcacctcaccccataaaggataaactgaagggaaaagatgagacggattccccaacagtccatttgggcctggactctgattcagagagcgaacttgtcatagatttaggagaagaccattctgggcgggagggtcgaaaaaataagaaggaacccaaagaaccatctcccaaacaggatgttgtaggtaaaactccaccatccacgacggtgggcagccattctcccccggaaacaccggtgctcacccgctcttccgcccaaacttccgcggctggcgccacagccaccaccagcacgtcctccacggtcaccgtcacggccccggcccccgccgccacaggaagcccagtgaaaaagcagaggccgcttttaccgaaggagactgccccggccgtgcagcgggtcgtgtggaactcatcaactgtccagcagaaggagatcacacagagcccatccacgtccaccatcaccctggtgaccagcacacagtcatcgcccctggtcaccagctcggggtccatgagcacccttgtgtcctcagtcaacgctgacctgcccatcgccactgcctcagctgatgtcgccgctgatattgccaagtacactagcaaaatgatggatgcaataaaaggaacaatgacagaaatatacaacgatctttctaaaaacactactggaagcacaatagctgagattcgcaggctgaggatcgagatagagaagctccagtggctgcaccagcaagagctctccgaaatgaaacacaacttagagctgaccatggcggagatgcggcagagcctggagcaggagcgggaccggctcatcgccgaggtgaagaagcagctggagttggagaagcagcaggcggtggatgagaccaagaagaagcagtggtgcgccaactgcaagaaggaggccatcttttactgctgttggaacaccagctactgtgactacccctgccagcaagcccactggcctgagcacatgaagtcctgcacccagtcagctactgctcctcagcaggaagcggatgctgaggtgaacacagaaacactaaataagtcctcccaggggagctcctcgagcacacaatcagcaccttcagaaacggccagcgcctccaaagagaaggagacgtcagctgagaaaagcaaggagagtggctcgacccttgacctttctggctccagagagacgccctcctccattctcttaggctccaaccaaggctctgttagcaaaaggtgtgacaagcaacctgcctatgccccaaccaccacagaccaccagccgcaccccaactaccccgcccagaagtaccattcccggagtaataaatccagttggagcagcagtgatgagaagaggggatcgacacgttccgatcacaacaccagtaccagcacgaagagcctcctcccgaaagagtctcggctggacaccttctgggactagcagtgaatcgggacacaaaccacccaccccattgggagaaaaacccagacgccaggaaaagaagaaacaacaaaggcaggagaacagccactttcagacttgaaaatgacaaaaccctcagttgagcctgagcccccggcgcgggggctgctacactacaggacacccagcatcggctttgactgcagactgttcacccacacgagccctgtgcttttggtgtaaataatgtacaatttgtggatgtcattgaatctagaggactttcccctttttatatttgtattaactttaacttattaaaaaaaaaaaaagaaaaagaaaaacgatttaaaaaaaaaaaaaaaa

SEQ ID NO: 204681 - DNA, 4053 bp, Homo sapiens
  Payload ID: 20372
  Gene Name: zinc finger, MYND-type containing 8
  Uniprot ID: Q9ULU4
  ENST ID: ENST00000471951
  CDS Start-End: 28-3732
aagtattgacattacacagtgttaacaatgcatccacagagcttggctgaagaggaaataaaaacagaacaggaggtggtagagggcatggatatctctactcgctccaaagatcctggctctgcagagagaacagcccagaaaagaaagttccccagccctccacattcttccaatggccactcgccgcaggacacatcaacaagccccattaaaaagaaaaagaaacctggcttactgaacagtaacaataaggagcagtcagaactaagacatggtccgttttactatatgaagcagccactcaccacagaccctgttgatgttgtaccgcaggatggacggaatgatttctactgctgggtttgtcaccgggaaggccaagtcctttgctgtgagctctgtccccgggtttatcacgctaagtgtctgagactgacatcggaaccagagggggactggttttgtcctgaatgtgagaaaattacagtagcagaatgcatcgagacccagagtaaagccatgacaatgctcaccattgaacagttatcctacctgctcaagtttgccattcagaaaatgaaacagccagggacagatgcattccagaagcccgttccattggaacagcaccctgactatgcggaatacatcttccatccaatggacctttgtacattggaaaagaatgcgaaaaagaaaatgtatggctgcacagaagccttcctggctgatgcaaagtggattttgcacaactgcatcatttataatgggggaaatcacaaattgacgcaaatagcgaaagtagtcatcaaaatctgtgaacatgagatgaatgaaatcgaagtatgtccagaatgttatctagctgcttgccaaaaacgagataactggttttgtgagccttgtagcaatccacatcctttggtctgggccaaactgaaggggtttccattctggcctgcaaaagctctaagggataaagacgggcaggtcgatgcccgattctttggacaacatgacagggcctgggttccaataaataattgctacctcatgtctaaagaaattcctttttctgtgaaaaagactaagagcatcttcaacagtgccatgcaagagatggaggtttacgtggagaacatccgcaggaagtttggggtttttaattactctccatttaggacaccctacacacccaacagccagtatcaaatgctgctcgatcccaccaaccccagcgccggcactgccaagatagacaagcaggagaaggtcaagctcaactttgacatgacggcatcccccaagatcctgatgagcaagcctgtgctgagtgggggcacaggccgccggatttccttgtcggatatgccgcgctcccccatgagcacaaactcttctgtgcacacgggctccgacgtggagcaggatgctgagaagaaggccacgtcgagccacttcagtgcgagcgaggagtccatggacttcctggataagagcacagcttcaccagcctccaccaagacgggacaagcagggagtttatccggcagcccaaagcccttctctcctcaactgtcagctcctatcacgacgaaaacggacaaaacctccaccaccggcagcatcctgaatcttaacctggatcgaagcaaagctgagatggatttgaaggagctgagcgagtcggtccagcaacagtccacccctgttcctctcatctctcccaagcgccagattcgtagcaggttccagctgaatcttgacaagaccatagagagttgcaaagcacaattaggcataaatgaaatctcggaagatgtctatacggccgtagagcacagcgattcggaggattctgagaagtcagatagtagcgatagtgagtatatcagtgatgatgagcagaagtctaagaacgagccagaagacacagaggacaaagaaggttgtcagatggacaaagagccatctgctgttaaaaaaaagcccaagcctacaaacccagtggagattaaagaggagctgaaaagcacgtcaccagccagcgagaaggcagaccctggagcagtcaaggacaaggccagccctgagcctgagaaggacttttccgaaaaggcaaaaccttcacctcaccccataaaggataaactgaagggaaaagatgagacggattccccaacagtccatttgggcctggactctgattcagagagcgaacttgtcatagatttaggagaagaccattctgggcgggagggtcgaaaaaataagaaggaacccaaagaaccatctcccaaacaggatgttgtaggtaaaactccaccatccacgacggtgggcagccattctcccccggaaacaccggtgctcacccgctcttccgcccaaacttccgcggctggcgccacagccaccaccagcacgtcctccacggtcaccgtcacggccccggcccccgccgccacaggaagcccagtgaaaaagcagaggccgcttttaccgaaggagactgccccggccgtgcagcgggtcgtgtggaactcatcaagtaagtttcaaacgtcctcccaaaagtggcacatgcagaagatgcagcgtcagcagcagcagcagcagcagcaaaaccagcagcagcagcctcagtcttcccaggggacgagatatcagaccagacaggctgtgaaagctgtccagcagaaggagatcacacagagcccatccacgtccaccatcaccctggtgaccagcacacagtcatcgcccctggtcaccagctcggggtccatgagcacccttgtgtcctcagtcaacgctgacctgcccatcgccactgcctcagctgatgtcgccgctgatattgccaagtacactagcaaaatgatggatgcaataaaaggaacaatgacagaaatatacaacgatctttctaaaaacactactggaagcacaatagctgagattcgcaggctgaggatcgagatagagaagctccagtggctgcaccagcaagagctctccgaaatgaaacacaacttagagctgaccatggcggagatgcggcagagcctggagcaggagcgggaccggctcatcgccgaggtgaagaagcagctggagttggagaagcagcaggcggtggatgagaccaagaagaagcagtggtgcgccaactgcaagaaggaggccatcttttactgctgttggaacaccagctactgtgactacccctgccagcaagcccactggcctgagcacatgaagtcctgcacccagtcagctactgctcctcagcaggaagcggatgctgaggtgaacacagaaacactaaataagtcctcccaggggagctcctcgagcacacaatcagcaccttcagaaacggccagcgcctccaaagagaaggagacgtcagctgagaaaagcaaggagagtggctcgacccttgacctttctggctccagagagacgccctcctccattctcttaggctccaaccaaggctctgttagcaaaaggtgtgacaagcaacctgcctatgccccaaccaccacagaccaccagccgcaccccaactaccccgcccagaagtaccattcccggagtaataaatccagttggagcagcagtgatgagaagaggggatcgacacgttccgatcacaacaccagtaccagcacgaagagcctcctcccgaaagagtctcggctggacaccttctgggactagcagtgaatcgggacacaaaccacccaccccattgggagaaaaacccagacgccaggaaaagaagaaacaacaaaggcaggagaacagccactttcagacttgaaaatgacaaaaccctcagttgagcctgagcccccggcgcgggggctgctacactacaggacacccagcatcggctttgactgcagactgttcacccacacgagccctgtgcttttggtgtaaataatgtacaatttgtggatgtcattgaatctagaggactttcccctttttatatttgtattaactttaacttattaaaaaaaaaaaaagaaaaag

SEQ ID NO: 204682 - DNA, 5273 bp, Homo sapiens
  Payload ID: 20372
  Gene Name: zinc finger, MYND-type containing 8
  Uniprot ID: Q9ULU4
  ENST ID: ENST00000536340
  CDS Start-End: 1-3726
atggtgtttctggaagagtttgaagctagatcctgcttggctgaagaggaaataaaaacagaacaggaggtggtagagggcatggatatctctactcgctccaaagatcctggctctgcagagagaacagcccagaaaagaaagttccccagccctccacattcttccaatggccactcgccgcaggacacatcaacaagccccattaaaaagaaaaagaaacctggcttactgaacagtaacaataaggagcagtcagaactaagacatggtccgttttactatatgaagcagccactcaccacagaccctgttgatgttgtaccgcaggatggacggaatgatttctactgctgggtttgtcaccgggaaggccaagtcctttgctgtgagctctgtccccgggtttatcacgctaagtgtctgagactgacatcggaaccagagggggactggttttgtcctgaatgtgagaaaattacagtagcagaatgcatcgagacccagagtaaagccatgacaatgctcaccattgaacagttatcctacctgctcaagtttgccattcagaaaatgaaacagccagggacagatgcattccagaagcccgttccattggaacagcaccctgactatgcggaatacatcttccatccaatggacctttgtacattggaaaagaatgcgaaaaagaaaatgtatggctgcacagaagccttcctggctgatgcaaagtggattttgcacaactgcatcatttataatgggggaaatcacaaattgacgcaaatagcgaaagtagtcatcaaaatctgtgaacatgagatgaatgaaatcgaagtatgtccagaatgttatctagctgcttgccaaaaacgagataactggttttgtgagccttgtagcaatccacatcctttggtctgggccaaactgaaggggtttccattctggcctgcaaaagctctaagggataaagacgggcaggtcgatgcccgattctttggacaacatgacagggcctgggttccaataaataattgctacctcatgtctaaagaaattcctttttctgtgaaaaagactaagagcatcttcaacagtgccatgcaagagatggaggtttacgtggagaacatccgcaggaagtttggggtttttaattactctccatttaggacaccctacacacccaacagccagtatcaaatgctgctcgatcccaccaaccccagcgccggcactgccaagatagacaagcaggagaaggtcaagctcaactttgacatgacggcatcccccaagatcctgatgagcaagcctgtgctgagtgggggcacaggccgccggatttccttgtcggatatgccgcgctcccccatgagcacaaactcttctgtgcacacgggctccgacgtggagcaggatgctgagaagaaggccacgtcgagccacttcagtgcgagcgaggagtccatggacttcctggataagagcacagcttcaccagcctccaccaagacgggacaagcagggagtttatccggcagcccaaagcccttctctcctcaactgtcagctcctatcacgacgaaaacggacaaaacctccaccaccggcagcatcctgaatcttaacctggatcgaagcaaagctgagatggatttgaaggagctgagcgagtcggtccagcaacagtccacccctgttcctctcatctctcccaagcgccagattcgtagcaggttccagctgaatcttgacaagaccatagagagttgcaaagcacaattaggcataaatgaaatctcggaagatgtctatacggccgtagagcacagcgattcggaggattctgagaagtcagatagtagcgatagtgagtatatcagtgatgatgagcagaagtctaagaacgagccagaagacacagaggacaaagaaggttgtcagatggacaaagagccatctgctgttaaaaaaaagcccaagcctacaaacccagtggagattaaagaggagctgaaaagcacgtcaccagccagcgagaaggcagaccctggagcagtcaaggacaaggccagccctgagcctgagaaggacttttccgaaaaggcaaaaccttcacctcaccccataaaggataaactgaagggaaaagatgagacggattccccaacagtccatttgggcctggactctgattcagagagcgaacttgtcatagatttaggagaagaccattctgggcgggagggtcgaaaaaataagaaggaacccaaagaaccatctcccaaacaggatgttgtaggtaaaactccaccatccacgacggtgggcagccattctcccccggaaacaccggtgctcacccgctcttccgcccaaacttccgcggctggcgccacagccaccaccagcacgtcctccacggtcaccgtcacggccccggcccccgccgccacaggaagcccagtgaaaaagcagaggccgcttttaccgaaggagactgccccggccgtgcagcgggtcgtgtggaactcatcaagtaagtttcaaacgtcctcccaaaagtggcacatgcagaagatgcagcgtcagcagcagcagcagcagcagcaaaaccagcagcagcagcctcagtcttcccaggggacgagatatcagaccagacaggctgtgaaagctgtccagcagaaggagatcacacagagcccatccacgtccaccatcaccctggtgaccagcacacagtcatcgcccctggtcaccagctcggggtccatgagcacccttgtgtcctcagtcaacgctgacctgcccatcgccactgcctcagctgatgtcgccgctgatattgccaagtacactagcaaaatgatggatgcaataaaaggaacaatgacagaaatatacaacgatctttctaaaaacactactggaagcacaatagctgagattcgcaggctgaggatcgagatagagaagctccagtggctgcaccagcaagagctctccgaaatgaaacacaacttagagctgaccatggcggagatgcggcagagcctggagcaggagcgggaccggctcatcgccgaggtgaagaagcagctggagttggagaagcagcaggcggtggatgagaccaagaagaagcagtggtgcgccaactgcaagaaggaggccatcttttactgctgttggaacaccagctactgtgactacccctgccagcaagcccactggcctgagcacatgaagtcctgcacccagtcagctactgctcctcagcaggaagcggatgctgaggtgaacacagaaacactaaataagtcctcccaggggagctcctcgagcacacaatcagcaccttcagaaacggccagcgcctccaaagagaaggagacgtcagctgagaaaagcaaggagagtggctcgacccttgacctttctggctccagagagacgccctcctccattctcttaggctccaaccaaggctctgttagcaaaaggtgtgacaagcaacctgcctatgccccaaccaccacagaccaccagccgcaccccaactaccccgcccagaagtaccattcccggagtaataaatccagttggagcagcagtgatgagaagaggggatcgacacgttccgatcacaacaccagtaccagcacgaagagcctcctcccgaaagagtctcggctggacaccttctgggactagcagtgaatcgggacacaaaccacccaccccattgggagaaaaacccagacgccaggaaaagaagaaacaacaaaggcaggagaacagccactttcagacttgaaaatgacaaaaccctcagttgagcctgagcccccggcgcgggggctgctacactacaggacacccagcatcggctttgactgcagactgttcacccacacgagccctgtgcttttggtgtaaataatgtacaatttgtggatgtcattgaatctagaggactttcccctttttatatttgtattaactttaacttattaaaaaaaaaaaaagaaaaagaaaaacgatttaaaaaaaaaaaaaaaagcaaccaaccccaacaacaaaaaagaatgttttggtattggagaagggatggtcagttagcctgtctgtcacacgacggaatggatactgggcccggggaccactttcatactcacgtcctcatccttggatacccaggggagggcgaaccgttttcgctcgtgtgtctgtacgcagcatgttgggatcgggagtttcggcacagactatcccatcaagccgttggctcctttcagctactacgttaccacgttcctaaaacgcaagctctccggaccagacggacacagggagaagctagtttctttcatgtgattgaaatgatgactctactcctaaaagggaaaaaacaatatccttgtttacagaagagaaacaaacaagccccactcagctcagtcacaggagagaacacagaaagtcttaggatcatgaactctgaaaaaaagagaaaccttatctttgctttgtggttcctttaaacacactcacacacacttggtcagagatgctgtgcttcttggaagcaaggactcaaaggcaaggtgcacgcagaggacgtttgagtctgggatgaagcatgtacgtattatttatatgatggaatttcacgtttttatgtaagcatgaaacacaggcagtatgagagaaagcaaggcccgtcatgctgtccgtacactacgtatgctgtagagccattttgtatgttgtgtaaaacaaaaagcattgatgaaaaagcaaaaggtgatgtatgtatatgagaaaattaattgtacgatatcattccagtacgttttgttgtacattttagtcttgtttactttctcttcattgttaagaggatgcgaactgtacagtttccagctagttacccatattagagaagaaataagagagtattagaagaaaacaggagagaaagaacatttgtgaattgcagttgtcaaaaaaaaaaaatagcctagctggccttatttgtgaagcataattgcttttagcatatggaagtattttttcacattttctttgtataaaatttgtattaaacttaaatatctttttgatggtggtgtttctttgtgactgagccagtagactcacactatatgcttttttgggtttgcccgttccttcccccacccccccagttttttcagatttctttacctttttttaattaaactgttttggaaaaatgc

SEQ ID NO: 204683 - DNA, 3405 bp, Homo sapiens
  Payload ID: 20372
  Gene Name: zinc finger, MYND-type containing 8
  Uniprot ID: Q9ULU4
  ENST ID: ENST00000540497
  CDS Start-End: 1-3405
atgcatccacagagcttggctgaagaggaaataaaaacagaacaggaggtggtagagggcatggatatctctactcgctccaaagatcctggctctgcagagagaacagcccagaaaagaaagttccccagccctccacattcttccaatggccactcgccgcaggacacatcaacaagccccattaaaaagaaaaagaaacctggcttactgaacagtaacaataaggagcaggatggacggaatgatttctactgctgggtttgtcaccgggaaggccaagtcctttgctgtgagctctgtccccgggtttatcacgctaagtgtctgagactgacatcggaaccagagggggactggttttgtcctgaatgtgagaaaattacagtagcagaatgcatcgagacccagagtaaagccatgacaatgctcaccattgaacagttatcctacctgctcaagtttgccattcagaaaatgaaacagccagggacagatgcattccagaagcccgttccattggaacagcaccctgactatgcggaatacatcttccatccaatggacctttgtacattggaaaagaatgcgaaaaagaaaatgtatggctgcacagaagccttcctggctgatgcaaagtggattttgcacaactgcatcatttataatgggggaaatcacaaattgacgcaaatagcgaaagtagtcatcaaaatctgtgaacatgagatgaatgaaatcgaagtatgtccagaatgttatctagctgcttgccaaaaacgagataactggttttgtgagccttgtagcaatccacatcctttggtctgggccaaactgaaggggtttccattctggcctgcaaaagctctaagggataaagacgggcaggtcgatgcccgattctttggacaacatgacagggcctgggttccaataaataattgctacctcatgtctaaagaaattcctttttctgtgaaaaagactaagagcatcttcaacagtgccatgcaagagatggaggtttacgtggagaacatccgcaggaagtttggggtttttaattactctccatttaggacaccctacacacccaacagccagtatcaaatgctgctcgatcccaccaaccccagcgccggcactgccaagatagacaagcaggagaaggtcaagctcaactttgacatgacggcatcccccaagatcctgatgagcaagcctgtgctgagtgggggcacaggccgccggatttccttgtcggatatgccgcgctcccccatgagcacaaactcttctgtgcacacgggctccgacgtggagcaggatgctgagaagaaggccacgtcgagccacttcagtgcgagcgaggagtccatggacttcctggataagagcacagatcgaagcaaagctgagatggatttgaaggagctgagcgagtcggtccagcaacagtccacccctgttcctctcatctctcccaagcgccagattcgtagcaggttccagctgaatcttgacaagaccatagagagttgcaaagcacaattaggcataaatgaaatctcggaagatgtctatacggccgtagagcacagcgattcggaggattctgagaagtcagatagtagcgatagtgagtatatcagtgatgatgagcagaagtctaagaacgagccagaagacacagaggacaaagaaggttgtcagatggacaaagagccatctgctgttaaaaaaaagcccaagcctacaaacccagtggagattaaagaggagctgaaaagcacgtcaccagccagcgagaaggcagaccctggagcagtcaaggacaaggccagccctgagcctgagaaggacttttccgaaaaggcaaaaccttcacctcaccccataaaggataaactgaagggaaaagatgagacggattccccaacagtccatttgggcctggactctgattcagagagcgaacttgtcatagatttaggagaagaccattctgggcgggagggtcgaaaaaataagaaggaacccaaagaaccatctcccaaacaggatgttgtaggtaaaactccaccatccacgacggtgggcagccattctcccccggaaacaccggtgctcacccgctcttccgcccaaacttccgcggctggcgccacagccaccaccagcacgtcctccacggtcaccgtcacggccccggcccccgccgccacaggaagcccagtgaaaaagcagaggccgcttttaccgaaggagactgccccggccgtgcagcgggtcgtgtggaactcatcaagtaagtttcaaacgtcctcccaaaagtggcacatgcagaagatgcagcgtcagcagcagcagcagcagcagcaaaaccagcagcagcagcctcagtcttcccaggggacgagatatcagaccagacaggctgtgaaagctgtccagcagaaggagatcacacagagcccatccacgtccaccatcaccctggtgaccagcacacagtcatcgcccctggtcaccagctcggggtccatgagcacccttgtgtcctcagtcaacgctgacctgcccatcgccactgcctcagctgatgtcgccgctgatattgccaagtacactagcaaaatgatggatgcaataaaaggaacaatgacagaaatatacaacgatctttctaaaaacactactggaagcacaatagctgagattcgcaggctgaggatcgagatagagaagctccagtggctgcaccagcaagagctctccgaaatgaaacacaacttagagctgaccatggcggagatgcggcagagcctggagcaggagcgggaccggctcatcgccgaggtgaagaagcagctggagttggagaagcagcaggcggtggatgagaccaagaagaagcagtggtgcgccaactgcaagaaggaggccatcttttactgctgttggaacaccagctactgtgactacccctgccagcaagcccactggcctgagcacatgaagtcctgcacccagtcagctactgctcctcagcaggaagcggatgctgaggtgaacacagaaacactaaataagtcctcccaggggagctcctcgagcacacaatcagcaccttcagaaacggccagcgcctccaaagagaaggagacgtcagctgagaaaagcaaggagagtggctcgacccttgacctttctggctccagagagacgccctcctccattctcttaggctccaaccaaggctctgaccattcccggagtaataaatccagttggagcagcagtgatgagaagaggggatcgacacgttccgatcacaacaccagtaccagcacgaagagcctcctcccgaaagagtctcggctggacaccttctgggactag

SEQ ID NO: 204684 - DNA, 4027 bp, Homo sapiens
  Payload ID: 20372
  Gene Name: zinc finger, MYND-type containing 8
  ENST ID: ENST00000619049
  CDS Start-End: 280-2583
gatggctcttgctcacccgagcctcacaaagataatcgctcaggaagtgtttcagccaatccggggcggctttacactccgatttgccggggcagccaatcggggatgagcttttattaggcggccagatcatcagccgaagtgccaaaccctttttctgtgagaactaggagcctgtcctccatgttttataagtattgacattacacagtgttaacaatgcatccacagagcttggctgaagaggaaataaaaacagaacaggaggtggtagagggcatggatatctctactcgctccaaagatcctggctctgcagagagaacagcccagaaaagaaagttccccagccctccacattcttccaatggccactcgccgcaggacacatcaacaagccccattaaaaagaaaaagaaacctggcttactgaacagtaacaataaggagcaggatggacggaatgatttctactgctgggtttgtcaccgggaaggccaagtcctttgctgtgagctctgtccccgggtttatcacgctaagtgtctgagactgacatcggaaccagagggggactggttttgtcctgaatgtgagaaaattacagtagcagaatgcatcgagacccagagtaaagccatgacaatgctcaccattgaacagttatcctacctgctcaagtttgccattcagaaaatgaaacagccagggacagatgcattccagaagcccgttccattggaacagcaccctgactatgcggaatacatcttccatccaatggacctttgtacattggaaaagaatgcgaaaaagaaaatgtatggctgcacagaagccttcctggctgatgcaaagtggattttgcacaactgcatcatttataatgggggaaatcacaaattgacgcaaatagcgaaagtagtcatcaaaatctgtgaacatgagatgaatgaaatcgaagtatgtccagaatgttatctagctgcttgccaaaaacgagataactggttttgtgagccttgtagcaatccacatcctttggtctgggccaaactgaaggggtttccattctggcctgcaaaagctctaagggataaagacgggcaggtcgatgcccgattctttggacaacatgacagggcctgggttccaataaataattgctacctcatgtctaaagaaattcctttttctgtgaaaaagactaagagcatcttcaacagtgccatgcaagagatggaggtttacgtggagaacatccgcaggaagtttggggtttttaattactctccatttaggacaccctacacacccaacagccagtatcaaatgctgctcgatcccaccaaccccagcgccggcactgccaagatagacaagcaggagaaggtcaagctcaactttgacatgacggcatcccccaagatcctgatgagcaagcctgtgctgagtgggggcacaggccgccggatttccttgtcggatatgccgcgctcccccatgagcacaaactcttctgtgcacacgggctccgacgtggagcaggatgctgagaagaaggccacgtcgagccacttcagtgcgagcgaggagtccatggacttcctggataagagcacagcttcaccagcctccaccaagacgggacaagcagggagtttatccggcagcccaaagcccttctctcctcaactgtcagctcctatcacgacgaaaacggacaaaacctccaccaccggcagcatcctgaatcttaacctggatcgaagcaaagctgagatggatttgaaggagctgagcgagtcggtccagcaacagtccacccctgttcctctcatctctcccaagcgccagattcgtagcaggttccagctgaatcttgacaagaccatagagagttgcaaagcacaattaggcataaatgaaatctcggaagatgtctatacggccgtagagcacagcgattcggaggattctgagaagtcagatagtagcgatagtgagtatatcagtgatgatgagcagaagtctaagaacgagccagaagacacagaggacaaagaaggttgtcagatggacaaagagccatctgctgttaaaaaaaagcccaagcctacaaacccagtggagattaaagaggagctgaaaagcacgtcaccagccagcgagaaggcagaccctggagcagtcaaggacaaggccagccctgagcctgagaaggacttttccgaaaaggcaaaaccttcacctcaccccataaaggataaactgaagggaaaagatgagacggattccccaacagtccatttgggcctggactctgattcagagagcgaacttaccattcccggagtaataaatccagttggagcagcagtgatgagaagaggggatcgacacgttccgatcacaacaccagtaccagcacgaagagcctcctcccgaaagagtctcggctggacaccttctgggactagcagtgaatcgggacacaaaccacccaccccattgggagaaaaacccagacgccaggaaaagaagaaacaacaaaggcaggagaacagccactttcagacttgaaaatgacaaaaccctcagttgagcctgagcccccggcgcgggggctgctacactacaggacacccagcatcggctttgactgcagactgttcacccacacgagccctgtgcttttggtgtaaataatgtacaatttgtggatgtcattgaatctagaggactttcccctttttatatttgtattaactttaacttattaaaaaaaaaaaaagaaaaagaaaaacgatttaaaaaaaaaaaaaaaagcaaccaaccccaacaacaaaaaagaatgttttggtattggagaagggatggtcagttagcctgtctgtcacacgacggaatggatactgggcccggggaccactttcatactcacgtcctcatccttggatacccaggggagggcgaaccgttttcgctcgtgtgtctgtacgcagcatgttgggatcgggagtttcggcacagactatcccatcaagccgttggctcctttcagctactacgttaccacgttcctaaaacgcaagctctccggaccagacggacacagggagaagctagtttctttcatgtgattgaaatgatgactctactcctaaaagggaaaaaacaatatccttgtttacagaagagaaacaaacaagccccactcagctcagtcacaggagagaacacagaaagtcttaggatcatgaactctgaaaaaaagagaaaccttatctttgctttgtggttcctttaaacacactcacacacacttggtcagagatgctgtgcttcttggaagcaaggactcaaaggcaaggtgcacgcagaggacgtttgagtctgggatgaagcatgtacgtattatttatatgatggaatttcacgtttttatgtaagcatgaaacacaggcagtatgagagaaagcaaggcccgtcatgctgtccgtacactacgtatgctgtagagccattttgtatgttgtgtaaaacaaaaagcattgatgaaaaagcaaaaggtgatgtatgtatatgagaaaattaattgtacgatatcattccagtacgttttgttgtacattttagtcttgtttactttctcttcattgttaagaggatgcgaactgtacagtttccagctagttacccatattagagaagaaataagagagtattagaagaaaacaggagagaaagaacatttgtgaattgcagttgtcaaaaaaaaaaaatagcctagctggccttatttgtgaagcataattgcttttagcatatggaagtattttttcacattttctttgtataaaatttgtattaaacttaaatatctttttgatggtggtgtttctttgtgactgagccagtagactcacactatatgcttttttgggtttgcccgttccttcccccacccccccagttttttcagatttctttacctttttttaattaaactgttttggaaaaatgc

SEQ ID NO: 204685 - DNA, 3411 bp, Homo sapiens
  Payload ID: 20372
  Gene Name: zinc finger, MYND-type containing 8
  ENST ID: ENST00000617418
  CDS Start-End: 1-3411
atgcatccacagagcttggctgaagaggaaataaaaacagaacaggaggtggtagagggcatggatatctctactcgctccaaagatcctggctctgcagagagaacagcccagaaaagaaagttccccagccctccacattcttccaatggccactcgccgcaggacacatcaacaagccccattaaaaagaaaaagaaacctggcttactgaacagtaacaataaggagcaggatggacggaatgatttctactgctgggtttgtcaccgggaaggccaagtcctttgctgtgagctctgtccccgggtttatcacgctaagtgtctgagactgacatcggaaccagagggggactggttttgtcctgaatgtgagaaaattacagtagcagaatgcatcgagacccagagtaaagccatgacaatgctcaccattgaacagttatcctacctgctcaagtttgccattcagaaaatgaaacagccagggacagatgcattccagaagcccgttccattggaacagcaccctgactatgcggaatacatcttccatccaatggacctttgtacattggaaaagaatgcgaaaaagaaaatgtatggctgcacagaagccttcctggctgatgcaaagtggattttgcacaactgcatcatttataatgggggaaatcacaaattgacgcaaatagcgaaagtagtcatcaaaatctgtgaacatgagatgaatgaaatcgaagtatgtccagaatgttatctagctgcttgccaaaaacgagataactggttttgtgagccttgtagcaatccacatcctttggtctgggccaaactgaaggggtttccattctggcctgcaaaagctctaagggataaagacgggcaggtcgatgcccgattctttggacaacatgacagggcctgggttccaataaataattgctacctcatgtctaaagaaattcctttttctgtgaaaaagactaagagcatcttcaacagtgccatgcaagagatggaggtttacgtggagaacatccgcaggaagtttggggtttttaattactctccatttaggacaccctacacacccaacagccagtatcaaatgctgctcgatcccaccaaccccagcgccggcactgccaagatagacaagcaggagaaggtcaagctcaactttgacatgacggcatcccccaagatcctgatgagcaagcctgtgctgagtgggggcacaggccgccggatttccttgtcggatatgccgcgctcccccatgagcacaaactcttctgtgcacacgggctccgacgtggagcaggatgctgagaagaaggccacgtcgagccacttcagtgcgagcgaggagtccatggacttcctggataagagcacagcttcaccagcctccaccaagacgggacaagcagggagtttatccggcagcccaaagcccttctctcctcaactgtcagctcctatcacgacgaaaacggacaaaacctccaccaccggcagcatcctgaatcttaacctggatcgaagcaaagctgagatggatttgaaggagctgagcgagtcggtccagcaacagtccacccctgttcctctcatctctcccaagcgccagattcgtagcaggttccagctgaatcttgacaagaccatagagagttgcaaagcacaattaggcataaatgaaatctcggaagatgtctatacggccgtagagcacagcgattcggaggattctgagaagtcagatagtagcgatagtgagtatatcagtgatgatgagcagaagtctaagaacgagccagaagacacagaggacaaagaaggttgtcagatggacaaagagccatctgctgttaaaaaaaagcccaagcctacaaacccagtggagattaaagaggagctgaaaagcacgtcaccagccagcgagaaggcagaccctggagcagtcaaggacaaggccagccctgagcctgagaaggacttttccgaaaaggcaaaaccttcacctcaccccataaaggataaactgaagggaaaagatgagacggattccccaacagtccatttgggcctggactctgattcagagagcgaacttgtcatagatttaggagaagaccattctgggcgggagggtcgaaaaaataagaaggaacccaaagaaccatctcccaaacaggatgttgtaggtaaaactccaccatccacgacggtgggcagccattctcccccggaaacaccggtgctcacccgctcttccgcccaaacttccgcggctggcgccacagccaccaccagcacgtcctccacggtcaccgtcacggccccggcccccgccgccacaggaagcccagtgaaaaagcagaggccgcttttaccgaaggagactgccccggccgtgcagcgggtcgtgtggaactcatcaactgtccagcagaaggagatcacacagagcccatccacgtccaccatcaccctggtgaccagcacacagtcatcgcccctggtcaccagctcggggtccatgagcacccttgtgtcctcagtcaacgctgacctgcccatcgccactgcctcagctgatgtcgccgctgatattgccaagtacactagcaaaattcgcaggctgaggatcgagatagagaagctccagtggctgcaccagcaagagctctccgaaatgaaacacaacttagagctgaccatggcggagatgcggcagagcctggagcaggagcgggaccggctcatcgccgaggtgaagaagcagctggagttggagaagcagcaggcggtggatgagaccaagaagaagcagtggtgcgccaactgcaagaaggaggccatcttttactgctgttggaacaccagctactgtgactacccctgccagcaagcccactggcctgagcacatgaagtcctgcacccagtcagctactgctcctcagcaggaagcggatgctgaggtgaacacagaaacactaaataagtcctcccaggggagctcctcgagcacacaatcagcaccttcagaaacggccagcgcctccaaagagaaggagacgtcagctgagaaaagcaaggagagtggctcgacccttgacctttctggctccagagagacgccctcctccattctcttaggctccaaccaaggctctgttagcaaaaggtgtgacaagcaacctgcctatgccccaaccaccacagaccaccagccgcaccccaactaccccgcccagaagtaccattcccggagtaataaatccagttggagcagcagtgatgagaagaggggatcgacacgttccgatcacaacaccagtaccagcacgaagagcctcctcccgaaagagtctcggctggacaccttctgggactag

SEQ ID NO: 204686 - DNA, 5090 bp, Homo sapiens
  Payload ID: 20372
  Gene Name: zinc finger, MYND-type containing 8
  ENST ID: ENST00000611941
  CDS Start-End: 280-3543
gatggctcttgctcacccgagcctcacaaagataatcgctcaggaagtgtttcagccaatccggggcggctttacactccgatttgccggggcagccaatcggggatgagcttttattaggcggccagatcatcagccgaagtgccaaaccctttttctgtgagaactaggagcctgtcctccatgttttataagtattgacattacacagtgttaacaatgcatccacagagcttggctgaagaggaaataaaaacagaacaggaggtggtagagggcatggatatctctactcgctccaaagatcctggctctgcagagagaacagcccagaaaagaaagttccccagccctccacattcttccaatggccactcgccgcaggacacatcaacaagccccattaaaaagaaaaagaaacctggcttactgaacagtaacaataaggagcagtcagaactaagacatggtccgttttactatatgaagcagccactcaccacagaccctgttgatgttgtaccgcaggatggacggaatgatttctactgctgggtttgtcaccgggaaggccaagtcctttgctgtgagctctgtccccgggtttatcacgctaagtgtctgagactgacatcggaaccagagggggactggttttgtcctgaatgtgagaaaattacagtagcagaatgcatcgagacccagagtaaagccatgacaatgctcaccattgaacagttatcctacctgctcaagtttgccattcagaaaatgaaacagccagggacagatgcattccagaagcccgttccattggaacagcaccctgactatgcggaatacatcttccatccaatggacctttgtacattggaaaagaatgcgaaaaagaaaatgtatggctgcacagaagccttcctggctgatgcaaagtggattttgcacaactgcatcatttataatgggggaaatcacaaattgacgcaaatagcgaaagtagtcatcaaaatctgtgaacatgagatgaatgaaatcgaagtatgtccagaatgttatctagctgcttgccaaaaacgagataactggttttgtgagccttgtagcaatccacatcctttggtctgggccaaactgaaggggtttccattctggcctgcaaaagctctaagggataaagacgggcaggtcgatgcccgattctttggacaacatgacagggcctgggttccaataaataattgctacctcatgtctaaagaaattcctttttctgtgaaaaagactaagagcatcttcaacagtgccatgcaagagatggaggtttacgtggagaacatccgcaggaagtttggggtttttaattactctccatttaggacaccctacacacccaacagccagtatcaaatgctgctcgatcccaccaaccccagcgccggcactgccaagatagacaagcaggagaaggtcaagctcaactttgacatgacggcatcccccaagatcctgatgagcaagcctgtgctgagtgggggcacaggccgccggatttccttgtcggatatgccgcgctcccccatgagcacaaactcttctgtgcacacgggctccgacgtggagcaggatgctgagaagaaggccacgtcgagccacttcagtgcgagcgaggagtccatggacttcctggataagagcacagcttcaccagcctccaccaagacgggacaagcagggagtttatccggcagcccaaagcccttctctcctcaactgtcagctcctatcacgacgaaaacggacaaaacctccaccaccggcagcatcctgaatcttaacctggatcgaagcaaagctgagatggatttgaaggagctgagcgagtcggtccagcaacagtccacccctgttcctctcatctctcccaagcgccagattcgtagcaggttccagctgaatcttgacaagaccatagagagttgcaaagcacaattaggcataaatgaaatctcggaagatgtctatacggccgtagagcacagcgattcggaggattctgagaagtcagatagtagcgatagtgagtatatcagtgatgatgagcagaagtctaagaacgagccagaagacacagaggacaaagaaggttgtcagatggacaaagagccatctgctgttaaaaaaaagcccaagcctacaaacccagtggagattaaagaggagctgaaaagcacgtcaccagccagcgagaaggcagaccctggagcagtcaaggacaaggccagccctgagcctgagaaggacttttccgaaaaggcaaaaccttcacctcaccccataaaggataaactgaagggaaaagatgagacggattccccaacagtccatttgggcctggactctgattcagagagcgaacttgtcatagatttaggagaagaccattctgggcgggagggtcgaaaaaataagaaggaacccaaagaaccatctcccaaacaggatgctgtccagcagaaggagatcacacagagcccatccacgtccaccatcaccctggtgaccagcacacagtcatcgcccctggtcaccagctcggggtccatgagcacccttgtgtcctcagtcaacgctgacctgcccatcgccactgcctcagctgatgtcgccgctgatattgccaagtacactagcaaaatgatggatgcaataaaaggaacaatgacagaaatatacaacgatctttctaaaaacactactggaagcacaatagctgagattcgcaggctgaggatcgagatagagaagctccagtggctgcaccagcaagagctctccgaaatgaaacacaacttagagctgaccatggcggagatgcggcagagcctggagcaggagcgggaccggctcatcgccgaggtgaagaagcagctggagttggagaagcagcaggcggtggatgagaccaagaagaagcagtggtgcgccaactgcaagaaggaggccatcttttactgctgttggaacaccagctactgtgactacccctgccagcaagcccactggcctgagcacatgaagtcctgcacccagtcagctactgctcctcagcaggaagcggatgctgaggtgaacacagaaacactaaataagtcctcccaggggagctcctcgagcacacaatcagcaccttcagaaacggccagcgcctccaaagagaaggagacgtcagctgagaaaagcaaggagagtggctcgacccttgacctttctggctccagagagacgccctcctccattctcttaggctccaaccaaggctctgttagcaaaaggtgtgacaagcaacctgcctatgccccaaccaccacagaccaccagccgcaccccaactaccccgcccagaagtaccattcccggagtaataaatccagttggagcagcagtgatgagaagaggggatcgacacgttccgatcacaacaccagtaccagcacgaagagcctcctcccgaaagagtctcggctggacaccttctgggactagcagtgaatcgggacacaaaccacccaccccattgggagaaaaacccagacgccaggaaaagaagaaacaacaaaggcaggagaacagccactttcagacttgaaaatgacaaaaccctcagttgagcctgagcccccggcgcgggggctgctacactacaggacacccagcatcggctttgactgcagactgttcacccacacgagccctgtgcttttggtgtaaataatgtacaatttgtggatgtcattgaatctagaggactttcccctttttatatttgtattaactttaacttattaaaaaaaaaaaaagaaaaagaaaaacgatttaaaaaaaaaaaaaaaagcaaccaaccccaacaacaaaaaagaatgttttggtattggagaagggatggtcagttagcctgtctgtcacacgacggaatggatactgggcccggggaccactttcatactcacgtcctcatccttggatacccaggggagggcgaaccgttttcgctcgtgtgtctgtacgcagcatgttgggatcgggagtttcggcacagactatcccatcaagccgttggctcctttcagctactacgttaccacgttcctaaaacgcaagctctccggaccagacggacacagggagaagctagtttctttcatgtgattgaaatgatgactctactcctaaaagggaaaaaacaatatccttgtttacagaagagaaacaaacaagccccactcagctcagtcacaggagagaacacagaaagtcttaggatcatgaactctgaaaaaaagagaaaccttatctttgctttgtggttcctttaaacacactcacacacacttggtcagagatgctgtgcttcttggaagcaaggactcaaaggcaaggtgcacgcagaggacgtttgagtctgggatgaagcatgtacgtattatttatatgatggaatttcacgtttttatgtaagcatgaaacacaggcagtatgagagaaagcaaggcccgtcatgctgtccgtacactacgtatgctgtagagccattttgtatgttgtgtaaaacaaaaagcattgatgaaaaagcaaaaggtgatgtatgtatatgagaaaattaattgtacgatatcattccagtacgttttgttgtacattttagtcttgtttactttctcttcattgttaagaggatgcgaactgtacagtttccagctagttacccatattagagaagaaataagagagtattagaagaaaacaggagagaaagaacatttgtgaattgcagttgtcaaaaaaaaaaaatagcctagctggccttatttgtgaagcataattgcttttagcatatggaagtattttttcacattttctttgtataaaatttgtattaaacttaaatatctttttgatggtggtgtttctttgtgactgagccagtagactcacactatatgcttttttgggtttgcccgttccttcccccacccccccagttttttcagatttctttacctttttttaattaaactgttttggaaaaatgc

SEQ ID NO: 204687 - DNA, 2964 bp, Homo sapiens
  Payload ID: 20373
  Gene Name: zinc finger, NFX1-type containing 1
  ENST ID: ENST00000371744
  CDS Start-End: 161-2964
gaaaggacgcgccggagccgggtgagtggccccgcaactgcccctgcccctgattcttccttgcctcgccgcgaaccccggcgcccgcgccgacccgccactgcctctgcccttttccagataacagaaagtaacgtgaaggaattcaggtgactcagacatggaggagagaagacctcatctggatgccaggcccaggaattcccataccaaccacagaggccctgtggatggagagttaccaccaagagctagaaatcaggccaataacccaccagccaatgctctccgaggaggagccagccaccctggaaggcatcctagggccaacaaccatcctgctgcttactggcagagggaagagagatttagggccatgggcaggaacccacatcaaggaaggaggaaccaggaggggcatgccagcgacgaagctagagaccaaagacatgaccaggagaatgacaccaggtggagaaatggcaaccaggactgtaggaaccgcagaccaccatggtccaatgacaacttccagcagtggcggactccccaccagaagcctacagaacagccacagcaggcgaagaaactgggctacaagttcttagaaagtcttctgcagaaagacccttctgaggtggtcatcacacttgccacaagtttagggctgaaagagctcctttctcattcttccatgaaatctaacttccttgagctcatctgtcaggttcttcggaaggcttgtagctccaaaatggatcgccagagtgttctccatgtactgggcatattgaaaaactccaaatttctcaaagtctgcctgcctgcttatgtggtagggatgatcactgaacccatccctgacatccgaaaccagtatccagagcacataagcaacatcatctccctcctccaggaccttgtaagtgtcttccctgccagctctgtgcaggaaacttccatgctggtttccctcctgccaacctctcttaatgctctgagagcctctggtgttgacatagaagaggaaacggagaagaacctggaaaaggtacagactatcattgaacatctgcaggaaaagaggcgagagggcactttgagagtggatacctacactctagtgcagcctgaggcagaagaccatgttgagagctaccgaaccatgcccatttaccctacctacaatgaagtgcacttggatgagaggcccttccttcgccccaatatcatttctggaaaatacgacagcactgctatctatctggatacccacttccggctcctgcgagaagatttcgtcagacctttacgggaaggtattttggaacttctccaaagctttgaagaccagggcctgaggaagagaaagtttgatgacatccgaatctactttgacaccaggattatcacccccatgtgttcatcatcaggcatagtctacaaggtgcagtttgacacaaaaccactgaagtttgttcgctggcagaattccaaacgattgctctatgggtctttggtatgcatgtccaaggacaacttcgagacatttctttttgccaccgtatctaacagggagcaggaagatctctgccgaggaattgtccagctctgcttcaatgagcaaagccaacagctgctagcagaggtccagccctctgactctttcctcatggtagagacaactgcatactttgaggcctacaggcacgtcctggaaggactccaggaggtccaggaggaagatgttcccttccagaggaatatcgtggagtgtaactctcatgtgaaggagccaaggtacttgctaatggggggcagatacgactttacccccttaatagagaatccttcagccactggggaatttctaagaaatgtcgagggtttgagacatcccagaattaatgtcttagatcctggccagtggccctcaaaagaagccctgaagctggatgactcccagatggaagccttgcagtttgctctcacaagggaactggctattattcaaggacctcctggaacaggcaaaacctatgtgggtctaaaaattgttcaggccctcctaaccaacgagtctgtttggcaaattagcctccagaagttccccatcttggttgtgtgttatactaatcatgctttggaccagtttctggaaggcatctacaattgtcagaagaccagcattgtgcgggtgggtggaaggagcaacagtgaaatcctgaagcagttcaccctaagggagctgaggaacaagcgggaattccgccgcaacctccccatgcacctccgaagggcctacatgagtatcatgacacagatgaaggagtcagagcaagagcttcatgaaggagccaagaccctggagtgcaccatgcgtggtgtcctacgggaacagtacctgcagaagtacatctcaccccagcactgggaaagtctcatgaatggaccagtgcaggatagtgaatggatttgcttccagcactggaagcattccatgatgctggagtggctaggtcttggtgtcggttctttcacgcaaagtgtttctccagcaggacctgagaatacagcccaggcagaaggggatgaggaggaagaaggggaggaggagagttcgctgatagagatcgcagaggaagctgacctgattcaagcagaccgggtgattgaggaggaagaggtggtgaggccccagcggcggaagaaggaagagagtggagcagaccaggagttggctaaaatgcttctggccatgaggctagaccattgtggcactgggacagcagctggacaggagcaagccacaggagagtggcagacccagcgcaaccagaaaaagaaaatgaaaaaaagagtgaaggatgagcttcgcaaactgaacaccatgactgcagccgaggccaacgagatcgaggatgtttggcagctggacctcagttctcgctggcagctttatag

SEQ ID NO: 204688 - DNA, 7212 bp, Homo sapiens
  Payload ID: 20373
  Gene Name: zinc finger, NFX1-type containing 1
  Uniprot ID: Q9P2E3
  ENST ID: ENST00000371752
  CDS Start-End: 86-5842
gccccagcactcgccggcggcagtgaaaggacgcgccggagccggataacagaaagtaacgtgaaggaattcaggtgactcagacatggaggagagaagacctcatctggatgccaggcccaggaattcccataccaaccacagaggccctgtggatggagagttaccaccaagagctagaaatcaggccaataacccaccagccaatgctctccgaggaggagccagccaccctggaaggcatcctagggccaacaaccatcctgctgcttactggcagagggaagagagatttagggccatgggcaggaacccacatcaaggaaggaggaaccaggaggggcatgccagcgacgaagctagagaccaaagacatgaccaggagaatgacaccaggtggagaaatggcaaccaggactgtaggaaccgcagaccaccatggtccaatgacaacttccagcagtggcggactccccaccagaagcctacagaacagccacagcaggcgaagaaactgggctacaagttcttagaaagtcttctgcagaaagacccttctgaggtggtcatcacacttgccacaagtttagggctgaaagagctcctttctcattcttccatgaaatctaacttccttgagctcatctgtcaggttcttcggaaggcttgtagctccaaaatggatcgccagagtgttctccatgtactgggcatattgaaaaactccaaatttctcaaagtctgcctgcctgcttatgtggtagggatgatcactgaacccatccctgacatccgaaaccagtatccagagcacataagcaacatcatctccctcctccaggaccttgtaagtgtcttccctgccagctctgtgcaggaaacttccatgctggtttccctcctgccaacctctcttaatgctctgagagcctctggtgttgacatagaagaggaaacggagaagaacctggaaaaggtacagactatcattgaacatctgcaggaaaagaggcgagagggcactttgagagtggatacctacactctagtgcagcctgaggcagaagaccatgttgagagctaccgaaccatgcccatttaccctacctacaatgaagtgcacttggatgagaggcccttccttcgccccaatatcatttctggaaaatacgacagcactgctatctatctggatacccacttccggctcctgcgagaagatttcgtcagacctttacgggaaggtattttggaacttctccaaagctttgaagaccagggcctgaggaagagaaagtttgatgacatccgaatctactttgacaccaggattatcacccccatgtgttcatcatcaggcatagtctacaaggtgcagtttgacacaaaaccactgaagtttgttcgctggcagaattccaaacgattgctctatgggtctttggtatgcatgtccaaggacaacttcgagacatttctttttgccaccgtatctaacagggagcaggaagatctctgccgaggaattgtccagctctgcttcaatgagcaaagccaacagctgctagcagaggtccagccctctgactctttcctcatggtagagacaactgcatactttgaggcctacaggcacgtcctggaaggactccaggaggtccaggaggaagatgttcccttccagaggaatatcgtggagtgtaactctcatgtgaaggagccaaggtacttgctaatggggggcagatacgactttacccccttaatagagaatccttcagccactggggaatttctaagaaatgtcgagggtttgagacatcccagaattaatgtcttagatcctggccagtggccctcaaaagaagccctgaagctggatgactcccagatggaagccttgcagtttgctctcacaagggaactggctattattcaaggacctcctggaacaggcaaaacctatgtgggtctaaaaattgttcaggccctcctaaccaacgagtctgtttggcaaattagcctccagaagttccccatcttggttgtgtgttatactaatcatgctttggaccagtttctggaaggcatctacaattgtcagaagaccagcattgtgcgggtgggtggaaggagcaacagtgaaatcctgaagcagttcaccctaagggagctgaggaacaagcgggaattccgccgcaacctccccatgcacctccgaagggcctacatgagtatcatgacacagatgaaggagtcagagcaagagcttcatgaaggagccaagaccctggagtgcaccatgcgtggtgtcctacgggaacagtacctgcagaagtacatctcaccccagcactgggaaagtctcatgaatggaccagtgcaggatagtgaatggatttgcttccagcactggaagcattccatgatgctggagtggctaggtcttggtgtcggttctttcacgcaaagtgtttctccagcaggacctgagaatacagcccaggcagaaggggatgaggaggaagaaggggaggaggagagttcgctgatagagatcgcagaggaagctgacctgattcaagcagaccgggtgattgaggaggaagaggtggtgaggccccagcggcggaagaaggaagagagtggagcagaccaggagttggctaaaatgcttctggccatgaggctagaccattgtggcactgggacagcagctggacaggagcaagccacaggagagtggcagacccagcgcaaccagaaaaagaaaatgaaaaaaagagtgaaggatgagcttcgcaaactgaacaccatgactgcagccgaggccaacgagatcgaggatgtttggcagctggacctcagttctcgctggcagctttataggctctggctacagttgtaccaggctgacacccgccggaagatcctcagctatgaacgccagtaccgcacatcagcagaaagaatggccgagctgagactccaggaagacctgcacattcttaaagatgcccaggttgtaggaatgacaaccacaggtgctgccaaataccgccagatcctacagaaggtggagccgaggattgtcatagtggaagaagctgcggaagtccttgaggcccataccattgccacattgagcaaagcttgccagcacctcattttgattggggaccaccagcagctgcgccccagtgccaacgtgtatgatctggccaagaacttcaaccttgaggtgtccctttttgaacggctagtgaaagtaaacattccctttgtccgtctgaattaccagcaccgtatgtgccctgaaattgcccgccttttgaccccccacatttaccaggatctggagaatcatccatctgttcttaagtatgagaagattaagggggtgtcttccaaccttttctttgtagaacacaactttcctgaacaggaaatccaagagggcaaaagccatcagaaccagcatgaggctcactttgtggtagagctgtgcaagtacttcctgtgccaggaatacctgccttcccagatcaccatcctcactacctataccgggcagctcttctgcctgcgcaaactgatgcctgccaagacatttgctggcgtcagggtccatgttgtggacaaataccaaggggaagagaatgacatcatcctcctctcgctagtgcggagcaaccaagaaggcaaggtgggttttctgcagatatccaaccgcatctgtgtggccttgtcccgagccaagaagggaatgtactgcatcggaaacatgcagatgctggccaaggtgcccctgtggagcaagatcattcatacacttcgagagaacaatcaaataggccccatgctccggctctgctgccagaaccaccctgaaacccacaccttagtatccaaagcttctgacttccaaaaagtacccgaaggaggctgcagcctgccctgcgagttccgcctgggctgtgggcatgtctgcacccgtgcctgccacccttatgactcttcacacaaggagttccaatgcatgaagccatgccagaaggtcatctgtcaggaagggcaccggtgtccccttgtttgcttccaggagtgtcagccttgtcaggtgaaggtgcccaaaaccattcctcggtgcggccatgaacaaatggtcccttgttccgtgcctgagtcagatttctgctgccaggagccttgctccaagtctctgagatgtgggcacagatgcagccacccatgtggtgaggactgtgtgcagctgtgttcagaaatggtcaccataaaactcaagtgtgggcacagtcaaccggtaaaatgtggtcatgtggaaggcctcctgtatggtggtctgctagtcaagtgtaccacaaagtgtggcactatcttggactgcgggcatccttgcccaggctcctgccacagctgcttcgaagggcgtttccatgaacgctgtcagcagccctgcaagcgcctgcttatctgctcacacaagtgccaggaaccatgcattggtgagtgcccaccctgccagcggacctgtcagaaccgctgtgtccacagccagtgcaagaagaaatgtggggagctgtgtagtccctgcgtggaaccctgtgtctggcgctgccagcactaccagtgcaccaaactctgctctgagccctgcaaccgacccccatgctatgtgccttgtactaagctgctagtttgtggccacccctgcattggtctctgtggggagccatgccccaagaaatgccggatctgccacatggatgaggtcacccaaatattctttggctttgaggatgagcctgatgcccgctttgtgcagctggaagactgcagccacatctttgaggtgcaagccctagaccgctacatgaatgaacagaaggatgatgaagtcgccatcagattgaaagtctgccctatctgccaggtgcccatccgcaaaaacctgaggtatggaactagcataaaacagcggctagaagagattgaaatcatcaaggaaaagatccagggctcagcaggggaaatagcaaccagccaggaacggcttaaggccctgctggagaggaagagcctcctccaccagctgcttcctgaagacttcctgatgttaaaggagaagctggcccagaaaaatctgtcagtgaaggacctgggtctggttgagaattacatcagcttctatgaccacctggccagcctgtgggattccctgaaaaagatgcatgtcttagaagagaaaagagtgaggactcgactagaacaggtccatgagtggctggccaagaagcgcttgagcttcactagccaggaactaagtgacctccgaagtgaaatccagaggctcacatacctggtgaaccttctgacccgctacaagatagcagagaagaaggtgaaagatagcatagcagtagaggtctatagtgtccagaatatccttgagaaaacatgtaagttcacccaagaggatgaacaacttgtgcaggaaaagatggaagctctgaaagccacccttccctgctctggcctgggcatctcagaggaagagcgagtgcagattgtcagtgccataggttatcctcgtggtcactggttcaagtgccgcaatggccatatctatgtgattggcgattgtgggggagccatggagaggggcacgtgtcctgactgtaaggaagtgattggtggcacaaatcatactctggaaagaagcaaccagcttgcttctgaaatggatggagcccagcatgctgcctggtctgacacggccaacaacctgatgaactttgaggagatccaggggatgatgtaggaagatggtacaccactgccttttgccctcgccactgaatgactggggccagctccctaatgaaggaactgaagtttgttttttattatcatcctttttaggctgggcgcagtggcttacgcctgtaatcccagcactttgggaggccgaggcaggcggatcacgaggtcaggagttcgagaccagcctgaccaacatggcgaaaccccgtctctactaaaaatacaaaaattagctgggcgttatggcgggcgcctgtaatcccagctacttgggaggctgaggcagaagaatcgcttaaacccaggaggcggaggttgcagtgagctgagatcatgccattgcactccagtctgggcgacaggagcaagactctgtctcaaaaaaaaaaaaatcattctttttagtcttagcacctacttaaggatccacttttagggctcacccacatttgtttctagatttacccctgcgctagagtaagcactttatctccagaactgagagcaaagttaacaaatctcaccccttctctcctgcaaattagtggacagactccctggaacatgtttggggcttccacctagggccacctagtggtatctctgggtctttacttggtcagatgtttattctacattgttccccaggaacagagtatgagctcattgatgcagaccgattctaattgccaggccctaatttgcagactaactctcataataaacagaggcccatagttgtttatgaactgcttatcccttaaaggagcacaagaacccctccctgccctccttgggcaccctgcctccaggagatggaggcacgtgataagacaaaagactgcaccaactcaccctgacacagttacatagtcactgagagtggggaagatgggacagcccacatgctgcataagatgggccttatgcagcaggcccaggtcgtcattaaggagtgacccctttcctgtaacctgcactttgggatggtagaagtttctttacctgctgacaggtttggtggcactgctggttacccctgggccctgaatggagctaaaatcacatttggtaccagcagcacctatcccaagtgtgatccttcatcccaacactccctcttggagctgttccctgggtagagctagcatgccagcagcttctgcaggctccaaacccaggccagaagccagacccaggcctgctgcctgcatctgcattccctccttccagtgttccttagaacagacatttaggtatctcaggtcctttctaagtgtccctttcctatgtatgcatttcctttttttgtctttactatgcactttagcttataaagccaattaaaaacaatgattgagaaaatca

SEQ ID NO: 204689 - DNA, 5235 bp, Homo sapiens
  Payload ID: 20373
  Gene Name: zinc finger, NFX1-type containing 1
  ENST ID: ENST00000371754
  CDS Start-End: 455-4267
ttcctcgccatgtcgcgcttcacacgcaccaaaccgctcgacgggttccccttcctctggggccggctgaggcccgcaaaggccttgggcgcagtcatctcccgccccccgcggtccgctcccctcagccgcgcccgcctgagcccgccggctccgccgccggggggagctgaggtgacgccctcctcgagggcggaggcgccggccgtgcctgggccaggccctcgtgctctccaccctgggcccccgcctcctccttctcctcctctgggccgcccgcccggctccgcccagggtctgcggggaacggaaaccgaaagtgcgcggcgccgggcggggccaccgacctgcctgggccgaagccccagcactcgccggcggcagtgaaaggacgcgccggagccggttttccagataacagaaagtaacgtgaaggaattcaggtgactcagacatggaggagagaagacctcatctggatgccaggcccaggaattcccataccaaccacagaggccctgtggatggagagttaccaccaagagctagaaatcaggccaataacccaccagccaatgctctccgaggaggagccagccaccctggaaggcatcctagggccaacaaccatcctgctgcttactggcagagggaagagagatttagggccatgggcaggaacccacatcaaggaaggaggaaccaggaggggcatgccagcgacgaagctagagaccaaagacatgaccaggagaatgacaccaggtggagaaatggcaaccaggactgtaggaaccgcagaccaccatggtccaatgacaacttccagcagtggcggactccccaccagaagcctacagaacagccacagcaggcgaagaaactgggctacaagttcttagaaagtcttctgcagaaagacccttctgaggtggtcatcacacttgccacaagtttagggctgaaagagctcctttctcattcttccatgaaatctaacttccttgagctcatctgtcaggttcttcggaaggcttgtagctccaaaatggatcgccagagtgttctccatgtactgggcatattgaaaaactccaaatttctcaaagtctgcctgcctgcttatgtggtagggatgatcactgaacccatccctgacatccgaaaccagtatccagagcacataagcaacatcatctccctcctccaggaccttgtaagtgtcttccctgccagctctgtgcaggaaacttccatgctggtttccctcctgccaacctctcttaatgctctgagagcctctggtgttgacatagaagaggaaacggagaagaacctggaaaaggtacagactatcattgaacatctgcaggaaaagaggcgagagggcactttgagagtggatacctacactctagtgcagcctgaggcagaagaccatgttgagagctaccgaaccatgcccatttaccctacctacaatgaagtgcacttggatgagaggcccttccttcgccccaatatcatttctggaaaatacgacagcactgctatctatctggatacccacttccggctcctgcgagaagatttcgtcagacctttacgggaaggtattttggaacttctccaaagctttgaagaccagggcctgaggaagagaaagtttgatgacatccgaatctactttgacaccaggattatcacccccatgtgttcatcatcaggcatagtctacaaggtgcagtttgacacaaaaccactgaagtttgttcgctggcagaattccaaacgattgctctatgggtctttggtatgcatgtccaaggacaacttcgagacatttctttttgccaccgtatctaacagggagcaggaagatctctgccgaggaattgtccagctctgcttcaatgagcaaagccaacagctgctagcagaggtccagccctctgactctttcctcatggtagagacaactgcatactttgaggcctacaggcacgtcctggaaggactccaggaggtccaggaggaagatgttcccttccagaggaatatcgtggagtgtaactctcatgtgaaggagccaaggtacttgctaatggggggcagatacgactttacccccttaatagagaatccttcagccactggggaatttctaagaaatgtcgagggtttgagacatcccagaattaatgtcttagatcctggccagtggccctcaaaagaagccctgaagctggatgactcccagatggaagccttgcagtttgctctcacaagggaactggctattattcaaggacctcctggaacaggcaaaacctatgtgggtctaaaaattgttcaggccctcctaaccaacgagtctgtttggcaaattagcctccagaagttccccatcttggttgtgtgttatactaatcatgctttggaccagtttctggaaggcatctacaattgtcagaagaccagcattgtgcgggtgggtggaaggagcaacagtgaaatcctgaagcagttcaccctaagggagctgaggaacaagcgggaattccgccgcaacctccccatgcacctccgaagggcctacatgagtatcatgacacagatgaaggagtcagagcaagagcttcatgaaggagccaagaccctggagtgcaccatgcgtggtgtcctacgggaacagtacctgcagaagtacatctcaccccagcactgggaaagtctcatgaatggaccagtgcaggatagtgaatggatttgcttccagcactggaagcattccatgatgctggagtggctaggtcttggtgtcggttctttcacgcaaagtgtttctccagcaggacctgagaatacagcccaggcagaaggggatgaggaggaagaaggggaggaggagagttcgctgatagagatcgcagaggaagctgacctgattcaagcagaccgggtgattgaggaggaagaggtggtgaggccccagcggcggaagaaggaagagagtggagcagaccaggagttggctaaaatgcttctggccatgaggctagaccattgtggcactgggacagcagctggacaggagcaagccacaggagagtggcagacccagcgcaaccagaaaaagaaaatgaaaaaaagagtgaaggatgagcttcgcaaactgaacaccatgactgcagccgaggccaacgagatcgaggatgtttggcagctggacctcagttctcgctggcagctttataggctctggctacagttgtaccaggctgacacccgccggaagatcctcagctatgaacgccagtaccgcacatcagcagaaagaatggccgagctgagactccaggaagacctgcacattcttaaagatgcccaggttgtaggaatgacaaccacaggtgctgccaaataccgccagatcctacagaaggtggagccgaggattgtcatagtggaagaagctgcggaagtccttgaggcccataccattgccacattgagcaaagcttgccagcacctcattttgattggggaccaccagcagctgcgccccagtgccaacgtgtatgatctggccaagaacttcaaccttgaggtgtccctttttgaacggctagtgaaagtaaacattccctttgtccgtctgaattaccagcaccgtatgtgccctgaaattgcccgccttttgaccccccacatttaccaggatctggagaatcatccatctgttcttaagtatgagaagattaaggccaagtcaaattcctgcagagctttggcaactgggatgagaagaaagcataagatttcagggatgattttatctttttttaagcttacgataagaagtgcacgttttcaattgctcctctcgggctcttggaccactgcctccttccccttctccaggagccgctttgctgtattgatctgtagagataacaaaaggatgcctgccgtgaaacccgtatctactaacacaggaagccacgggctgcaaatgcctggggctctgatgggagaaacatttcagaagggcagcaccagcagggatgcagcagcttgcttactgagcagccttgtgaacaagatcccgcctcgcagcctcacctgggcttctgactgctgcatctctttttcctccgcctctagctgcagaactgcatacacatctttctccattttctcaatcttgtcccggaatttgaggatgacatctcaatgggagaaaataaaaaggatttacaaataagggtaggccaggcatggtggctcacacctgtaacccggcactctgggagattgaggtgggaggattgcttgagcccaggaatttgaggccagcctgggcaacgtggccagactctgtctctacaaaaaaaaaaaaaaaaaaaaaaaaagccaggcacagtggctcatgcctgtaatcccacgctttgggaggccaaggcaggtggatcacctgaggtcaggagtttgagaccagcttggccaatgctgtgaaaccccgtctctattaaaaatacaaaaatcagctgggtgtgggggcacacgcctgtaatcccagctactactcagaaggctgaggcaggagaactgcttgaacccacgaggcggaggctgcagtaagccaagatgacaccactacactccagcctgggcaaaagagcgagactccatctaaaaaaaaaaaaaaaattagccatcatggtggcacacacctgtagtcccacctactcaggaggctgaggagaagaactgcttgaacccaggagttcgaggcaacagtaagctatgatcgcacccctgtaccccagcctgggcaacaaagcaagaccttatcttaaacaaaataaggcagtggctcaagcctgtaatcccagcactttgggaggccaaggcgggtggatcacgaggtcaagagatcgagaccatcctggacaacatggtgaaaccccacctgtactaaaaatataaaaattagctgggcgtggtggcatgcacctgtagtcccagctacttgggaggctgaggcaggaggatcacttgaacccgggacgcagaggttgcaatgggccgagatcgcaccactgcactccagcctggcaacagagcaagactccatctcaaaaataaattaaataaaataaaataagggtgactactaatactgtgtaactgatgaaaataatttagctgtgcatttactgacataggaaa

SEQ ID NO: 204690 - DNA, 7371 bp, Homo sapiens
  Payload ID: 20373
  Gene Name: zinc finger, NFX1-type containing 1
  Uniprot ID: Q9P2E3
  ENST ID: ENST00000396105
  CDS Start-End: 248-6004
gtgcctgggccaggccctcgtgctctccaccctgggcccccgcctcctccttctcctcctctgggccgcccgcccggctccgcccagggtctgcggggaacggaaaccgaaagtgcgcggcgccgggcggggccaccgacctgcctgggccgaagccccagcactcgccggcggcagtgaaaggacgcgccggagccggttttccagataacagaaagtaacgtgaaggaattcaggtgactcagacatggaggagagaagacctcatctggatgccaggcccaggaattcccataccaaccacagaggccctgtggatggagagttaccaccaagagctagaaatcaggccaataacccaccagccaatgctctccgaggaggagccagccaccctggaaggcatcctagggccaacaaccatcctgctgcttactggcagagggaagagagatttagggccatgggcaggaacccacatcaaggaaggaggaaccaggaggggcatgccagcgacgaagctagagaccaaagacatgaccaggagaatgacaccaggtggagaaatggcaaccaggactgtaggaaccgcagaccaccatggtccaatgacaacttccagcagtggcggactccccaccagaagcctacagaacagccacagcaggcgaagaaactgggctacaagttcttagaaagtcttctgcagaaagacccttctgaggtggtcatcacacttgccacaagtttagggctgaaagagctcctttctcattcttccatgaaatctaacttccttgagctcatctgtcaggttcttcggaaggcttgtagctccaaaatggatcgccagagtgttctccatgtactgggcatattgaaaaactccaaatttctcaaagtctgcctgcctgcttatgtggtagggatgatcactgaacccatccctgacatccgaaaccagtatccagagcacataagcaacatcatctccctcctccaggaccttgtaagtgtcttccctgccagctctgtgcaggaaacttccatgctggtttccctcctgccaacctctcttaatgctctgagagcctctggtgttgacatagaagaggaaacggagaagaacctggaaaaggtacagactatcattgaacatctgcaggaaaagaggcgagagggcactttgagagtggatacctacactctagtgcagcctgaggcagaagaccatgttgagagctaccgaaccatgcccatttaccctacctacaatgaagtgcacttggatgagaggcccttccttcgccccaatatcatttctggaaaatacgacagcactgctatctatctggatacccacttccggctcctgcgagaagatttcgtcagacctttacgggaaggtattttggaacttctccaaagctttgaagaccagggcctgaggaagagaaagtttgatgacatccgaatctactttgacaccaggattatcacccccatgtgttcatcatcaggcatagtctacaaggtgcagtttgacacaaaaccactgaagtttgttcgctggcagaattccaaacgattgctctatgggtctttggtatgcatgtccaaggacaacttcgagacatttctttttgccaccgtatctaacagggagcaggaagatctctgccgaggaattgtccagctctgcttcaatgagcaaagccaacagctgctagcagaggtccagccctctgactctttcctcatggtagagacaactgcatactttgaggcctacaggcacgtcctggaaggactccaggaggtccaggaggaagatgttcccttccagaggaatatcgtggagtgtaactctcatgtgaaggagccaaggtacttgctaatggggggcagatacgactttacccccttaatagagaatccttcagccactggggaatttctaagaaatgtcgagggtttgagacatcccagaattaatgtcttagatcctggccagtggccctcaaaagaagccctgaagctggatgactcccagatggaagccttgcagtttgctctcacaagggaactggctattattcaaggacctcctggaacaggcaaaacctatgtgggtctaaaaattgttcaggccctcctaaccaacgagtctgtttggcaaattagcctccagaagttccccatcttggttgtgtgttatactaatcatgctttggaccagtttctggaaggcatctacaattgtcagaagaccagcattgtgcgggtgggtggaaggagcaacagtgaaatcctgaagcagttcaccctaagggagctgaggaacaagcgggaattccgccgcaacctccccatgcacctccgaagggcctacatgagtatcatgacacagatgaaggagtcagagcaagagcttcatgaaggagccaagaccctggagtgcaccatgcgtggtgtcctacgggaacagtacctgcagaagtacatctcaccccagcactgggaaagtctcatgaatggaccagtgcaggatagtgaatggatttgcttccagcactggaagcattccatgatgctggagtggctaggtcttggtgtcggttctttcacgcaaagtgtttctccagcaggacctgagaatacagcccaggcagaaggggatgaggaggaagaaggggaggaggagagttcgctgatagagatcgcagaggaagctgacctgattcaagcagaccgggtgattgaggaggaagaggtggtgaggccccagcggcggaagaaggaagagagtggagcagaccaggagttggctaaaatgcttctggccatgaggctagaccattgtggcactgggacagcagctggacaggagcaagccacaggagagtggcagacccagcgcaaccagaaaaagaaaatgaaaaaaagagtgaaggatgagcttcgcaaactgaacaccatgactgcagccgaggccaacgagatcgaggatgtttggcagctggacctcagttctcgctggcagctttataggctctggctacagttgtaccaggctgacacccgccggaagatcctcagctatgaacgccagtaccgcacatcagcagaaagaatggccgagctgagactccaggaagacctgcacattcttaaagatgcccaggttgtaggaatgacaaccacaggtgctgccaaataccgccagatcctacagaaggtggagccgaggattgtcatagtggaagaagctgcggaagtccttgaggcccataccattgccacattgagcaaagcttgccagcacctcattttgattggggaccaccagcagctgcgccccagtgccaacgtgtatgatctggccaagaacttcaaccttgaggtgtccctttttgaacggctagtgaaagtaaacattccctttgtccgtctgaattaccagcaccgtatgtgccctgaaattgcccgccttttgaccccccacatttaccaggatctggagaatcatccatctgttcttaagtatgagaagattaagggggtgtcttccaaccttttctttgtagaacacaactttcctgaacaggaaatccaagagggcaaaagccatcagaaccagcatgaggctcactttgtggtagagctgtgcaagtacttcctgtgccaggaatacctgccttcccagatcaccatcctcactacctataccgggcagctcttctgcctgcgcaaactgatgcctgccaagacatttgctggcgtcagggtccatgttgtggacaaataccaaggggaagagaatgacatcatcctcctctcgctagtgcggagcaaccaagaaggcaaggtgggttttctgcagatatccaaccgcatctgtgtggccttgtcccgagccaagaagggaatgtactgcatcggaaacatgcagatgctggccaaggtgcccctgtggagcaagatcattcatacacttcgagagaacaatcaaataggccccatgctccggctctgctgccagaaccaccctgaaacccacaccttagtatccaaagcttctgacttccaaaaagtacccgaaggaggctgcagcctgccctgcgagttccgcctgggctgtgggcatgtctgcacccgtgcctgccacccttatgactcttcacacaaggagttccaatgcatgaagccatgccagaaggtcatctgtcaggaagggcaccggtgtccccttgtttgcttccaggagtgtcagccttgtcaggtgaaggtgcccaaaaccattcctcggtgcggccatgaacaaatggtcccttgttccgtgcctgagtcagatttctgctgccaggagccttgctccaagtctctgagatgtgggcacagatgcagccacccatgtggtgaggactgtgtgcagctgtgttcagaaatggtcaccataaaactcaagtgtgggcacagtcaaccggtaaaatgtggtcatgtggaaggcctcctgtatggtggtctgctagtcaagtgtaccacaaagtgtggcactatcttggactgcgggcatccttgcccaggctcctgccacagctgcttcgaagggcgtttccatgaacgctgtcagcagccctgcaagcgcctgcttatctgctcacacaagtgccaggaaccatgcattggtgagtgcccaccctgccagcggacctgtcagaaccgctgtgtccacagccagtgcaagaagaaatgtggggagctgtgtagtccctgcgtggaaccctgtgtctggcgctgccagcactaccagtgcaccaaactctgctctgagccctgcaaccgacccccatgctatgtgccttgtactaagctgctagtttgtggccacccctgcattggtctctgtggggagccatgccccaagaaatgccggatctgccacatggatgaggtcacccaaatattctttggctttgaggatgagcctgatgcccgctttgtgcagctggaagactgcagccacatctttgaggtgcaagccctagaccgctacatgaatgaacagaaggatgatgaagtcgccatcagattgaaagtctgccctatctgccaggtgcccatccgcaaaaacctgaggtatggaactagcataaaacagcggctagaagagattgaaatcatcaaggaaaagatccagggctcagcaggggaaatagcaaccagccaggaacggcttaaggccctgctggagaggaagagcctcctccaccagctgcttcctgaagacttcctgatgttaaaggagaagctggcccagaaaaatctgtcagtgaaggacctgggtctggttgagaattacatcagcttctatgaccacctggccagcctgtgggattccctgaaaaagatgcatgtcttagaagagaaaagagtgaggactcgactagaacaggtccatgagtggctggccaagaagcgcttgagcttcactagccaggaactaagtgacctccgaagtgaaatccagaggctcacatacctggtgaaccttctgacccgctacaagatagcagagaagaaggtgaaagatagcatagcagtagaggtctatagtgtccagaatatccttgagaaaacatgtaagttcacccaagaggatgaacaacttgtgcaggaaaagatggaagctctgaaagccacccttccctgctctggcctgggcatctcagaggaagagcgagtgcagattgtcagtgccataggttatcctcgtggtcactggttcaagtgccgcaatggccatatctatgtgattggcgattgtgggggagccatggagaggggcacgtgtcctgactgtaaggaagtgattggtggcacaaatcatactctggaaagaagcaaccagcttgcttctgaaatggatggagcccagcatgctgcctggtctgacacggccaacaacctgatgaactttgaggagatccaggggatgatgtaggaagatggtacaccactgccttttgccctcgccactgaatgactggggccagctccctaatgaaggaactgaagtttgttttttattatcatcctttttaggctgggcgcagtggcttacgcctgtaatcccagcactttgggaggccgaggcaggcggatcacgaggtcaggagttcgagaccagcctgaccaacatggcgaaaccccgtctctactaaaaatacaaaaattagctgggcgttatggcgggcgcctgtaatcccagctacttgggaggctgaggcagaagaatcgcttaaacccaggaggcggaggttgcagtgagctgagatcatgccattgcactccagtctgggcgacaggagcaagactctgtctcaaaaaaaaaaaaatcattctttttagtcttagcacctacttaaggatccacttttagggctcacccacatttgtttctagatttacccctgcgctagagtaagcactttatctccagaactgagagcaaagttaacaaatctcaccccttctctcctgcaaattagtggacagactccctggaacatgtttggggcttccacctagggccacctagtggtatctctgggtctttacttggtcagatgtttattctacattgttccccaggaacagagtatgagctcattgatgcagaccgattctaattgccaggccctaatttgcagactaactctcataataaacagaggcccatagttgtttatgaactgcttatcccttaaaggagcacaagaacccctccctgccctccttgggcaccctgcctccaggagatggaggcacgtgataagacaaaagactgcaccaactcaccctgacacagttacatagtcactgagagtggggaagatgggacagcccacatgctgcataagatgggccttatgcagcaggcccaggtcgtcattaaggagtgacccctttcctgtaacctgcactttgggatggtagaagtttctttacctgctgacaggtttggtggcactgctggttacccctgggccctgaatggagctaaaatcacatttggtaccagcagcacctatcccaagtgtgatccttcatcccaacactccctcttggagctgttccctgggtagagctagcatgccagcagcttctgcaggctccaaacccaggccagaagccagacccaggcctgctgcctgcatctgcattccctccttccagtgttccttagaacagacatttaggtatctcaggtcctttctaagtgtccctttcctatgtatgcatttcctttttttgtctttactatgcactttagcttataaagccaattaaaaacaatgattgagaaaa

SEQ ID NO: 204691 - DNA, 2122 bp, Homo sapiens
  Payload ID: 20373
  Gene Name: zinc finger, NFX1-type containing 1
  ENST ID: ENST00000455070
  CDS Start-End: 1-2122
tccaaaatggatcgccagagtgttctccatgtactgggcatattgaaaaactccaaatttctcaaagtctgcctgcctgcttatgtggtagggatgatcactgaacccatccctgacatccgaaaccagtatccagagcacataagcaacatcatctccctcctccaggaccttgtaagtgtcttccctgccagctctgtgcaggaaacttccatgctggtttccctcctgccaacctctcttaatgctctgagagcctctggtgttgacatagaagaggaaacggagaagaacctggaaaaggtacagactatcattgaacatctgcaggaaaagaggcgagagggcactttgagagtggatacctacactctagtgcagcctgaggcagaagaccatgttgagagctaccgaaccatgcccatttaccctacctacaatgaagtgcacttggatgagaggcccttccttcgccccaatatcatttctggaaaatacgacagcactgctatctatctggatacccacttccggctcctgcgagaagatttcgtcagacctttacgggaaggtattttggaacttctccaaagctttgaagaccagggcctgaggaagagaaagtttgatgacatccgaatctactttgacaccaggattatcacccccatgtgttcatcatcaggcatagtctacaaggtgcagtttgacacaaaaccactgaagtttgttcgctggcagaattccaaacgattgctctatgggtctttggtatgcatgtccaaggacaacttcgagacatttctttttgccaccgtatctaacagggagcaggaagatctctgccgaggaattgtccagctctgcttcaatgagcaaagccaacagctgctagcagaggtccagccctctgactctttcctcatggtagagacaactgcatactttgaggcctacaggcacgtcctggaaggactccaggaggtccaggaggaagatgttcccttccagaggaatatcgtggagtgtaactctcatgtgaaggagccaaggtacttgctaatggggggcagatacgactttacccccttaatagagaatccttcagccactggggaatttctaagaaatgtcgagggtttgagacatcccagaattaatgtcttagatcctggccagtggccctcaaaagaagccctgaagctggatgactcccagatggaagccttgcagtttgctctcacaagggaactggctattattcaaggacctcctggaacaggcaaaacctatgtgggtctaaaaattgttcaggccctcctaaccaacgagtctgtttggcaaattagcctccagaagttccccatcttggttgtgtgttatactaatcatgctttggaccagtttctggaaggcatctacaattgtcagaagaccagcattgtgcgggtgggtggaaggagcaacagtgaaatcctgaagcagttcaccctaagggagctgaggaacaagcgggaattccgccgcaacctccccatgcacctccgaagggcctacatgagtatcatgacacagatgaaggagtcagagcaagagcttcatgaaggagccaagaccctggagtgcaccatgcgtggtgtcctacgggaacagtacctgcagaagtacatctcaccccagcactgggaaagtctcatgaatggaccagtgcaggatagtgaatggatttgcttccagcactggaagcattccatgatgctggagtggctaggtcttggtgtcggttctttcacgcaaagtgtttctccagcaggacctgagaatacagcccaggcagaaggggatgaggaggaagaaggggaggaggagagttcgctgatagagatcgcagaggaagctgacctgattcaagcagaccgggtgattgaggaggaagaggtggtgaggccccagcggcggaagaaggaagagagtggagcagaccaggagttggctaaaatgcttctggccatgaggctagaccattgtggcactgggacagcagctggacaggagcaagccacaggagagtggcagacagtaccctgcctggtattgatgtctgcagacccagcgcaaccag

SEQ ID NO: 204692 - DNA, 5695 bp, Homo sapiens
  Payload ID: 20374
  Gene Name: zinc finger, RAN-binding domain containing 1
  Uniprot ID: Q9UGI0
  ENST ID: ENST00000359653
  CDS Start-End: 372-2498
gtgatggcctccctgaaattaaacatttctattagtggcttcccgttaatctcatccttcttagatcaaacctcgttatatctcctgcctatctcttttgcattccaaagttcagttttattaaatcccagggtctaagattttttctttgagaatttatctccagtgtttctatggaaattaaaaaagaaaattaggataattcaatgtcgaaatgttgcatgcatcttttgagaaatttatattttgtaggttgaaggacttgctttttgggcagcgtatttttggaggtggaatgtagttattttaataaccatgtcctaattatttatagcttcctgcctgacacagctcacttcaagaagtgcacaatgtcagaacgtggaattaagtgggcttgtgaatattgtacgtatgaaaactggccatctgcaatcaagtgtactatgtgtcgtgcccaaagacctagtggaacaattattacagaagatccatttaaaagtggttcaagtgatgttggtagagattgggatccttccagcaccgaaggaggaagtagtcctttgatatgtccagactctagtgcaagaccaagggtgaaatcttcgtatagcatggaaaatgcaaataagtggtcatgccacatgtgtacatatttgaactggccaagagcaatcagatgtacccagtgcttatcccaacgtaggaccaggagtcctacagaatctcctcagtcctcaggatctggctcaagaccagttgctttttctgttgatccttgtgaggaatacaatgatagaaataaactgaacactaggacacagcactggacttgctctgtttgcacatatgaaaactgggccaaggctaaaagatgtgttgtttgtgatcatcccagacctaataacattgaagcaatagaattggcagagactgaagaggcttcttcaataataaatgagcaagacagagctcgatggaggggaagttgcagtagtggtaatagccaaaggagatcacctcctgctacgaagcgggactctgaagtgaaaatggattttcagaggattgaattggctggtgctgtgggaagcaaggaggaacttgaagtagactttaaaaaactaaagcaaattaaaaacaggatgaaaaagactgattggctcttcctcaatgcttgtgtgggggttgtagaaggtgatttagctgccatagaagcatacaagtcatcaggaggagacattgcacgtcagctcaccgcagatgaagtacgcttgctgaatcgtccttctgcctttgatgttggctatactcttgtacacttggctatacgttttcagaggcaggatatgctagcaatattgcttacagaggtgtctcaacaagcagcaaagtgtattccagcaatggtgtgtcctgaactgacagaacaaatccggagagagatagctgcctctcttcatcagagaaagggggattttgcttgctattttctgactgaccttgtaacatttacattgccagcagatattgaagatttgcccccaacagtccaagaaaaattatttgatgaggtgcttgatagagacgttcaaaaagaattagaagaagaatctccaattattaactggtccttggaattggctacacgtttggacagtcgactgtatgcactttggaaccggactgcaggagactgcctacttgattcagttctacaagctacctggggcatctatgacaaggactcagtgcttcggaaagccctgcatgacagcctgcatgactgttcacattggttttacacacgctggaaagattgggaatcatggtattctcagagctttggtttacatttttccttgagagaagaacagtggcaagaagactgggcatttatactctctcttgctagtcagcctggagcaagcttggagcagacgcacatttttgtactggcacatattcttagacgaccaattatagtttatggagtaaaatattacaagagtttccggggagaaactttaggatatactcggtttcaaggtgtttatctgcctttgttgtgggaacagagtttttgttggaaaagtccgattgctctgggttatacgaggggccacttctctgctttggttgccatggaaaatgatggctatggcaaccgaggtgctggtgctaatctcaataccgatgatgatgtcaccatcacatttttgcctctggttgacagtgaaaggaagctactccatgtgcacttcctttctgctcaggagctaggtaatgaggaacagcaagaaaaactgctcagggagtggctggactgctgtgtgacggaggggggagttctggttgccatgcagaagagttctcggcggcgaaatcaccccctggtcactcagatggtagaaaaatggcttgaccgctaccgacagatccggccgtgtacatccctgtctgatggagaggaagatgaggatgatgaagatgaatgaaaaaaaaaatcaaacagcagaagaccaaggcatcagatctgtaatgaccctaaagttagtgtggtgctccaagcagagtcgacatcatggaatgaaccaaatctggcaggatctgctcggggaagtgttttcctggaccacacacaccttatggagataatgcctctgctgcgtgaggagacagagaactttagttggactacagtttgtaaaaaaaactaattttattaagacagaactttttttccttccaaattgtaaatctgtctataaatgtaacgcatgtggttgtgtaagacattgtttaataggaaaagttgtaccagcatcttcatattattgagaaaattttttccagcatgggcacttagaaaaagcacatggcaaatggctctttgttcctttcagatattatttcagtagaacctggcattctactttcaccttaaaagatccatctaagtctcagatctggaaacgttttgtaccgattatccacagcaaaacaaaaataagcttttattttattaataatttcgttcctcttgtgcccaatcaaatcttttaggaacaaactgcaagaaaagctaagaatgttttagagtgaactaaatacagacattgcttacttgttttgaagagggttttggttttggttattgtgtctttaagttttctgatatgccccctttcaatatttagatatttatttgttgggaagaataccttaaaatgagggttcttattccagattctgggcagtggtctgtgagtagtttttttcctggatgaaaagggagcaagcccacttgtcactaaatgaattgtgtgaaatgtgctcacttggactccatcaacaatgtgctgctcccagattgccatgccagagggtcttcggattcttccttctatcacctctgctctaagcaaatcttgttagaagggcatgcctttgcttaggcagattgggaataccaattcactacagaataaagattttaaaaatgcaataaggtggcaaatgcattgtatgaagaatttctcagtgtttagtctgagaatttttgcatgttggttaattgtggccattctttaatttaaagttaaaactataatcttaggtagaaaaacttttttataagaagtattatttgaccacttcaggtatacattcaatactgggtaaaaatttcagacctatctcaggaacacagaaatatttggtgtcctgataagcactttctagactattgatgtggccaggaatttggaaagacgacacacgcacgcgcgcgcgcgcacacacacacacacacacacacacacacacagttttttccttccctgtgatgaaaaaggctgtgaaaaccttaaagtatttgcttgcttcttgttttgtttagttgataatgaaatgtgtacaacctcaaatttgctgccagaatactaaaaatagaaaaatacccacaaaactgtcatgtctttagttctttccccccgaaaactcagtaaaaaggtgttcccaggatgaaaagatcattttttgctgcatgctaaatcttgcaggaaaaatgattttttagtacgattctgtagaaatgaatctttgatataatgtaaatgctgctgtttgtttcaagtggtgaatgtgttgttaaaaattggctgtttgctttcattttggccaataagtaatcaagtttgtagaaaatgttagcattctgactacttagcatctgtagtaatttctctatgtatagggataattttttagtgggcagagatcctgttctagttgcctgttaagcaaaatctgccctcccaattgaaaaagccaaagagaattgttagagggaaaagcatgtagccattgcagtctgcattgcagccagcgttgtccagagtacacgctcagcacttagcttctactgtgtgttgtggtctggtgagtgttgtttcccctgagcgctctattatttatttatttattatcaatcagtgaccctgaccacatagtgtgataggtgcagcattcttccctgtgggaaagaattaaagatggttccatttcctaggctacagacaggaatggggctctaaatggttttcatagactggctgttaaaggccaaaaattttggtaaatcaatgctatattatgctcttgaactattaaaacagccataattattgtcccaagatagaatatagtcctttttcaaagatgattatacgtggctaggtgacagacattaatgactgactctggagagtaagtcatacctgcactctgtggacttgatggttctttttctagagcaaacagagcgtggcattttgttttgacttgttcttccttggggtcaaatttatatatatatatataaatttttgtttgggcgaccaagatctaataattaaaacccaggtggaccatggattcagacctgcctttttatgtttttgactcttaggttcatcgtgtcccagacttcttcacatattcgtgaaggtaagatattctgtgtgcgcttggcctccttttcacgcatatttcattgcctctttgatgagtggttacgaagacgttaaactacctttttgttccctggggtaataggtcagtaactatgagcgccgtctctctccatgtgagcttgtgttaatagacacttttatggtagagttgggatggggccaccaccttaaaatgagtgagcagacaaggccaggcaagccaaaggctttaagacaccatgattttcttgttttgttttaattgggaagggaagtataaggaagagctcagagggagtttcatacctggaattgttggacttaattgacacttgcaaatacttttagtataaaggtttaattctatttaaaaagaagatccattaaatcaagctcttaactcatgggactatttgcaacacttctttgtaaatatcattttgtttgttaggttattggcaaaacagtttcaaggttcacttccctcccttgaaccaggtccaggtcattttgctttggggtagattaaagtcagaactctaaaagttgagcaactttgtttttttttgaattgatttagcactaacccaccattgcatcttaaggatggcatgacgtgataatgatggacttgtgtgaggttttgatttttcaattaaactttttgttatcacaggtaa

SEQ ID NO: 204693 - DNA, 2821 bp, Homo sapiens
  Payload ID: 20375
  Gene Name: zinc finger, RAN-binding domain containing 2
  Uniprot ID: O95218
  ENST ID: ENST00000254821
  CDS Start-End: 17-979
gctggtggcgttcaagatgtcgaccaagaatttccgagtcagtgacggggactggatttgccctgacaaaaaatgtggaaatgtaaactttgctagaagaaccagctgtaatcgatgtggtcgggagaaaacaactgaggccaagatgatgaaagctgggggcactgaaataggaaagacacttgcagaaaagagccgaggcctatttagtgctaatgactggcaatgtaaaacttgcagcaatgtgaattgggccagaagatcagagtgtaatatgtgtaatactccaaagtatgctaaattagaagaaagaacaggatatggtggtggttttaatgaaagagaaaatgttgaatatatagaaagagaagaatctgatggtgaatatgatgagtttggacgtaaaaagaaaaaatacagagggaaagcagttggtcctgcatctatattaaaggaagttgaagataaagaatcagagggagaagaagaggatgaggatgaagatctttctaaatataagttagatgaggatgaggatgaagatgacgctgatctctcaaaatataatcttgatgccagtgaagaagaagatagtaataaaaagaaatctaatagacgaagtcgctcaaagtctcgatcttcacattcacgatcttcatcacgctcatcctccccctcaagttcaaggtctaggtccaggtcccgttcaagaagttcttccagttcgcagtcaagatctcgttccagttccagagaacgttcgagatctcgtgggtcgaaatcaagatccagctccaggtcccacaggggctcttcttccccacgaaaaagatcttattcaagttcatcatcttctcctgagaggaacagaaagagaagtcgttctagatcttcttcatctggtgatcgcaaaaaaagacgaacaagatcacggtcacccgaaagccaggtgattggtgaaaacactaaacaaccctgagcccagggccaacccctacggaacaccactactttacccagacgccacaggtcatcatctggatcatcccattctggttcccgttcaagttcaaaaaagaaataatgtattaaaatttacatcttaaaaaaatccagtacagtgcatgaagcatatttttaaagaagttggtgtcttacttggtcagaagtgctaaatctgctagtagaggtgcatgcctttcattgcttttcaaaacaatacagctgtgtttatttgtgaagttaaaagtaaatagcattttaagccataatgtcccaaaatagatgttctgtcattcattatttacaaccatttgcttcatttaaaaccatttcagctataacaaagtactttgcttcctaatttaaacccatttttgtcatttccaaatacatcctgtccattggctaagacaggattacctaggcttgcctgaactttgggcatggaagaaagactggaaactagttggaaacaacatacttatggaaaagaaagtcagcctttttatgctgttaacagatgtcagagtgattctcaccaaaaaaagttaaactatgttgtaagcagccaactgtaaatgtctattttgaaattccctatgctaagggtgccttagaatcattgtgtctcttttatccagctttacttttttgctccacatttaatgcaaaagaatcttgtgatgtctacaaggagagaagtgggatatattttcctttctgacacataatttggggcaaaaaagaaagtcttaagagtttatcttttctctgctgatacggttgcttgataaagacatctcaaaatgtttaccaatgttttaagaagctttgtgtgatattcttccaaatgtagttaccaaatataatatggtagaaaaggctaaatcatacttaatgagcaaattgaagtaagcttttaaagtatatttctcttttggtgaaaggccaatggagacattgtgaatttaagtgaacatttgcctcaagatgttaactataaacacactgcatacaattttcttctgaataacaaatgaatgcttattgctgcatgatgtaagcaaaagtcattatttttcctattcatttgaaataagttatggcttaaaatgcttttggagtttatttctcaaaattaaaatctggtcacatgagctttagtttgttttctggtttaaaaaataaaaaggtttctcttaacagtatttccagtgacaatgcaaggtaagtatatcaaaggaaatcaacagttgtgcttgggggctttttgttatgggatattgatttcttgttttttttccgtaacattgtctgctgcaatttaaataaaaattacgacattttaagatatttcatagacaaaccaaacaaaaatatatgtttttactttaaagtgaatgtttttctcttcagctgatctaaaaatgaaagcaagatatcttatgtagaaatattttgataatatttttacagtgagctttcccatgtttttatgtcttaagtttctttgctgcgtttatgtaggttgcacaagaacttttactcacttgtaattgtgcctcagactttttgaaagtctaccttctaaattgccccgacgatctagattctacatgttaccattggtttattcttgtgctttctgtatttaaaactttggctgtactaagcaaatgcaaggttataatttagctaatagtagtttacagacaattctgatgattatgatttcatttggtttaactaagctgtactagttcatttcataaggaaatgatactgtagacaaatgtaaataaagcctgtgagtcaagca

SEQ ID NO: 204694 - DNA, 3078 bp, Homo sapiens
  Payload ID: 20375
  Gene Name: zinc finger, RAN-binding domain containing 2
  Uniprot ID: O95218
  ENST ID: ENST00000370920
  CDS Start-End: 303-1295
ccgaggcttctagtgccacgaaggcctcctgcctgggttgtccttatggcgcctgtgagtttagttctagaaaagatatttgtattttaacttttccatctaacaaacagtagcacaggcatcttagtctggacaacaacgtacaagctgaattcctggctagttccctcattatcaaaccctgacacagtagtaggcgcgagtcaggcagtgtggggacagccccgagttgccgaaagtccccggcccgttttcctcctgtgaagacatagctgcgggtggctgtgctggtggcgttcaagatgtcgaccaagaatttccgagtcagtgacggggactggatttgccctgacaaaaaatgtggaaatgtaaactttgctagaagaaccagctgtaatcgatgtggtcgggagaaaacaactgaggccaagatgatgaaagctgggggcactgaaataggaaagacacttgcagaaaagagccgaggcctatttagtgctaatgactggcaatgtaaaacttgcagcaatgtgaattgggccagaagatcagagtgtaatatgtgtaatactccaaagtatgctaaattagaagaaagaacaggatatggtggtggttttaatgaaagagaaaatgttgaatatatagaaagagaagaatctgatggtgaatatgatgagtttggacgtaaaaagaaaaaatacagagggaaagcagttggtcctgcatctatattaaaggaagttgaagataaagaatcagagggagaagaagaggatgaggatgaagatctttctaaatataagttagatgaggatgaggatgaagatgacgctgatctctcaaaatataatcttgatgccagtgaagaagaagatagtaataaaaagaaatctaatagacgaagtcgctcaaagtctcgatcttcacattcacgatcttcatcacgctcatcctccccctcaagttcaaggtctaggtccaggtcccgttcaagaagttcttccagttcgcagtcaagatctcgttccagttccagagaacgttcgagatctcgtgggtcgaaatcaagatccagctccaggtcccacaggggctcttcttccccacgaaaaagatcttattcaagttcatcatcttctcctgagaggaacagaaagagaagtcgttctagatcttcttcatctggtgatcgcaaaaaaagacgaacaagatcacggtcacccgaaagacgccacaggtcatcatctggatcatcccattctggttcccgttcaagttcaaaaaagaaataatgtattaaaatttacatcttaaaaaaatccagtacagtgcatgaagcatatttttaaagaagttggtgtcttacttggtcagaagtgctaaatctgctagtagaggtgcatgcctttcattgcttttcaaaacaatacagctgtgtttatttgtgaagttaaaagtaaatagcattttaagccataatgtcccaaaatagatgttctgtcattcattatttacaaccatttgcttcatttaaaaccatttcagctataacaaagtactttgcttcctaatttaaacccatttttgtcatttccaaatacatcctgtccattggctaagacaggattacctaggcttgcctgaactttgggcatggaagaaagactggaaactagttggaaacaacatacttatggaaaagaaagtcagcctttttatgctgttaacagatgtcagagtgattctcaccaaaaaaagttaaactatgttgtaagcagccaactgtaaatgtctattttgaaattccctatgctaagggtgccttagaatcattgtgtctcttttatccagctttacttttttgctccacatttaatgcaaaagaatcttgtgatgtctacaaggagagaagtgggatatattttcctttctgacacataatttggggcaaaaaagaaagtcttaagagtttatcttttctctgctgatacggttgcttgataaagacatctcaaaatgtttaccaatgttttaagaagctttgtgtgatattcttccaaatgtagttaccaaatataatatggtagaaaaggctaaatcatacttaatgagcaaattgaagtaagcttttaaagtatatttctcttttggtgaaaggccaatggagacattgtgaatttaagtgaacatttgcctcaagatgttaactataaacacactgcatacaattttcttctgaataacaaatgaatgcttattgctgcatgatgtaagcaaaagtcattatttttcctattcatttgaaataagttatggcttaaaatgcttttggagtttatttctcaaaattaaaatctggtcacatgagctttagtttgttttctggtttaaaaaataaaaaggtttctcttaacagtatttccagtgacaatgcaaggtaagtatatcaaaggaaatcaacagttgtgcttgggggctttttgttatgggatattgatttcttgttttttttccgtaacattgtctgctgcaatttaaataaaaattacgacattttaagatatttcatagacaaaccaaacaaaaatatatgtttttactttaaagtgaatgtttttctcttcagctgatctaaaaatgaaagcaagatatcttatgtagaaatattttgataatatttttacagtgagctttcccatgtttttatgtcttaagtttctttgctgcgtttatgtaggttgcacaagaacttttactcacttgtaattgtgcctcagactttttgaaagtctaccttctaaattgccccgacgatctagattctacatgttaccattggtttattcttgtgctttctgtatttaaaactttggctgtactaagcaaatgcaaggttataatttagctaatagtagtttacagacaattctgatgattatgatttcatttggtttaactaagctgtactagttcatttcataaggaaatgatactgtagacaaatgtaaataaagcctgtgagtcaagcatcaagtggtgtttgttagaaataaactagagatttttaaactctga

SEQ ID NO: 204695 - DNA, 2808 bp, Homo sapiens
  Payload ID: 20375
  Gene Name: zinc finger, RAN-binding domain containing 2
  ENST ID: ENST00000610633
  CDS Start-End: 35-1048
atagctgcgggtggctgtgctggtggcgttcaagatgtcgaccaagaatttccgagtcagtgacggggactggatttgccctgacaaaaaatgtggaaatgtaaactttgctagaagaaccagctgtaatcgatgtggtcgggagaaaacaactgaggccaagatgatgaaagctgggggcactgaaataggaaagacacttgcagaaaagagccgaggcctatttagtgctaatgactggcaatgtaaaacttgcagcaatgtgaattgggccagaagatcagagtgtaatatgtgtaatactccaaagtatgctaaattagaagaaagaacaggatatggtggtggttttaatgaaagagaaaatgttgaatatatagaaagagaagaatctgatggtgaatatgatgagtttggacgtaaaaagaaaaaatacagagggaaagcagttggtcctgcatctatattaaaggaagttgaagataaagaatcagagggagaagaagaggatgaggatgaagatctttctaaatataagttagatgaggatgaggatgaagatgacgctgatctctcaaaatataatcttgatgccagtgaagaagaagatagtaataaaaagaaatctaatagacgaagtcgctcaaagtctcgatcttcacattcacgatcttcatcacgctcatcctccccctcaagttcaaggtctaggtccaggtcccgttcaagaagttcttccagttcgcagtcaagatctcgttccagttccagagaacgttcgagatctcgtgggtcgaaatcaagatccagctccaggtccacaggggctcttcttccccacgaaaaagatcttattcaagttcatcatcttctcctgagaggaacagaaagagaagtcgttctagatcttcttcatctggtgatcgcaaaaaaagacgaacaagatcacggtcacccgaaagacgccacaggtcatcatctggatcatcccattctggttcccgttcaagttcaaaaaagaaataatgtattaaaatttacatcttaaaaaaatccagtacagtgcatgaagcatatttttaaagaagttggtgtcttacttggtcagaagtgctaaatctgctagtagaggtgcatgcctttcattgcttttcaaaacaatacagctgtgtttatttgtgaagttaaaagtaaatagcattttaagccataatgtcccaaaatagatgttctgtcattcattatttacaaccatttgcttcatttaaaaccatttcagctataacaaagtactttgcttcctaatttaaacccatttttgtcatttccaaatacatcctgtccattggctaagacaggattacctaggcttgcctgaactttgggcatggaagaaagactggaaactagttggaaacaacatacttatggaaaagaaagtcagcctttttatgctgttaacagatgtcagagtgattctcaccaaaaaaagttaaactatgttgtaagcagccaactgtaaatgtctattttgaaattccctatgctaagggtgccttagaatcattgtgtctcttttatccagctttacttttttgctccacatttaatgcaaaagaatcttgtgatgtctacaaggagagaagtgggatatattttcctttctgacacataatttggggcaaaaaagaaagtcttaagagtttatcttttctctgctgatacggttgcttgataaagacatctcaaaatgtttaccaatgttttaagaagctttgtgtgatattcttccaaatgtagttaccaaatataatatggtagaaaaggctaaatcatacttaatgagcaaattgaagtaagcttttaaagtatatttctcttttggtgaaaggccaatggagacattgtgaatttaagtgaacatttgcctcaagatgttaactataaacacactgcatacaattttcttctgaataacaaatgaatgcttattgctgcatgatgtaagcaaaagtcattatttttcctattcatttgaaataagttatggcttaaaatgcttttggagtttatttctcaaaattaaaatctggtcacatgagctttagtttgttttctggtttaaaaaataaaaaggtttctcttaacagtatttccagtgacaatgcaaggtaagtatatcaaaggaaatcaacagttgtgcttgggggctttttgttatgggatattgatttcttgttttttttccgtaacattgtctgctgcaatttaaataaaaattacgacattttaagatatttcatagacaaaccaaacaaaaatatatgtttttactttaaagtgaatgtttttctcttcagctgatctaaaaatgaaagcaagatatcttatgtagaaatattttgataatatttttacagtgagctttcccatgtttttatgtcttaagtttctttgctgcgtttatgtaggttgcacaagaacttttactcacttgtaattgtgcctcagactttttgaaagtctaccttctaaattgccccgacgatctagattctacatgttaccattggtttattcttgtgctttctgtatttaaaactttggctgtactaagcaaatgcaaggttataatttagctaatagtagtttacagacaattctgatgattatgatttcatttggtttaactaagctgtactagttcatttcataaggaaatgatactgtagacaaatgtaaataaagcctgtgagtcaagcatcaagtggtgtttgttagaaataaactagagatttttaaactctg

SEQ ID NO: 204696 - DNA, 1257 bp, Homo sapiens
  Payload ID: 20375
  Gene Name: zinc finger, RAN-binding domain containing 2
  Uniprot ID: O95218
  ENST ID: ENST00000611683
  CDS Start-End: 295-1257
tctagtgccacgaaggcctcctgcctgggttgtccttatggcgcctgtgagtttagttctagaaaagatatttgtattttaacttttccatctaacaaacagtagcacaggcatcttagtctggacaacaacgtacaagctgaattcctggctagttccctcattatcaaaccctgacacagtagtaggcgcgagtcaggcagtgtggggacagccccgagttgccgaaagtccccggcccgttttcctcctgtgaagacatagctgcgggtggctgtgctggtggcgttcaagatgtcgaccaagaatttccgagtcagtgacggggactggatttgccctgacaaaaaatgtggaaatgtaaactttgctagaagaaccagctgtaatcgatgtggtcgggagaaaacaactgaggccaagatgatgaaagctgggggcactgaaataggaaagacacttgcagaaaagagccgaggcctatttagtgctaatgactggcaatgtaaaacttgcagcaatgtgaattgggccagaagatcagagtgtaatatgtgtaatactccaaagtatgctaaattagaagaaagaacaggatatggtggtggttttaatgaaagagaaaatgttgaatatatagaaagagaagaatctgatggtgaatatgatgagtttggacgtaaaaagaaaaaatacagagggaaagcagttggtcctgcatctatattaaaggaagttgaagataaagaatcagagggagaagaagaggatgaggatgaagatctttctaaatataagttagatgaggatgaggatgaagatgacgctgatctctcaaaatataatcttgatgccagtgaagaagaagatagtaataaaaagaaatctaatagacgaagtcgctcaaagtctcgatcttcacattcacgatcttcatcacgctcatcctccccctcaagttcaaggtctaggtccaggtcccgttcaagaagttcttccagttcgcagtcaagatctcgttccagttccagagaacgttcgagatctcgtgggtcgaaatcaagatccagctccaggtcccacaggggctcttcttccccacgaaaaagatcttattcaagttcatcatcttctcctgagaggaacagaaagagaagtcgttctagatcttcttcatctggtgatcgcaaaaaaagacgaacaagatcacggtcacccgaaagccaggtgattggtgaaaacactaaacaaccctga

SEQ ID NO: 204697 - DNA, 4046 bp, Homo sapiens
  Payload ID: 20376
  Gene Name: zinc finger, RAN-binding domain containing 3
  Uniprot ID: Q5FWF4
  ENST ID: ENST00000264159
  CDS Start-End: 118-3357
ccaatggtaaaactaggaggacagccattttgcccacttgtaaaagagctaccttttcccacgagttggagcctgaggtgcggagtttcgtgagtttttactgactcgaggatcatcatgcctagggttcataacataaaaaagtctcttacacctcacatttcttgtgtgacaaatgaatctgataatctgctggattttttgcctgacagactaagagcaaagctacttccattccagaaagatggcatcatttttgccctcaaaagaaatggcaggtgtatggtggctgatgaaatgggtctaggaaagacaatccaggcaattggaattacttacttctataaagaggaatggcctctgttaatagtggtcccttcgtctctgaggtacccttggacagaagaaattgaaaaatggatcccagagctaagtccagaagaaatcaatgttattcagaataaaactgatgttaggagaatgtcgaccagtaaagtgacagttctgggttatggtctcttaaccgcagatgcaaagactttgatagatgcactgaataatcagaacttcaaagtagttatagtggatgaatcacactacatgaaatccagaaatgcaactcgcagcaggattttattgccaatagtacagaaagccagacgagccattcttcttacaggaacaccagctttaggaaggcctgaagagctttttatgcagattgaagctctctttccacaaaaatttggaagatggaccgactatgcaaaaagatactgtaatgcacacatcagatattttggtaaaagacctcagtgggattgtagaggggcatcaaatcttaatgaacttcaccagctattaagtgacataatgattagaagattaaagactgaagttttaacccagctaccccctaaagtcagacagcgtattccatttgatcttccatcagcagctgccaaggaattgaataccagctttgaagagtgggaaaaaataatgagaactccaaattcaggtgccatggagacagtcatggggttgataactcgcatgtttaaacaaactgctattgccaaggcaggtgctgtaaaggattatattaagatgatgcttcagaatgattcgcttaaatttctggtttttgctcaccatttaagcatgctccaagcttgcacagaagcagtcatcgaaaataagactcgttacattaggatagatggaagtgtttcatcttcagaaagaatacatctggttaatcagtttcaaaaggatcctgacactcgcgtggctatcctaagcattcaggctgctggccagggattaacatttactgcagcaagtcatgttgtatttgctgagttgtactgggaccctggacatataaaacaagcagaagaccgagctcacagaattggccagtgcagttctgtgaatattcactaccttattgcaaatggaaccctagacacccttatgtggggaatgttgaatcgcaaggctcaagttacagggagcacactgaacggtaggaaagaaaaaattcaggctgaggaaggtgataaggaaaaatgggatttcctgcagtttgctgaagcttggactccaaatgacagttctgaagagttaaggaaggaagctttgttcactcacttcgaaaaagaaaaacagcatgatattcgatcattttttgtaccacaacctaaaaaaagacagttgatgacctcctgtgacgaatcaaagagattccgggaggaaaatactgtagtgtcatcagaccctacaaaaacagctgcaagagatatcatcgattatgaaagtgatgttgaacctgaaacgaaaagattgaaattggctgcctcggaagaccactgcagtccgtcggaagagacaccatcccagtccaagcaaatccgaactccactcgtggaaagtgtacaggaggccaaggcccagttaaccaccccagcctttcctgtagagggctggcaatgtagtctctgcacctatatcaataattcagagttaccttattgtgaaatgtgtgagactcctcaaggcagtgctgttatgcaaatagatagcctcaaccatatccaggataaaaacgagaaggatgattctcagaaagacacctccaaaaaggttcaaactatctcagactgtgaaaaacaagcccttgcacagtcagaacctggccagttggctgacagcaaggaagaaacaccaaaaattgagaaagaagacggacttacatcccagccaggtaatgaacagtggaagagttcagacactttgccagtgtatgacaccttaatgttctgtgcaagtaggaatactgaccggattcacatctatactaaggatggaaaacagatgagctgtaatttcattcctctggatataaaattagacctttgggaagatttaccagcaagctttcagctgaaacaatatcgctcactgattttgagatttgttcgagaatggagtagtctaactgccatgaagcaaaggataatcaggaaaagtggacagctattctgtagcccaattcttgctttggaagagatcacaaagcaacaaaccaaacaaaattgcaccaaaagatacataaccaaagaagatgttgccgtagcctcaatggacaaagtgaagaatgttgggggccatgtccgtctgatcacaaaggagtccaggccacgggatcctttcacaaaaaaacttcttgaagatggagcctgtgtcccatttctaaatccatacacagtccaggcagatctcactgtgaagccctctacatccaaaggctatttgcaagctgtggataatgaaggaaatccactttgccttcgctgtcagcaacccacttgccagactaagcaagcatgtaaagcgaactcttgggattcacggttttgctctctgaaatgtcaggaagagttttggattcgatctaataacagttacctgagagccaaagtatttgaaactgaacatggtgtgtgtcagctctgtaatgtgaacgcacaagaactctttttacgtctgagagatgcccctaaaagtcagaggaagaatcttctgtatgctacctggacttcaaagctcccattagaacagctaaatgaaatgataagaaacccaggggaaggacatttctggcaggtggatcacatcaagccagtgtatgggggaggaggacagtgttccctggacaacctgcagactctctgcacagtctgtcacaaagagagaactgccagacaagctaaggaaagaagccaggtgagaagacaatctctagcatcaaagcatggatcagacatcacacgatttttggtaaagaagtaaagtagaaaaatatatgaatgaatgacaaatggtttacatgtggaagactttaatacagaagttttccatgtttgtttaatatatcgagagtaaaaattttcagaacaaaaatcaagaattcaaattctcttctactaattacttttagtattaaatacattttgaaagtacttaacagaaactaagatacaatactgaatatttctgtggtctttttgatttgattcagactcgcaattatgtttcagcaatgttttgtaaagctctttacccctaatatgcctaatcactgtattgtgcatagattgtgtttaaaaaatgtactctcaattacctaaaaatgcttctggattagtattgttctggactgtcataggtatgagtggaacattgcaaaaccttatgggaaatttcagacgcaaatcattatttgggaattctgggccaagcatgaccagcctgcttaggattcaagagagactgtccactaaatacctccagaatgagctaggggcacacattttgggtgttgcttttcttgctttatttcttagctagtcatctttatcaaaaatatccttttcaaaatgaggtacctatggtgtttgtggacaatttgggggttctgtgtaaagtaattgttaaaactattaaataactgaaaacataaaatgtaaaatgccacttaa

SEQ ID NO: 204698 - DNA, 6820 bp, Homo sapiens
  Payload ID: 20376
  Gene Name: zinc finger, RAN-binding domain containing 3
  Uniprot ID: Q5FWF4
  ENST ID: ENST00000401392
  CDS Start-End: 214-3447
cccttttcgcaaccctaacgggagagaagtgatggaagaagggtagccggaagagtttcctcaaaataccataggggttttaaattattagtacgtatttaaactcatctactttcacgttgtcccgttgaacgtcacttccgcttaggggcggacacgtcccaaacctgtggcgggagttggagattctgcggcgaatacgccaggatcatcatgcctagggttcataacataaaaaagtctcttacacctcacatttcttgtgtgacaaatgaatctgataatctgctggattttttgcctgacagactaagagcaaagctacttccattccagaaagatggcatcatttttgccctcaaaagaaatggcaggtgtatggtggctgatgaaatgggtctaggaaagacaatccaggcaattggaattacttacttctataaagaggaatggcctctgttaatagtggtcccttcgtctctgaggtacccttggacagaagaaattgaaaaatggatcccagagctaagtccagaagaaatcaatgttattcagaataaaactgatgttaggagaatgtcgaccagtaaagtgacagttctgggttatggtctcttaaccgcagatgcaaagactttgatagatgcactgaataatcagaacttcaaagtagttatagtggatgaatcacactacatgaaatccagaaatgcaactcgcagcaggattttattgccaatagtacagaaagccagacgagccattcttcttacaggaacaccagctttaggaaggcctgaagagctttttatgcagattgaagctctctttccacaaaaatttggaagatggaccgactatgcaaaaagatactgtaatgcacacatcagatattttggtaaaagacctcagtgggattgtagaggggcatcaaatcttaatgaacttcaccagctattaagtgacataatgattagaagattaaagactgaagttttaacccagctaccccctaaagtcagacagcgtattccatttgatcttccatcagcagctgccaaggaattgaataccagctttgaagagtgggaaaaaataatgagaactccaaattcaggtgccatggagacagtcatggggttgataactcgcatgtttaaacaaactgctattgccaaggcaggtgctgtaaaggattatattaagatgatgcttcagaatgattcgcttaaatttctggtttttgctcaccatttaagcatgctccaagcttgcacagaagcagtcatcgaaaataagactcgttacattaggatagatggaagtgtttcatcttcagaaagaatacatctggttaatcagtttcaaaaggatcctgacactcgcgtggctatcctaagcattcaggctgctggccagggattaacatttactgcagcaagtcatgttgtatttgctgagttgtactgggaccctggacatataaaacaagcagaagaccgagctcacagaattggccagtgcagttctgtgaatattcactaccttattgcaaatggaaccctagacacccttatgtggggaatgttgaatcgcaaggctcaagttacagggagcacactgaacggtaggaaagaaaaaattcaggctgaggaaggtgataaggaaaaatgggatttcctgcagtttgctgaagcttggactccaaatgacagttctgaagagttaaggaaggaagctttgttcactcacttcgaaaaagaaaaacagcatgatattcgatcattttttgtaccacaacctaaaaaaagacagttgatgacctcctgtgacgaatcaaagagattccgggaggaaaatactgtagtgtcatcagaccctacaaaaacagctgcaagagatatcatcgattatgaaagtgatgttgaacctgaaacgaaaagattgaaattggctgcctcggaagaccactgcagtccgtcggaagagacaccatcccagtccaagcaaatccgaactccactcgtggaaagtgtacaggaggccaaggcccagttaaccaccccagcctttcctgtagagggctggcaatgtagtctctgcacctatatcaataattcagagttaccttattgtgaaatgtgtgagactcctcaaggcagtgctgttatgcaaatagatagcctcaaccatatccaggataaaaacgagaaggatgattctcagaaagacacctccaaaaaggttcaaactatctcagactgtgaaaaacaagcccttgcacagtcagaacctggccagttggctgacagcaaggaagaaacaccaaaaattgagaaagaagacggacttacatcccagccagaacagtggaagagttcagacactttgccagtgtatgacaccttaatgttctgtgcaagtaggaatactgaccggattcacatctatactaaggatggaaaacagatgagctgtaatttcattcctctggatataaaattagacctttgggaagatttaccagcaagctttcagctgaaacaatatcgctcactgattttgagatttgttcgagaatggagtagtctaactgccatgaagcaaaggataatcaggaaaagtggacagctattctgtagcccaattcttgctttggaagagatcacaaagcaacaaaccaaacaaaattgcaccaaaagatacataaccaaagaagatgttgccgtagcctcaatggacaaagtgaagaatgttgggggccatgtccgtctgatcacaaaggagtccaggccacgggatcctttcacaaaaaaacttcttgaagatggagcctgtgtcccatttctaaatccatacacagtccaggcagatctcactgtgaagccctctacatccaaaggctatttgcaagctgtggataatgaaggaaatccactttgccttcgctgtcagcaacccacttgccagactaagcaagcatgtaaagcgaactcttgggattcacggttttgctctctgaaatgtcaggaagagttttggattcgatctaataacagttacctgagagccaaagtatttgaaactgaacatggtgtgtgtcagctctgtaatgtgaacgcacaagaactctttttacgtctgagagatgcccctaaaagtcagaggaagaatcttctgtatgctacctggacttcaaagctcccattagaacagctaaatgaaatgataagaaacccaggggaaggacatttctggcaggtggatcacatcaagccagtgtatgggggaggaggacagtgttccctggacaacctgcagactctctgcacagtctgtcacaaagagagaactgccagacaagctaaggaaagaagccaggtgagaagacaatctctagcatcaaagcatggatcagacatcacacgatttttggtaaagaagtaaagtagaaaaatatatgaatgaatgacaaatggtttacatgtggaagactttaatacagaagttttccatgtttgtttaatatatcgagagtaaaaattttcagaacaaaaatcaagaattcaaattctcttctactaattacttttagtattaaatacattttgaaagtacttaacagaaactaagatacaatactgaatatttctgtggtctttttgatttgattcagactcgcaattatgtttcagcaatgttttgtaaagctctttacccctaatatgcctaatcactgtattgtgcatagattgtgtttaaaaaatgtactctcaattacctaaaaatgcttctggattagtattgttctggactgtcataggtatgagtggaacattgcaaaaccttatgggaaatttcagacgcaaatcattatttgggaattctgggccaagcatgaccagcctgcttaggattcaagagagactgtccactaaatacctccagaatgagctaggggcacacattttgggtgttgcttttcttgctttatttcttagctagtcatctttatcaaaaatatccttttcaaaatgaggtacctatggtgtttgtggacaatttgggggttctgtgtaaagtaattgttaaaactattaaataactgaaaacataaaatgtaaaatgccacttaagcttgattttttagatctttttttaaaaaatgaataaaactaggcttactgttggctgggcgcggtggctcacgcatgtaatcccagcactttgggaggccaaagcgggtggatcatgaggtcaggagatagatcgagaccatcctggctaatacggtgaaaccccatctctactaaaaatacaaaaaattagccgggcatggtgttgtgcacgtgtaatctcagatactcgggaggctgaggcaggagaattgcttgaacccgggaagcagaggttgcagtgagccgagatcacgccattgaactccagcctgggcgacagagcgagactccgtctcaaacaaacaaacaaacaaaaaaaaaaactaagcgtactatcaaaatacactttgtcttctggttctcattttctgtttttaaaaccctgtgttattaaaggtatgtttctggtacttattttaaaaagagtgatgatgacaaaacactttataataaggcataatcagatggttatatgcatttaaatatacaataataacattaaaatgtaattgacataaaataagagtgacgatgaaacaaacccagggcctagtcctgcaatatgtcagaatcatgagggcaaagagtcagaactatacaaaatacaggaccgaggaagaattacattcccaaaagggagctgtttgtaaatactattaggacatatacctctttagtttgagcattttcccacgttaattaatagctagtgttttacaacataaaggacttgtttttagaaagattatacaatcaaagattatacaaccacagttgttcctcagtttctatttcattgtatgagatcaagtcatgttggttattttataaatgaagttgggctttctttggcctcctttctgcttagttggtcaggtgctctttgcagttttctgcctcatttccaaggtaacctaggatttgtcacggttgagagccaagaagcaggcacgctgcctttcctccagcatggggttttgcaagcgaggtctaagtaggtcaaatttgaggggaacttgctcttcagatcacactaaggtgataattctaaggagaaagttctcagatgtaagaactgtgtgatggtttgaggtgaaacaatccatgaagataggctcagtctataccaggtttcagaattctgactaattaaaaatgccgtaaggagcattgagcatttgctgtacaggacactgactggcccgtccccatcccttcctgacatgtctcagagctttgtgtcctgccttcccctaatttggtctgcattacttgtggggcacattgagatgaagggttctgagacagaaaataaagatagagattgatctaataaccgagaccgaaagggcatcttgaggactgttctttcctcctcacaatctgaaacagaagctccccactatgtattgcaaatgggaggttatgacagagggacacagaaagtgtcagagcaagtggcagatcctgagtgcagaaggaagtgcagatgccccaggaagaagacagctgctgccactcaggagatggagatggagtgaaaacacaggtgggtacaatgagtgtaaaaggataggcctggctctgaaaagactcagagaagctgcaagatacagtttaggctaagaaaacaacaacaaaaaagggctctggccaggtatgatggcacttgcttgtagtcctagctacacaggaggctgaggtaggagggtcacttaagcccaggggttcatgaccagcctgggtaacacagcaaggccccatctcaaaaaagaaaaaaggctctgggtccagggaacagagctgggaagtggtaggtgacgaaggaactcgcttacgatagggaaccatatgaaaatatgcctgtgggtaggggtagggtggggaggacttccggagcatggtgggctcacacactcaaaccttgcacagccagcatcaggctggcctgccttcctgttcccgtcactgggtgacattgatcccagacacattctgatgactagtaaagttgcttttagtagccccagagccaggaggaataattcatatggaatttttaaagacgcccactcttggcgttaattacagcccaacgtacatttcttggggagattttcctgtgacaagtgaataccctctacattttcttaactggatgggaaaaggattttatgcccatacatcttgctaataaaccaaatcccttcttcagattcttgagtgaaacatttaaaatgtagtttctttagaaataaaagtatgaggcattttaaattatatgacagacaaaaaagtcaatgctcttgagctctttacagtaaataggttgtgtttactcataggatacagaatcatggatatcaaacatcaaaaataaattataaaaataatgtctcattttctgttgcatattattagcctgtctctcattccaccatttgttcttttgaactggaaaattgtgggctcctagtcactgcactaatctatctgaatatccaactaccagaaagggtttatcccatctcaagtttgtcagttgctttatatcgttaagggtgtttttgccaccctggttgtgttcataattaccattgagaaatgtcactgttattaaaatacattctgtgttccaacta

SEQ ID NO: 204699 - DNA, 4130 bp, Homo sapiens
  Payload ID: 20376
  Gene Name: zinc finger, RAN-binding domain containing 3
  ENST ID: ENST00000403017
  CDS Start-End: 123-1409
ttgtcccgttgaacgtcacttccgcttaggggcggacacgtcccaaacctgtggcgggagttggagattctgcggcgaatacgccaggtgtgactggctggaagtggcgtggctggatcatcatgcctagggttcataacataaaaaagtctcttacacctcacatttcttgtgtgacaaatgaatctgataatctgctggattttttgcctgacagactaagagcaaagctacttccattccagaaagatggcatcatttttgccctcaaaagaaatggcaggtgtatggtggctgatgaaatgggtctaggaaagacaatccaggcaattggaattacttacttctataaagaggaatggcctctgttaatagtggtcccttcgtctctgaggtacccttggacagaagaaattgaaaaatggatcccagagctaagtccagaagaaatcaatgttattcagaataaaactgatgttaggagaatgtcgaccagtaaagtgacagttctgggttatggtctcttaaccgcagatgcaaagactttgatagatgcactgaataatcagaacttcaaagtagttatagtggatgaatcacactacatgaaatccagaaatgcaactcgcagcaggattttattgccaatagtacagaaagccagacgagccattcttcttacaggaacaccagctttaggaaggcctgaagagctttttatgcagattgaagctctctttccacaaaaatttggaagatggaccgactatgcaaaaagatactgtaatgcacacatcagatattttggtaaaagacctcagtgggattgtagaggggcatcaaatcttaatgaacttcaccagctattaagtgacataatgattagaagattaaagactgaagttttaacccagctaccccctaaagtcagacagcgtattccatttgatcttccatcagcagctgccaaggaattgaataccagctttgaagagtgggaaaaaataatgagaactccaaattcaggtgccatggagacagtcatggggttgataactcgcatgtttaaacaaactgctattgccaaggcaggtgctgtaaaggattatattaagatgatgcttcagaatgattcgcttaaatttctggtttttgctcaccatttaagcatgctccaagcttgcacagaagcagtcatcgaaaataagactcgttacattaggatagatggaagtgtttcatcttcagaaagaatacatctggttaatcagtttcaaaaggatcctgacactcgcgtggctatcctaagcattcaggctgctggccaggacctgtatgacaaggtggcctgggggaaaagaactcttgtctcaggactttttatggagtgcttctgttttgtcccttaggattaagtttgaagggattaacatttactgcagcaagtcatgttgtatttgctgagttgtactgggaccctggacatataaaacaagcagaagaccgagctcacagaattggccagtgcagttctgtgaatattcactaccttattgcaaatggaaccctagacacccttatgtggggaatgttgaatcgcaaggctcaagttacagggagcacactgaacggtaggaaagaaaaaattcaggctgaggaaggtgataaggaaaaatgggatttcctgcagtttgctgaagcttggactccaaatgacagttctgaagagttaaggaaggaagctttgttcactcacttcgaaaaagaaaaacagcatgatattcgatcattttttgtaccacaacctaaaaaaagacagttgatgacctcctgtgacgaatcaaagagattccgggaggaaaatactgtagtgtcatcagaccctacaaaaacagctgcaagagatatcatcgattatgaaagtgatgttgaacctgaaacgaaaagattgaaattggctgcctcggaagaccactgcagtccgtcggaagagacaccatcccagtccaagcaaatccgaactccactcgtggaaagtgtacaggaggccaaggcccagttaaccaccccagcctttcctgtagagggctggcaatgtagtctctgcacctatatcaataattcagagttaccttattgtgaaatgtgtgagactcctcaaggcagtgctgttatgcaaatagatagcctcaaccatatccaggataaaaacgagaaggatgattctcagaaagacacctccaaaaaggttcaaactatctcagactgtgaaaaacaagcccttgcacagtcagaacctggccagttggctgacagcaaggaagaaacaccaaaaattgagaaagaagacggacttacatcccagccagaacagtggaagagttcagacactttgccagtgtatgacaccttaatgttctgtgcaagtaggaatactgaccggattcacatctatactaaggatggaaaacagatgagctgtaatttcattcctctggatataaaattagacctttgggaagatttaccagcaagctttcagctgaaacaatatcgctcactgattttgagatttgttcgagaatggagtagtctaactgccatgaagcaaaggataatcaggaaaagtggacagctattctgtagcccaattcttgctttggaagagatcacaaagcaacaaaccaaacaaaattgcaccaaaagatacataaccaaagaagatgttgccgtagcctcaatggacaaagtgaagaatgttgggggccatgtccgtctgatcacaaaggagtccaggccacgggatcctttcacaaaaaaacttcttgaagatggagcctgtgtcccatttctaaatccatacacagtccaggcagatctcactgtgaagccctctacatccaaaggctatttgcaagctgtggataatgaaggaaatccactttgccttcgctgtcagcaacccacttgccagactaagcaagcatgtaaagcgaactcttgggattcacggttttgctctctgaaatgtcaggaagagttttggattcgatctaataacagttacctgagagccaaagtatttgaaactgaacatggtgtgtgtcagctctgtaatgtgaacgcacaagaactctttttacgtctgagagatgcccctaaaagtcagaggaagaatcttctgtatgctacctggacttcaaagctcccattagaacagctaaatgaaatgataagaaacccaggggaaggacatttctggcaggtggatcacatcaagccagtgtatgggggaggaggacagtgttccctggacaacctgcagactctctgcacagtctgtcacaaagagagaactgccagacaagctaaggaaagaagccaggtgagaagacaatctctagcatcaaagcatggatcagacatcacacgatttttggtaaagaagtaaagtagaaaaatatatgaatgaatgacaaatggtttacatgtggaagactttaatacagaagttttccatgtttgtttaatatatcgagagtaaaaattttcagaacaaaaatcaagaattcaaattctcttctactaattacttttagtattaaatacattttgaaagtacttaacagaaactaagatacaatactgaatatttctgtggtctttttgatttgattcagactcgcaattatgtttcagcaatgttttgtaaagctctttacccctaatatgcctaatcactgtattgtgcatagattgtgtttaaaaaatgtactctcaattacctaaaaatgcttctggattagtattgttctggactgtcataggtatgagtggaacattgcaaaaccttatgggaaatttcagacgcaaatcattatttgggaattctgggccaagcatgaccagcctgcttaggattcaagagagactgtccactaaatacctccagaatgagctaggggcacacattttgggtgttgcttttcttgctttatttcttagctagtcatctttatcaaaaatatccttttcaaaatgaggtacctatggtgtttgtggacaatttgggggttctgtgtaaagtaattgttaaaactattaaataactgaaaacataaaatgtaaaa

SEQ ID NO: 204700 - DNA, 6943 bp, Homo sapiens
  Payload ID: 20376
  Gene Name: zinc finger, RAN-binding domain containing 3
  ENST ID: ENST00000536680
  CDS Start-End: 1698-3575
ccttttcgcaaccctaacgggagagaagtgatggaagaagggtagccggaagagtttcctcaaaataccataggggttttaaattattagtacgtatttaaactcatctactttcacgttgtcccgttgaacgtcacttccgcttaggggcggacacgtcccaaacctgtggcgggagttggagattctgcggcgaatacgccaggtgtgactggctggaagtggcgtggctggatcatcatgcctagggttcataacataaaaaagtctcttacacctcacatttcttgtgtgacaaatgaatctgataatctgctggattttttgcctgacagactaagagcaaagctacttccattccagaaagatggcatcatttttgccctcaaaagaaatggcaggtgtatggtggctgatgaaatgggtctaggaaagacaatccaggcaattggaattacttacttctataaagaggaatggcctctgttaatagtggtcccttcgtctctgaggtacccttggacagaagaaattgaaaaatggatcccagagctaagtccagaagaaatcaatgttattcagaataaaactgatgttaggagaatgtcgaccagtaaagtgacagttctgggttatggtctcttaaccgcagatgcaaagactttgatagatgcactgaataatcagaacttcaaagtagttatagtggatgaatcacactacatgaaatccagaaatgcaactcgcagcaggattttattgccaatagtacagaaagccagacgagccattcttcttacaggaacaccagctttaggaaggcctgaagagctttttatgcagattgaagctctctttccacaaaaatttggaagatggaccgactatgcaaaaagatactgtaatgcacacatcagatattttggtaaaagacctcagtgggattgtagaggggcatcaaatcttaatgaacttcaccagctattaagtgacataatgattagaagattaaagactgaagttttaacccagctaccccctaaagtcagacagcgtattccatttgatcttccatcagcagctgccaaggaattgaataccagctttgaagagtgggaaaaaataatgagaactccaaattcaggtgccatggagacagtcatggggttgataactcgcatgtttaaacaaactgctattgccaaggcaggtgctgtaaaggattatattaagatgatgcttcagaatgattcgcttaaatttctggtttttgctcaccatttaagcatgctccaagcttgcacagaagcagtcatcgaaaataagactcgttacattaggatagatggaagtgtttcatcttcagaaagaatacatctggttaatcagtttcaaaaggatcctgacactcgcgtggctatcctaagcattcaggctgctggccaggacctgtatgacaaggtggcctgggggaaaagaactcttgtctcaggactttttatggagtgcttctgttttgtcccttaggattaagtttgaagggattaacatttactgcagcaagtcatgttgtatttgctgagttgtactgggaccctggacatataaaacaagcagaagaccgagctcacagaattggccagtgcagttctgtgaatattcactaccttattgcaaatggaaccctagacacccttatgtggggaatgttgaatcgcaaggctcaagttacagggagcacactgaacggtaggaaagaaaaaattcaggctgaggaaggtgataaggaaaaatgggatttcctgcagtttgctgaagcttggactccaaatgacagttctgaagagttaaggaaggaagctttgttcactcacttcgaaaaagaaaaacagcatgatattcgatcattttttgtaccacaacctaaaaaaagacagttgatgacctcctgtgacgaatcaaagagattccgggaggaaaatactgtagtgtcatcagaccctacaaaaacagctgcaagagatatcatcgattatgaaagtgatgttgaacctgaaacgaaaagattgaaattggctgcctcggaagaccactgcagtccgtcggaagagacaccatcccagtccaagcaaatccgaactccactcgtggaaagtgtacaggaggccaaggcccagttaaccaccccagcctttcctgtagagggctggcaatgtagtctctgcacctatatcaataattcagagttaccttattgtgaaatgtgtgagactcctcaaggcagtgctgttatgcaaatagatagcctcaaccatatccaggataaaaacgagaaggatgattctcagaaagacacctccaaaaaggttcaaactatctcagactgtgaaaaacaagcccttgcacagtcagaacctggccagttggctgacagcaaggaagaaacaccaaaaattgagaaagaagacggacttacatcccagccaggtaatgaacagtggaagagttcagacactttgccagtgtatgacaccttaatgttctgtgcaagtaggaatactgaccggattcacatctatactaaggatggaaaacagatgagctgtaatttcattcctctggatataaaattagacctttgggaagatttaccagcaagctttcagctgaaacaatatcgctcactgattttgagatttgttcgagaatggagtagtctaactgccatgaagcaaaggataatcaggaaaagtggacagctattctgtagcccaattcttgctttggaagagatcacaaagcaacaaaccaaacaaaattgcaccaaaagatacataaccaaagaagatgttgccgtagcctcaatggacaaagtgaagaatgttgggggccatgtccgtctgatcacaaaggagtccaggccacgggatcctttcacaaaaaaacttcttgaagatggagcctgtgtcccatttctaaatccatacacagtccaggcagatctcactgtgaagccctctacatccaaaggctatttgcaagctgtggataatgaaggaaatccactttgccttcgctgtcagcaacccacttgccagactaagcaagcatgtaaagcgaactcttgggattcacggttttgctctctgaaatgtcaggaagagttttggattcgatctaataacagttacctgagagccaaagtatttgaaactgaacatggtgtgtgtcagctctgtaatgtgaacgcacaagaactctttttacgtctgagagatgcccctaaaagtcagaggaagaatcttctgtatgctacctggacttcaaagctcccattagaacagctaaatgaaatgataagaaacccaggggaaggacatttctggcaggtggatcacatcaagccagtgtatgggggaggaggacagtgttccctggacaacctgcagactctctgcacagtctgtcacaaagagagaactgccagacaagctaaggaaagaagccaggtgagaagacaatctctagcatcaaagcatggatcagacatcacacgatttttggtaaagaagtaaagtagaaaaatatatgaatgaatgacaaatggtttacatgtggaagactttaatacagaagttttccatgtttgtttaatatatcgagagtaaaaattttcagaacaaaaatcaagaattcaaattctcttctactaattacttttagtattaaatacattttgaaagtacttaacagaaactaagatacaatactgaatatttctgtggtctttttgatttgattcagactcgcaattatgtttcagcaatgttttgtaaagctctttacccctaatatgcctaatcactgtattgtgcatagattgtgtttaaaaaatgtactctcaattacctaaaaatgcttctggattagtattgttctggactgtcataggtatgagtggaacattgcaaaaccttatgggaaatttcagacgcaaatcattatttgggaattctgggccaagcatgaccagcctgcttaggattcaagagagactgtccactaaatacctccagaatgagctaggggcacacattttgggtgttgcttttcttgctttatttcttagctagtcatctttatcaaaaatatccttttcaaaatgaggtacctatggtgtttgtggacaatttgggggttctgtgtaaagtaattgttaaaactattaaataactgaaaacataaaatgtaaaatgccacttaagcttgattttttagatctttttttaaaaaatgaataaaactaggcttactgttggctgggcgcggtggctcacgcatgtaatcccagcactttgggaggccaaagcgggtggatcatgaggtcaggagatagatcgagaccatcctggctaatacggtgaaaccccatctctactaaaaatacaaaaaattagccgggcatggtgttgtgcacgtgtaatctcagatactcgggaggctgaggcaggagaattgcttgaacccgggaagcagaggttgcagtgagccgagatcacgccattgaactccagcctgggcgacagagcgagactccgtctcaaacaaacaaacaaacaaaaaaaaaaactaagcgtactatcaaaatacactttgtcttctggttctcattttctgtttttaaaaccctgtgttattaaaggtatgtttctggtacttattttaaaaagagtgatgatgacaaaacactttataataaggcataatcagatggttatatgcatttaaatatacaataataacattaaaatgtaattgacataaaataagagtgacgatgaaacaaacccagggcctagtcctgcaatatgtcagaatcatgagggcaaagagtcagaactatacaaaatacaggaccgaggaagaattacattcccaaaagggagctgtttgtaaatactattaggacatatacctctttagtttgagcattttcccacgttaattaatagctagtgttttacaacataaaggacttgtttttagaaagattatacaatcaaagattatacaaccacagttgttcctcagtttctatttcattgtatgagatcaagtcatgttggttattttataaatgaagttgggctttctttggcctcctttctgcttagttggtcaggtgctctttgcagttttctgcctcatttccaaggtaacctaggatttgtcacggttgagagccaagaagcaggcacgctgcctttcctccagcatggggttttgcaagcgaggtctaagtaggtcaaatttgaggggaacttgctcttcagatcacactaaggtgataattctaaggagaaagttctcagatgtaagaactgtgtgatggtttgaggtgaaacaatccatgaagataggctcagtctataccaggtttcagaattctgactaattaaaaatgccgtaaggagcattgagcatttgctgtacaggacactgactggcccgtccccatcccttcctgacatgtctcagagctttgtgtcctgccttcccctaatttggtctgcattacttgtggggcacattgagatgaagggttctgagacagaaaataaagatagagattgatctaataaccgagaccgaaagggcatcttgaggactgttctttcctcctcacaatctgaaacagaagctccccactatgtattgcaaatgggaggttatgacagagggacacagaaagtgtcagagcaagtggcagatcctgagtgcagaaggaagtgcagatgccccaggaagaagacagctgctgccactcaggagatggagatggagtgaaaacacaggtgggtacaatgagtgtaaaaggataggcctggctctgaaaagactcagagaagctgcaagatacagtttaggctaagaaaacaacaacaaaaaagggctctggccaggtatgatggcacttgcttgtagtcctagctacacaggaggctgaggtaggagggtcacttaagcccaggggttcatgaccagcctgggtaacacagcaaggccccatctcaaaaaagaaaaaaggctctgggtccagggaacagagctgggaagtggtaggtgacgaaggaactcgcttacgatagggaaccatatgaaaatatgcctgtgggtaggggtagggtggggaggacttccggagcatggtgggctcacacactcaaaccttgcacagccagcatcaggctggcctgccttcctgttcccgtcactgggtgacattgatcccagacacattctgatgactagtaaagttgcttttagtagccccagagccaggaggaataattcatatggaatttttaaagacgcccactcttggcgttaattacagcccaacgtacatttcttggggagattttcctgtgacaagtgaataccctctacattttcttaactggatgggaaaaggattttatgcccatacatcttgctaataaaccaaatcccttcttcagattcttgagtgaaacatttaaaatgtagtttctttagaaataaaagtatgaggcattttaaattatatgacagacaaaaaagtcaatgctcttgagctctttacagtaaataggttgtgtttactcataggatacagaatcatggatatcaaacatcaaaaataaattataaaaataatgtctcattttctgttgcatattattagcctgtctctcattccaccatttgttcttttgaactggaaaattgtgggctcctagtcactgcactaatctatctgaatatccaactaccagaaagggtttatcccatctcaagtttgtcagttgctttatatcgttaagggtgtttttgccaccctggttgtgttcataattaccattgagaaatgtcactgttattaaaatacattctgtgttcc

SEQ ID NO: 204701 - DNA, 2494 bp, Homo sapiens
  Payload ID: 20376
  Gene Name: zinc finger, RAN-binding domain containing 3
  Uniprot ID: Q5FWF4
  ENST ID: ENST00000619650
  CDS Start-End: 88-1884
actactgtttgcttttcctagttcgaaaaagaaaaacagcatgatattcgatcattttttgtaccacaacctaaaaaaagacagttgatgacctcctgtgacgaatcaaagagattccgggaggaaaatactgtagtgtcatcagaccctacaaaaacagctgcaagagatatcatcgattatgaaagtgatgttgaacctgaaacgaaaagattgaaattggctgcctcggaagaccactgcagtccgtcggaagagacaccatcccagtccaagcaaatccgaactccactcgtggaaagtgtacaggaggccaaggcccagttaaccaccccagcctttcctgtagagggctggcaatgtagtctctgcacctatatcaataattcagagttaccttattgtgaaatgtgtgagactcctcaaggcagtgctgttatgcaaatagatagcctcaaccatatccaggataaaaacgagaaggatgattctcagaaagacacctccaaaaaggttcaaactatctcagactgtgaaaaacaagcccttgcacagtcagaacctggccagttggctgacagcaaggaagaaacaccaaaaattgagaaagaagacggacttacatcccagccagaacagtggaagagttcagacactttgccagtgtatgacaccttaatgttctgtgcaagtaggaatactgaccggattcacatctatactaaggatggaaaacagatgagctgtaatttcattcctctggatataaaattagacctttgggaagatttaccagcaagctttcagctgaaacaatatcgctcactgattttgagatttgttcgagaatggagtagtctaactgccatgaagcaaaggataatcaggaaaagtggacagctattctgtagcccaattcttgctttggaagagatcacaaagcaacaaaccaaacaaaattgcaccaaaagatacataaccaaagaagatgttgccgtagcctcaatggacaaagtgaagaatgttgggggccatgtccgtctgatcacaaaggagtccaggccacgggatcctttcacaaaaaaacttcttgaagatggagcctgtgtcccatttctaaatccatacacagtccaggcagatctcactgtgaagccctctacatccaaaggctatttgcaagctgtggataatgaaggaaatccactttgccttcgctgtcagcaacccacttgccagactaagcaagcatgtaaagcgaactcttgggattcacggttttgctctctgaaatgtcaggaagagttttggattcgatctaataacagttacctgagagccaaagtatttgaaactgaacatggtgtgtgtcagctctgtaatgtgaacgcacaagaactctttttacgtctgagagatgcccctaaaagtcagaggaagaatcttctgtatgctacctggacttcaaagctcccattagaacagctaaatgaaatgataagaaacccaggggaaggacatttctggcaggtggatcacatcaagccagtgtatgggggaggaggacagtgttccctggacaacctgcagactctctgcacagtctgtcacaaagagagaactgccagacaagctaaggaaagaagccaggtgagaagacaatctctagcatcaaagcatggatcagacatcacacgatttttggaaacctcaaagctgcatgaatcacacaaggtaacaggtgccgagcaaggtctgcaggtttctggattgccagatagtgcagcacctgaaggaggtgcagcgcacacaaatgatcagcgcaggtgtcaaaggatgaagcagccacttacagaagtgcaaatcctcagccactcatcttaatccttaacaagacagcactccagataggcagccacgaccccaaaggcttctggaaccaaactgattaaagttttactcagtggatagttctatagaattaatgatgatgtatgccaaaaacctttcagtgattctaacttcaagcttggaaaaaaagacgaggcttcccagtgtttgtggtggtggatctgcctggttctcaatttgacaccctaagcgatcatactcaagaatagtacagatgtgtggaatacgccaatacctttaactacagacatcatgttctcaagataaaagcctttaaaacaaaaagccatcgtaggtatcaagtcaacatgaaattggaatgcaaaattaatactgctgaggatttccttcatatcccatgctgtttaactatctcttccacagtcctagaatcaatcttttttaattaagagacagggtctgtctttgttacccaggctggagtacagtggtgtcatcaaagctcagtgcagcctccaactcctgggctcaatactcttgcctcagcctcctcttcctgagtagctgcaactacagacacatgccccaatactcagctaatttttaaatttttgtggagatg

SEQ ID NO: 204702 - DNA, 2168 bp, Homo sapiens
  Payload ID: 20377
  Gene Name: zinc finger, SWIM-type containing 1
  Uniprot ID: Q9BR11
  ENST ID: ENST00000372520
  CDS Start-End: 82-1539
ggcgacggagcctggctgtgggcccatctttggaaaaaagatctgggaatgattgtctagcctccagcctcaacttacttgatgcttgagagactcaaagccccgtggtcagctgccctgcaaagaaagtattttgaccttggcatttggacagctcccatctctcccatggccctgacaatgctgaatgggctcctgattaaggactcaagcccacctatgctgctgcaccaggttaacaagactgcccagttagataccttcaactaccagagctgctttatgcaaagtgtctttgaccatttccctgagatcttatttatccaccggacctataacccaaggggtaaggtcttatataccttcctggtggatggacctcgggtgcagctggagggtcatcttgcccgagcagtctactttgccatccctgccaaggaggacactgaaggcctggcccagatgttccaagtattcaagaagtttaatccagcatgggagagagtctgtaccatcctggtggatcctcatttccttccactgcctatcctagctatggagttccccacagctgaggtccttctctcagccttccacatttgtaagttcctccaggccaagttctatcagctgtcccttgaacggcccgtggaaaggctgctcctgacctccctgcagagcacaatgtgctcagccacagcaggcaacctgagaaagttgtatacactcctgagcaactgcatccctccagccaagctgcccgagcttcactcacactggctgctcaacgaccgcatctggctggctcaccgctggagaagccgagctgagagcagccactacttccagagcctcgaggtcaccacccacatcctcagccagttctttggtaccaccccatctgagaaacaaggtatggcttctctgttccgttacatgcagcagaactctgcagacaaggcaaacttcaaccagggcctgtgtgcccagaacaatcatgctccctcagacaccatccccgaaagccccaaactggagcagctggtagaatcccacatccagcactccctcaatgccatctgcacagggccagcagcccaactgtgcctgggcgagcttgctgtggtccagaaatccacacacctcattggctctggctcagaaaagatgaacatacagatcctggaagatacccataaggtgcagccccagccccctgccagctgcagctgctactttaaccaggccttccacctgccctgccgccacatcctagccatgctcagtgcccgccgccaggtgctccagcccgacatgctgccggctcagtggacggcaggctgtgctaccagtctagacagcatcctgggcagcaagtggagtgagaccctggataagcacctggcagtgactcacctcaccgaggaggtgggtcagctgttgcagcactgcaccaaggaggagtttgagcggaggtatagcaccctgcgggaactggccgacagctggattgggccttatgagcaggtccaactctgattattctcgatgcccagagatgctcatgcacctgtgcacactcacatccacccatacacacacacacacacacacacacacacacacacacactcccttacactgttgtacttccgtgggccctccttccagaacaaggacaacaaggacaaggttgaagggtcttctcatctaccatggcctgctacctagcatgtgtctagctcaatgagacaggagtcagcaaatcttaatctgtttagtttactcaggtggccacatacagtctctgttgtatattcttggttttgttttaatattttttttctttttttttttttttttttttttgagaaggagtctgtctccagcctgggagggtgagactccatctaaaaaaaataaaataaatggcaacccctggtctaagataagagataaaacatcaggtggtgaggttgaggtttggggcttggtagcagttgccccagtcatgagatgactcacttaacccgtctcctttaagtgagctgggctgggaggcttcctacaggggaagaggcccctctggggagctgactcagccaggctccctgaacttttttccttgtcccatcctggggtcaataaaactgaatgttgcatattct

SEQ ID NO: 204703 - DNA, 2769 bp, Homo sapiens
  Payload ID: 20377
  Gene Name: zinc finger, SWIM-type containing 1
  Uniprot ID: Q9BR11
  ENST ID: ENST00000372523
  CDS Start-End: 96-1553
aaatagggagaaatggcgacggagcctggctgtgggcccatctttggaaaaaagatctgggaatgattgtctagcctccagcctcaacttacttgatgcttgagagactcaaagccccgtggtcagctgccctgcaaagaaagtattttgaccttggcatttggacagctcccatctctcccatggccctgacaatgctgaatgggctcctgattaaggactcaagcccacctatgctgctgcaccaggttaacaagactgcccagttagataccttcaactaccagagctgctttatgcaaagtgtctttgaccatttccctgagatcttatttatccaccggacctataacccaaggggtaaggtcttatataccttcctggtggatggacctcgggtgcagctggagggtcatcttgcccgagcagtctactttgccatccctgccaaggaggacactgaaggcctggcccagatgttccaagtattcaagaagtttaatccagcatgggagagagtctgtaccatcctggtggatcctcatttccttccactgcctatcctagctatggagttccccacagctgaggtccttctctcagccttccacatttgtaagttcctccaggccaagttctatcagctgtcccttgaacggcccgtggaaaggctgctcctgacctccctgcagagcacaatgtgctcagccacagcaggcaacctgagaaagttgtatacactcctgagcaactgcatccctccagccaagctgcccgagcttcactcacactggctgctcaacgaccgcatctggctggctcaccgctggagaagccgagctgagagcagccactacttccagagcctcgaggtcaccacccacatcctcagccagttctttggtaccaccccatctgagaaacaaggtatggcttctctgttccgttacatgcagcagaactctgcagacaaggcaaacttcaaccagggcctgtgtgcccagaacaatcatgctccctcagacaccatccccgaaagccccaaactggagcagctggtagaatcccacatccagcactccctcaatgccatctgcacagggccagcagcccaactgtgcctgggcgagcttgctgtggtccagaaatccacacacctcattggctctggctcagaaaagatgaacatacagatcctggaagatacccataaggtgcagccccagccccctgccagctgcagctgctactttaaccaggccttccacctgccctgccgccacatcctagccatgctcagtgcccgccgccaggtgctccagcccgacatgctgccggctcagtggacggcaggctgtgctaccagtctagacagcatcctgggcagcaagtggagtgagaccctggataagcacctggcagtgactcacctcaccgaggaggtgggtcagctgttgcagcactgcaccaaggaggagtttgagcggaggtatagcaccctgcgggaactggccgacagctggattgggccttatgagcaggtccaactctgattattctcgatgcccagagatgctcatgcacctgtgcacactcacatccacccatacacacacacacacacacacacacacacacacacacactcccttacactgttgtacttccgtgggccctccttccagaacaaggacaacaaggacaaggttgaagggtcttctcatctaccatggcctgctacctagcatgtgtctagctcaatgagacaggagtcagcaaatcttaatctgtttagtttactcaggtggccacatacagtctctgttgtatattcttggttttgttttaatattttttttctttttttttttttttttttttttgagaaggagtctgtctccgtcacccaggctggagtgcagtggcgcaatctctgctcactgcaagctccacctcctgggttcacaccattctcctgcctcagcctcccgagtatctgggactacaggcgcccgccacaatgccgggctaattttttgtatttttagtagagacggggtttcaccgtgttagccaggatggtctcgatctcctgacttcgtgatctgcccgcctcggcctcccaaagtgctgggattacaggcgtgagccatcgcacccggcctgttttaacattttcataaggtaaaaacctttcttagctcaaaggtctttaaaaaagcaggcaatccagctgggcatggtggctcacgcctgtaatcccagcattttgggaggctgaggtggacagatgacttgaggtcaggagttcaagaccagcctggccaacatagtgaaaccctgtctctactaaaaatacacaaattagccaggtgtggtggcgggggccctgtaatcccagctactcgggaggctgaggcaggagaatcgcttgaacctgggaggcagaggttgcagtaggccaagatcctgctgccactgcactccagcctgggagggtgagactccatctaaaaaaaataaaataaatggcaacccctggtctaagataagagataaaacatcaggtggtgaggttgaggtttggggcttggtagcagttgccccagtcatgagatgactcacttaacccgtctcctttaagtgagctgggctgggaggcttcctacaggggaagaggcccctctggggagctgactcagccaggctccctgaacttttttccttgtcccatcctggggtcaataaaactgaatgttgcatattcta

SEQ ID NO: 204704 - DNA, 2091 bp, Homo sapiens
  Payload ID: 20378
  Gene Name: zinc finger, SWIM-type containing 2
  Uniprot ID: Q8NEG5
  ENST ID: ENST00000295131
  CDS Start-End: 41-1942
agtgagccgagcagaggggccgcctccgcccgcacccagcatgcttcgccgaggctataaggcctctgaaaggcgaagacacttgagcgagaggctcagctggcaccaagaccaggcgctgagtagcagcatctacctcctacgagagatgggccccactggcttcctgctgagggaggaggagccggaatacatggatttccgagtttttctaggaaatcctcacgtttgtaactgttccacatttccgaaaggaggggaactttgtaagcatatctgctgggtcttgttgaaaaaattcaagcttccaaggaaccatgaatctgctttacaactgggtcttggagaaagagagataagtgacttgcttcgggggatacatcgagttcaaactccccaaccaggaacaaatgacgaaaatgaacatgttgaagaagatgggtacattaaacagaaggaaattgattcagaggatatctgctctatttgtcaagagctacttttagagaaaaagcttcctgtcaccttttgcaggtttggctgtggcaatagtattcatataaaatgcatgaagatcttagctaattatcagagtacatcaaacacttccatgttgaaatgtcctctgtgcaggaaagagtttgcaccattaaaactgattttggaggaattcaaaaactctagcaaactagtagctgcagcagaaaaagagagactggacaaacaccttgggattccctgtaataactgcaaacagtttccaattgaggggaagtgttataagtgtaccgaatgcatagaatatcacttatgccaggaatgttttgatagctgctgccatctttcccacacgtttacatttcgtgagaaaagaaaccaaaaatggagatcactagaaaaaagagcagatgaagttgtaaaatacatagatactaaaaatgagattgaagaaaagatgtcacattttcaagaaaagcaaggccaagtttacacaccaaaacacattgtaagatcactgcctctccaactgattactaagaatagtaagctgcttgctccaggctaccagtgtctactttgtttgaaggcatttcatcttggtcaacatacaagattgctaccatgtactcacaagtttcacaggaagtgtattgacaactggttattccacaagtgcaattcatgccctattgatggacaagttatatataaccctttaacttggaaaaattcagcagtgaatggacaagcacatcagtctgtttcaaacagagacatcattcatctatcaaagcagaaagaaccagatctttttattcctggtactggattagtcttaaaacaaaatagacttggaattttacctagcatacctcagtgtaattttgatgaattgaatacacctcaaagcccaaaagatgcctatgaaaatacaacaatagataatctatgctctatcaaattagataattcaaattcaaaaaaattaacctatgattataaaattagccaacattttcccaggtatcttcaagatttacccactgtgtcatttgggaaaataccatctcaaacactgcttcctcctattgttcataagaatattgtgtgtcccactgcaatggaaagtccatgcatcagtggaaaatttcacactagtctaagccggatgaccaaaggctgtaaatgtaataaccacaacctaaagaagactcctgccactaaaataagagaggacaacaagagatcaactttacttccagaggatttcaatcttattgtcaattggagcacagctaaacttagtttgtctaaaaggtatagtaactgtatgggggaaattacacgaaaatgtagtcatctatcaagacagcctgtgtctcactctgtaaatacaaaaagtactgagctatctttaataatagaaggagttcaattgtgaaaaagtttactatctgaaaatatttgaatgttgaatataaaaaaatgttttatatagaacataaaaagcacacatagtcttgacaaatgtatataaaattctctgttggaatttgcctacttacctataaacagctcactacacttaaa

SEQ ID NO: 204705 - DNA, 596 bp, Homo sapiens
  Payload ID: 20378
  Gene Name: zinc finger, SWIM-type containing 2
  ENST ID: ENST00000419862
  CDS Start-End: 79-324
gcctgcacgccgtcgtcttggagaccggctggcgcctcagtgagccgagcagaggggccgcctccgcccgcacccagcatgcttcgccgaggctataaggcctctgaaaggcgaagacacttgagcgagaggctcagctggcaccaagaccaggcgctgagtagcagcatctacctcctacgagagatgggccccactggcttcctgctgagggaggaggagccggaatacatggatttccgagtaactaccgcccctaccgcccccagttggccatcatccccgcccaccaggttcccccactggcatacccaatgtgcgtagccaccatcacaatctctgcggatacttgctgcctcacccccgaaagcgccttcccacgagtgttccagactctaaaatacgtgaaattacagaaggaaatagtatttattagaagtttcttttttggaggttaagaccaaactgcaactcttgtaaaagatgatggctcttgatctttaggcttgaaaatgtttttctaggaaatcctcacgtttgtaactgttccacatttccgaaaggaggggaactttgtaagcatatctgctgggtct

SEQ ID NO: 204706 - DNA, 2773 bp, Homo sapiens
  Payload ID: 20379
  Gene Name: zinc finger, SWIM-type containing 3
  Uniprot ID: Q96MP5
  ENST ID: ENST00000255152
  CDS Start-End: 210-2300
agatagcaaatacacccccttcctcttgtaacccggtcaggcctagggttcctccctgagttccagaataggccacccagttggggcggacccttaaggcattctgggcccacgcctgcctataaaccctcatagtgtgacctttgacccctggtgtgatcttgggcccgggctgggaccagcccctagtgtgggttgtgggggcggccatggagctgggcagctgcttcaagacctatgaggacttcaaggagtgcttcagcgcctacaaaagggagaacaggtgctccttcattctcagggactgcgtctccgtccgcttccacaacctcaaccatggcacctccatccgcgaagacatcctgtatgtgcaggtgaaatttgtctgcattcggacccaatcaaacaggaagagaacgcgggaggcagacatgtgcccagcgtacttgctcctaaggtacaacgagagactagatagactatttatcagtgaactaaacacacagcacatacatggtgactctaaagtggctagtcctggaggagacaccactggcaaatctcaaaagacaatgtgcctgcagagactccagcctgtgcagcccacaaccaaaaaagaccttgacactgccgagaagtccctggttgagccatcgttttgcctagataaggtacaagtgtcctcaaagccagagcaggaaggcatcactccttctgacctggccaagatagcaaaagtgatgaagaactttcttaaggtagatgagggttccatggcttccttcagtgtgggtgacagccagcacctggaccggctcagcttccagagcagtaagatgaccgacctgttcatccgcttcccagagaatctcttgctacaccgggtggagaacacccagggccacatcctctatgctttcttggtggagaacaaggaacgagaaagtcgagtggtgcactttgctgtgctcaaggcggagacagtcacctctgtggccaagatgctgagcatcttcacagagttcaactccgattggcccaaggtcaaggtggtctttgtggacccttcattccattaccgggctatcctgcaggagatctttcctgctgcccgcatcctcctttccatctaccacacaacccgactcttggagaagaagttgcatcgtagttcagcaaatccatcctttaaaaggctcatgaaggaagccctgcgggaggccgtgtttgtcacttctgaagccagcctgaaaaatctctgccagatgtcccaggccgtactggatgaggatctcttcaacttcctgcaggcccactggttcacctgtgaactgctgtggtacatgcatgttaggaagggcctgcttgcgtgtaacacctacatggacagcctagacattgtcaccagcaaggtgtcaagcctctttcgggaacagcagtcgctgctggactgcatcctctgctttgtggattacatagacttctttaataccaaaggcttgaagaacttgcccacacctcctcccaaattaaagagagctcggccggcaagcatgccactgaagtccaagaaggcttttggaatctgtggagagagccttaccagcctccctgcagaagagaccaagccagacgcacagcaggtacaggtacagcagcagtcacaagtgccgccctcgcaggttggcatgctggacaccttgcaccagagtggctctgaactagcctacaagctgtgccacaatgagtgggaggtggtacagaactccacccacctggtggacatggctggctcttcagtggacgttcagctgctagaggactctcaccaggttagcaaagatggctgtagctgcagctgttcctttcaacaatggtaccacctgccatgccgacacattttggctctgctgcacaccagccagcagccggttggtgaagccatggtgtgccgccggtggcagaagaagtaccagtacctccttgggcccaatggggagctccaggatcgtggtatggtcccaaacacaggccagcctgagaagcaaggacggaacgacatgattcaggacctaagcagggagttagcaaacctgctcatgcagaccgaggggccagagctggaggaacgctactccaccctgcgcaagattgtggatatctgggctggcccctcccagccatctgagctctttcagcagccaggagactttaaggacgtgggccgcctccctttcctctggggaaagcaagaagaaggggagggattccctcctgctacagctgtgatgcattattgaagcactttagctgaagcattggaccacaaacacttctccttggaagtgtgagagtttaaagtgggcaggacatactagggtttagcattttagccaatgtcttcctaggtggggctaggaatattgttacagtagagaggaagggaactccactgtgtgacagtcctttcaatctgccccttttcagccctacttttggcattccttgggagcctcagttgttgttcaaggccaaagttatctccgtgctgcaaggtcaccctcttcctcccccagcccctgagatcagatcttatttgctctgcaaagatgaatccctgcctcaggttagggtgagacaaaatcggtctggtaaaagggcctgttttcagggacaaagggaatgaggatgatctttggctgttgctgctctttatgaagaatcttatttgtaactttttattcatattaaagttgtttttaataaaattaaa

SEQ ID NO: 204707 - DNA, 4339 bp, Homo sapiens
  Payload ID: 20380
  Gene Name: zinc finger, SWIM-type containing 4
  Uniprot ID: Q9H7M6
  ENST ID: ENST00000254323
  CDS Start-End: 190-3159
taaaggggccgcatcaccctgccggcccggcgcgggtcgggggtgggtgcggtaggggtcccggggcggccgagcgcagaggacggacgggaaggagggcagggggcgcgggagccggcgaagcggagcgggcatcggaccgagccccccaaagaggccccgccccggccctggccccggccgggccggatggaaccccccgcggccaagcggagccggggctgccccgcgggacccgaggagcgcgatgccggggccggggccgcgcgtggccggggccggcccgaggcgctgctggacctcagcgccaagcgggtagccgagagctgggccttcgagcaggtggaggagcggttctcccgggtgcctgagcccgtccagaagcgcatcgtgttttggtcgtttccacgcagtgaacgggaaatatgtatgtactcgtcgctgggttacccgcccccagagggcgagcacgatgcccgggtgccctttacccgcgggctgcacctgctccagagcggggccgtggaccgcgtgttgcaagtgggattccacctgagcggaaacatccgcgagccagggagtcctggagagcccgagcgcctctaccatgtctccatcagctttgatcgctgcaagatcacgtccgtgagctgcggctgtgacaaccgcgacctcttctactgtgcccacgtggtggccctgtccctgtaccgcattcggcacgcccaccaggtggagctgcggctgcccatctccgagacgctctcccagatgaaccgggaccagctgcagaagttcgtgcagtacctcatcagcgcccatcacactgaggtgctgcccactgctcagcgcttggctgatgagatcctcctgctgggctccgagatcaacttggtgaatggtgccccagaccccaccgccggcgcaggaatcgaggacgccaactgctggcacctggacgaggagcagatccaggagcaggtgaagcagctactgtccaatggcggctactacggggccagccagcagctgcgctccatgttcagcaaggtgcgggagatgctgcgaatgcgggactccaacggggcgcgcatgctgattctcatgaccgagcagttcctgcaggacacgcgcctggccctgtggcggcagcagggcgcgggcatgacggacaagtgccggcagctctgggatgagctgggggccctgtgggtttgcgtcgtcctgagcccccactgcaaaccagaggaaagggcaggctggctccagctactcagcaggtgggacaagctcgacgtctgcccactggaagagggcaactactccttcgacggccccagcctgcagcccaccatggcccccgccccagagctgctccagaagggctccacctgcatcaccaacaccgaaggatgggtggggcaccccctggaccccattggctgcctctgcagggcgctcctggaggcctgtcgtctggaggaggagacacttaccctttacccagactcaggccccgagaagcggaaggtggcctaccagcacgtgcctgtgcccgggagccctggggagtcctacttggtgctggcgctggaggtggcactgctggggctggggcagcagcgggccctgccggaggggctgtacgcccaggacaaggtggtgcgcaacgaggagcagctgctggccctgctggaggaggtggagttggatgagcggttggtgcaggtgctgcgcaagcaggcggggctgctgctggaagggggtcccttcagtggctttggggaggtgctgttccgggagagcgtgcccatgcacacctgtgcccgctacctgttcaccgcactgctgcctcatgacccggacctggcctatcgcctcgcgctgcgagctatgaggctgcccatactggagacagcatttcctgctggagaacctcatcccagcccgctggactccatcatgagcaaccgcttcccccgctggttcatccttggccacctggagacccgccagtgtgaactggcttccaccatgttgacggccgccaagggagaccccaagtggctgcacacggtactgggctccatccagcagaacatccactctccggccctgctctttaagctggcgcaggacgcctgcaagacagccaccccggtcagcgccccaccagacaccacgctgctgggcatcgcactggagctggggctgcaggtgatgcggatgactctgaacgtaatgacctggcggcggagggagatggtgcgctggctggtcagctgtgccacagagattggcccgcaagccctgatgaatatcatgcagaactggtattccttattcacaccagtggaggcggctaccatcgtggcagtgacgggcaccacacacgccactctgctgcgactgcagctggacacatcgcggagggaggagctctgggcctgcgcccgcaccctggccttgcagtgcgcgatgaaggaccctcagaactgcgccttgcctgccctgaccctgtgcgagaagaaccactcggccttcgaggcggcctaccagatcgtgctggacgcggcggccggcggcctgggccacgcccacctcttcactgtggcccgctatatggagcaccgcgggctgccgctccgggcctacaagctggcgacgctggccctggcgcagctcagcatcgccttcaaccaggacagccaccctgccgtcaacgacgtgctttgggcctgctctctcagccactccctgggccggcacgagctctctgccatcgtccccctcatcattcgcagcatccactgtgccccaatgctgtccgatattctgcgccgctggactctctcggcgcccggtctgggccccttaggggcacgccgggccgccaagccactgggtgccgaccgggcgccgctctgccagctcctggacgcggcagtcaccgcctacatcaccaccagccactcgcgcctcacgcacatcagcccgcggcactatggggatttcatcgaattcctgggcaaggcccgggagaccttcctgctggcgcccgacgggcacctccagttctcacagttcttggagaacctcaaacagacctacaagggcaagaagaaactcatgcttttggtgcgggagcgttttggttgagggacagtggggtgcgtgggagtggggatccccctcgcccctgcgtcccccacccttgctctccaattaggcccacgtggcatttcagtattattaagtcagggaaggagcccggctggagatgggggcagggggagcagcatcctgccacgtgtgtgcctgggagtctgtgagcaagtgtgcaagactccagaagcagaagccatactgccacccagaagcctggaaggggtgtgtgcttgggctgctggtatgaccccactttgggcaccccaaaagcaataggcaaactccccttacccagactggcttgggctccaggagggaggctgggaggcaggactttccagaaatcgaccctctaagtcaatgtagcacattttcccccaaccccaccctgggtggccaagggtcctcccccaccccctactgctcagggccccccattatgccacctccaaagtggctgcccagccaggaccattggctcacccccactgaaggaattgaagaggcctcaggcctcagcctcatacctcacccccttatcctatccggccaggacccccatttccttgggcactagggtcccagggtgggctcagggttggggaagtcctcgctgccctctcttctcacctgctagtcactggacgtacaactcaggaactgagcgaggctcacactgccccttccaacctggggttgggggacacagacgcgagagagccggagacccccacccccgatctggaaaggaaagagacctgtatcttggtgtttttctggctttttcaccctttcgcctcctgtctttctgcttcgccccttcatcttactctgtttccatttttcccggcacttacctgcctttctctctgcacctaagtccctgccgccctctctctttggccatccttcctttcccccaccttgacccagggaggagaagggagaacatcacccccccaagtcacccccacatcttttcccttcttgtatattaaggacaaaataccacatcattttgtaactttttttctatttattgaacggtgtattacatgtccttttcctttttttttttcaaagattgaacagaaatttttctttttaattttattttgagactggggtgcatctccagagccactcacaccctcaacctcgtttcctccgc

SEQ ID NO: 204708 - DNA, 719 bp, Homo sapiens
  Payload ID: 20380
  Gene Name: zinc finger, SWIM-type containing 4
  ENST ID: ENST00000592227
  CDS Start-End: 1-719
agccctggccctgtctcccccagactcaggccccgagaagcggaaggtggcctaccagcacgtgcctgtgcccgggagccctggggagtcctacttggtgctggcgctggaggtggcactgctggggctggggcagcagcgggccctgccggaggggctgtacgcccaggacaaggtggtgcgcaacgaggagcagctgctgacccgccagtgtgaactggcttccaccatgttgacggccgccaagggagaccccaagtggctgcacacggtactgggctccatccagcagaacatccactctccggccctgctctttaagctggcgcaggacgcctgcaagacagccaccccggtcagcgccccaccagacaccacgctgctgggcatcgcactggagctggggctgcaggtgatgcggatgactctgaacgtaatgacctggcggcggagggagatggtgcgctggctggtcagctgtgccacagagattggcccgcaagccctgatgaatatcatgcagaactggtattccttattcacaccagtggaggcggctaccatcgtggcagtgacgggcaccacacacgccactctgctgcgactgcagctggacacatcgcggagggaggagctctgggcctgcgcccgcaccctggccttgcagtgcgcgatgaaggaccctcagaactgcgccttgcctgccctgaccctgtgcg

SEQ ID NO: 204709 - DNA, 2921 bp, Homo sapiens
  Payload ID: 20380
  Gene Name: zinc finger, SWIM-type containing 4
  ENST ID: ENST00000590508
  CDS Start-End: 1-2697
agcgcccatcacactgaggtgctgcccactgctcagcgcttggctgatgagatcctcctgctgggctccgagatcaacttggtgaatggtgccccagaccccaccgccggcgcaggaatcgaggacgccaactgctggcacctggacgaggagcagatccaggagcaggtgaagcagctactgtccaatggcggctactacggggccagccagcagctgcgctccatgttcagcaaggtgcgggagatgctgcgaatgcgggactccaacggggcgcgcatgctgattctcatgaccgagcagttcctgcaggacacgcgcctggccctgtggcggcagcagggcgcgggcatgacggacaagtgccggcagctctgggatgagctgggggccctgtgggtttgcgtcgtcctgagcccccactgcaaaccagaggaaagggcaggctggctccagctactcagcaggtgggacaagctcgacgtctgcccactggaagagggcaactactccttcgacggccccagcctgcagcccaccatggcccccgccccaggctcggaggaagaggaagaggtggcagccacaagtccccgccacacggtatttggccgcgccttgctggctggagagctacactggaatgacgcctacctgcagaggatcctggccagtgactcctacgggcccagcctcacaggcagcgtgggtggggacaaaccgactttcgacccccagggccgcccactgtggctgggagaacctttccccactgcctgtgcccgtgtggacaccctgcgtgcccacggatacccccgccaggccctgcggctggcaagtgccatcatcaacacactccggctgcagcagcggcatcagctagagagctacaagcagcagaaaaaagagctgctccagaagggctccacctgcatcaccaacaccgaaggatgggtggggcaccccctggaccccattggctgcctctgcagggcgctcctggaggcctgtcgtctggaggaggagacacttaccctttacccagactcaggccccgagaagcggaaggtggcctaccagcacgtgcctgtgcccgggagccctggggagtcctacttggtgctggcgctggaggtggcactgctggggctggggcagcagcgggccctgccggaggggctgtacgcccaggacaaggtggtgcgcaacgaggagcagctgctggccctgctggaggaggtggagttggatgagcggttggtgcaggtgctgcgcaagcaggcggggctgctgctggaagggggtcccttcagtggctttggggaggtgctgttccgggagagcgtgcccatgcacacctgtgcccgctacctgttcaccgcactgctgcctcatgacccggacctggcctatcgcctcgcgctgcgagctatgaggctgcccatactggagacagcatttcctgctggagaacctcatcccagcccgctggactccatcatgagcaaccgcttcccccgctggttcatccttggccacctggagacccgccagtgtgaactggcttccaccatgttgacggccgccaagggagaccccaagtggctgcacacggtactgggctccatccagcagaacatccactctccggccctgctctttaagctggcgcaggacgcctgcaagacagccaccccggtcagcgccccaccagacaccacgctgctgggcatcgcactggagctggggctgcaggtgatgcggatgactctgaacgtaatgacctggcggcggagggagatggtgcgctggctggtcagctgtgccacagagattggcccgcaagccctgatgaatatcatgcagaactggtattccttattcacaccagtggaggcggctaccatcgtggcagtgacgggcaccacacacgccactctgctgcgactgcagctggacacatcgcggagggaggagctctgggcctgcgcccgcaccctggccttgcagtgcgcgatgaaggaccctcagaactgcgccttgcctgccctgaccctgtgcgagaagaaccactcggccttcgaggcggcctaccagatcgtgctggacgcggcggccggcggcctgggccacgcccacctcttcactgtggcccgctatatggagcaccgcgggctgccgctccgggcctacaagctggcgacgctggccctggcgcagctcagcatcgccttcaaccaggacagccaccctgccgtcaacgacgtgctttgggcctgctctctcagccactccctgggccggcacgagctctctgccatcgtccccctcatcattcgcagcatccactgtgccccaatgctgtccgatattctgcgccgctggactctctcggcgcccggtctgggccccttaggggcacgccgggccgccaagccactgggtgccgaccgggcgccgctctgccagctcctggacgcggcagtcaccgcctacatcaccaccagccactcgcgcctcacgcacatcagcccgcggcactatggggatttcatcgaattcctgggcaaggcccgggagaccttcctgctggcgcccgacgggcacctccagttctcacagttcttggagaacctcaaacagacctacaagggcaagaagaaactcatgcttttggtgcgggagcgttttggttgagggacagtggggtgcgtgggagtggggatccccctcgcccctgcgtcccccacccttgctctccaattaggcccacgtggcatttcagtattattaagtcagggaaggagcccggctggagatgggggcagggggagcagcatcctgccacgtgtgtgcctgggagtctgtgagcaagtgtgcaagactccagaagcagaagccatactgccacccagaagcct

SEQ ID NO: 204710 - DNA, 5819 bp, Homo sapiens
  Payload ID: 20381
  Gene Name: zinc finger, SWIM-type containing 5
  Uniprot ID: Q9P217
  ENST ID: ENST00000359600
  CDS Start-End: 207-3764
ctgcaggccgcccgcgtctgccctcgcggcgcgctcccgggcccggccgcggttccccactcgggccggctggctcgcgggttctctcgccccgcccccctcggcgccaccgctgggcgcttgcgcggggcgcgtggccgtggccagggtctccgccgcagcccgagcagccgccgccgcctcagtcagtcagtcagtccccagcaatggcggacggaggtgagcgagaggagctgctctcgccgtcaccggtctctccggctaagcggcagtgttcgtggcccagcccgcaggctcatcaccctcgcggttcgcctggggcagccggcggaggggcagggggcgtcggcagcagctgcctggtcctcggggcccgcccccacctgcagccggattccttactggactgcgccgccaagacggtggcggaaaagtgggcatacgaacgggtggaggagcgcttcgagcggatcccggagcccgtgcagcgccgcatcgtctactggtccttcccgcggaatgagcgggagatctgcatgtactccagcttccagtaccggggcggccccggcgccggcgctgctggcggcgccgcgggggcttcgccggccgaggaggggccgcagccaccccccggggccgccgctccggccggctccgcccccgggggcgtcgcggctggggcatcccccgggctgggcgcaggggccggcgcggccggctgcggtggcgaggggctcccgttccgccggggcatccgtctgctggacagcggctccgtggagaacgtgctgcaagtcggctttcatctgagtggcacagtaactgagctggccactgcctctgaaccagcagtgacttataaagttgcaatcagttttgatcgatgcaaaatcacctcagtgacatgtggctgtgggaacaaggacatattctactgtgcccatgtggtagcactctcactctacaggatccgtaaaccagaccaagtcaaattgcgtcttcctatctccgaaacccttttccagatgaatagggaccagctacaaaagtttattcaatatttaatcacggcacaccacactgaagttcttcctactgcacagaaactggcagatgagattctatcctccaactcagaaatcaaccaagtgaatggtgcccctgaccccacagctggggccagcattgacgatgagaactgttggcatttggatgaagaacaggtgaaagaacaagtgaagctttttctctcccagggcggttactgtggctctggaaagcaactcaactcaatgtttgccaaggttcgagaaatgctgcggatgagagattccaatggagcaaggatgctgacactaataactgagcagtttgtggctgacccacgactcacactctggaggcagcaaggaacaaacatgacagacaagtgcaggcagctctgggatgagctaggggctttatgggtgtgcataattttaaatccacactgcaaactggaggagaaatcctgctggctgcagcagctgcagaagtggagcgacctggatgtctgtcccctggaggatggaaactatggacatgagctgcccaacatcaccaatgcacttccccagagtgccattcacagcccagactccttatccagaccaagacgaacagtattcactagagccattgaggggcgtgaattacattggcaggatagccacctacagcgaataatcagcagtgatgtttatacagctcctgcctgccagcgggaaagtgaaagactactctttaattcccaaggccagccactgtggcttgagcatgtgcctacagcctgtgctcgagttgacgccctgcgttcccatggttatccaaaagaggccctcagactcacagtggccattattaatactctgaggttgcagcagcagcggcaactggaaatctacaagcatcagaagaaagaactgttgcagagaggaaccacaaccatcacaaacctggagggctgggtgggccaccccctggatcccatcgactgcctgtttctcactttgactgaggcctgccgcctgaatgatgatggctatctggagatgtcagatatgaatgaaagcagaccccctgtgtaccagcatgtacctgtggctgcaggctccccaaacagcagtgagtcctacctgtcattggccctggaagttgcactgatgggcctgggtcaacagaggttaatgcctgaaggcctctacgcacaggacaaggtatgccgtaatgaggagcagctcctgagccaactccaagagctgcagctggacgatgagctagtgcaaacactgcaaaaacaatgcatcttactgctggaaggaggtcctttcagcggtctgggagaagtcatccaccgagagagtgttcccatgcatacctttgccaagtatttgttctcagctctgctgcctcatgatccagacctgtcctataaattagccttacgtgccatgaggttacctgttttagaaaactcagcttctgcaggcgacacatcccaccctcaccatatggtgtctgtggtgcccagccgttatcctcgctggttcacgcttggacacttggaatcacagcagtgtgaactggcctccaccatgctgactgctgccaaaggagacactttgagactccgaacaattctggaagcaatacagaagcacattcattcttcctccctcatcttcaaactggcccaagatgcattcaagattgctactcccaccgacagtagtactgacagcaccctgctcaacgttgccctggaacttgggttacaggtgatgcggatgaccttatcaacccttaactggagacgcagggagatggtacgatggttggtgacctgtgctacagaagtgggtgtgcgggccctggtgagcatcttgcagagctggtacacactcttcacccctactgaggctactagtattgtagctgccacagccgtatcccacaccactatcctgcgcctcagtcttgactatccacagcgggaggaactggctagctgtgctcgcacactggctctacagtgtgctatgaaggatccacagagctgtgccctgtcagcccttacactctgtgagaaagaccacattgcctttgaggcagcctaccagattgccattgatgctgctgctggtggtatgacccattcacagctgttcaccatcgcccgctacatggagctccgtggctacccgctacgtgccttcaagctggcctcattggccatgagccatcttaacctggcctacaaccaggatactcacccagccatcaatgatgtgctctgggcttgtgctctcagccactctctgggcaagaatgagctggcagctctcatccccctggtggtgaagagtgtgcactgtgccacagtgctttcagacatcttacgacgctgcacagtgactgcacctggcctggccggcatcccaggccgccgaagctctggaaagctcatgtccactgacaaagctccattgcgccagttgctggatgccaccatcaatgcctatatcaacactacacactcacgcctaacacacatcagccctcgccactatggagagttcattgagtttctaagcaaggctcgggagaccttcctgctgccccaggatggccacctgcagtttgcccagttcatcgacaacctcaaacagatctacaaaggcaagaaaaagttgatgctgctggtgcgagagcgctttggctgagagagcagatagctcactgccagagcagcctgggttcccaggtagtatcaggtcaggccaagggcactgaaacatttgtccaccctgagagaactctgagcacctgtggatgaggccaaaggaccacagggctaaggatggggaaagtccagctctagtcgataatgcctaccttggcaagcttctgactacagcctactgttcatggaggagctgggccctgcagatcgaccagaaaccccacaacatgccacctcatgcccctatatcctgcgtgtcctgagcattggccctgtctcccttggcaaacacagaacactgttccatctcagggattgcttaaccagagaaacagacacatttgtgggactgtaaatactatatgtgttgctaattattgtaaacttgtaactatttataattctgcttctgatttgatgggcacttgaagtagctgtgggtaggaggatatgcttattttctgaggagactcacaaccatttctcaggtttcccttgcagagtgtttgctggtagcagtggaagagtgggggtgccaaggagaaaaatggccagttaggatcaacccaagtctagtctatgcagaatcccccacctacagacagggcatttatagtccagtggtgagtgagggacagaggccaggactggacttagacttttgcctcacaaaactgtgaggacattgaagctcctgcctcacacagcctcttcaggagcctgctgaacacctgagaaacaagtgcagggagaagatgaaggtctgggaagccgctgagttcataatattcatctactgtggtcacctttgtgttagcaagtgtgtggtttcatctataattgtgtgtgtgtatctttatggctaagtacatgtgtgtatgtacatagatacatctgtgcatgcctgtttgtgcacatatatatttatgtgtatgtgtcagttctatggctgtgtacctgtttgaatatgtgcacactggactgtgagtttctacgtgaggatatacacattttgtgtacatgtgaggatgcacatctttgtgcaaatgcactcatgtttgtgcatgtttagtatgtgtatctgcgtacacgagtgcatgtgtataaacatgtttgtatccatgtgtatgcttgttatccatgcatctgtgtctttatatgtgtaactgagcgtatttctacatgtagggatgtctgtgtattcatgtttgaggatctgcatcaatgtgtcctttttgccagatttctctttcccattcctcttaaatctctctcgccagctaaacgtttgttccccatctctgtgcctcctctattcattctctcaccaaacaagcttctaagcaccaatctccctctgccatcagattggctgctttagctccatagttctcttctcgcctcatacttgctttcttcccctgcctttctacctcaagcttcctcgccggcttttgtcacagtctcattgctcgctgacttggaggctagggctggtctgcacttagcctctcccttcctaatttctagccctagtgggcagtcctgtcttagccctggctgacctccatagtgtatcatgttcctgctaccttcctgacccctgtgctcagcctggaattgttataggaggtagcaagggcactcagaaaagtcagttggaaccagtgtcttggtgtttactgtttcatgtcttagttcctgagttgggggtggggtttgatagggaaggggtggtatagctagaatgtgaactaagaacttctccatctgctttactttttctttcttcgacaaactgtcaccttttttactccaaactgaccaagaagttgtatttgccatttgtggctactcaagtcttactgtccagccaagggcccctacgtctcagcccaatgggttggttaaaaaaaagagagaagccactctcatttctgtatcacagttgcccttttttagcaagtgtgtgaattcacagtgcttttctatgaataaatcatggatcacataaaagatcatttttctaaaagca

SEQ ID NO: 204711 - DNA, 5501 bp, Homo sapiens
  Payload ID: 20382
  Gene Name: zinc finger, SWIM-type containing 6
  Uniprot ID: Q9HCJ5
  ENST ID: ENST00000252744
  CDS Start-End: 1-3648
atggcggagcgcggacagcagcctcctcccgcgaaacggctttgctgccggccgggcggcggcggcggcggcgggggcagcagcggcggcggcggcggcgcgggtggcggctacagctctgcctgtcggccaggcccgcgggcgggtggcgcggcggcggcggcggcgtgcgggggcggcgcggcgctggggttgctgccgccgggcaagacccagagccccgagtcgctgctggacatcgcggcgcgcagggtggcggagaagtggccgttccagcgcgtggaggagcgctttgagcgcatcccggagccggtgcagcgccgcatagtctattggtccttcccccgcagcgagcgggagatctgcatgtactcgtccttcaacaccggcggcggcgccgcgggcggccccggcgacgacagcggtggcggcggcggcgcgggcggcggcggcggcggcggctcctcgtcttccccggccgcaacctcggcggccgcaacctcggccgccgccgccgctgccgccgccgccgccgccgccgccgccgccgcgggggccggggccccgtcggtgggggctgccggggcggcggacggcggcgacgagacgcggctgcctttccgccggggcatcgcgctgttggaaagcggctgcgtagacaacgtcctgcaagtcggtttccacttgagcggcacagtgacagaacctgcaatacaatcggagccagaaactgtttgcaacgtggccatcagctttgatcgttgcaagattacctcagtgacctgcagctgtggaaacaaggacatattttattgtgcccatgttgtggcactgtctttataccgcatccgcaagccagatcaggtcaaactgcatcttcctatttcagagactctctttcaaatgaatagagaccaactgcaaaagtttgtacagtatttgatcacagtgcaccacacagaagttttgccaactgctcaaaaattagcagatgaaattctttcccaaaattcagaaatcaaccaagttcatggtgctcctgatccaacagcaggtgctagtatagatgatgaaaactgctggcacttagatgaagagcaggttcaagaacaggttaaactgttcctttcccagggcgggtaccacggatcagggaagcagcttaatttgctctttgcaaaggtgcgggagatgttaaagatgagggactccaatggggcccgcatgttgaccttgataacagagcaattcatggctgaccctcgcctgtcactttggcggcaacaaggcactgcaatgactgacaaatacaggcagctctgggatgagctgggtgctctgtggatgtgtatagttttaaacccccactgcaagttggagcaaaaggccagttggctaaaacagctgaagaaatggaatagtgttgatgtctgtccatgggaagatggaaatcatggcagtgaattacccaacttaaccaatgctctgcctcagggtgcaaatgccaaccaagattcatcgaacaggccacatcggacagtgttcacccgagccatcgaggcatgcgatctccactggcaggatagccacttgcagcacattatcagcagtgacctatacaccaactactgttaccatgacgacactgaaaactccctcttcgactcccgcgggtggcccctctggcatgaacatgttcctacagcctgtgcaagagtggacgcattacgttctcatgggtaccccagagaagcactgagactagcaatagctattgttaatacattaagacgacagcagcagaaacagttggaaatgttccgaacccaaaaaaaagagctaccccataaaaacataacctcgataaccaatctggagggctgggttggacatcccctggaccctgtgggcactctcttcagtagccttatggaagcctgccgcattgatgatgagaacctctctgggttctcagattttacagagaatatgggacagtgcaagtctctggaataccagcatctacctgcacacaaattcttagaagaaggggaatcctatttaacgctggctgtggaagtagccctgatagggctaggacagcagcgtatcatgcctgatgggctgtacacacaagagaaagtttgccggaatgaggagcagctcatttctaagcttcaggaaattgaattggatgacacactggtgaaaatttttcgcaagcaagcagtcttcctattagaagccggaccatatagtggtttaggtgaaataatccatcgggagagcgttccaatgcacacatttgccaagtatctcttcacctctctcctacctcacgatgctgaattggcatacaaaattgcactgagagcaatgcggttactagtattggaatctactgctccatcaggagacctcacccgcccacaccacattgcatcagttgttcccaaccgctaccctcgctggttcactctaagccacattgagtcccagcagtgtgagctggcatccaccatgctaactgcagccaaaggcgatgttcggaggctggaaacagtattagaatccatccagaaaaacattcactcctcatcacacatcttcaagcttgcccaagatgcatttaaaatagcaactctcatggacagtttgccagacatcactcttttgaaagtgtctctggagctgggcctgcaggttatgcgaatgacactgtcaaccttaaattggcgacggcgggagatggtgaggtggctggtaacgtgtgctactgaagtcggggtttatgccctggacagcatcatgcagacctggtttacactctttactcccaccgaggccacaagtatagttgcaactaccgtgatgtccaacagcaccatcgtccgcctccacctggactgccaccagcaggaaaagctggccagcagcgcccggacacttgcactgcagtgtgccatgaaggatccacagaactgtgccctctctgcgctaaccctttgtgaaaaggatcacatagcttttgagacggcgtaccaaattgttctcgacgctgctacgactggcatgagctatacacagctctttacaatagcacggtacatggagcaccgcgggtaccccatgagggcctacaagctggccaccctggccatgacccatctcaacctgagctacaatcaggacacacaccctgccattaatgatgttttgtgggcctgtgcgcttagccactcccttggtaaaaatgagcttgcagctataatacctctggtggtcaagagtgtcaagtgtgcaacggtactgtcagacattttgcgcagatgcactctgaccactcctggcatggtgggacttcatgggaggaggaactctggtaagctcatgtcactggacaaagcccccttgaggcaactcttggatgccacgatcggggcctacatcaacacaacgcactcacggctcacacacatcagtcctcggcactatagtgagtttatagagttcctcagcaaagcccgagagaccttcttaatggcgcatgatggacacattcagtttacacagtttattgacaacctgaaacaaatctacaaaggcaaaaagaaactgatgatgttggttcgggagaggtttggttgatagatcttgtatgaatggggtggggggtggggatgggagggatggtttgtttttacttgagcctgcctttgtaccctttttaacttaaagaacagagccacaccggtattatatgtgtatagttatattgcgtttgcagactaaattgtcatgttgtgaaagtttgtgtgttttttattttttccctatttctttctttcctttattttattattttttttaattttttttttctggttttgtatgagagagaggttaaaaaggtttggtttacactgagtatatgttgtcaagtggcaaaagtccacatagctctcctgttttctgtatacgttcacagcctcaaaaaaaataattgaaatggctttaaaaaccaaacaaaacacctccatcctgtgataagtacctcgaatggattcagctttactcctttgtaactcatctttacattttcagcatatttaaacaaaccaacaaaatgaaatactaatagtaaaaaggctgacccatgtggctttgcagtgctgttcgtccagaagcatggcacacgatgcttgtgcatgtggaaacttagcgactgtcaacatacattctcagggatttatccaaaaaaattaaaaaaagaatgagagcatttattgtactgtatatatattatagtatatgtctgaatattgaaaatataacattaactaatttataaaaaatattctatgtaatgcaaaatacttgaagctgcagtagcttggttttaaacaaaaacaaaaaaaaaactgagagaaaacctatcagaaggactaaaagtacgccttgcttcagggttggctcaggtggtgaacttcatgctgggcatctatgcagagccaccttttggattgcatggttggactgagatctattgggagaaattatatatgtatatatatttatacaacttatgtatacatatatatatgtatacacacagacacacacacacaccaccaacaaccaccactacaccacacatgcttataacaggcactagaataaagagggacaacaaaatacacagccagagcagcaagccttagcattaagaatatacaatatgccggaattggggttcgtgcctcctagcctaggaaacttaaaagaaatatccttttgacacaaaacacaaaatgttttccaaaacaattgacataatgatacattacgcctttgcagtgagctaataataagctaacctttgtgcacaaataacattatatatattatatatctattctgcataggtattttgactttgtgcaggacagaaagttgtgtaggtatgactgttctacttttcagttttctttttttttaatatattttattttctctagaaattactcaaacaaaagcagccttctatcttgccttgtcttaatgctttaaaataaccaaactggagatctaactaccaaactgttcattatattattaaataccaactttggttacagtatagtgtctttactttagctgatggttctgtaaccttgtgctttttaaagcaatttttatgttttggtgcaaaagttgtccagtgtctcttgttcccttcactagagaacatgcttagaggtatgtttgtaggtatttttgtttagaagaactatttcatgcgctccattttatttattataataggtaaaaagaaaaaaaaaggttgtaattcatcacccatgtaaacatgctcatgaagttgaaagtaattaagatttgatacactgatatcaatttatttatgtaactaaatcactgttttataaacttgttaatgatcaacaatttttgttttgattaaaattagttttttgaaagtt

SEQ ID NO: 204712 - DNA, 2008 bp, Homo sapiens
  Payload ID: 20383
  Gene Name: zinc finger, SWIM-type containing 7
  Uniprot ID: Q19AV6
  ENST ID: ENST00000399277
  CDS Start-End: 99-521
cctgccccggcggggggtcaggatcctccacaggtaggcgcagtcagctggagcgtcgcggcggtccgccggtcgtggagggcgtgtcctgcggcgcgatggccgtagtgttgccggcggttgtggaggagctcctgagcgagatggcggcggcggtgcaggagagcgcgcgaattcctgatgaatatctgttatcgctgaagtttctctttggctcatcagccacccaggccttggacctagttgatcgacagtccatcaccttaatctcatcacccagtggaaggcgtgtttaccaggtccttggaagttccagtaaaacatacacatgtttggcttcttgtcattactgttcatgtcctgcatttgcattctcagtgctacggaagagtgacagcatcctgtgcaagcatctcttggcagtttacctgagtcaggttatgaggacctgtcagcagctaagtgtctctgacaagcagttgactgacatattattgatggagaagaaacaagaagcataaaaggtacagattgagcatcattctttcaaaatagaatcctgtcaagaaatgcattgaaagcgtcatgattcacatggaaaagaggtgaaatggatcttcagacacttcatgttactgtcccttttccctccaggactgcaggaggtgctgtgggttggagccgtgggctgtggagggtttgtgtatgatgagaagccctgtacagtcttgtcaagaaataccctgagccagtctctgagacgcttcggtaaaaaatgtccctggatggaatcaagattttaaattcaaataaagcctaatatcatgttgtgtccacattatttagtctttttttttttcttttgagatggagtctcactttgtcgcccaggctggggtgcagtggcgtgatctcagctcactgcaagctccgcctcccgggttcacgccattctcctgcctcagcctcccgagtagctgggactacaggtacccgccaccatgcccggctaaatttttgtattttttttttagtagagatggggtttcaccgtgttagccaggatggtctccatctcctgacctagtggtctgcccgcctcgacctcccaaagtgctggaattacatgcatgagccactgcgcctgaccctatttagtcttaagtaactaactgaattactagtaatttttaaaaggttggaatggtgggccaaacagtaagatgaagtttcgacgagtaggtcagttcttttccttgggtccaggaaactattgagcagcaacagaagatcagagcagagatgtggctaaacagtagcaggtatgaaaagacttagaggttctggtttctgtaagcttcaaatatctgtgatgcttgtgccaaaacagcttaagtagactgtattgtttgagagttagtatcgagaacaagggaagaactggtttcactctgcacttctgatctttacaacagggcaattgaaggaacagactaaaaatcgtgtcctggaaggaaactacaggtactaccagggattttcagtctgaagaagaaaagacaaaatagatgacagaaggagtattagaagggagagcgatgagactcagttggacaccgagagagcaaagaagcaataatacgtgaagatgaaaatgaaatcaatttcagcataagaagacaagaacttatggtaaagctgcccacagccagaagaggatcctagaaggacaggaattccctgtctgcagcatttcataagcatgtaatattgttgcagggatactgcagaaggagttgaagcagtggacagacagatgatataggtgattttacagcctaagaaagccctgtgcttgtgcccccaaaacatgaggtgctagtgaatgaatgctgggggaaagcccagggcctaggtgttgcaatgttctgtggttggcagatgctttttgttttgttaaaaagtgcaacagataaaatttatcaatacttttctgctactcaggaaa

SEQ ID NO: 204713 - DNA, 703 bp, Homo sapiens
  Payload ID: 20383
  Gene Name: zinc finger, SWIM-type containing 7
  Uniprot ID: Q19AV6
  ENST ID: ENST00000472495
  CDS Start-End: 91-513
ggcggggggtcaggatcctccacaggtaggcgcagtcagctggagcgtcgcggcggtccgccggtcgtggagggcgtgtcctgcggcgcgatggccgtagtgttgccggcggttgtggaggagctcctgagcgagatggcggcggcggtgcaggagagcgcgcgaattcctgatgaatatctgttatcgctgaagtttctctttggctcatcagccacccaggccttggacctagttgatcgacagtccatcaccttaatctcatcacccagtggaaggcgtgtttaccaggtccttggaagttccagtaaaacatacacatgtttggcttcttgtcattactgttcatgtcctgcatttgcattctcagtgctacggaagagtgacagcatcctgtgcaagcatctcttggcagtttacctgagtcaggttatgaggacctgtcagcagctaagtgtctctgacaagcagttgactgacatattattgatggagaagaaacaagaagcataaaaggactgcaggaggtgctgtgggttggagccgtgggctgtggagggtttgtgtatgatgagaagccctgtacagtcttgtcaagaaataccctgagccagtctctgagacgcttcggtaaaaaatgtccctggatggaatcaagattttaaattcaaataaagcctaatatcatgttgtgtccacatta

SEQ ID NO: 204714 - DNA, 969 bp, Homo sapiens
  Payload ID: 20383
  Gene Name: zinc finger, SWIM-type containing 7
  ENST ID: ENST00000476496
  CDS Start-End: 1-93
gtagtgttgccggcggttgtggaggagctcctgagcgagatggcggcggcggtgcaggagagcgcgcgaagtacgggaccgaggtcttcctgatgaatatctgttatcgctgaagtttctctttggctcatcagccacccaggccttggacctagttgatcgacagtccatcaccttaatctcatcacccagtggaaggcgtgtttaccaggtccttggaagttccagtaaaacatacacatgtttggcttcttgtcattactgttcatgtcctgcatttgcattctcagtgctacggaagagtgacagcatcctgtgcaagcatctcttggcagtttacctgagtcaggttatgaggacctgtcagcagctaagtgtctctgacaagcagttgactgacatattattgatggagaagaaacaagaagcataaaagggcaattgaaggaacagactaaaaatcgtgtcctggaaggaaactacaggtactaccagggattttcagtctgaagaagaaaagacaaaatagatgacagaaggagtattagaagggagagcgatgagactcagttggacaccgagagagcaaagaagcaataatacgtgaagatgaaaatgaaatcaatttcagcataagaagacaagaacttatggtaaagctgcccacagccagaagaggatcctagaaggacaggaattccctgtctgcagcatttcataagcatgtaatattgttgcagggatactgcagaaggagttgaagcagtggacagacagatgatataggtgattttacagcctaagaaagccctgtgcttgtgcccccaaaacatgaggtgctagtgaatgaatgctgggggaaagcccagggcctaggtgttgcaatgttctgtggttggcagatgctttttgttttgttaaaaagtgcaacagataaaatttatcaatacttttctgctactcaggaaa

SEQ ID NO: 204715 - DNA, 723 bp, Homo sapiens
  Payload ID: 20383
  Gene Name: zinc finger, SWIM-type containing 7
  ENST ID: ENST00000460315
  CDS Start-End: 95-193
ccccggcggggggtcaggatcctccacaggtaggcgcagtcagctggagcgtcgcggcggtccgccggtcgtggagggcgtgtcctgcggcgcgatggccgtagtgttgccggcggttgtggaggagctcctgagcgagatggcggcggcggtgcaggagagcgcgcgaagtacgggaccgaggtcttcctgatgaatatctgttatcgctgaagtttctctttggctcatcagccacccaggccttggacctagttgatcgacagtccatcaccttaatctcatcacccagtggaaggcgtgtttaccaggtccttggaagttccagtaaaacatacacatgtttggcttcttgtcattactgttcatgtcctgcatttgcattctcagtgctacggaagagtgacagcatcctgtgcaagcatctcttggcagtttacctgagtcaggttatgaggacctgtcagcagctaagtgtctctgacaagcagttgactgacatattattgatggagaagaaacaagaagcataaaaggactgcaggaggtgctgtgggttggagccgtgggctgtggagggtttgtgtatgatgagaagccctgtacagtcttgtcaagaaataccctgagccagtctctgagacgcttcggtaaaaaatgtccctggatggaatcaagattttaaattcaaataaagcctaatatcatgttgtgtccacatta

SEQ ID NO: 204716 - DNA, 879 bp, Homo sapiens
  Payload ID: 20383
  Gene Name: zinc finger, SWIM-type containing 7
  ENST ID: ENST00000491631
  CDS Start-End: 124-219
gcgccccgacgtcactccgtctcgccctgccccggcggggggtcaggatcctccacaggtaggcgcagtcagctggagcgtcgcggcggtccgccggtcgtggagggcgtgtcctgcggcgcgatggccgtagtgttgccggcggttgtggaggagctcctgagcgagatggcggcggcggtgcaggagagcgcgcgaagtacgggaccgagttcctgatgaatatctgttatcgctgaagtttctctttggctcatcagccacccaggccttggacctagttgatcgacagtccatcaccttaatctcatcacccagtggaaggcgtgtttaccaggtccttggaagttccagtaaaacatacacatgtttggcttcttgtcattactgttcatgtcctgcatttgcattctcagtgctacggaagagtgacagcatcctgtgcaagcatctcttggcagtttacctgagtcaggttatgaggacctgtcagcagctaagtgtctctgacaagcagttgactgacatattattgatggagaagaaacaagaagcataaaaggtacagattgagcatcattctttcaaaatagaatcctgtcaagaaatgcattgaaagcgtcatgattcacatggaaaagaggtgaaatggatcttcagacacttcatgttactgtcccttttccctccaggactgcaggaggtgctgtgggttggagccgtgggctgtggagggtttgtgtatgatgagaagccctgtacagtcttgtcaagaaataccctgagccagtctctgagacgcttcggtaaaaaatgtccctggatggaatcaagattttaaattcaaataaagcctaatatcatgttgtgtccacatta

SEQ ID NO: 204717 - DNA, 918 bp, Homo sapiens
  Payload ID: 20383
  Gene Name: zinc finger, SWIM-type containing 7
  ENST ID: ENST00000486706
  CDS Start-End: 76-171
tcctccacaggtaggcgcagtcagctggagcgtcgcggcggtccgccggtcgtggagggcgtgtcctgcggcgcgatggccgtagtgttgccggcggttgtggaggagctcctgagcgagatggcggcggcggtgcaggagagcgcgcgaagtacgggaccgagttcctgatgaatatctgttatcgctgaagtttctctttggctcatcagccacccaggccttggacctagttgatcgacagtccatcaccttaatctcatcacccagtggaaggcgtgtttaccagagacagggtctcactatgttgcccaggctggtctcaaactcctaggttcaagcgatcctcccaccttggcctctcacaatattgggattacaggtccttggaagttccagtaaaacatacacatgtttggcttcttgtcattactgttcatgtcctgcatttgcattctcagtgctacggaagagtgacagcatcctgtgcaagcatctcttggcagtttacctgagtcaggttatgaggacctgtcagcagctaagtgtctctgacaagcagttgactgacatattattgatggagaagaaacaagaagcataaaaggtacagattgagcatcattctttcaaaatagaatcctgtcaagaaatgcattgaaagcgtcatgattcacatggaaaagaggtgaaatggatcttcagacacttcatgttactgtcccttttccctccaggactgcaggaggtgctgtgggttggagccgtgggctgtggagggtttgtgtatgatgagaagccctgtacagtcttgtcaagaaataccctgagccagtctctgagacgcttcggtaaaaaatgtccctggatggaatcaagattttaaattcaaataaagcctaatatcatgttgtgtcc

SEQ ID NO: 204718 - DNA, 566 bp, Homo sapiens
  Payload ID: 20383
  Gene Name: zinc finger, SWIM-type containing 7
  ENST ID: ENST00000579955
  CDS Start-End: 91-327
ggcggggggtcaggatcctccacaggtaggcgcagtcagctggagcgtcgcggcggtccgccggtcgtggagggcgtgtcctgcggcgcgatggccgtagtgttgccggcggttgtggaggagctcctgagcgagatggcggcggcggtgcaggagagcgcgcgaagtacgggaccgaggctgaagtttctctttggctcatcagccacccaggccttggacctagttgatcgacagtccatcaccttaatctcatcacccagtggaaggcgtgtttaccagagacagggtctcactatgttgcccaggctggtctcaaactcctaggttcaagcgatcctcccaccttggcctctcacaatattgggattacaggtccttggaagttccagtaaaacatacacatgtttggcttcttgtcattactgttcatgtcctgcatttgcattctcagtgctacggaagagtgacagcatcctgtgcaagcatctcttggcagtttacctgagtcaggttatgaggacctgtcagcagctaagtgtctctgacaagcagttgactgacat

SEQ ID NO: 204719 - DNA, 677 bp, Homo sapiens
  Payload ID: 20383
  Gene Name: zinc finger, SWIM-type containing 7
  ENST ID: ENST00000584519
  CDS Start-End: 43-123
cgcggcggtccgccggtcgtggagggcgtgtcctgcggcgcgatggccgtagtgttgccggcggttgtggaggagctcctgagcgagatggcggcggcggtgcaggagagcgcgcgaagctgaagtttctctttggctcatcagccacccaggccttggacctagttgatcgacagtccatcaccttaatctcatcacccagtggaaggcgtgtttaccaggtccttggaagttccagtaaaacatacacatgtttggcttcttgtcattactgttcatgtcctgcatttgcattctcagtgctacggaagagtgacagcatcctgtgcaagcatctcttggcagtttacctgagtcaggttatgaggacctgtcagcagctaagtgtctctgacaagcagttgactgacatattattgatggagaagaaacaagaagcataaaaggactgcaggaggtgctgtgggttggagccgtgggctgtggagggtttgtgtatgatgagaagccctgtacagtcttgtcaagaaataccctgagccagtctctgagacgcttcggtaaaaaatgtccctggatggaatcaagattttaaattcaaataaagcctaatatcatgttgtgtccacattatttagtctttttttttttcttttgagatggagtctcactttgtc

SEQ ID NO: 204720 - DNA, 987 bp, Homo sapiens
  Payload ID: 20383
  Gene Name: zinc finger, SWIM-type containing 7
  ENST ID: ENST00000585208
  CDS Start-End: 41-136
cggcggtccgccggtcgtggagggcgtgtcctgcggcgcgatggccgtagtgttgccggcggttgtggaggagctcctgagcgagatggcggcggcggtgcaggagagcgcgcgaagtacgggaccgagttcctgatgaatatctgttatcacagtgtctcactctgtcactgaggctggagtacagtggcgcgatctcaactcactgcagcctctgcctcccaggttccagtgattctcctgcctcagcctcctgagtagctgggactacaggtggcacacaccgaggcaggtggatgatgaggtcaggagttccgcctgccttggcctcccaaggtgctgggattacaggcatgagccaccacacctggccttaaaaaaattcttaaaggctgaagtttctctttggctcatcagccacccaggccttggacctagttgatcgacagtccatcaccttaatctcatcacccagtggaaggcgtgtttaccagggtctcactatgttgcccaggctggtctcaaactcctaggttcaagcgatcctcccaccttggcctctcacaatattgggattacaggtccttggaagttccagtaaaacatacacatgtttggcttcttgtcattactgttcatgtcctgcatttgcattctcagtgctacggaagagtgacagcatcctgtgcaagcatctcttggcagtttacctgagtcaggttatgaggacctgtcagcagctaagtgtctctgacaagcagttgactgacatattattgatggagaagaaacaagaagcataaaaggactgcaggaggtgctgtgggttggagccgtgggctgtggagggtttgtgtatgatgagaagccctgtacagtcttgtcaagaaataccctgagccagtctctgagacgcttcggtaaaaaatgtccctggatggaatcaagattttaaattcaaataaagcctaatatcatgttgtgtcc

SEQ ID NO: 204721 - DNA, 726 bp, Homo sapiens
  Payload ID: 20383
  Gene Name: zinc finger, SWIM-type containing 7
  ENST ID: ENST00000486655
  CDS Start-End: 41-241
cgtagtgttgccggcggttgtggaggagctcctgagcgagatggcggcggcggtgcaggagagcgcgcgaattcctgatgaatatctgttatcgctgaagtttctctttggctcatcagccacccaggccttggacctagttgatcgacagtccatcaccttaatctcatcacccagtggaaggcgtgtttaccagagacagggtctcactatgttgcccaggctggtctcaaactcctaggttcaagcgatcctcccaccttggcctctcacaatattgggattacagtgcaagcatctcttggcagtttacctgagtcaggttatgaggacctgtcagcagctaagtgtctctgacaagcagttgactgacatattattgatggagaagaaacaagaagcataaaaggtacagattgagcatcattctttcaaaatagaatcctgtcaagaaatgcattgaaagcgtcatgattcacatggaaaagaggtgaaatggatcttcagacacttcatgttactgtcccttttccctccaggactgcaggaggtgctgtgggttggagccgtgggctgtggagggtttgtgtatgatgagaagccctgtacagtcttgtcaagaaataccctgagccagtctctgagacgcttcggtaaaaaatgtccctggatggaatcaagattttaaattcaaataaagcctaatatcatgttgtgtccacatta

SEQ ID NO: 204722 - DNA, 682 bp, Homo sapiens
  Payload ID: 20383
  Gene Name: zinc finger, SWIM-type containing 7
  ENST ID: ENST00000460252
  CDS Start-End: 88-186
ggggggtcaggatcctccacaggtaggcgcagtcagctggagcgtcgcggcggtccgccggtcgtggagggcgtgtcctgcggcgcgatggccgtagtgttgccggcggttgtggaggagctcctgagcgagatggcggcggcggtgcaggagagcgcgcgaagtacgggaccgaggtcttcctgatgaatatctgttatcgctgaagtttctctttggctcatcagccacccaggccttggacctagttgatcgacagtccatcaccttaatctcatcacccagtggaaggcgtgtttaccaggtccttggaagttccagtaaaacatacacatgtttggcttcttgtcattactgttcatgtcctgcatttgcattctcagtgctacggaagagtgacagcatcctgtgcaagcatctcttggcagtttacctgagtcaggttatgaggacctgtcagcagctaagtgtctctgacaagcagttgactgacatattattgatggagaagaaacaagaagcataaaaggtacagattgagcatcattctttcaaaatagaatcctgtcaagaaatgcattgaaagcgtcatgattcacatggaaaagaggtgaaatggatcttcagacacttcatgttactgtcccttttccctccaggactgcaggaggtgctgtgggtt

SEQ ID NO: 204723 - DNA, 671 bp, Homo sapiens
  Payload ID: 20383
  Gene Name: zinc finger, SWIM-type containing 7
  ENST ID: ENST00000474716
  CDS Start-End: 46-141
cgtcgcggcggtccgccggtcgtggagggcgtgtcctgcggcgcgatggccgtagtgttgccggcggttgtggaggagctcctgagcgagatggcggcggcggtgcaggagagcgcgcgaagtacgggaccgagttcctgatgaatatctgttatcgctgaagtttctctttggctcatcagccacccaggccttggacctagttgatcgacagtccatcaccttaatctcatcacccagtggaaggcgtgtttaccaggtccttggaagttccagtaaaacatacacatgtttggcttcttgtcattactgttcatgtcctgcatttgcattctcagtgctacggaagagtgacagcatcctgtgcaagcatctcttggcagtttacctgagtcaggttatgaggacctgtcagcagctaagtgtctctgacaagcagttgactgacatattattgatggagaagaaacaagaagcataaaaggactgcaggaggtgctgtgggttggagccgtgggctgtggagggtttgtgtatgatgagaagccctgtacagtcttgtcaagaaataccctgagccagtctctgagacgcttcggtaaaaaatgtccctggatggaatcaagattttaaattcaaataaagcctaatatcatgttgtgtccacatta

SEQ ID NO: 204724 - DNA, 1264 bp, Homo sapiens
  Payload ID: 20383
  Gene Name: zinc finger, SWIM-type containing 7
  ENST ID: ENST00000490395
  CDS Start-End: 57-152
gtcagctggagcgtcgcggcggtccgccggtcgtggagggcgtgtcctgcggcgcgatggccgtagtgttgccggcggttgtggaggagctcctgagcgagatggcggcggcggtgcaggagagcgcgcgaagtacgggaccgagttcctgatgaatatctgttatcgctgaagtttctctttggctcatcagccacccaggccttggacctagttgatcgacagtccatcaccttaatctcatcacccagtggaaggcgtgtttaccaggtccttggaagttccagtaaaacatacacatgtttggcttcttgtcattactgttcatgtcctgcatttgcattctcagtgctacggaagagtgacagcatcctgtgcaagcatctcttggcagtttacctgagtcaggttatgaggacctgtcagcagctaagtgtctctgacaagcagttgactgacatattattgatggagaagaaacaagaagcataaaaggactgcaggaggtgctgtgggttggagccgtgggctgtggagggtttgtgtatgatgagaagccctgtacagtcttgtcaagaaataccctgagccagtctctgagacgcttcgatggagtctcactttgtcgcccaggctggggtgcagtggcgtgatctcagctcactgcaagctccgcctcccgggttcacgccattctcctgcctcagcctcccgagtagctgggactacagggcaattgaaggaacagactaaaaatcgtgtcctggaaggaaactacaggtactaccagggattttcagtctgaagaagaaaagacaaaatagatgacagaaggagtattagaagggagagcgatgagactcagttggacaccgagagagcaaagaagcaataatacgtgaagatgaaaatgaaatcaatttcagcataagaagacaagaacttatggtaaagctgcccacagccagaagaggatcctagaaggacaggaattccctgtctgcagcatttcataagcatgtaatattgttgcagggatactgcagaaggagttgaagcagtggacagacagatgatataggtgattttacagcctaagaaagccctgtgcttgtgcccccaaaacatgaggtgctagtgaatgaatgctgggggaaagcccagggcctaggtgttgcaatgttctgtggttggcagatgctttttgttttgttaaaaagtgcaacagataaaatttatcaatacttttctgctactcaggaaa

SEQ ID NO: 204725 - DNA, 6062 bp, Homo sapiens
  Payload ID: 20384
  Gene Name: zinc finger, SWIM-type containing 8
  Uniprot ID: A7E2V4
  ENST ID: ENST00000398706
  CDS Start-End: 256-5784
gccgccgagcgcttcgtcccggccctaagtctcggagactggccaagatcaccgcttgcaccgcgctgttgggcgaggcccggtcccgtctctttcccaggcctgagattctcgcccggcacggccgccctgagcgccccggccacccccagccccggctcgcccctcaggccccgggcctcccctcaacccccggccggcggcccaggccccggatccgcggggggggacccggccccggggggtgcgggccccatggagctgatgtttgcagagtgggaggacggagagcgcttctcattcgaggattcggaccgttttgaggaggattcactctgttccttcatctccgaggccgagagcctctgccagaactggcggggatggcgcaaacagtcagcggggcccaattcccccactggcggcggtggcggaggtggcagtggcggtaccagaatgcgagatggactggtgatcccattggtggagctgtcagcaaagcaggtggcatttcatatcccatttgaagtggtggagaaagtttacccaccagtgcctgagcagctacagctccgaattgctttttggagcttccctgagaatgaagaggacattcggctgtattcgtgcctggccaatggcagtgcggatgagtttcagcgaggggatcagctcttccgcatgcgggctgtgaaggacccattgcagatagggttccacctgagtgctacagtggtgccacctcagatggtccctcctaaaggggcctacaacgtggctgtgatgtttgaccgctgccgggtcacttcctgcagctgtacctgtggggctggggccaaatggtgcacccacgtcgtggcactctgtctcttccgcatccacaacgcttctgcagtctgcctgcgagccccagtctcagagtccctgtcccggctacagagggaccagctgcaaaagtttgctcagtacctcatcagtgagctccctcagcagatcctccccacagctcagcgtctcctggacgaactcctgtcttcccagtcaacagccatcaatacagtgtgtggagctccggaccccacagcagggccctcagcatcggaccagagtacttggtatctggatgaatcgacactcactgacaacatcaaaaagacactgcacaagttctgtggcccctcccctgtggtcttcagtgatgtgaactccatgtatctgtcttccacggagccgccagccgctgctgaatgggcatgtctgctgcgccctctgaggggccgtgagccagagggcgtctggaacctgctaagcattgtgcgggagatgttcaagcggagggacagcaatgctgcccccttgttggaaatcctcactgaccagtgcctcacctatgaacagataacaggttggtggtatagcgtacgtacctcagcctcacacagcagtgccagtgggcacacgggccgtagcaacgggcagtcagaggtggcagcccatgcctgtgccagcatgtgtgacgagatggtcacactgtggaggctggccgtgctggaccctgcactcagcccccagcggcgccgggaactgtgtacgcagctgcggcagtggcaactgaaggtgattgagaacgtcaagcggggccaacacaagaagacgctggagcggctcttccccggcttccggccagcggtggaggcctgctacttcaactgggaagaggcctacccacttcctggtgtcacctacagcggcactgacaggaagctggcactgtgctgggcccgggccctgccctctcggccaggtgcctcccgctctgggggcctggaggaatcccgggaccggccccgaccccttcctactgagccagctgtgcggcccaaggagcctgggaccaagcgaaagggcttgggtgagggggtcccctcatcacagcggggtccccgccgcctctcagctgaagggggagataaagctctacataagatgggtccaggtgggggcaaagccaaggcactgggtggggctggcagtgggagcaagggctcagcaggtggcggaagcaagcgacggctgagcagcgaagacagctccctggagccagacctggccgagatgagcctggatgacagcagcctggccctgggcgcagaggccagcaccttcgggggattccctgagagccctccaccctgtcctctccacggtggctcccgaggcccttccactttccttcctgagcccccagatacttatgaagaagatggtggtgtgtacttctcggaagggcctgagcctcccacagcctctgttggcccccctggcctactgcctggggatgtctgtacccaggacgacctcccttctacagatgagagtggcaatgggcttcccaaaaccaaagaggcagcccctgcagttggagaggaggatgatgactaccaggcgtactatctgaatgcccaggatggggctgggggcgaggaagagaaggccgagggcggggctggggaggagcacgacctgtttgctgggctgaagccactggaacaggagagtcgcatggaggtactgtttgcctgtgctgaggccctgcatgcgcatggctatagcagtgaggcctcccgtctcactgtggagcttgcccaggatctgctagccaacccacccgacctcaaggtagagccgccccctgccaagggcaagaagaacaaggtatccacgagccgtcagacctgggtggctaccaacaccctgagcaaggcggccttcctgttgacagtgctaagtgagcgtccagagcaccacaacctggccttccgagttggcatgtttgccttggagctacagaggcctccagcttctaccaaggccttggaggtgaagctggcataccaggagtctgaggtggctgccctgctcaagaagatccctctgggtccaagtgagatgagtaccatgcggtgccgggcagaggaacttcgggaggggacactctgtgactatcggcctgtgttgcctctcatgctggccagtttcatctttgacgttctctgtgctccagtggtttctcccacaggttcccggcccccaagtcgcaactggaacagcgagacacctggggatgaggagcttggatttgaagcagcagttgctgccttgggcatgaagacaacagtgagcgaggcagaacatcccctcttatgtgaaggcacacgtcgggagaagggtgacctggcattagcactaatgatcacttacaaggacgaccaggccaagcttaagaagatcttagacaaactcttggaccgagagagccagacacataagccacagacgctgagttctttctactcatctagccgcccaaccacagccagccagaggtctccttcaaagcacgggggcccatctgccccaggggccctgcaaccactgacctcaggctctgcagggcctgctcaaccagggagtgtggcaggggctgggccaggccccactgagggcttcacagagaagaatgtgcctgagagttccccacattccccctgtgagggtcttccatctgaggcagctttgaccccaaggccagaagggaaggttcctagccgcttggcacttggcagtcgtggaggctataatggacggggatgggggtccccaggacggcctaagaagaagcacacaggcatggccagcattgacagcagtgcccctgaaacaacatcggatagttcccccaccttaagccggagaccacttcgagggggctgggcccccacctcctggggtcgaggtcaggacagtgacagcattagcagctcttcttcggactccctgggctcctcatcctccagtggaagtcgccgggccagtgccagtggaggagcccgggcgaagactgttgaagttggcaggtacaagggccgccgccccgagagtcatgcccctcatgtacccaatcagccatcagaggcagctgcacacttctacttcgagctggcgaagacagtgctgatcaaggcagggggcaacagcagcacttccattttcacacatccatcttcctcagggggccaccagggtcctcaccgcaacctgcacctttgcgccttcgagattgggctttatgcccttggcctgcacaactttgtttctcccaactggctctcacgtacttattcttcccacgtttcctggattacaggccaggccatggagataggcagcgcagccctgactatactggtagaatgctgggatgggcacctgacaccccctgaggttgcatccctggctgacagggcatcacgggcaagagactccaatatggtgagggcggcagcagagctggccctgagctgcctgcctcacgcccatgcattgaaccctaatgagatccagcgggccctggtgcagtgcaaggaacaggacaacctgatgttggagaaggcctgcatggcagtggaagaggcagctaagggtgggggcgtgtaccctgaagtgttgtttgaggttgctcaccagtggttctggctgtatgagcaaactgcaggtggctcatccacagcccgtgaaggggctacaagctgtagtgccagtgggatcagggcaggtggggaagctgggcggggtatgcctgagggtagagggggcccagggactgagccggttacagtggcagcggcagcagtgacagcagcagccacagtggtgcccgtcatatcggtggggtctagtttatacccgggtccaggactggggcatggccactcccctggcctgcacccctacactgctctacagccccacctgccctgtagccctcagtatctcactcacccagctcaccctgcccaccccatgcctcacatgccccggcctgccgtcttccctgtgcccagctctgcatacccacagggtgtgcatcctgcattcctaggggctcagtacccttattcagtgactcctccctcacttgctgccactgctgtgtctttccccgttccttccatggcacccatcacagtacatccctaccacacagagccagggcttccactgcccaccagtgtggcctgtgagttgtggggccagggaacagtgagcagtgtccatccagcatccacgtttccagccatccaaggtgcctcactgcctgccctgaccacacagcccagccctctggtgagcggaggttttccaccgcccgaggaggagacacacagtcagccagtcaatccccacagcctgcaccacctgcatgctgcctaccgtgtcggaatgctggcactggagatgctgggtcgccgggcacacaacgatcaccccaacaacttctcccgctcccccccctacactgatgatgtcaaatggttgctggggctggcagcaaagctgggagtgaactacgtgcaccagttctgtgtgggggcagccaagggggtgctgagcccgtttgtgctgcaggagatcgtcatggagacgctgcagcggctgagtcccgctcatgcccacaaccacctgcgtgccccggccttccaccaactggtgcagcgctgccagcaggcatacatgcagtacatccaccaccgcttgattcacctgactcctgcggactacgacgactttgtgaatgcgatccggagtgcccgcagcgccttctgcctgacgcccatgggcatgatgcagttcaacgacatcctacagaacctcaagcgcagcaaacagaccaaggagctgtggcagcgggtctcactcgagatggccaccttctccccctgagtctttcacccttagggtcctatacagggacccaggcctgtggctatgggggcccctcacacagggggagtgaaacttggctggacagatcatcctcactcagttccctggtagcacagactgacagctgctcttgggctatagcttggggccaagatgtctcacaccctagaagcctagggctgggggagacagccctgtctgggagggggcgttgggtggcctctggtatttatttggcatttataaatatataaactccttttttactctagtcg

SEQ ID NO: 204726 - DNA, 5773 bp, Homo sapiens
  Payload ID: 20384
  Gene Name: zinc finger, SWIM-type containing 8
  ENST ID: ENST00000433366
  CDS Start-End: 197-4207
accgcgctgttgggcgaggcccggtcccgtctctttcccaggcctgagattctcgcccggcacggccgccctgagcgccccggccacccccagccccggctcgcccctcaggccccgggcctcccctcaacccccggccggcggcccaggccccggatccgcggggggggacccggccccggggggtgcgggccccatggagctgatgtttgcagagtgggaggacggagagcgcttctcattcgaggattcggaccgttttgaggaggattcactctgttccttcatctccgaggccgagagcctctgccagaactggcggggatggcgcaaacagtcagcggggcccaattcccccactggcggcggtggcggaggtggcagtggcggtaccagaatgcgagatggactggtgatcccattggtggagctgtcagcaaagcaggtggcatttcatatcccatttgaagtggtggagaaagtttacccaccagtgcctgagcagctacagctccgaattgctttttggagcttccctgagaatgaagaggacattcggctgtattcgtgcctggccaatggcagtgcggatgagtttcagcgaggggatcagctcttccgcatgcgggctgtgaaggacccattgcagatagggttccacctgagtgctacagtggtgccacctcagatggtccctcctaaaggggcctacaacgtggctgtgatgtttgaccgctgccgggtcacttcctgcagctgtacctgtggggctggggccaaatggtgcacccacgtcgtggcactctgtctcttccgcatccacaacgcttctgcagtctgcctgcgagccccagtctcagagtccctgtcccggctacagagggaccagctgcaaaagtttgctcagtacctcatcagtgagctccctcagcagatcctccccacagctcagcgtctcctggacgaactcctgtcttcccagtcaacagccatcaatacagtgtgtggagctccggaccccacagcagggccctcagcatcggaccagagtacttggtatctggatgaatcgacactcactgacaacatcaaaaagacactgcacaagttctgtggcccctcccctgtggtcttcagtgatgtgaactccatgtatctgtcttccacggagccgccagccgctgctgaatgggcatgtctgctgcgccctctgaggggccgtgagccagagggcgtctggaacctgctaagcattgtgcgggagatgttcaagcggagggacagcaatgctgcccccttgttggaaatcctcactgaccagtgcctcacctatgaacagataacaggttggtggtatagcgtacgtacctcagcctcacacagcagtgccagtgggcacacgggccgtagcaacgggcagtcagaggtggcagcccatgcctgtgccagcatgtgtgacgagatggtcacactgtggaggctggccgtgctggaccctgcactcagcccccagcggcgccgggaactgtgtacgcagctgcggcagtggcaactgaaggtgattgagaacgtcaagcggggccaacacaagaagacgctggagcggctcttccccggcttccggccagcggtggaggcctgctacttcaactgggaagaggcctacccacttcctggtgtcacctacagcggcactgacaggaagctggcactgtgctgggcccgggccctgccctctcggccaggtgcctcccgctctgggggcctggaggaatcccgggaccggccccgaccccttcctactgagccagctgtgcggcccaaggagcctgggaccaagcgaaagggcttgggtgagggggtcccctcatcacagcggggtccccgccgcctctcagctgaagggggagataaagctctacataagatgggtccaggtgggggcaaagccaaggcactgggtggggctggcagtgggagcaagggctcagcaggtggcggaagcaagcgacggctgagcagcgaagacagctccctggagccagacctggccgagatgagcctggatgacagcagcctggccctgggcgcagaggccagcaccttcgggggattccctgagagccctccaccctgtcctctccacggtggctcccgaggcccttccactttccttcctgagcccccagatacttatgaagaagatggtggtgtgtacttctcggaagggcctgagcctcccacagcctctgttggcccccctggcctactgcctggggatgtctgtacccaggacgacctcccttctacagatgagagtggcaatgggcttcccaaaaccaaagaggcagcccctgcagttggagaggaggatgatgactaccaggcgtactatctgaatgcccaggatggggctgggggcgaggaagagaaggccgagggcggggctggggaggagcacgacctgtttgctgggctgaagccactggaacaggagagtcgcatggaggtactgtttgcctgtgctgaggccctgcatgcgcatggctatagcagtgaggcctcccgtctcactgtggagcttgcccaggatctgctagccaacccacccgacctcaagggcaagaagaacaaggtatccacgagccgtcagacctgggtggctaccaacaccctgagcaaggcggccttcctgttgacagtgctaagtgagcgtccagagcaccacaacctggccttccgagttggcatgtttgccttggagctacagaggcctccagcttctaccaaggccttggaggtgaagctggcataccaggagtctgaggtggctgccctgctcaagaagatccctctgggtccaagtgagatgagtaccatgcggtgccgggcagaggaacttcgggaggggacactctgtgactatcggcctgtgttgcctctcatgctggccagtttcatctttgacgttctctgtgctccagtggtttctcccacaggttcccggcccccaagtcgcaactggaacagcgagacacctggggatgaggagcttggatttgaagcagcagttgctgccttgggcatgaagacaacagtgagcgaggcagaacatcccctcttatgtgaaggcacacgtcgggagaagggtgacctggcattagcactaatgatcacttacaaggacgaccaggccaagcttaagaagatcttagacaaactcttggaccgagagagccagacacataagccacagacgctgagttctttctactcatctagccgcccaaccacagccagccagaggtctccttcaaagcacgggggcccatctgccccaggggccctgcaaccactgacctcaggctctgcagggcctgctcaaccagggagtgtggcaggggctgggccaggccccactgagggcttcacagagaagaatgtgcctgagagttccccacattccccctgtgagggtcttccatctgaggcagctttgaccccaaggccagaagggaaggttcctagccgcttggcacttggcagtcgtggaggctataatggacggggatgggggtccccaggacggcctaagaagaagcacacaggcatggccagcattgacagcagtgcccctgaaacaacatcggatagttcccccaccttaagccggagaccacttcgagggggctgggcccccacctcctggggtcgaggtcaggacagtgacagcattagcagctcttcttcggactccctgggctcctcatcctccagtggaagtcgccgggccagtgccagtggaggagcccgggcgaagactgttgaagttggcaggtcagtacaagggccgccgccccgagagtcatgcccctcatgtacccaatcagccatcagaggcagctgcacacttctacttcgagctggcgaagacagtgctgatcaaggcagggggcaacagcagcacttccattttcacacatccatcttcctcagggggccaccagggtcctcaccgcaacctgcacctttgcgccttcgagattgggctttatgcccttggcctgcacaactttgtttctcccaactggctctcacgtacttattcttcccacgtttcctggattacaggccaggccatggagataggcagcgcagccctgactatactggtagaatgctgggatgggcacctgacaccccctgaggttgcatccctggctgacagggcatcacgggcaagagactccaatatggtgagggcggcagcagagctggccctgagctgcctgcctcacgcccatgcattgaaccctaatgagatccagcgggccctggtgcagtgcaaggaacaggacaacctgatgttggagaaggcctgcatggcagtggaagaggcagctaagggtgggggcgtgtaccctgaagtgttgtttgaggttgctcaccagtggttctggctgtatgagcaaactgcaggtggctcatccacagcccgtgaaggggctacaagctgtagtgccagtgggatcagggcaggtggggaagctgggcggggtatgcctgagggtagagggggcccagggactgagccggttacagtggcagcggcagcagtgacagcagcagccacagtggtgcccgtcatatcggtggggtctagtttatacccgggtccaggactggggcatggccactcccctggcctgcacccctacactgctctacagccccacctgccctgtagccctcagtatctcactcacccagctcaccctgcccaccccatgcctcacatgccccggcctgccgtcttccctgtgcccagctctgcatacccacagggtgtgcatcctgcattcctaggggctcagtacccttattcagtgactcctccctcacttgctgccactgctgtgtctttccccgttccttccatggcacccatcacagtacatccctaccacacagagccagggcttccactgcccaccagtgtggccttgagcagtgtccatccagcatccacgtttccagccatccaaggtgcctcactgcctgccctgaccacacagcccagccctctggtgagcggaggttttccaccgcccgaggaggagacacacagtcagccagtcaatccccacagcctgcaccacctgcatgctgcctaccgtgtcggaatgctggcactggagatgctgggtcgccgggcacacaacgatcaccccaacaacttctcccgctcccccccctacactgatgatgtcaaatggttgctggggctggcagcaaagctgggagtgaactacgtgcaccagttctgtgtgggggcagccaagggggtgctgagcccgtttgtgctgcaggagatcgtcatggagacgctgcagcggctgagtcccgctcatgcccacaaccacctgcgtgccccggccttccaccaactggtgcagcgctgccagcaggcatacatgcagtacatccaccaccgcttgattcacctgactcctgcggactacgacgactttgtgaatgcgatccggagtgcccgcagcgccttctgcctgacgcccatgggcatgatgcagttcaacgacatcctacagaacctcaagcgcagcaaacagaccaaggagctgtggcagcgggtctcactcgagatggccaccttctccccctgagtctttcacccttagggtcctatacagggacccaggcctgtggctatgggggcccctcacacagggggagtgaaacttggctggacaga

SEQ ID NO: 204727 - DNA, 3611 bp, Homo sapiens
  Payload ID: 20384
  Gene Name: zinc finger, SWIM-type containing 8
  ENST ID: ENST00000412198
  CDS Start-End: 1-3338
cgtactatctgaatgcccaggatggggctgggggcgaggaagagaaggccgagggcggggctggggaggagcacgacctgtttgctgggctgaagccactggaacaggagagtcgcatggaggtactgtttgcctgtgctgaggccctgcatgcgcatggctatagcagtgaggcctcccgtctcactgtggagcttgcccaggatctgctagccaacccacccgacctcaaggtagagccgccccctgccaagggcaagaagaacaaggtatccacgagccgtcagacctgggtggctaccaacaccctgagcaaggcggccttcctgttgacagtgctaagtgagcgtccagagcaccacaacctggccttccgagttggcatgtttgccttggagctacagaggcctccagcttctaccaaggccttggaggtgaagctggcataccaggagtctgaggtggctgccctgctcaagaagatccctctgggtccaagtgagatgagtaccatgcggtgccgggcagaggaacttcgggaggggacactctgtgactatcggcctgtgttgcctctcatgctggccagtttcatctttgacgttctctgtgctccagtggtttctcccacaggttcccggcccccaagtcgcaactggaacagcgagacacctggggatgaggagcttggatttgaagcagcagttgctgccttgggcatgaagacaacagtgagcgaggcagaacatcccctcttatgtgaaggcacacgtcgggagaagggtgacctggcattagcactaatgatcacttacaaggacgaccaggccaagcttaagaagatcttagacaaactcttggaccgagagagccagacacataagccacagacgctgagttctttctactcatctagccgcccaaccacagccagccagaggtctccttcaaagcacgggggcccatctgccccaggggccctgcaaccactgacctcaggctctgcagggcctgctcaaccagggagtgtggcaggggctgggccaggccccactgagggcttcacagagaagaatgtgcctgagagttccccacattccccctgtgagggtcttccatctgaggcagctttgaccccaaggccagaagggaaggttcctagccgcttggcacttggcagtcgtggaggctataatggacggggatgggggtccccaggacggcctaagaagaagcacacaggcatggccagcattgacagcagtgcccctgaaacaacatcggatagttcccccaccttaagccggagaccacttcgagggggctgggcccccacctcctggggtcgaggtcaggacagtgacagcattagcagctcttcttcggactccctgggctcctcatcctccagtggaagtcgccgggccagtgccagtggaggagcccgggcgaagactgttgaagttggcaggtacaagggccgccgccccgagagtcatgcccctcatgtacccaatcagccatcagaggcagctgcacacttctacttcgagctggcgaagacagtgctgatcaaggcagggggcaacagcagcacttccattttcacacatccatcttcctcagggggccaccagggtcctcaccgcaacctgcacctttgcgccttcgagattgggctttatgcccttggcctgcacaactttgtttctcccaactggctctcacgtacttattcttcccacgtttcctggattacaggccaggccatggagataggcagcgcagccctgactatactggtagaatgctgggatgggcacctgacaccccctgaggttgcatccctggctgacagggcatcacgggcaagagactccaatatggtgagggcggcagcagagctggccctgagctgcctgcctcacgcccatgcattgaaccctaatgagatccagcgggccctggtgcagtgcaaggaacaggacaacctgatgttggagaaggcctgcatggcagtggaagaggcagctaagggtgggggcgtgtaccctgaagtgttgtttgaggttgctcaccagtggttctggctgtatgagcaaactgcaggtggctcatccacagcccgtgaaggggctacaagctgtagtgccagtgggatcagggcaggtggggaagctgggcggggtatgcctgagggtagagggggcccagggactgagccggttacagtggcagcggcagcagtgacagcagcagccacagtggtgcccgtcatatcggtggggtctagtttatacccgggtccaggactggggcatggccactcccctggcctgcacccctacactgctctacagccccacctgccctgtagccctcagtatctcactcacccagctcaccctgcccaccccatgcctcacatgccccggcctgccgtcttccctgtgcccagctctgcatacccacagggtgtgcatcctgcattcctaggggctcagtacccttattcagtgactcctccctcacttgctgccactgctgtgtctttccccgttccttccatggcacccatcacagtacatccctaccacacagagccagggcttccactgcccaccagtgtggcctgtgagttgtggggccagggaacagtgagcagtgtccatccagcatccacgtttccagccatccaaggtgcctcactgcctgccctgaccacacagcccagccctctggtgagcggaggttttccaccgcccgaggaggagacacacagtcagccagtcaatccccacagcctgcaccacctgcatgctgcctaccgtgtcggaatgctggcactggagatgctgggtcgccgggcacacaacgatcaccccaacaacttctcccgctcccccccctacactgatgatgtcaaatggttgctggggctggcagcaaagctgggagtgaactacgtgcaccagttctgtgtgggggcagccaagggggtgctgagcccgtttgtgctgcaggagatcgtcatggagacgctgcagcggctgagtcccgctcatgcccacaaccacctgcgtgccccggccttccaccaactggtgcagcgctgccagcaggcatacatgcagtacatccaccaccgcttgattcacctgactcctgcggactacgacgactttgtgaatgcgatccggagtgcccgcagcgccttctgcctgacgcccatgggcatgatgcagttcaacgacatcctacagaacctcaagcgcagcaaacagaccaaggagctgtggcagcgggtctcactcgagatggccaccttctccccctgagtctttcacccttagggtcctatacagggacccaggcctgtggctatgggggcccctcacacagggggagtgaaacttggctggacagatcatcctcactcagttccctggtagcacagactgacagctgctcttgggctatagcttggggccaagatgtctcacaccctagaagcctagggctgggggagacagccctgtctgggagggggcgttgggtggcctctggtatttatttggcatttataaatatataaactccttttttactct

SEQ ID NO: 204728 - DNA, 4490 bp, Homo sapiens
  Payload ID: 20384
  Gene Name: zinc finger, SWIM-type containing 8
  ENST ID: ENST00000492395
  CDS Start-End: 1-2715
ataacaggttggtggtatagcgtacgtacctcagcctcacacagcagtgccagtgggcacacgggccgtagcaacgggcagtcagaggtggcagcccatgcctgtgccagcatgtgtgacgagatggtcacactgtggaggctggccgtgctggaccctgcactcagcccccagcggcgccgggaactgtgtacgcagctgcggcagtggcaactgaaggtgattgagaacgtcaagcggggccaacacaagaagacgctggagcggctcttccccggcttccggccagcggtggaggcctgctacttcaactgggaagaggcctacccacttcctggtgtcacctacagcggcactgacaggaagctggcactgtgctgggcccgggccctgccctctcggccaggtgcctcccgctctgggggcctggaggaatcccgggaccggccccgaccccttcctactgagccagctgtgcggcccaaggagcctgggaccaagcgaaagggcttgggtgagggggtcccctcatcacagcggggtccccgccgcctctcagctgaagggggagataaagctctacataagatgggtccaggtgggggcaaagccaaggcactgggtggggctggcagtgggagcaagggctcagcaggtggcggaagcaagcgacggctgagcagcgaagacagctccctggagccagacctggccgagatgagcctggatgacagcagcctggccctgggcgcagaggccagcaccttcgggggattccctgagagccctccaccctgtcctctccacggtggctcccgaggcccttccactttccttcctgagcccccagatacttatgaagaagatggtggtgtgtacttctcggaagggcctgagcctcccacagcctctgttggcccccctggcctactgcctggggatgtctgtacccaggacgacctcccttctacagatgagagtggcaatgggcttcccaaaaccaaagaggcagcccctgcagttggagaggaggatgatgactaccaggcgtactatctgaatgcccaggatggggctgggggcgaggaagagaaggccgagggcggggctggggaggagcacgacctgtttgctgggctgaagccactggaacaggagagtcgcatggaggtactgtttgcctgtgctgaggccctgcatgcgcatggctatagcagtgaggcctcccgtctcactgtggagcttgcccaggatctgctagccaacccacccgacctcaaggtagagccgccccctgccaagggcaagaagaacaaggtatccacgagccgtcagacctgggtggctaccaacaccctgagcaaggcggccttcctgttgacagtgctaagtgagcgtccagagcaccacaacctggccttccgagttggcatgtttgccttggagctacagaggcctccagcttctaccaaggccttggaggtgaagctggcataccaggagtctgaggtggctgccctgctcaagaagatccctctgggtccaagtgagatgagtaccatgcggtgccgggcagaggaacttcgggaggggacactctgtgactatcggcctgtgttgcctctcatgctggccagtttcatctttgacgttctctgtgctccaggttcccggcccccaagtcgcaactggaacagcgagacacctggggatgaggagcttggatttgaagcagcagttgctgccttgggcatgaagacaacagtgagcgaggcagaacatcccctcttatgtgaaggcacacgtcgggagaagggtgacctggcattagcactaatgatcacttacaaggacgaccaggccaagcttaagaagatcttagacaaactcttggaccgagagagccagacacataagccacagacgctgagttctttctactcatctagccgcccaaccacagccagccagaggtctccttcaaagcacgggggcccatctgccccaggggccctgcaaccactgacctcaggctctgcagggcctgctcaaccagggagtgtggcaggggctgggccaggccccactgagggcttcacagagaagaatgtgcctgagagttccccacattccccctgtgagggtcttccatctgaggcagctttgaccccaaggccagaagggaaggttcctagccgcttggcacttggcagtcgtggaggctataatggacggggatgggggtccccaggacggcctaagaagaagcacacaggcatggccagcattgacagcagtgcccctgaaacaacatcggatagttcccccaccttaagccggagaccacttcgagggggctgggcccccacctcctggggtcgaggtcaggacagtgacagcattagcagctcttcttcggactccctgggctcctcatcctccagtggaagtcgccgggccagtgccagtggaggagcccgggcgaagactgttgaagttggcagggggccaccagggtcctcaccgcaacctgcacctttgcgccttcgagattgggctttatgcccttggcctgcacaactttgtttctcccaactggctctcacgtacttattcttcccacgtttcctggattacaggccaggccatggagataggcagcgcagccctgactatactggtagaatgctgggatgggcacctgacaccccctgaggttgcatccctggctgacagggcatcacgggcaagagactccaatatggtgagggcggcagcagagctggccctgagctgcctgcctcacgcccatgcattgaaccctaatgagatccagcgggccctggtgcagtgcaaggaacaggacaacctgatgttggagaaggcctgcatggcagtggaagaggcagctaagggtgggggcgtgtaccctgaagtgttgtttgaggttgctcaccagtggttctggctgtatgagcaaactgcaggtggctcatccacagcccgtgaaggggctacaagctgtagtgccagtgggatcagggcaggtggggaagctgggcggggtatgcctgagggtagagggggcccagggactgagccggttacagtggcagcggcagcagtgacagcagcagccacagtggtgcccgtcatatcggtggggtctagtttatacccgggtccaggactggggcatggccactcccctggcctgcacccctacactgctctacagccccacctgccctgtagccctcagtatctcactcacccagctcaccctgcccaccccatgcctcacatgccccggcctgccgtcttccctgtgcccagctctgcatacccacagggtgtgcatcctgcattcctaggggctcagtacccttattcagtgactcctccctcacttgctgccactgctgtgtctttccccgttccttccatggcacccatcacagtacatccctaccacacagagccagggcttccactgcccaccagtgtggcctgtgagttgtggggccagggaacagtgagcagtgtccatccagcatccacgtttccagccatccaaggtgcctcactgcctgccctgaccacacagcccagccctctggtgagcggaggttttccaccgcccgaggaggagacacacagtcagccagtcaatccccacagcctgcaccacctgcatgctgcctaccgtgtcggaatgctggcactggagatgctgggtcgccgggcacacaacgatcaccccaacaacttctcccgctcccccccctacactgatgatgtcaaatggttgctggggctggcagcaaagctgggagtgaactacgtgcaccagttctgtgtgggggcagccaagggggtgctgagcccgtttgtgctgcaggagatcgtcatggagacgctgcagcggctgagtcccgctcatgcccacaaccacctgcgtgccccggccttccaccaactggtgcagcgctgccagcaggcatacatgcagtacatccaccaccgcttgattcacctgactcctgcggactacgacgactttgtgaatgcgatccggagtgcccgcagcgccttctgcctgacgcccatgggcatgatgcagttcaacgacatcctacagaacctcaagcgcagcaaacagaccaaggagctgtggcagcgggtctcactcgagatggccaccttctccccctgagtctttcacccttagggtcctatacagggacccaggcctgtggctatgggggcccctcacacagggggagtgaaacttggctggacagatcatcctcactcagttccctggtagcacagactgacagctgctcttgggctatagcttggggccaagatgtctcacaccctagaagcctagggctgggggagacagccctgtctgggagggggcgttgggtggcctctggtatttatttggcatttataaatatataaactccttttttactcta

SEQ ID NO: 204729 - DNA, 5919 bp, Homo sapiens
  Payload ID: 20384
  Gene Name: zinc finger, SWIM-type containing 8
  ENST ID: ENST00000603114
  CDS Start-End: 256-5646
gccgccgagcgcttcgtcccggccctaagtctcggagactggccaagatcaccgcttgcaccgcgctgttgggcgaggcccggtcccgtctctttcccaggcctgagattctcgcccggcacggccgccctgagcgccccggccacccccagccccggctcgcccctcaggccccgggcctcccctcaacccccggccggcggcccaggccccggatccgcggggggggacccggccccggggggtgcgggccccatggagctgatgtttgcagagtgggaggacggagagcgcttctcattcgaggattcggaccgttttgaggaggattcactctgttccttcatctccgaggccgagagcctctgccagaactggcggggatggcgcaaacagtcagcggggcccaattcccccactggcggcggtggcggaggtggcagtggcggtaccagaatgcgagatggactggtgatcccattggtggagctgtcagcaaagcaggtggcatttcatatcccatttgaagtggtggagaaagtttacccaccagtgcctgagcagctacagctccgaattgctttttggagcttccctgagaatgaagaggacattcggctgtattcgtgcctggccaatggcagtgcggatgagtttcagcgaggggatcagctcttccgcatgcgggctgtgaaggacccattgcagatagggttccacctgagtgctacagtggtgccacctcagatggtccctcctaaaggggcctacaacgtggctgtgatgtttgaccgctgccgggtcacttcctgcagctgtacctgtggggctggggccaaatggtgcacccacgtcgtggcactctgtctcttccgcatccacaacgcttctgcagtctgcctgcgagccccagtctcagagtccctgtcccggctacagagggaccagctgcaaaagtttgctcagtacctcatcagtgagctccctcagcagatcctccccacagctcagcgtctcctggacgaactcctgtcttcccagtcaacagccatcaatacagtgtgtggagctccggaccccacagcagggccctcagcatcggaccagagtacttggtatctggatgaatcgacactcactgacaacatcaaaaagacactgcacaagttctgtggcccctcccctgtggtcttcagtgatgtgaactccatgtatctgtcttccacggagccgccagccgctgctgaatgggcatgtctgctgcgccctctgaggggccgtgagccagagggcgtctggaacctgctaagcattgtgcgggagatgttcaagcggagggacagcaatgctgcccccttgttggaaatcctcactgaccagtgcctcacctatgaacagataacaggttggtggtatagcgtacgtacctcagcctcacacagcagtgccagtgggcacacgggccgtagcaacgggcagtcagaggtggcagcccatgcctgtgccagcatgtgtgacgagatggtcacactgtggaggctggccgtgctggaccctgcactcagcccccagcggcgccgggaactgtgtacgcagctgcggcagtggcaactgaaggtgattgagaacgtcaagcggggccaacacaagaagacgctggagcggctcttccccggcttccggccagcggtggaggcctgctacttcaactgggaagaggcctacccacttcctggtgtcacctacagcggcactgacaggaagctggcactgtgctgggcccgggccctgccctctcggccaggtgcctcccgctctgggggcctggaggaatcccgggaccggccccgaccccttcctactgagccagctgtgcggcccaaggagcctgggaccaagcgaaagggcttgggtgagggggtcccctcatcacagcggggtccccgccgcctctcagctgaagggggagataaagctctacataagatgggtccaggtgggggcaaagccaaggcactgggtggggctggcagtgggagcaagggctcagcaggtggcggaagcaagcgacggctgagcagcgaagacagctccctggagccagacctggccgagatgagcctggatgacagcagcctggccctgggcgcagaggccagcaccttcgggggattccctgagagccctccaccctgtcctctccacgcctctgttggcccccctggcctactgcctggggatgtctgtacccaggacgacctcccttctacagatgagagtggcaatgggcttcccaaaaccaaagaggcagcccctgcagttggagaggaggatgatgactaccaggcgtactatctgaatgcccaggatggggctgggggcgaggaagagaaggccgagggcggggctggggaggagcacgacctgtttgctgggctgaagccactggaacaggagagtcgcatggaggtactgtttgcctgtgctgaggccctgcatgcgcatggctatagcagtgaggcctcccgtctcactgtggagcttgcccaggatctgctagccaacccacccgacctcaaggtagagccgccccctgccaagggcaagaagaacaaggtatccacgagccgtcagacctgggtggctaccaacaccctgagcaaggcggccttcctgttgacagtgctaagtgagcgtccagagcaccacaacctggccttccgagttggcatgtttgccttggagctacagaggcctccagcttctaccaaggccttggaggtgaagctggcataccaggagtctgaggtggctgccctgctcaagaagatccctctgggtccaagtgagatgagtaccatgcggtgccgggcagaggaacttcgggaggggacactctgtgactatcggcctgtgttgcctctcatgctggccagtttcatctttgacgttctctgtgctccaggttcccggcccccaagtcgcaactggaacagcgagacacctggggatgaggagcttggatttgaagcagcagttgctgccttgggcatgaagacaacagtgagcgaggcagaacatcccctcttatgtgaaggcacacgtcgggagaagggtgacctggcattagcactaatgatcacttacaaggacgaccaggccaagcttaagaagatcttagacaaactcttggaccgagagagccagacacataagccacagacgctgagttctttctactcatctagccgcccaaccacagccagccagaggtctccttcaaagcacgggggcccatctgccccaggggccctgcaaccactgacctcaggctctgcagggcctgctcaaccagggagtgtggcaggggctgggccaggccccactgagggcttcacagagaagaatgtgcctgagagttccccacattccccctgtgagggtcttccatctgaggcagctttgaccccaaggccagaagggaaggttcctagccgcttggcacttggcagtcgtggaggctataatggacggggatgggggtccccaggacggcctaagaagaagcacacaggcatggccagcattgacagcagtgcccctgaaacaacatcggatagttcccccaccttaagccggagaccacttcgagggggctgggcccccacctcctggggtcgaggtcaggacagtgacagcattagcagctcttcttcggactccctgggctcctcatcctccagtggaagtcgccgggccagtgccagtggaggagcccgggcgaagactgttgaagttggcaggtacaagggccgccgccccgagagtcatgcccctcatgtacccaatcagccatcagaggcagctgcacacttctacttcgagctggcgaagacagtgctgatcaaggcagggggcaacagcagcacttccattttcacacatccatcttcctcagggggccaccagggtcctcaccgcaacctgcacctttgcgccttcgagattgggctttatgcccttggcctgcacaactttgtttctcccaactggctctcacgtacttattcttcccacgtttcctggattacaggccaggccatggagataggcagcgcagccctgactatactggtagaatgctgggatgggcacctgacaccccctgaggttgcatccctggctgacagggcatcacgggcaagagactccaatatggtgagggcggcagcagagctggccctgagctgcctgcctcacgcccatgcattgaaccctaatgagatccagcgggccctggtgcagtgcaaggaacaggacaacctgatgttggagaaggcctgcatggcagtggaagaggcagctaagggtgggggcgtgtaccctgaagtgttgtttgaggttgctcaccagtggttctggctgtatgagcaaactgcaggtggctcatccacagcccgtgaaggggctacaagctgtagtgccagtgggatcagggcaggtggggaagctgggcggggtatgcctgagggtagagggggcccagggactgagccggttacagtggcagcggcagcagtgacagcagcagccacagtggtgcccgtcatatcggtggggtctagtttatacccgggtccaggactggggcatggccactcccctggcctgcacccctacactgctctacagccccacctgccctgtagccctcagtatctcactcacccagctcaccctgcccaccccatgcctcacatgccccggcctgccgtcttccctgtgcccagctctgcatacccacagggtgtgcatcctgcattcctaggggctcagtacccttattcagtgactcctccctcacttgctgccactgctgtgtctttccccgttccttccatggcacccatcacagtacatccctaccacacagagccagggcttccactgcccaccagtgtggccttgagcagtgtccatccagcatccacgtttccagccatccaaggtgcctcactgcctgccctgaccacacagcccagccctctggtgagcggaggttttccaccgcccgaggaggagacacacagtcagccagtcaatccccacagcctgcaccacctgcatgctgcctaccgtgtcggaatgctggcactggagatgctgggtcgccgggcacacaacgatcaccccaacaacttctcccgctcccccccctacactgatgatgtcaaatggttgctggggctggcagcaaagctgggagtgaactacgtgcaccagttctgtgtgggggcagccaagggggtgctgagcccgtttgtgctgcaggagatcgtcatggagacgctgcagcggctgagtcccgctcatgcccacaaccacctgcgtgccccggccttccaccaactggtgcagcgctgccagcaggcatacatgcagtacatccaccaccgcttgattcacctgactcctgcggactacgacgactttgtgaatgcgatccggagtgcccgcagcgccttctgcctgacgcccatgggcatgatgcagttcaacgacatcctacagaacctcaagcgcagcaaacagaccaaggagctgtggcagcgggtctcactcgagatggccaccttctccccctgagtctttcacccttagggtcctatacagggacccaggcctgtggctatgggggcccctcacacagggggagtgaaacttggctggacagatcatcctcactcagttccctggtagcacagactgacagctgctcttgggctatagcttggggccaagatgtctcacaccctagaagcctagggctgggggagacagccctgtctgggagggggcgttgggtggcctctggtatttatttggcatttataaatatataaactccttttttactct

SEQ ID NO: 204730 - DNA, 3369 bp, Homo sapiens
  Payload ID: 20384
  Gene Name: zinc finger, SWIM-type containing 8
  ENST ID: ENST00000604754
  CDS Start-End: 1-3307
tgggggcgaggaagagaaggccgagggcggggctggggaggagcacgacctgtttgctgggctgaagccactggaacaggagagtcgcatggaggtactgtttgcctgtgctgaggccctgcatgcgcatggctatagcagtgaggcctcccgtctcactgtggagcttgcccaggatctgctagccaacccacccgacctcaaggtagagccgccccctgccaagggcaagaagaacaaggtatccacgagccgtcagacctgggtggctaccaacaccctgagcaaggcggccttcctgttgacagtgctaagtgagcgtccagagcaccacaacctggccttccgagttggcatgtttgccttggagctacagaggcctccagcttctaccaaggccttggaggtgaagctggcataccaggagtctgaggtggctgccctgctcaagaagatccctctgggtccaagtgagatgagtaccatgcggtgccgggcagaggaacttcgggaggggacactctgtgactatcggcctgtgttgcctctcatgctggccagtttcatctttgacgttctctgtgctccagtggtttctcccacaggttcccggcccccaagtcgcaactggaacagcgagacacctggggatgaggagcttggatttgaagcagcagttgctgccttgggcatgaagacaacagtgagcgaggcagaacatcccctcttatgtgaaggcacacgtcgggagaagggtgacctggcattagcactaatgatcacttacaaggacgaccaggccaagcttaagaaggtcactgcttctgtcttccagatcttagacaaactcttggaccgagagagccagacacataagccacagacgctgagttctttctactcatctagccgcccaaccacagccagccagaggtctccttcaaagcacgggggcccatctgccccaggggccctgcaaccactgacctcaggctctgcagggcctgctcaaccagggagtgtggcaggggctgggccaggccccactgagggcttcacagagaagaatgtgcctgagagttccccacattccccctgtgagggtcttccatctgaggcagctttgaccccaaggccagaagggaaggttcctagccgcttggcacttggcagtcgtggaggctataatggacggggatgggggtccccaggacggcctaagaagaagcacacaggcatggccagcattgacagcagtgcccctgaaacaacatcggatagttcccccaccttaagccggagaccacttcgagggggctgggcccccacctcctggggtcgaggtcaggacagtgacagcattagcagctcttcttcggactccctgggctcctcatcctccagtggaagtcgccgggccagtgccagtggaggagcccgggcgaagactgttgaagttggcaggtacaagggccgccgccccgagagtcatgcccctcatgtacccaatcagccatcagaggcagctgcacacttctacttcgagctggcgaagacagtgctgatcaaggcagggggcaacagcagcacttccattttcacacatccatcttcctcagggggccaccagggtcctcaccgcaacctgcacctttgcgccttcgagattgggctttatgcccttggcctgcacaactttgtttctcccaactggctctcacgtacttattcttcccacgtttcctggattacaggccaggccatggagataggcagcgcagccctgactatactggtagaatgctgggatgggcacctgacaccccctgaggttgcatccctggctgacagggcatcacgggcaagagactccaatatggtgagggcggcagcagagctggccctgagctgcctgcctcacgcccatgcattgaaccctaatgagatccagcgggccctggtgcagtgcaaggaacaggacaacctgatgttggagaaggcctgcatggcagtggaagaggcagctaagggtgggggcgtgtaccctgaagtgttgtttgaggttgctcaccagtggttctggctgtatgagcaaactgcaggtggctcatccacagcccgtgaaggggctacaagctgtagtgccagtgggatcagggcaggtggggaagctgggcggggtatgcctgagggtagagggggcccagggactgagccggttacagtggcagcggcagcagtgacagcagcagccacagtggtgcccgtcatatcggtggggtctagtttatacccgggtccaggactggggcatggccactcccctggcctgcacccctacactgctctacagccccacctgccctgtagccctcagtatctcactcacccagctcaccctgcccaccccatgcctcacatgccccggcctgccgtcttccctgtgcccagctctgcatacccacagggtgtgcatcctgcattcctaggggctcagtacccttattcagtgactcctccctcacttgctgccactgctgtgtctttccccgttccttccatggcacccatcacagtacatccctaccacacagagccagggcttccactgcccaccagtgtggccttgagcagtgtccatccagcatccacgtttccagccatccaaggtgcctcactgcctgccctgaccacacagcccagccctctggtgagcggaggttttccaccgcccgaggaggagacacacagtcagccagtcaatccccacagcctgcaccacctgcatgctgcctaccgtgtcggaatgctggcactggagatgctgggtcgccgggcacacaacgatcaccccaacaacttctcccgctcccccccctacactgatgatgtcaaatggttgctggggctggcagcaaagctgggagtgaactacgtgcaccagttctgtgtgggggcagccaagggggtgctgagcccgtttgtgctgcaggagatcgtcatggagacgctgcagcggctgagtcccgctcatgcccacaaccacctgcgtgccccggccttccaccaactggtgcagcgctgccagcaggcatacatgcagtacatccaccaccgcttgattcacctgactcctgcggactacgacgactttgtgaatgcgatccggagtgcccgcagcgccttctgcctgacgcccatgggcatgatgcagttcaacgacatcctacagaacctcaagcgcagcaaacagaccaaggagctgtggcagcgggtctcactcgagatggccaccttctccccctgagtctttcacccttagggtcctatacagggacccaggcctgtggctatgggggcccctcacac

SEQ ID NO: 204731 - DNA, 5465 bp, Homo sapiens
  Payload ID: 20384
  Gene Name: zinc finger, SWIM-type containing 8
  ENST ID: ENST00000604524
  CDS Start-End: 224-5191
cggagactggccaagatcaccgcttgcaccgcgctgttgggcgaggcccggtcccgtctctttcccaggcctgagattctcgcccggcacggccgccctgagcgccccggccacccccagccccggctcgcccctcaggccccgggcctcccctcaacccccggccggcggcccaggccccggatccgcggggggggacccggccccggggggtgcgggccccatggagctgatgtttgcagagtgggaggacggagagcgcttctcattcgaggattcggaccgttttgaggaggattcactctgttccttcatctccgaggccgagagcctctgccagaactggcggggatggcgcaaacagtcagcggggcccaattcccccactggcggcggtggcggaggtggcagtggcggtaccagaatgcgagatggactggtgatcccattggtggagctgtcagcaaagcaggtggcatttcatatcccatttgaagtggtggagaaagtttacccaccagtgcctgagcagctacagctccgaattgctttttggagcttccctgagaatgaagaggacattcggctgtattcgtgcctggccaatggcagtgcggatgagtttcagcgaggggatcagctcttccgcatgcgggctgtgaaggacccattgcagatagggttccacctgagtgctacagtggtgccacctcagatggtccctcctaaaggggcctacaacgtggctgtgatgtttgaccgctgccgggtcacttcctgcagctgtacctgtggggctggggccaaatggtgcacccacgtcgtggcactctgtctcttccgcatccacaacgcttctgcagtctgcctgcgagccccagtctcagagtccctgtcccggctacagagggaccagctgcaaaagtttgctcagtacctcatcagtgagctccctcagcagatcctccccacagctcagcgtctcctggacgaactcctgtcttcccagtcaacagccatcaatacagtgtgtggagctccggaccccacagcagggccctcagcatcggaccagagtacttggtatctggatgaatcgacactcactgacaacatcaaaaagacactgcacaagttctgtggcccctcccctgtggtcttcagtgatgtgaactccatgtatctgtcttccacggagccgccagccgctgctgaatgggcatgtctgctgcgccctctgaggggccgtgagccagagggcgtctggaacctgctaagcattgtgcgggagatgttcaagcggagggacagcaatgctgcccccttgttggaaatcctcactgaccagtgcctcacctatgaacagataacaggttggtggtatagcgtacgtacctcagcctcacacagcagtgccagtgggcacacgggccgtagcaacgggcagtcagaggtggcagcccatgcctgtgccagcatgtgtgacgagatggtcacactgtggaggctggccgtgctggaccctgcactcagcccccagcggcgccgggaactgtgtacgcagctgcggcagtggcaactgaaggtgattgagaacgtcaagcggggccaacacaagaagacgctggagcggctcttccccggcttccggccagcggtggaggcctgctacttcaactgggaagaggcctacccacttcctggtgtcacctacagcggcactgacaggaagctggcactgtgctgggcccgggccctgccctctcggccaggtgcctcccgctctgggggcctggaggaatcccgggaccggccccgaccccttcctactgagccagctgtgcggcccaaggagcctgggaccaagcgaaagggcttgggtgagggggtcccctcatcacagcggggtccccgccgcctctcagctgaagggggagataaagctctacataagatgggtccaggtgggggcaaagccaaggcactgggtggggctggcagtgggagcaagggctcagcaggtggcggaagcaagcgacggctgagcagcgaagacagctccctggagccagacctggccgagatgagcctggatgacagcagcctggccctgggcgcagaggccagcaccttcgggggattccctgagagccctccaccctgtcctctccacggtggctcccgaggcccttccactttccttcctgagcccccagatacttatgaagaagatggtggtgtgtacttctcggaagggcctgagcctcccacagcctctgttggcccccctggcctactgcctggggatgtctgtacccaggacgacctcccttctacagatgagagtggcaatgggcttcccaaaaccaaagaggcagcccctgcagttggagaggaggatgatgactaccaggcgtactatctgaatgcccaggatggggctgggggcgaggaagagaaggccgagggcggggctggggaggagcacgacctgtttgctgggctgaagccactggaacaggagagtcgcatggaggtactgtttgcctgtgctgaggccctgcatgcgcatggctatagcagtgaggcctcccgtctcactgtggagcttgcccaggatctgctagccaacccacccgacctcaaggtagagccgccccctgccaagggcaagaagaacaaggtatccacgagccgtcagacctgggtggctaccaacaccctgagcaaggcggccttcctgttgacagtgctaagtgagcgtccagagcaccacaacctggccttccgagttggcatgtttgccttggagctacagaggcctccagcttctaccaaggccttggaggtgaagctggcataccaggagtctgaggtggctgccctgctcaagaagatccctctgggtccaagtgagatgagtaccatgcggtgccgggcagaggaacttcgggaggggacactctgtgactatcggcctgtgttgcctctcatgctggccagtttcatctttgacgttctctgtgctccaggttcccggcccccaagtcgcaactggaacagcgagacacctggggatgaggagcttggatttgaagcagcagttgctgccttgggcatgaagacaacagtgagcgaggcagaacatcccctcttatgtgaaggcacacgtcgggagaagggtgacctggcattagcactaatgatcacttacaaggacgaccaggccaagcttaagaagatcttagacaaactcttggaccgagagagccagacacataagccacagacgctgagttctttctactcatctagccgcccaaccacagccagccagaggtctccttcaaagcacgggggcccatctgccccaggggccctgcaaccactgacctcaggctctgcagggcctgctcaaccagggagtgtggcaggggctgggccaggccccactgagggcttcacagagaagaatgtgcctgagagttccccacattccccctgtgagggtcttccatctgaggcagctttgaccccaaggccagaagggaaggttcctagccgcttggcacttggcagtcgtggaggctataatggacggggatgggggtccccaggacggcctaagaagaagcacacaggcatggccagcattgacagcagtgcccctgaaacaacatcggatagttcccccaccttaagccggagaccacttcgagggggctgggcccccacctcctggggtcgaggtcaggacagtgacagcattagcagctcttcttcggactccctgggctcctcatcctccagtggaagtcgccgggccagtgccagtggaggagcccgggcgaagactgttgaagttggcaggtacaagggccgccgccccgagagtcatgcccctcatgtacccaatcagccatcagaggcagctgcacacttctacttcgagctggcgaagacagtgctgatcaaggcagggggcaacagcagcacttccattttcacacatccatcttcctcagggggccaccagggtcctcaccgcaacctgcacctttgcgccttcgagattgggctttatgcccttggcctgcacaactttgtttctcccaactggctctcacgtacttattcttcccacgtttcctggattacaggccaggccatggagataggcagcgcagccctgactatactggtagaatgctgggatgggcacctgacaccccctgaggttgcatccctggctgacagggcatcacgggcaagagactccaatatggtgagggcggcagcagagctggccctgagctgcctgcctcacgcccatgcattgaaccctaatgagatccagcgggccctggtgcagtgcaaggaacaggacaacctgatgttggagaaggcctgcatggcagtggaagaggcagctaaggtacatccctaccacacagagccagggcttccactgcccaccagtgtggcctgtgagttgtggggccagggaacagtgagcagtgtccatccagcatccacgtttccagccatccaaggtgcctcactgcctgccctgaccacacagcccagccctctggtgagcggaggttttccaccgcccgaggaggagacacacagtcagccagtcaatccccacagcctgcaccacctgcatgctgcctaccgtgtcggaatgctggcactggagatgctgggtcgccgggcacacaacgatcaccccaacaacttctcccgctcccccccctacactgatgatgtcaaatggttgctggggctggcagcaaagctgggagtgaactacgtgcaccagttctgtgtgggggcagccaagggggtgctgagcccgtttgtgctgcaggagatcgtcatggagacgctgcagcggctgagtcccgctcatgcccacaaccacctgcgtgccccggccttccaccaactggtgcagcgctgccagcaggcatacatgcagtacatccaccaccgcttgattcacctgactcctgcggactacgacgactttgtgaatgcgatccggagtgcccgcagcgccttctgcctgacgcccatgggcatgatgcagttcaacgacatcctacagaacctcaagcgcagcaaacagaccaaggagctgtggcagcgggtctcactcgagatggccaccttctccccctgagtctttcacccttagggtcctatacagggacccaggcctgtggctatgggggcccctcacacagggggagtgaaacttggctggacagatcatcctcactcagttccctggtagcacagactgacagctgctcttgggctatagcttggggccaagatgtctcacaccctagaagcctagggctgggggagacagccctgtctgggagggggcgttgggtggcctctggtatttatttggcatttataaatatataaactccttttttactcta

SEQ ID NO: 204732 - DNA, 630 bp, Homo sapiens
  Payload ID: 20384
  Gene Name: zinc finger, SWIM-type containing 8
  ENST ID: ENST00000466354
  CDS Start-End: 1-613
tgatgatgtcaaatggttgctggggctggcagcaaagctgggagatcgtcatggagacgctgcagcggctgagtcccgctcatgcccacaaccacctgcgtgccccggccttccaccaactggtgcagcgctgccagcaggcatacatgcagtacatccaccaccgcttgattcacctgactcctgcggactacgacgactttgtgaatgcgatccggagtgcccgcagcgccttctgcctgacgcccatgggcatgatgcagttcaacgacatcctacagaacctcaagcgcagcaaacagaccaaggagctgtggcagcgggtctcactcgagatggccaccttctccccctgagtctttcacccttagggtcctatacagggacccaggcctgtggctatgggggcccctcacacagggggagtgaaacttggctggacagatcatcctcactcagttccctggtagcacagactgacagctgctcttgggctatagcttggggccaagatgtctcacaccctagaagcctagggctgggggagacagccctgtctgggagggggcgttgggtggcctctggtatttatttggcatttataaatatataaactccttttttactcta

SEQ ID NO: 204733 - DNA, 6004 bp, Homo sapiens
  Payload ID: 20384
  Gene Name: zinc finger, SWIM-type containing 8
  Uniprot ID: A7E2V4
  ENST ID: ENST00000605216
  CDS Start-End: 218-5731
ctggccaagatcaccgcttgcaccgcgctgttgggcgaggcccggtcccgtctctttcccaggcctgagattctcgcccggcacggccgccctgagcgccccggccacccccagccccggctcgcccctcaggccccgggcctcccctcaacccccggccggcggcccaggccccggatccgcggggggggacccggccccggggggtgcgggccccatggagctgatgtttgcagagtgggaggacggagagcgcttctcattcgaggattcggaccgttttgaggaggattcactctgttccttcatctccgaggccgagagcctctgccagaactggcggggatggcgcaaacagtcagcggggcccaattcccccactggcggcggtggcggaggtggcagtggcggtaccagaatgcgagatggactggtgatcccattggtggagctgtcagcaaagcaggtggcatttcatatcccatttgaagtggtggagaaagtttacccaccagtgcctgagcagctacagctccgaattgctttttggagcttccctgagaatgaagaggacattcggctgtattcgtgcctggccaatggcagtgcggatgagtttcagcgaggggatcagctcttccgcatgcgggctgtgaaggacccattgcagatagggttccacctgagtgctacagtggtgccacctcagatggtccctcctaaaggggcctacaacgtggctgtgatgtttgaccgctgccgggtcacttcctgcagctgtacctgtggggctggggccaaatggtgcacccacgtcgtggcactctgtctcttccgcatccacaacgcttctgcagtctgcctgcgagccccagtctcagagtccctgtcccggctacagagggaccagctgcaaaagtttgctcagtacctcatcagtgagctccctcagcagatcctccccacagctcagcgtctcctggacgaactcctgtcttcccagtcaacagccatcaatacagtgtgtggagctccggaccccacagcagggccctcagcatcggaccagagtacttggtatctggatgaatcgacactcactgacaacatcaaaaagacactgcacaagttctgtggcccctcccctgtggtcttcagtgatgtgaactccatgtatctgtcttccacggagccgccagccgctgctgaatgggcatgtctgctgcgccctctgaggggccgtgagccagagggcgtctggaacctgctaagcattgtgcgggagatgttcaagcggagggacagcaatgctgcccccttgttggaaatcctcactgaccagtgcctcacctatgaacagataacaggttggtggtatagcgtacgtacctcagcctcacacagcagtgccagtgggcacacgggccgtagcaacgggcagtcagaggtggcagcccatgcctgtgccagcatgtgtgacgagatggtcacactgtggaggctggccgtgctggaccctgcactcagcccccagcggcgccgggaactgtgtacgcagctgcggcagtggcaactgaaggtgattgagaacgtcaagcggggccaacacaagaagacgctggagcggctcttccccggcttccggccagcggtggaggcctgctacttcaactgggaagaggcctacccacttcctggtgtcacctacagcggcactgacaggaagctggcactgtgctgggcccgggccctgccctctcggccaggtgcctcccgctctgggggcctggaggaatcccgggaccggccccgaccccttcctactgagccagctgtgcggcccaaggagcctgggaccaagcgaaagggcttgggtgagggggtcccctcatcacagcggggtccccgccgcctctcagctgaagggggagataaagctctacataagatgggtccaggtgggggcaaagccaaggcactgggtggggctggcagtgggagcaagggctcagcaggtggcggaagcaagcgacggctgagcagcgaagacagctccctggagccagacctggccgagatgagcctggatgacagcagcctggccctgggcgcagaggccagcaccttcgggggattccctgagagccctccaccctgtcctctccacggtggctcccgaggcccttccactttccttcctgagcccccagatacttatgaagaagatggtggtgtgtacttctcggaagggcctgagcctcccacagcctctgttggcccccctggcctactgcctggggatgtctgtacccaggacgacctcccttctacagatgagagtggcaatgggcttcccaaaaccaaagaggcagcccctgcagttggagaggaggatgatgactaccaggcgtactatctgaatgcccaggatggggctgggggcgaggaagagaaggccgagggcggggctggggaggagcacgacctgtttgctgggctgaagccactggaacaggagagtcgcatggaggtactgtttgcctgtgctgaggccctgcatgcgcatggctatagcagtgaggcctcccgtctcactgtggagcttgcccaggatctgctagccaacccacccgacctcaaggtagagccgccccctgccaagggcaagaagaacaaggtatccacgagccgtcagacctgggtggctaccaacaccctgagcaaggcggccttcctgttgacagtgctaagtgagcgtccagagcaccacaacctggccttccgagttggcatgtttgccttggagctacagaggcctccagcttctaccaaggccttggaggtgaagctggcataccaggagtctgaggtggctgccctgctcaagaagatccctctgggtccaagtgagatgagtaccatgcggtgccgggcagaggaacttcgggaggggacactctgtgactatcggcctgtgttgcctctcatgctggccagtttcatctttgacgttctctgtgctccaggttcccggcccccaagtcgcaactggaacagcgagacacctggggatgaggagcttggatttgaagcagcagttgctgccttgggcatgaagacaacagtgagcgaggcagaacatcccctcttatgtgaaggcacacgtcgggagaagggtgacctggcattagcactaatgatcacttacaaggacgaccaggccaagcttaagaagatcttagacaaactcttggaccgagagagccagacacataagccacagacgctgagttctttctactcatctagccgcccaaccacagccagccagaggtctccttcaaagcacgggggcccatctgccccaggggccctgcaaccactgacctcaggctctgcagggcctgctcaaccagggagtgtggcaggggctgggccaggccccactgagggcttcacagagaagaatgtgcctgagagttccccacattccccctgtgagggtcttccatctgaggcagctttgaccccaaggccagaagggaaggttcctagccgcttggcacttggcagtcgtggaggctataatggacggggatgggggtccccaggacggcctaagaagaagcacacaggcatggccagcattgacagcagtgcccctgaaacaacatcggatagttcccccaccttaagccggagaccacttcgagggggctgggcccccacctcctggggtcgaggtcaggacagtgacagcattagcagctcttcttcggactccctgggctcctcatcctccagtggaagtcgccgggccagtgccagtggaggagcccgggcgaagactgttgaagttggcaggtacaagggccgccgccccgagagtcatgcccctcatgtacccaatcagccatcagaggcagctgcacacttctacttcgagctggcgaagacagtgctgatcaaggcagggggcaacagcagcacttccattttcacacatccatcttcctcagggggccaccagggtcctcaccgcaacctgcacctttgcgccttcgagattgggctttatgcccttggcctgcacaactttgtttctcccaactggctctcacgtacttattcttcccacgtttcctggattacaggccaggccatggagataggcagcgcagccctgactatactggtagaatgctgggatgggcacctgacaccccctgaggttgcatccctggctgacagggcatcacgggcaagagactccaatatggtgagggcggcagcagagctggccctgagctgcctgcctcacgcccatgcattgaaccctaatgagatccagcgggccctggtgcagtgcaaggaacaggacaacctgatgttggagaaggcctgcatggcagtggaagaggcagctaagggtgggggcgtgtaccctgaagtgttgtttgaggttgctcaccagtggttctggctgtatgagcaaactgcaggtggctcatccacagcccgtgaaggggctacaagctgtagtgccagtgggatcagggcaggtggggaagctgggcggggtatgcctgagggtagagggggcccagggactgagccggttacagtggcagcggcagcagtgacagcagcagccacagtggtgcccgtcatatcggtggggtctagtttatacccgggtccaggactggggcatggccactcccctggcctgcacccctacactgctctacagccccacctgccctgtagccctcagtatctcactcacccagctcaccctgcccaccccatgcctcacatgccccggcctgccgtcttccctgtgcccagctctgcatacccacagggtgtgcatcctgcattcctaggggctcagtacccttattcagtgactcctccctcacttgctgccactgctgtgtctttccccgttccttccatggcacccatcacagtacatccctaccacacagagccagggcttccactgcccaccagtgtggcctgtgagttgtggggccagggaacagtgagcagtgtccatccagcatccacgtttccagccatccaaggtgcctcactgcctgccctgaccacacagcccagccctctggtgagcggaggttttccaccgcccgaggaggagacacacagtcagccagtcaatccccacagcctgcaccacctgcatgctgcctaccgtgtcggaatgctggcactggagatgctgggtcgccgggcacacaacgatcaccccaacaacttctcccgctcccccccctacactgatgatgtcaaatggttgctggggctggcagcaaagctgggagtgaactacgtgcaccagttctgtgtgggggcagccaagggggtgctgagcccgtttgtgctgcaggagatcgtcatggagacgctgcagcggctgagtcccgctcatgcccacaaccacctgcgtgccccggccttccaccaactggtgcagcgctgccagcaggcatacatgcagtacatccaccaccgcttgattcacctgactcctgcggactacgacgactttgtgaatgcgatccggagtgcccgcagcgccttctgcctgacgcccatgggcatgatgcagttcaacgacatcctacagaacctcaagcgcagcaaacagaccaaggagctgtggcagcgggtctcactcgagatggccaccttctccccctgagtctttcacccttagggtcctatacagggacccaggcctgtggctatgggggcccctcacacagggggagtgaaacttggctggacagatcatcctcactcagttccctggtagcacagactgacagctgctcttgggctatagcttggggccaagatgtctcacaccctagaagcctagggctgggggagacagccctgtctgggagggggcgttgggtggcctctggtatttatttggcatttataaatatataaactccttttttactct

SEQ ID NO: 204734 - DNA, 3713 bp, Homo sapiens
  Payload ID: 20384
  Gene Name: zinc finger, SWIM-type containing 8
  ENST ID: ENST00000603187
  CDS Start-End: 1-3697
tgagcccccagatacttatgaagaagatggtggtgtgtacttctcggaagggcctgagcctcccacagcctctgttggcccccctggcctactgcctggggatgtctgtacccaggacgacctcccttctacagatgagagtggcaatgggcttcccaaaaccaaagaggcagcccctgcagttggagaggaggatgatgactaccaggcgtactatctgaatgcccaggatggggctgggggcgaggaagagaaggccgagggcggggctggggaggagcacgacctgtttgctgggctgaagccactggaacaggagagtcgcatggaggtactgtttgcctgtgctgaggccctgcatgcgcatggctatagcagtgaggcctcccgtctcactgtggagcttgcccaggatctgctagccaacccacccgacctcaaggtagagccgccccctgccaagggcaagaagaacaaggtatccacgagccgtcagacctgggtggctaccaacaccctgagcaaggcggccttcctgttgacagtgctaagtgagcgtccagagcaccacaacctggccttccgagttggcatgtttgccttggagctacagaggcctccagcttctaccaaggccttggaggtgaagctggcataccaggagtctgaggtggctgccctgctcaagaagatccctctgggtccaagtgagatgagtaccatgcggtgccgggcagaggaacttcgggaggggacactctgtgactatcggcctgtgttgcctctcatgctggccagtttcatctttgacgttctctgtgctccaggttcccggcccccaagtcgcaactggaacagcgagacacctggggatgaggagcttggatttgaagcagcagttgctgccttgggcatgaagacaacagtgagcgaggcagaacatcccctcttatgtgaaggcacacgtcgggagaagggtgacctggcattagcactaatgatcacttacaaggacgaccaggccaagcttaagaagatcttagacaaactcttggaccgagagagccagacacataagccacagacgctgagttctttctactcatctagccgcccaaccacagccagccagaggtctccttcaaagcacgggggcccatctgccccaggggccctgcaaccactgacctcaggctctgcagggcctgctcaaccagggagtgtggcaggggctgggccaggccccactgagggcttcacagagaagaatgtgcctgagagttccccacattccccctgtgagggtcttccatctgaggcagctttgaccccaaggccagaagggaaggttcctagccgcttggcacttggcagtcgtggaggctataatggacggggatgggggtccccaggacggcctaagaagaagcacacaggcatggccagcattgacagcagtgcccctgaaacaacatcggatagttcccccaccttaagccggagaccacttcgagggggctgggcccccacctcctggggtcgaggtcaggacagtgacagcattagcagctcttcttcggactccctgggctcctcatcctccagtggaagtcgccgggccagtgccagtggaggagcccgggcgaagactgttgaagttggcaggtacaagggccgccgccccgagagtcatgcccctcatgtacccaatcagccatcagaggcagctgcacacttctacttcgagctggcgaagacagtgctgatcaaggcagggggcaacagcagcacttccattttcacacatccatcttcctcagggggccaccagggtcctcaccgcaacctgcacctttgcgccttcgagattgggctttatgcccttggcctgcacaactttgtttctcccaactggctctcacgtacttattcttcccacgtttcctggattacaggccaggccatggagataggcagcgcagccctgactatactggtagaatgctgggatgggcacctgacaccccctgaggttgcatccctggctgacagggcatcacgggcaagagactccaatatggtgagggcggcagcagagctggccctgagctgcctgcctcacgcccatgcattgaaccctaatgagatccagcgggccctggtgcagtgcaaggaacaggacaacctgatgttggagaaggcctgcatggcagtggaagaggcagctaagggtgggggcgtgtaccctgaagtgttgtttgaggttgctcaccagtggttctggctgtatgagcaaactgcaggtggctcatccacagcccgtgaaggggctacaagctgtagtgccagtgggatcagggcaggtggggaagctgggcggggtatgcctgagggtagagggggcccagggactgagccggttacagtggcagcggcagcagtgacagcagcagccacagtggtgcccgtcatatcggtggggtctagtttatacccgggtccaggactggggcatggccactcccctggcctgcacccctacactgctctacagccccacctgccctgtagccctcagtatctcactcacccagctcaccctgcccaccccatgcctcacatgccccggcctgccgtcttccctgtgcccagctctgcatacccacagggtgtgcatcctgcattcctaggggctcagtacccttattcagtgactcctccctcacttgctgccactgctgtgtctttccccgttccttccatggcacccatcacagtacatccctaccacacagagccagggcttccactgcccaccagtgtggccttgagcagtgtccatccagcatccacgtttccagccatccaaggtgcctcactgcctgccctgaccacacagcccagccctctggtgagcggaggttttccaccgcccgaggaggagacacacagtcagccagtcaatccccacagcctgcaccacctgcatgctgcctaccgtgtcggaatgctggcactggagatgctgggtcgccgggcacacaacgatcaccccaacaacttctcccgctcccccccctacactgatgatgtcaaatggttgctggggctggcagcaaagctgggagatcgtcatggagacgctgcagcggctgagtcccgctcatgcccacaaccacctgcgtgccccggccttccaccaactggtgcagcgctgccagcaggcatacatgcagtacatccaccaccgcttgattcacctgactcctgcggactacgacgactttgtgaatgcgatccggagtgcccgcagcgccttctgcctgacgcccatgggcatgatgcagttcaacgacatcctacagaacctcaagcgcagcaaacagaccaaggagctgtggcagcgggtctcactcgagatggccaccttctccccctgagtctttcacccttagggtcctatacagggacccaggcctgtggctatgggggcccctcacacagggggagtgaaacttggctggacagatcatcctcactcagttccctggtagcacagactgacagctgctcttgggctatagcttggggccaagatgtctcacaccctagaagcctagggctgggggagacagccctgtctgggagggggcgttgggtggcctctggtatttatttggcatttataaatatataaactccttttttactct

SEQ ID NO: 204735 - DNA, 6075 bp, Homo sapiens
  Payload ID: 20384
  Gene Name: zinc finger, SWIM-type containing 8
  ENST ID: ENST00000604729
  CDS Start-End: 298-5802
agctgatgggggaggcggctccgcagccgcctagaggccccagccgccgagcgcttcgtcccggccctaagtctcggagactggccaagatcaccgcttgcaccgcgctgttgggcgaggcccggtcccgtctctttcccaggcctgagattctcgcccggcacggccgccctgagcgccccggccacccccagccccggctcgcccctcaggccccgggcctcccctcaacccccggccggcggcccaggccccggatccgcggggggggacccggccccggggggtgcgggccccatggagctgatgtttgcagagtgggaggacggagagcgcttctcattcgaggattcggaccgttttgaggaggattcactctgttccttcatctccgaggccgagagcctctgccagaactggcggggatggcgcaaacagtcagcggggcccaattcccccactggcggcggtggcggaggtggcagtggcggtaccagaatgcgagatggactggtgatcccattggtggagctgtcagcaaagcaggtggcatttcatatcccatttgaagtggtggagaaagtttacccaccagtgcctgagcagctacagctccgaattgctttttggagcttccctgagaatgaagaggacattcggctgtattcgtgcctggccaatggcagtgcggatgagtttcagcgaggggatcagctcttccgcatgcgggctgtgaaggacccattgcagatagggttccacctgagtgctacagtggtgccacctcagatggtccctcctaaaggggcctacaacgtggctgtgatgtttgaccgctgccgggtcacttcctgcagctgtacctgtggggctggggccaaatggtgcacccacgtcgtggcactctgtctcttccgcatccacaacgcttctgcagtctgcctgcgagccccagtctcagagtccctgtcccggctacagagggaccagctgcaaaagtttgctcagtacctcatcagtgagctccctcagcagatcctccccacagctcagcgtctcctggacgaactcctgtcttcccagtcaacagccatcaatacagtgtgtggagctccggaccccacagcagggccctcagcatcggaccagagtacttggtatctggatgaatcgacactcactgacaacatcaaaaagacactgcacaagttctgtggcccctcccctgtggtcttcagtgatgtgaactccatgtatctgtcttccacggagccgccagccgctgctgaatgggcatgtctgctgcgccctctgaggggccgtgagccagagggcgtctggaacctgctaagcattgtgcgggagatgttcaagcggagggacagcaatgctgcccccttgttggaaatcctcactgaccagtgcctcacctatgaacagataacaggttggtggtatagcgtacgtacctcagcctcacacagcagtgccagtgggcacacgggccgtagcaacgggcagtcagaggtggcagcccatgcctgtgccagcatgtgtgacgagatggtcacactgtggaggctggccgtgctggaccctgcactcagcccccagcggcgccgggaactgtgtacgcagctgcggcagtggcaactgaaggtgattgagaacgtcaagcggggccaacacaagaagacgctggagcggctcttccccggcttccggccagcggtggaggcctgctacttcaactgggaagaggcctacccacttcctggtgtcacctacagcggcactgacaggaagctggcactgtgctgggcccgggccctgccctctcggccaggtgcctcccgctctgggggcctggaggaatcccgggaccggccccgaccccttcctactgagccagctgtgcggcccaaggagcctgggaccaagcgaaagggcttgggtgagggggtcccctcatcacagcggggtccccgccgcctctcagctgaagggggagataaagctctacataagatgggtccaggtgggggcaaagccaaggcactgggtggggctggcagtgggagcaagggctcagcaggtggcggaagcaagcgacggctgagcagcgaagacagctccctggagccagacctggccgagatgagcctggatgacagcagcctggccctgggcgcagaggccagcaccttcgggggattccctgagagccctccaccctgtcctctccacggtggctcccgaggcccttccactttccttcctgagcccccagatacttatgaagaagatggtggtgtgtacttctcggaagggcctgagcctcccacagcctctgttggcccccctggcctactgcctggggatgtctgtacccaggacgacctcccttctacagatgagagtggcaatgggcttcccaaaaccaaagaggcagcccctgcagttggagaggaggatgatgactaccaggcgtactatctgaatgcccaggatggggctgggggcgaggaagagaaggccgagggcggggctggggaggagcacgacctgtttgctgggctgaagccactggaacaggagagtcgcatggaggtactgtttgcctgtgctgaggccctgcatgcgcatggctatagcagtgaggcctcccgtctcactgtggagcttgcccaggatctgctagccaacccacccgacctcaaggtagagccgccccctgccaagggcaagaagaacaaggtatccacgagccgtcagacctgggtggctaccaacaccctgagcaaggcggccttcctgttgacagtgctaagtgagcgtccagagcaccacaacctggccttccgagttggcatgtttgccttggagctacagaggcctccagcttctaccaaggccttggaggtgaagctggcataccaggagtctgaggtggctgccctgctcaagaagatccctctgggtccaagtgagatgagtaccatgcggtgccgggcagaggaacttcgggaggggacactctgtgactatcggcctgtgttgcctctcatgctggccagtttcatctttgacgttctctgtgctccagtggtttctcccacaggttcccggcccccaagtcgcaactggaacagcgagacacctggggatgaggagcttggatttgaagcagcagttgctgccttgggcatgaagacaacagtgagcgaggcagaacatcccctcttatgtgaaggcacacgtcgggagaagggtgacctggcattagcactaatgatcacttacaaggacgaccaggccaagcttaagaagatcttagacaaactcttggaccgagagagccagacacataagccacagacgctgagttctttctactcatctagccgcccaaccacagccagccagaggtctccttcaaagcacgggggcccatctgccccaggggccctgcaaccactgacctcaggctctgcagggcctgctcaaccagggagtgtggcaggggctgggccaggccccactgagggcttcacagagaagaatgtgcctgagagttccccacattccccctgtgagggtcttccatctgaggcagctttgaccccaaggccagaagggaaggttcctagccgcttggcacttggcagtcgtggaggctataatggacggggatgggggtccccaggacggcctaagaagaagcacacaggcatggccagcattgacagcagtgcccctgaaacaacatcggatagttcccccaccttaagccggagaccacttcgagggggctgggcccccacctcctggggtcgaggtcaggacagtgacagcattagcagctcttcttcggactccctgggctcctcatcctccagtggaagtcgccgggccagtgccagtggaggagcccgggcgaagactgttgaagttggcaggtacaagggccgccgccccgagagtcatgcccctcatgtacccaatcagccatcagaggcagctgcacacttctacttcgagctggcgaagacagtgctgatcaaggcagggggcaacagcagcacttccattttcacacatccatcttcctcagggggccaccagggtcctcaccgcaacctgcacctttgcgccttcgagattgggctttatgcccttggcctgcacaactttgtttctcccaactggctctcacgtacttattcttcccacgtttcctggattacaggccaggccatggagataggcagcgcagccctgactatactggtagaatgctgggatgggcacctgacaccccctgaggttgcatccctggctgacagggcatcacgggcaagagactccaatatggtgagggcggcagcagagctggccctgagctgcctgcctcacgcccatgcattgaaccctaatgagatccagcgggccctggtgcagtgcaaggaacaggacaacctgatgttggagaaggcctgcatggcagtggaagaggcagctaagggtgggggcgtgtaccctgaagtgttgtttgaggttgctcaccagtggttctggctgtatgagcaaactgcaggtggctcatccacagcccgtgaaggggctacaagctgtagtgccagtgggatcagggcaggtggggaagctgggcggggtatgcctgagggtagagggggcccagggactgagccggttacagtggcagcggcagcagtgacagcagcagccacagtggtgcccgtcatatcggtggggtctagtttatacccgggtccaggactggggcatggccactcccctggcctgcacccctacactgctctacagccccacctgccctgtagccctcagtatctcactcacccagctcaccctgcccaccccatgcctcacatgccccggcctgccgtcttccctgtgcccagctctgcatacccacagggtgtgcatcctgcattcctaggggctcagtacccttattcagtgactcctccctcacttgctgccactgctgtgtctttccccgttccttccatggcacccatcacagtacatccctaccacacagagccagggcttccactgcccaccagtgtggccttgagcagtgtccatccagcatccacgtttccagccatccaaggtgcctcactgcctgccctgaccacacagcccagccctctggtgagcggaggttttccaccgcccgaggaggagacacacagtcagccagtcaatccccacagcctgcaccacctgcatgctgcctaccgtgtcggaatgctggcactggagatgctgggtcgccgggcacacaacgatcaccccaacaacttctcccgctcccccccctacactgatgatgtcaaatggttgctggggctggcagcaaagctgggagtgaactacgtgcaccagttctgtgtgggggcagccaagggggtgctgagcccgtttgtgctgcaggagatcgtcatggagacgctgcagcggctgagtcccgctcatgcccacaaccacctgcgtgccccggccttccaccaactggtgcagcgctgccagcaggcatacatgcagtacatccaccaccgcttgattcacctgactcctgcggactacgacgactttgtgaatgcgatccggagtgcccgcagcgccttctgcctgacgcccatgggcatgatgcagttcaacgacatcctacagaacctcaagcgcagcaaacagaccaaggagctgtggcagcgggtctcactcgagatggccaccttctccccctgagtctttcacccttagggtcctatacagggacccaggcctgtggctatgggggcccctcacacagggggagtgaaacttggctggacagatcatcctcactcagttccctggtagcacagactgacagctgctcttgggctatagcttggggccaagatgtctcacaccctagaagcctagggctgggggagacagccctgtctgggagggggcgttgggtggcctctggtatttatttggcatttataaatatataaactccttttttactct

SEQ ID NO: 204736 - DNA, 4113 bp, Homo sapiens
  Payload ID: 20385
  Gene Name: zinc finger, X-linked, duplicated A
  Uniprot ID: P98168
  ENST ID: ENST00000358697
  CDS Start-End: 401-2800
ctgggaggggctggcgtgtgtttatttgggtatatacaatgagtcacggattaaaattgcttttaccagatagatacctaggtgttccacagcattattgaacaagatgtcgtcatttccccattacttcagaagacctccttaattacttatattaattgtagaatatatttatgcataccaggctctacctctgggctttctattccgttccagagacccagtaccagaatatttaaatcactgtggcgttgaatacattttaatatctgatagggccagtttctgcgcattgcacatttttttttcccctttcaggaacgtgttcaggcccgcggcagggggcgggatcgcgcctcctcctcggctctggttccagccgagcctctcggacgcagagatggaaatcccgaagctgctcccggctcgcgggacactacagggcggcggcggcggcggtatccccgcgggtggcggccgagtccaccgaggccctgactcgccggctggccaggtccccacgcgccgcctcctgctgccccggggcccccaagatggcgggcccgggcggcggcgcgaggaggccagcacggcatcacggggccctggcccaagcctgttcgcgccgaggccccatcaacctagcggcggcggcgacgacttcttcctggtgctgcttgacccggtgggtggcgacgtggagaccgcgggctccggtcaggccgcagggcctgtgttgagggaggaggccaaggcgggcccggggctccagggggacgagagcggcgcgaaccccgcgggctgctctgcgcagggcccccactgcctgtccgcggttcccactccggccccgatctccgcccccggccccgccgcggccttcgcgggcacagtcactatccacaaccaggacctgctgttgcgctttgagaacggcgtcctcaccctggccacgcccccaccacacgcctgggagccaggggccgctcctgcccagcagcccaggtgtctgatcgccccccaagctgggttcccgcaagccgcgcacccgggtgactgcccagagctgcggtccgacctcctgctagccgagcccgcagaacccgcgcctgctccggcgccccaggaggaggcggagggcctggccgccgccctgggcccccgcggactgctgggctctggtccaggcgtggtgctgtacctgtgccccgaggcgctgtgcgggcaaaccttcgccaagaagcaccagctgaagatgcacctgctgacgcacagcagcagccagggccagaggcccttcaaatgccccctgggtggctgcggctggaccttcaccacctcttacaagctcaagaggcacctgcagtcgcacgataaactgcggcccttcggctgccctgcggagggctgtggcaagagcttcaccaccgtgtacaacctcaaggcgcacatgaagggccatgagcaggagaactcgttcaaatgtgaggtgtgcgaggagagcttccccacgcaggccaaactcggcgcccaccagcgcagccacttcgaacccgagaggccttaccagtgcgcgttttctggctgcaagaagacatttatcacagtgagtgctctgttttcccataaccgcgcccatttcagggaacaggaactgttttcctgctctttccctggctgcagcaagcaatatgacaaggcttgtaggctgaaaattcacctgcggagtcacaccggcgagagacctttcctttgtgactttgatggctgtggctggaacttcaccagcatgtccaaactcttaaggcacaaaaggaagcacgacgatgaccggaggttcatgtgccctgtggaaggctgtgggaaatctttcacgagggccgaacatctgaaaggccacagcattacccacctgggcacaaagcctttcgtgtgtcctgtggcaggctgctgtgccaggttctctgctcgcagtagcctctacattcactccaagaaacacctgcaggatgtggacacttggaaaagccgttgcccgatctcctcttgtaataaactcttcacatccaagcacagcatgaagacgcacatggttaaaaggcataaggtgggccaggatctcttagctcagctagaagcagcaaattctcttacacccagcagtgaacttaccagccagagacagaatgatctcagtgatgcagagatagtgtctctcttctctgatgtacctgacagtacttctgctgcattgctggacacagcattggtgaactctggaatcttgactattgatgtggcttctgtgagctcgactctggcagggcacctccctgctaataataataattccgtagggcaggctgtggaccctccgtccttgatggccaccagcgaccctcctcaaagtctggatacctctctcttttttggaacggcggccactggttttcagcagagctccttaaatatggatgaggtctcaagtgtaagtgtggggccattgggatctctggactctttggccatgaaaaactccagtccagagcctcaggctttgacacccagcagtaagctaacagtggacacagatactctgactccttcgagcaccctttgtgaaaacagtgtctcagaactactgacaccagccaaagcggagtggagcgtacatcctaactctgacttctttggacaggagggagaaacccagtttggattccccaatgcagcaggaaaccatggttctcagaaagaaagaaatcttatcactgtgactggcagctcatttttggtatgaagcaactctattcattccttgccatgtggctaacttttattacagtcaattttgaggatattctggactaaatatttaagtgcagtcatttctttttggtttgcaaaaagagcacagccctggactatgagtttggagatctaaattctgatcttgagtctggaactgacaagttgtgtgaccctcagcaagtcacttaacctatctgagccttaatttccttatttataaattgtggtggtttgaacacattgctcataaggtcttttcagttttgttttgttttgttttgtgattttgtgctttttcttgaaaattttcgggcattttgcaattattattgtttgtacttgtaatcagaagcggtttgagccctgtagcactaaataatgaaagattgaggaactggtgttttacattaaaaatttaatggaaattttacacagtacgaaaatctaatgatagagctcaaaaaaaaagagctaaaaataggagttggttcttcttagctgtttatccttctaaccttttttttaaatgatgaaggtatgtttttgttgtggaaaatacaagggcttttgttatcactcagacccagagtgaaatgtttgctttgtggttttgaataagttggcctttaataagttatttagtctctcttagcctcagttttctatctgtaaaatggtcatagcaatgtgaacatatgtgttacatcctagacttatttttctaccccagtaggttgtattgaaaggaaaatgttatatgtgtttcagcatgttttggtgaatcttcattccctttcctgccccttgttttccctcctcaaaggggagaaattagcacaaattagtatcaggattgtgcaggaaataaacatttgtgaaggttaagaaagaggaaaaggaagttatttcttcaacagattaaggatttttctacacacagttcttttgtggcattggccacatgtccattagaccaatttgatagtatcttcggtctgcattcaaagccagctcatgcaatgagtattcagcctattcttccaagacaatctggacatagaccagagggagatttttctcccctctgtgccctagagagctcattgctggcttactcttagagttgaaatgagagggttttgtctgcattttgagtagataccatctatcttatgtgagtatagcattttacaatttagcactttcacaactattatatttgatcctcacaatcctgtgaggtaattatggcaaagtcagatctacaattcatattaaaatttacctagctcagattacaaa

SEQ ID NO: 204737 - DNA, 5894 bp, Homo sapiens
  Payload ID: 20386
  Gene Name: zinc finger, X-linked, duplicated B
  Uniprot ID: P98169
  ENST ID: ENST00000374888
  CDS Start-End: 398-2809
gggctggggtgtgtttatttgggtatatacaatgagtcatggattaaaattgcttccagcggatagatacctaggtgttccacagcattactgaacaagctgtcgtcatttccccattacctcagaagacccccttaattacttacttatattaactgtagaacgtatttatgcataccaggctctacctctgggctttctattctgttccagagacccagtaccagaatatttaaatcactgtggcgttaaatacgttttaatatctgatagggccagtttctgcgcattgcacatttttttttcccctttcaggaacgtgttcaggcccgcggcagggggcgggatcgcgcctcctcctcggctctggttccagccgagcctctcggacgcagagatggaaatcccgaagctgctcccggctcgcgggacactacagggcggcggcggcggcggtatccccgcgggtggcggccgagtccaccgaggccctgactcgccggctggccaggtccccacgcgccgcctcctgctgctccggggcccccaagatggcgggcccgggcggcggcgcgaggaggccagcacggcatcacggggccctggcccaagcctgttggcgccgaggaccgatcaacctagcggcggcggcggcggcggcggcgacgacttcttcctggtgctgcttgacccggtgggtggcgacgtggagaccgcgggctccggtcaggccgcagggcctgtgttgagggaggaggccgaggagggcccggggctccaggggggcgagagcggcgcgaatcccgcggggcccactgcgctaggcccccgctgcctgtccgcggttcccactccggccccgatctccgcccccggccccgccgcggccttcgcgggcacagtcactatccacaaccaggacctgctgttgcgctttgagaacggcgtcctcaccctggccacgcccccaccacacgcctgggagccaggggccgctcctgcccagcagcccgggtgtctgatcgccccgcaagctgggttcccgcatgccgcgcacccgggtgactgcccagagctgccgccagacctcctgctagctgagccggccgaacccgcgccagctccggcgcctgaggaggaggcggagggcccggccgccgccctgggcccccgcggaccgctgggctccggcccaggcgtggtgctgtacttgtgccccgaggcgcagtgcgggcaaaccttcgccaagaagcaccagctgaaggtgcacctgctgacgcacagcagcagccagggccagaggcccttcaaatgccccctgggtggctgcggctggaccttcaccacctcttacaagctcaagaggcacctgcagtcgcacgacaaactgcggccctttggctgcccggcagagggctgtggcaagagcttcaccacagtgtacaacctcaaggcgcacatgaagggccatgagcaggagaactcattcaaatgcgaggtgtgcgaggagagcttccccacgcaggccaaactcagcgcccaccagcgcagccacttcgaaccggagaggccttaccagtgcgcgttttctggctgcaagaagacatttatcacagtgagtgctctgttttcccataaccgcgcccatttcagggaacaggaactgttttcctgctcttttcctggctgcagcaaacaatatgacaaggcttgtaggctgaaaattcacctgcggagtcacaccggcgagagacctttcctttgtgactttgatggctgtggctggaacttcactagcatgtccaaactcttaaggcacaaaagaaagcacgacgatgaccggaggttcatgtgccctgtggaaggctgtgggaaatctttcacgagggcggaacatctgaaaggccacagcataacccacctgggcacaaagcctttcgtgtgtcctgtggcaggctgctgtgccaggttctctgctcgcagtagcctctacattcactccaagaaacacctgcaggatgtggacacttggaaaagccgttgcccgatctcctcttgtaataaactcttcacatccaagcacagcatgaagacgcacatggttaaaaggcataaggtgggccaggatctcttagctcagctagaagcagcaaattctctcacacccagcagtgaacttaccagccagagacagaatgatctcagtgatgcagagatagtgtctctcttctctgatgtacctgacagtacttctgctgcattgctggacacagcattggtgaactctggaatcttgactattgatgtggcttctgtgagctcgactctggcagggcacctccctgctaataataataattccgtagggcaggctgtggaccctccgtccttgatggccaccagcgaccctcctcaaagtctggatacctctctcttttttggaacggcggccactggttttcagcagagctccttaaatatggatgaggtctcaagtgtaagtgtggggccattgggatctctggactctttggccatgaaaaactccagtccagagcctcaggctttgacacccagcagtaagctaacagtggacacagatgctctgactccttcgagcaccctttgtgaaaacagtgtctcagaactactgacaccaaccaaagcggagtggaacgtacatcctgactctgacttctttggacaggagggagaaacccagtttggattccccaatgcagcaggaaaccatggttctcagaaagaaacagatcttatcactgtgactggcagctcatttttggtatgaaccaactctattcattcctcatcatgtggcttacttttattacagtcaattttgaggatattctggactaaatatttaagtgcagtcatttctttttggtttgcaaaaagagcacagccctggactacaagtttggagatttaaattctgatcttgagtttggaactgacaagttgtgtgaccctgagcaagtcagttaacctatctgagccttaatttccttatttataaattgaggtggtttgaatagattgcttttaaggtctttctgctctgtgattccttgataatacatttctttccttgaaaaatatgaggacgtttttcagtgatgtggcatgcgtttttttttaactgcccccccagccctgacatgttctttttttggcaaacatacataatgttacatcatactatgatgaacatccatgtacttttcactcaatttcagcaattatgaatccatgaacaatcttttttaacttagcctcactcactccccatgttctagtattattttgtaacaaatagcagacatctgatcattttatccataaatattctttatatatctctgaaagctatgggatgatatggaaaaaaatgataattccattatcgcaagtgatatttacagtaattctttaatatcagtaaatatccagtgagggttcaaacttccaattgcctcataaatgctacttgttttattatttttaattagtagaatcccgtaaatctcctaagtgtcttcttaatccgtatgtttccctttcatctttctttttttccttgcgattttgtttatgaaatgaggttgtttcacatgtagcatttgccacaatttaagttttgctaattgcatccctatggtaatgtttgctttcctctatcctctgtttctttaatttgctagttatgtctagagacttgatgagattgaaacatggcttttggcatgaatgtttcataggttatgttgtgttcatttagtaggtggcgcataatctgtggttttctctctttttgtggtattagcagctgctgcagataaatgcattaattcatgatgcttctgatatgatgagtcatctttgtagagttactaagcattagcaaaggaggaaatgctatgtaatagaaatattattcaatgccaaaatattttcttaaatagtcatagaactaacaagaaaaaatagatagcaaaaaaatgtgttggctgttctcactgtttatcttcctaacttcttttgatgatggaaggcagttttgtggaaattgccagccaggactttgacatgaaacagacccagggctaaattttggctctgtggtgttggataagtggccttgaataaattagttattaagcttcagttttctagcttttaactgattataacaatgcacacacatacctgacacactgttaaattttcttctcttcctgtttcttatgttaaggaaagatactctgtgttttggcatatgttggtgaatttgtaccatttttatcctctcagtccttccttttataagacaataattggagtagtttaatcttattcatgtgcagataaaagaggtttatgaagtttagggtgaagtaggcaagggaatctgtttactccctcttccctctactgaataattttccctctactgaataattttccctctaagaattgctgtgggtaataccaggagtggggacattgcccacatgcataagagcgtatctctccattcgatcagtttgtcaccatctttgctctgttttgaaagtcaggcttctctgtgactgtgaagcctgctgttccctgaaaatctgataatggagcagtggaggtttttttctttctgtgctctgtagatctcattgtttgcacttgtaatttcccagagttgaaaggaaagattgaactggaatattgtgtaaactatctgtcttacattagtgtagcattttgcaatttggggaacatcttcacaatttgtgtctcgttgttcagaacaaccctgtgaagtagttttggcaatgtctgtgttacatttcatgtaatttagccaactcccattccaactaggctttggctaaatctgacaattttatatatagcttaaaacaaagaatatacattcttttcacccctcccagtctacccatccagccttcatgattcattcctgtgtcaaggttagtcgctgttttccatttgaattggtttcttttatggtcagtttactttcttccctctcccctccctttcctgcacatccccatccttgctatgcctttctgtcctcttttataatggatatatctttttcctgccattatccctcagacattctcctcatggcacattttcttcaaatgctaacatttactgagtgtacattgaagttctgtgcatacaggaagaagttattttctgagcttagataatactatgtgtatatgtgattaaaatgaagattattttctaaagccttcaaattagaagtggatttctgtttcattacttccgttttaaaagtttttgccagagagttttgctaaatactctcttatttgctctagtgtactagtccagtagtgtttgcatgtggatgtctgtggatgacagttattgtagcactttggcagtgcactaaaattttgccactatgaaatgtttctttattgtgtgtgcgtgtgtgttttgaaatacgcacacagccacacccacatatatattaaaagtggttgtattcatttagtgaaaaacaaaaagtagatgtacttctgtaaatcagataaatgcttggaatttgattgtctacccaatcaacagttttccctctttgctctggaaatatttgtactcatatagcatatttcaaaaatgttgtcattcattaaggcctcttaaatagaccactattttttgtgtctggcagatgagtatgtcaaggattgagatgaacacataagtcttggaaattaaataaatttataaacataaagataatttaatgctgtgacttcattttttaaattctttaaaccaactttctcccaataaaaaattataaacta

SEQ ID NO: 204738 - DNA, 2468 bp, Homo sapiens
  Payload ID: 20387
  Gene Name: zinc finger, ZZ-type containing 3
  Uniprot ID: Q8IYH5
  ENST ID: ENST00000370798
  CDS Start-End: 487-1716
aggagcgggaggcggggacccacctggaagcgccgcggcgccgctatcgagcttcctgcagcggtggccacccgagcaagtgccgtggcgggggcggagagcggccacggcggcggcgcctccccaagtggcccgttgcgtccgaccccgcgtgaaagatatcaagttattctagtacaaccatataaataaataatacctgaagtctcagtgtaacatggacaattaacagtgatgacagataaatacagacgcatggggatcaaatactaggcaaaacgctttttaaaagtgtatcaggcttttaagaaacactgcaggatcctgtctatcttaatgctgatagagctcagctaaaaatttaggaggttctagtattcttcatggctgaagctgagagagtctgaaaccctgatgcttaagctccattctagatcatagctccaactccttcaggatataaggaaaagagattatatttccacaatgatagatctttggttgtacagttatcagagactattacagacgattgctgtactcgaggctcagcgttctcaagcagtccaagaccttgaaagtttaggcaggcaccagagagaagcactgaaaaatcccattggatttgtggaaaaactccagaagaaggctgatattgggcttccatatccacagagagttgttcaattgcctgagatcgtatgggaccaatatacccatagccttgggaattttgaaagagaatttaaaaatcgtaaaagacatactagaagagttaagctagtttttgataaagtaggtttacctgctagaccaaaaagtcctttagatcctaagaaggatggagagtccctttcatattctatgttgcctttgagtgatggtccagaaggctcaagcagtcgtcctcagatgataagaggacgcttgtgtgatgataccaaacctgaaacatttaaccagttgtggactgttgaagaacagaaaaagctggaacagctactcatcaaataccctcctgaagaagtagaatctcgacgctggcagaagatagcagatgaattgggcaacaggacagcaaaacaggttgccagccgagtacagaagtatttcataaagctaactaaagctggcattccagtaccaggcagaacaccaaacttatatatatactccaaaaagtcttcaacaagcagacgacagcaccctcttaataagcatctctttaagccttccactttcatgacttcacatgaaccgccagtgtatatggatgaagatgatgaccgatcttgttttcatagccacatgaacactgctgttgaagatgcatcagatgacgaaagtattcctatcatgtataggaatttacctgaatataaagaactattacagtttaaaaagttaaagaagcagaaacttcagcaaatgcaagctgaaagtggatttgtgcaacatgtgggctttaagtgtgataactgtggcatagaacccatccagggtgttcggtggcattgccaggattgtcctccagaaatgtctttggatttctgtgattcttgttcagactgtctacatgaaacagatattcacaaggaagatcaccaattagaacctatttataggtcagagacattcttagacagagactactgtgtgtctcagggcaccagttacaattaccttgacccaaactactttccagcaaacagatgacatggaagagaacatcatttactagtcctcttcaacacatagcaatggtatcattgttaattatgtgcacagtttggaaagattctctgctttcccagaaatgacactcacagcatgagagcttcctgagtgttctcgtcaagtacagctctgcaccgttgtggctctagatcactgttcagcagctgaacattcctggtgagcaaaggtttccctggtgaatttttcaccactgcgttttaggtggtgatcttaaatgggtgagatggaacgagagcacacattaaagagagagtaaattccaaaggtttcaaagaacttggtcataaatatgataatgagaagacaaagtatttatattaaaacagtttagtagccttcagttttgtgaaaatagttttcagcacagaaactgacttctttagacaaagttttaaccaatgatggtgtttgcttctaggatatacactttaaaagaactcactgtcccagtggtggtcattgatggcctttagtaaattggagctgcttaatcatattgatatctaatttcttttaaccacaatgaattgtccttaattaccaacagtgaagcactacaggaggcaactgtggcattgcttccttaaccagctcatggtgtgtgaatgttataaaattgtcactcagatatattttttaaatgtaatgttatataagatgatcatgtgatgtgtacaaactatggtgaaaagtgccagtggtagtaactg

SEQ ID NO: 204739 - DNA, 4328 bp, Homo sapiens
  Payload ID: 20387
  Gene Name: zinc finger, ZZ-type containing 3
  Uniprot ID: Q8IYH5
  ENST ID: ENST00000370801
  CDS Start-End: 477-3188
gttggcagagcagttgtcctggatggcggagccttgggttccgggggcctgggacctgcaactctttctacaagatatcaagttattctagtacaaccatataaataaataatacctgaagtctcagtgtaacatggacaattaacagtgatgacagataaatacagacgcatggggatcaaatactaggcaaaacgctttttaaaagtgtatcaggcttttaagaaacactgcaggatcctgtctatcttaatgctgatagagctcagctaaaaatttaggaggttctagtattcttcatggctgaagctgagagagtctgaaaccctgatgcttaagctccattctagatcatagctccaactccttcaggatataaggaaaagagattatatttccacaatgatagatctttggttgtacaggtttcccaatgagtggatcatgatgaccgtattgtagggacttgccatagtatggctgcttcccgatctactcgtgttacaagatcaacagtggggttaaacggcttggatgaatctttttgtggtagaactttaaggaatcgtagcattgcgcatcctgaagaaatctcttctaattctcaagtacgatcaagatcaccaaagaagagaccagagcctgtgccaattcagaaaggaaataataatgggagaaccactgatttaaaacagcagagtacccgagaatcatgggtaagccctaggaaaagaggactttcttcttcagaaaaggataacatagaaaggcaggctatagaaaattgtgagagaaggcaaacagaacctgtttcaccagttttaaaaagaattaagcgttgtcttagatctgaagcaccaaacagttcagaagaagattctcctataaaatcagacaaggagtcagtagaacagaggagtacagtagtggacaatgatgcagattttcaagggactaaacgagcttgtcgatgtcttatactggatgattgtgagaaaagggaaattaaaaaggtgaatgtcagtgaggaagggccacttaattctgcagtagttgaagaaatcacaggctatttggctgtcaatggtgttgatgacagtgattcagctgttataaactgtgatgactgtcagcctgatgggaacactaaacaaaatagcattggttcctatgtgttacaggaaaaatcagtagctgaaaatggggatacggatacccaaacttcaatgttccttgatagtaggaaggaggacagttatatagaccataaggtgccttgcacagattcacaagtgcaggtcaagttggaggaccacaaaatagtaactgcctgcttgcctgtggaacatgttaatcagctgactactgagccagctacagggcccttttctgaaactcagtcatctttaagggattctgaggaggaagtagatgtggtgggagatagcagtgcctcaaaagagcagtgtaaagaaaacaccaataacgaactggacacaagtcttgagagtatgccagcctccggagaacctgaaccatctcctgttctagactgtgtttcagctcaaatgatgtctttatcagaacctcaagaacatcgttatactctgagaacctcaccacgaagggcagcccctaccagaggtagtcccactaaaaacagttctccttacagagaaaatggacaatttgaggagaataatcttagtcctaatgaaacaaatgcaactgttagtgataatgtaagtcaatctcctacaaatcctggtgaaatttctcaaaatgaaaaagggatatgttgtgactctcaaaataatggaagtgaaggagtaagtaaaccaccctcagaggcaagactcaatattggacatttgccatctgccaaagagagtgccagtcagcacattacagaagaggaagatgatgatcctgatgtttattactttgaatcagatcatgtggcactgaaacacaacaaagattatcagagactattacagacgattgctgtactcgaggctcagcgttctcaagcagtccaagaccttgaaagtttaggcaggcaccagagagaagcactgaaaaatcccattggatttgtggaaaaactccagaagaaggctgatattgggcttccatatccacagagagttgttcaattgcctgagatcgtatgggaccaatatacccatagccttgggaattttgaaagagaatttaaaaatcgtaaaagacatactagaagagttaagctagtttttgataaagtaggtttacctgctagaccaaaaagtcctttagatcctaagaaggatggagagtccctttcatattctatgttgcctttgagtgatggtccagaaggctcaagcagtcgtcctcagatgataagaggacgcttgtgtgatgataccaaacctgaaacatttaaccagttgtggactgttgaagaacagaaaaagctggaacagctactcatcaaataccctcctgaagaagtagaatctcgacgctggcagaagatagcagatgaattgggcaacaggacagcaaaacaggttgccagccgagtacagaagtatttcataaagctaactaaagctggcattccagtaccaggcagaacaccaaacttatatatatactccaaaaagtcttcaacaagcagacgacagcaccctcttaataagcatctctttaagccttccactttcatgacttcacatgaaccgccagtgtatatggatgaagatgatgaccgatcttgttttcatagccacatgaacactgctgttgaagatgcatcagatgacgaaagtattcctatcatgtataggaatttacctgaatataaagaactattacagtttaaaaagttaaagaagcagaaacttcagcaaatgcaagctgaaagtggatttgtgcaacatgtgggctttaagtgtgataactgtggcatagaacccatccagggtgttcggtggcattgccaggattgtcctccagaaatgtctttggatttctgtgattcttgttcagactgtctacatgaaacagatattcacaaggaagatcaccaattagaacctatttataggtcagagacattcttagacagagactactgtgtgtctcagggcaccagttacaattaccttgacccaaactactttccagcaaacagatgacatggaagagaacatcatttactagtcctcttcaacacatagcaatggtatcattgttaattatgtgcacagtttggaaagattctctgctttcccagaaatgacactcacagcatgagagcttcctgagtgttctcgtcaagtacagctctgcaccgttgtggctctagatcactgttcagcagctgaacattcctggtgagcaaaggtttccctggtgaatttttcaccactgcgttttaggtggtgatcttaaatgggtgagatggaacgagagcacacattaaagagagagtaaattccaaaggtttcaaagaacttggtcataaatatgataatgagaagacaaagtatttatattaaaacagtttagtagccttcagttttgtgaaaatagttttcagcacagaaactgacttctttagacaaagttttaaccaatgatggtgtttgcttctaggatatacactttaaaagaactcactgtcccagtggtggtcattgatggcctttagtaaattggagctgcttaatcatattgatatctaatttcttttaaccacaatgaattgtccttaattaccaacagtgaagcactacaggaggcaactgtggcattgcttccttaaccagctcatggtgtgtgaatgttataaaattgtcactcagatatattttttaaatgtaatgttatataagatgatcatgtgatgtgtacaaactatggtgaaaagtgccagtggtagtaactgtgtaaagtttctaattcacaacattaattcctttaaaatacacagccttctgcctctgtatttggagttgtcagtacaactcatcaaagaaaactgcctaatataaaaatcatatatatggtaataatttccctcttttgtagtctgcacaagatccataaaagattgtatttttattactatttaaacaagtgattaaatttagtctgcacagtgagcaagggttcacatgcattcttttatactgctggattttgttgtgcatcatttaaaacattttgtatgtttcttcttatctgtgtatacagtatgttcttgaatgatgttcatttgtcaggagaactgtgagaaataaactatgtggatactgtctgtttatattatagaa

SEQ ID NO: 204740 - DNA, 561 bp, Homo sapiens
  Payload ID: 20387
  Gene Name: zinc finger, ZZ-type containing 3
  ENST ID: ENST00000414381
  CDS Start-End: 453-561
atcgagcttcctgcagcggtggccacccgagcaagtgccgtggcgggggcggagagcggccacggcggcggcgcctccccaagtggcccgttgcgtccgaccccgcgtgaaagatatcaagttattctagtacaaccatataaataaataatacctgaagtctcagtgtaacatggacaattaacagtgatgacagataaatacagacgcatggggatcaaatactaggcaaaacgctttttaaaagaaaaatttaggaggttctagtattcttcatggctgaagctgagagagtctgaaaccctgatgcttaagctccattctagatcatagctccaactccttcaggatataaggaaaagagattatatttccacaatgatagatctttggttgtacaggtttcccaatgagtggatcatgatgaccgtattgtagggacttgccatagtatggctgcttcccgatctactcgtgttacaagatcaacagtggggttaaacggcttggatgaatctttttgtggtagaactttaaggaatcgtagcattgcgcatcctg

SEQ ID NO: 204741 - DNA, 603 bp, Homo sapiens
  Payload ID: 20387
  Gene Name: zinc finger, ZZ-type containing 3
  ENST ID: ENST00000433749
  CDS Start-End: 431-603
gattctcgcgggacctcgttggcagagcagttgtcctggatggcggagccttgggttccgggggcctgggacctgcaactctttctacaagatatcaagttattctagtacaaccatataaataaataatacctgaagtctcagtgtaacatggacaattaacagtgatgacagataaatacagacgcatggggatcaaatactaggcaaaacgctttttaaaagaaaaatttaggaggttctagtattcttcatggctgaagctgagagagtctgaaaccctgatgcttaagctccattctagatcatagctccaactccttcaggatataaggaaaagagattatatttccacaatgatagatctttggttgtacaggtttcccaatgagtggatcatgatgaccgtattgtagggacttgccatagtatggctgcttcccgatctactcgtgttacaagatcaacagtggggttaaacggcttggatgaatctttttgtggtagaactttaaggaatcgtagcattgcgcatcctgaagaaatctcttctaattctcaagtacgatcaagatcaccaaagaagagaccagagcctgtgcc

SEQ ID NO: 204742 - DNA, 11456 bp, Homo sapiens
  Payload ID: 20388
  Gene Name: zinc finger, ZZ-type with EF-hand domain 1
  Uniprot ID: O43149
  ENST ID: ENST00000381638
  CDS Start-End: 126-9011
aagccgcaggggccgccgtcgtctcctccgcgtccccgcccgccagctgctgtcggaggttgacaggtcgaggcggggaggcggcggcggcggctgcagagccaggcgcccaagacggagaccccatggggaacgctccgagtcacagcagtgaagacgaagcggcagctgccggtggcgagggctggggcccacaccaggactgggccgcggtctcgggcacgacccccggcccgggcgtcgcggctccagcgctaccacccgccgcggcgctgctggagccggccaggctgcgagaggctgctgcagcgttgctgcccacacccccctgcgagtcgctggtgtcgaggcatcgcggcgcgttgtttcgctggctggaagagcggctgggccgcggcgaagagtctgtcactctggagcagttccgggagctgctggaggctcgcggcgccggctgctctagcgagcagttcgaggaggcctttgcccagtttgatgctgagggtgatgggacagttgatgccgagaacatgttggaggccctcaagaattccagtggagctaatcttcagggggagctgagccacatcatcagacaactacaggcctgctctctggttccaggtttcacagacatattttcagagtcgaaggagggccttgatattcactcgtcaatgatactgcgcttcctgcaccgcaatcggctctccagcgcggtgatgccctacccgatgctggagcactgcaataacatgtgcaccatgcggtcttccgtcctgaaggagtctctggatcagctggtacaaaaggaaaaggaaagccctggagatctaactagaagtccagagatggataaactcaagtcagtagcaaagtgctatgcttatatagaaacatcctccaactcggcagacattgacaagatgacaaatggagaaacctcatcctactggcagtcagatggcagtgcctgttcacactggattcgtttaaaaatgaagccagatgttgtgcttaggcacctgtccattgcagtggctgccactgaccagagctacatgccacagcaggtgacagtagctgtagggaggaatgccagcgatcttcaggaagtccgagatgtgcacatccccagcaatgtcactggctatgtgacgctgctggaaaatgccaacgtcagtcagctctatgtccagattaacataaagcgttgtcttagcgatggctgcgacactagaattcatggtctcagggctgttggctttcagagagttaagaagtctggggtctcagtctcagatgcttctgcaatatggtattggtctctgctgacatctctggtgacggcttctatggagacaaatcccgcctttgtccagacagtgctgcacaatactcagaaggcgctgcggcacatgcctccactctctctctcaccaggatctacagatttctcaactttcctctcccctaatgtgctggaagaagtggacagtttcctcataaggataactagctgctgttctaccccagaggtagaactgactcttctggcttttgctctcgcaagaggaagtgttgccaaagtcatgagctctctatgcaccatcactgaccatctggacacgcagtatgatgcctcatccctcatcttgtccatggcgtcagtcagacagaacctgctcctcaaatatggtaaacctctccagttgactcttcaggcatgtgatgtcaaaggaaaagaagataagtctggacccgaaaacctccttgttgaaccgtggacaagggatggttttcttacggaaactggaaaaaccagagccagcactattttttctaccggaactgaatctgccttccaagttacacagataagaattatggttcgacgtggtggcattggtgcccagtgtgggttggtgtttgcctataactcatcttcagataaattttgtgcggaagaacacttcaaaaggtttgaaaaatatgacaaatggaagcttcaggagctcaggcaatttgtaaaaagcaggattggttgctcatctgatgaccttggagaggatgatcctattggctggtttgaactggaagaagaatgggatgaagcagatgtgaagctgcaacagtgcagagttgccaaatatttgatggtgaagttcctctgcacccgtcaggagtcagcagagcgcttgggagtgcaaggcttgaccatcagtgggtacctccggcctgcaagagcagaagcagaacagagcgtcacctgtgcacactgcagaaaggacacagaggagagtgtctgtggggccacgttgctcctcaggacccttcagtttatccagcagctcgcccatgacctggtgcagcagaaggaaagtggcttaaaatataaatcttttctggacttcgcgggtcttgatttgcagatcttctggaatttttacagtaaattaaagcaaaacccgagggaagaatgcgtctctgcccaaaccctgcttctgcagctactccagagctgcttctctgtgctgcagggagatgtactggctgcttctgaggaggaaaaggctccaatccaaagccctaaaggagtagaggctgccaaggagctgtacacacacttgtgtgatgtggtggacaaggtggatggagactctgtgcccatggagatactaaaacaagaagtcaggaatacccttctcaatggggctgccatcttctttcctaatcgacagacccgacggaaccatctcttcaccatgatgaatgtcaccgagcaggagcacaagcagtccctgcagctcactttccgttcactgtgcacgtattttagtgacaaggatccaggcggccttcttcttttacctgagaagaacgacctggccaagatgaacatcagtgaagtcctggcggtcatggacactctcgtctctgttgctgctcgagagtgcgagctgttaatgctcagtggggccccaggggaggtgggctctgtgctcttctccctgttctggtccgtccaaggcagcctgctatcctggtgctacctgcagctgaagagcacggactctggagccaaagatcttgccgtggaccttattgaaaaatatgtgggccagtttctggcaagcatgagagcgattttggaatcccttttctcacagtacagtggaaaaaccatagtagaaagattatgtaactcagtgttttcaatggcagctcgtcaactggttatcttcctgctggacttctgcactttagacatcccacactgcgtgctcttgagagagttcagcgtcctcacagaactcctgaagaagctctgtagtggccccgaaggaggactgaggaagctggatgttgagacctggcaacaggaacagcctgtggtgttacatacgtggacgaaggaatctgcccacaactatgaaaataattgccatgaggtatccgtctttgttagcccaggggcaacctattttgaagtggaattcgatgacaggtgtgaaactgaaaaaaggtatgattatctggaatttaccgacgctagaggtcggaaaacacgctatgacacaaaagttggcactgataaatggcccaagaaagtgaccttcaaggccggtcctcggttgcagttcctctttcactctgacagcagtcacaacgaatggggctacaaattcactgtcactgcctgtgggctgcccgatgttgccgtgtcttgggggctggatttacagctcctcgtctcccggctgatgggacgcctggcttcccagtgcatggcgctcaagtctgtgcgccagttaggaagtaacatggtagtacctcaggcaaaaatggcattagtcctaagctccccactgtggaaacctgtcttcaggcatcaggtttgtccagagttggaattagaagcaagctggcccactcacccacaccggaatagtaaggaggttaagaacattcctgacgacccctgccgccattttcttcttgattttgcccagtcagagcctgctcagaacttctgtgggccatattcagaacttttcaaaggattcatacaggcatgtagaaaacaggccccaaagacagatatagttgctggttccactattgatcaagctgtgaacgccacctttgctgctctggtgtatcgcactccagatttatatgagaagctgcaaaaatatgtcaacagtgggggcaaaatagccctgagtgaagagtttgcccaggtttattccttggcagatgggattcgaatatggatgttagagatgaagcagaagtccctgatgagcctggggaatgaagcagaagaaaaacatagttcagaagctactgaggtgaaccctgagagcctggcaaaagagtgcattgagaagagtcttctattactaaaatttctgcccacgggcataagttcaaaagaaagctgcgaaaagttggagactgctgatgaaaccagtcatctccagccactcaacaagcgtcagaggacaagctctgtggtggaagagcatttccaagcctcagtatctcccactgaagccgcaccccctgccacaggagaccagagtcctggcctgggcacccagccaaagctgccatccagcagtggccttcctgctgcagacgtgtcccctgccacagctgaagagcccttgtcaccttccacacccacccgccggcctcccttcacccgagggcgactccggctgctctcctttcgatccatggaggaggccagactggtgcccacagtgaaagagaaataccctgtgctgaaggacgtcatggacttcattaaggatcagtcgctctcgcacaggagtgttgtgaaggttctttccctgaggaaagcccaggcccagagcatcctggaagtcctgaagataactcagcactgtgcagaatcccttgggcagccccactgcttccatccacctttcatacttttcctgttggaacttctgacctgtcagaaagattttaccaattattttggacacctggaaggctgtggtgctgatctacacaaagaaattcgagacacttactatcaacttgttctgtttttggtcaaagcagttaaaggatttagtagcctaaatgacaggtccttgctccctgccttatcctgtgttcagacagccctgcttcatcttttggatatgggctgggaacccaatgatctcgccttctttgttgatattcagttaccagatctcctcatgaaaatgtcacaggagaatataagtgtccatgacagtgtgatcagccaatggagtgaagaagatgagcttgctgatgccaagcagaattcagaatggatggatgagtgtcaggatggcatgtttgaggcctggtatgaaaaaatagcccaggaagatccagagaagcagaggaaaatgcacatgttcattgctcgctactgtgacctgttaaatgtggacatctcttgtgatgggtgtgatgagattgccccctggcatcgataccgctgtctgcagtgcagcgacatggatctctgcaaaacttgcttcctaggtggggtgaagcctgagggccacggagacgaccatgaaatggtcaacatggagtttacctgtgaccactgccagggtttgatcataggccggaggatgaactgcaatgtttgcgatgactttgatctttgctacggatgctatgcagcgaagaaatactcctacggccatttgcctacccacagcatcacggcccacccaatggtaaccattcggatcagtgaccggcagaggctcatccagccatatatccataactactcctggctgctctttgctgccctggctctctatagcgcccacctggccagtgcagaggatgtggatggggagaagctggacccccagacgcgcagcagtgccaccaccctgcggagccagtgcatgcagctcgtcggggactgtctgatgaaggctcatcagggaaaaggccttaaagctctagctttgctgggtgtattgccagatggggactcgagcctagaagatcaggccctaccagtcactgtgcccaccggagcgtcagaggagcagctagagaagaaagctgtccagggtgctgagctgtcagaagcaggcaatggaaagagagctgttcatgaggaaatcagacctgtagatttcaagcagagaaataaggcagataaaggtgtatcattatcgaaggatccttcatgccagacccaaatttcagattcacctgcagatgctagcccacctacaggacttccagatgctgaagattcagaagtgtcatctcagaagcccatagaggaaaaagcagttactccaagccctgagcaagtgtttgctgagtgttcccagaagaggattttgggattactagcagccatgttacctcccttaaagtcgggccccacggttcccctgatagacctggagcacgtccttccactcatgtttcaggttgtcatctcaaacgcaggccacctgaatgaaacctaccatctcaccctgggtcttctcggccagttaattatccgtcttttgccagcagaggtagacgccgcagtgatcaaagtcctctcagccaaacacaacctgtttgctgcaggggacagttccattgtgccagatggctggaaaaccacccacctgctctttagcctgggagctgtgtgtctggacagccgggtgggcttggactgggcgtgctccatggcagagatcctgcggtcactcaacagtgccccactgtggcgtgatgtcattgccaccttcacagaccactgcatcaagcagctgccattccagctgaagcacaccaacatcttcaccctgctcgtgctggttggcttcccccaggtcctctgtgtgggaacccgctgcgtttatatggataatgccaatgaaccccataatgtgatcatcttgaagcactttactgagaagaacagggctgtgattgttgatgtcaaaactcggaagaggaaaacagtgaaggactaccagctggtccagaagggaggaggacaagagtgtggtgactctcgggcccagctgagccagtactcccagcactttgcctttatcgccagtcaccttctgcaaagcagcatggacagccattgtcccgaggcagtagaagcaacttgggtcctgtccctggccctgaaaggattgtataaaacactaaaggctcacggttttgaggagatccgtgctactttccttcagaccgatttgctgaagttgctggtgaaaaagtgcagcaaagggactggctttagtaaaacgtggctcctccgggacctggaaattttgtccatcatgctgtactcctcaaaaaaggagatcaacgctttggctgagcacggagacctagagctggatgagcgaggggaccgagaggaagaggtggaacggccagtcagcagccctggcgacccagagcagaaaaagctggacccccttgagggcctggatgagcccaccagaatatgtttcttgatggctcatgatgccctcaatgcccctctgcacattctccgggccatatacgaactgcagatgaaaaagaccgattatttcttcctggaggttcagaagaggtttgatggtgatgagctcaccacagatgaaaggatacggtccctggctcagcggtggcagcccagtaagagtctgaggctggaagaacagagcgccaaagctgtggatacagacatgattatcctgccatgcttgtcccggcctgcacgctgtgaccaagccactgctgaatcgaaccctgtgacccagaagctgatctccagcacagagagcgaactgcagcagagctatgccaagcagcgccgtagcaagagcgccgccctcctgcacaaggagctgaactgcaagagtaagagggctgtccgggactacctcttccgagtgaacgaggccacagctgtcctgtacgcccgccacgtgcttgcatccctgctcgccgagtggcctagccacgtgccagtgagcgaggacatcctggagctcagtggccctgcccatatgacctacattttggatatgttcatgcagctggaagaaaagcatgagtgggagaagatcctgcagaaagtgctccagggctgccgagaggacatgctggggaccatggccctggctgcatgccagttcatggaggagccaggaatggaggtgcaagtgagggagtcgaaacacccgtataacaacaacaccaacttcgaggataaagttcacattcctggtgccatctacctctcaatcaaattcgactctcagtgcaacacagaggagggctgtgacgagttagccatgtccagcagcagtgacttccagcaagaccgacacagcttcagcgggtctcagcagaagtggaaagattttgaacttccaggagacactctgtattaccgcttcacctccgacatgagcaacaccgagtggggctacagattcaccgtgacggccggacacctggggcggttccagacaggattcgagattttgaagcagatgttgtcagaagaaagggtcgtgcctcatctcccattggcaaaaatttgggaatggctggtgggcgtggcctgtcgccagactggccatcaacgattaaaagccatccacttacttctgaggattgtgcgatgctgcggccacagtgacctgtgtgaccttgcgctgttgaagcccctgtggcagctctttacccacatggagtacggcctgtttgaggacgtgacgcagcccggcatcctccttcccctgcatcgtgccctcactgagctcttcttcgtcaccgagaaccgtgcccaggagcttggcgtgctgcaggattacctgctggccctaaccacggacgaccaccttctccgctgtgcggcacaggctctgcagaacattgctgccatcagcctggccatcaactacccaaacaaggccacccgcctctggaatgtggagtgttagcccttggtggggcgtgcatgggactagttcatctgccacagggattttagagcagacatctaacctcattcaggaaaactcctgtagcgccagtgcccagctctccttgagctgaccactccagttaggatgccaagcagccacgtctccaagagctcccgtgcgtaggctggacacaagcacaggctgtagcatggtgaaaataagccaagcagtgcagaatgcctcagaaagggtgggcagggggcccttaagaaggttcagagaccagccttctccagaggctgtcactgcaggagccgtgggcctgggaagacttggaagcggcctctctcaactggtttctgtctccgtggagctggaactgcctgcacttgccttcagagggaggcacagtccacccagatccacctttccagcaagacccccagtggctgcccagcctgggagcacctctttgcttttcacaccaaaccaaaactggcgagagcccctcctagccaccagtgatccccaagcatccagtacagaaccaggcatcgagctagctccctgcacggccgcaccctcccagagaactccttgaggagaacaagtgcccttggggacagccggcaggcgcccctgtacgtctgctcatgcaccaggcagcacagccgcagttcctcagttgttgttttgacatatttcagtttccacctcacgtttttagagcagaaccacactgtctccctggaggggctcgagggcatgaccggggactgaccattctgtgaaaggagcagaatgtgaggagcacgcgtgagcttatgtaccgtgaagatgatcagaggatatcttattttaagagtaaaaacccacataattttatttctgcttgatagtcatggtagtctgtcatacccacctctgggactctgcgtggctgtttggctgtcacttgtagcaataacgacattagttctagtcagtgctgttttacatttttcttttgatgggtttagtcttgccctggagtgccgatgatgattctccctccagagccacgcttgggaacatgaagcaagtctggcgtgtgggctgcgtgccggccttagtgggacccgtggggttggagcatgcctttaggggcagtgtctgggccgaagcacgtcccaccacacagtgccagagccagagaaggggccccaccaccaaggccaagcttgaccaggtcagcattgccatggcccagtgtgccccgtggcctctgaagatccctctgtgcagggtctgcagggatctggattgcaagggcccaagtctgcaggtctggaagcatcttcctataagagcactttcgccttctgggtcaggactccaaggtgcagcgggcttcacagccctacaattgggttctcagctaagccccagagttctggtagaaccatcccggggcgggtggagggtgggatttaagggagacgggaacacatggggcaggtcctggaacttggtggcctgaggactgaggccattgccctggtggaaaggcctggcctggttcctgtggcttgggacctgaataggcaggtgctgctggctccgtagaaacccttttcccatcttttgctctttgccaaacctaccttgctttgggagctgcctgcaccaccccagagaaggccccaccttcttcatccctcagacccgaggaggcctcccagtaaggagtttcccaagaggggactcacaggaaacaagtcttagtgcttgggagggaggccccgctgcgtgctcagactcacagccaacctggaaggtagacgagatagcgccacccacgcccctccacaccccagactccgagtaaagcgggcggtagggccggagtcacctcccctatggcagtggccgccgctgtactccatcctcccgtcaggaagatcagctgtaaataaacgctgggctccccagagcacctgtccgcccactgcccttgctgttctgggatcttcgctgcagttcacgggaaacaagcctgagtccgctcgcacccgcggctgctctcccggctcggcccggccgcctctgtctccggccaccgggtggcgctgccgagccagagccgccgcgtcccggcgctttccaggagccccaggcccggaggaggcgaagcccgcagagcaaaggtggaaacacgtgcctacgctgtaaagaaatcctgttccagagcatacctgttgtacaaacagacactgttcctaacgagaggagtgacgtattttcatcaccgtttttaatttgttttcttacgggtttacgattttgaatttttcttatttggttgaaagaattttgattctatcagcctgagtgagttcagcctgtaaaaaggatgttaagctgtgggtaaaatatgcaaacgaaaagaaatatattgtacaaattctatataataaggta

SEQ ID NO: 204743 - DNA, 2667 bp, Homo sapiens
  Payload ID: 20388
  Gene Name: zinc finger, ZZ-type with EF-hand domain 1
  ENST ID: ENST00000573183
  CDS Start-End: 1-2438
tacttttcctgttggaacttctgacctgtcagaaagattttaccaattattttggacacctggaaggctgtggtgctgatctacacaaagaaattcgagacacttactatcaacttgttctgtttttggtcaaagcagttaaaggatttagtagcctaaatgacaggtccttgctccctgccttatcctgtgttcagacagccctgcttcatcttttggatatgggctgggaacccaatgatctcgccttctttgttgatattcagttaccagatctcctcatgaaaatgtcacaggagaatataagtgtccatgacagtgtgatcagccaatggagtgaagaagatgagcttgctgatgccaagcagaattcagaatggatggatgagtgtcaggatggcatgtttgaggcctggtatgaaaaaatagcccaggaagatccagagaagcagaggaaaatgcacatgttcattgctcgctactgtgacctgttaaatgtggacatctcttgtgatgggtgtgatgagattgccccctggcatcgataccgctgtctgcagtgcagcgacatggatctctgcaaaacttgcttcctaggtggggtgaagcctgagggccacggagacgaccatgaaatggtcaacatggagtttacctgtgaccactgccagggtttgatcataggccggaggatgaactgcaatgtttgcgatgactttgatctttgctacggatgctatgcagcgaagaaatactcctacggccatttgcctacccacagcatcacggcccacccaatggtaaccattcggatcagtgaccggcagaggctcatccagccatatatccataactactcctggctgctctttgctgccctggctctctatagcgcccacctggccagtgcagaggatgtggatggggagaagctggacccccagacgcgcagcagtgccaccaccctgcggagccagtgcatgcagctcgtcggggactgtctgatgaaggctcatcagggaaaaggccttaaagctctagctttgctgggtgtattgccagatggggactcgagcctagaagatcaggccctaccagtcactgtgcccaccggagcgtcagaggagcagctagagaagaaagctgtccagggtgctgagctgtcagaagcaggcaatggaaagagagctgttcatgaggaaatcagacctgtagatttcaagcagagaaataaggcagataaaggtgtatcattatcgaaggatccttcatgccagacccaaatttcagattcacctgcagatgctagcccacctacaggacttccagatgctgaagattcagaagtgtcatctcagaagcccatagaggaaaaagcagttactccaagccctgagcaagtgtttgctgagtgttcccagaagaggattttgggattactagcagccatgttacctcccttaaagtcgggccccacggttcccctgatagacctggagcacgtccttccactcatgtttcaggttgtcatctcaaacgcaggccacctgaatgaaacctaccatctcaccctgggtcttctcggccagttaattatccgtcttttgccagcagaggtagacgccgcagtgatcaaagtcctctcagccaaacacaacctgtttgctgcaggggacagttccattgtgccagatggctggaaaaccacccacctgctctttagcctgggagctgtgtgtctggacagccgggtgggcttggactgggcgtgctccatggcagagatcctgcggtcactcaacagtgccccactgtggcgtgatgtcattgccaccttcacagaccactgcatcaagcagctgccattccagctgaagcacaccaacatcttcaccctgctcgtgctggttggcttcccccaggtcctctgtgtgggaacccgctgcgtttatatggataatgccaatgaaccccataatgtgatcatcttgaagcactttactgagaagaacagggctgtgattgttgatgtcaaaactcggaagaggaaaacagtgaaggactaccagctggtccagaagggaggaggacaagagtgtggtgactctcgggcccagctgagccagtactcccagcactttgcctttatcgccagtcaccttctgcaaagcagcatggacagccattgtcccgaggcagtagaagcaacttgggtcctgtccctggccctgaaaggattgtataaaacactaaaggctcacggttttgaggagatccgtgctactttccttcagaccgatttgctgaagttgctggtgaaaaagtgcagcaaagggactggctttagtaaaacgtggctcctccgggacctggaagtaagagacgagagggactcctgctcctctttcctggtgcagatgtgctggcctaggagttagaagcatcaccgagttccagctgcttctgccctgtgcacactcctttagtacagtgttgaaaactcccttgcttctgtattccctgttggaaatagggattatgacacctgtctacccctgtcagggaaaatgaatttaatgtttgttcaaagaacagtggaagagaagcattttatggaaacacatgattaaccattatatcatggtaataaagtatacccttgaattc

SEQ ID NO: 204744 - DNA, 2831 bp, Homo sapiens
  Payload ID: 20388
  Gene Name: zinc finger, ZZ-type with EF-hand domain 1
  ENST ID: ENST00000571436
  CDS Start-End: 1-658
gcccttgtcaccttccacacccacccgccggcctcccttcacccgagggcgactccggctgctctcctttcgatccatggaggaggccagactggtgcccacagtgaaagagaaataccctgtgctgaaggacgtcatggacttcattaaggatcagtcgctctcgcacaggagtgttgtgaaggttctttccctgaggaaagcccaggcccagagcatcctggaagtcctgaagataactcagcactgtgcagaatcccttgggcagccccactgcttccatccacctttcatacttttcctgttggaacttctgacctgtcagaaagattttaccaattattttggacacctggaaggctgtggtgctgatctacacaaagaaattcgagacacttactatcaacttgttctgtttttggtcaaagcagttaaaggatttagtagcctaaatgacaggtccttgctccctgccttatcctgtgttcagacagccctgcttcatcttttggatatgggctgggaacccaatgatctcgccttctttgttgatattcagttaccagatctcctcatgaaaatgtcacaggagaatataagtgtccatgacagtgtgatcagatgcacatgttcattgctcgctactgtgacctgttaaatgtggacatctcttgtgatgggtgtgatgagattgccccctggcatcgataccgctgtctgcagtgcagcgacatggatctctgcaaaacttgcttcctaggtggggtgaagcctgagggccacggagacgaccatgaaatggtcaacatggagtttacctgtgaccactgccagggtttgatcataggccggaggatgaactgcaatgtttgcgatgactttgatctttgctacggatgctatgcagcgaagaaatactcctacggccatttgcctacccacagcatcacggcccacccaatggtaaccattcggatcagtgaccggcagaggctcatccagccatatatccataactactcctggctgctctttgctgccctggctctctatagcgcccacctggccagtgcagaggatgtggatggggagaagctggacccccagacgcgcagcagtgccaccaccctgcggagccagtgcatgcagctcgtcggggactgtctgatgaaggctcatcagggaaaaggccttaaagctctagctttgctgggtgtattgccagatggggactcgagcctagaagatcaggccctaccagtcactgtgcccaccggagcgtcagaggagcagctagagaagaaagctgtccagggtgctgagctgtcagaagcaggcaatggaaagagagctgttcatgaggaaatcagacctgtagatttcaagcagagaaataaggcagataaaggtgtatcattatcgaaggatccttcatgccagacccaaatttcagattcacctgcagatgctagcccacctacaggacttccagatgctgaagattcagaagtgtcatctcagaagcccatagaggaaaaagcagttactccaagccctgagcaagtgtttgctgagtgttcccagaagaggattttgggattactagcagccatgttacctcccttaaagtcgggccccacggttcccctgatagacctggagcacgtccttccactcatgtttcaggttgtcatctcaaacgcaggccacctgaatgaaacctaccatctcaccctgggtcttctcggccagttaattatccgtcttttgccagcagaggtagacgccgcagtgatcaaagtcctctcagccaaacacaacctgtttgctgcaggggacagttccattgtgccagatggctggaaaaccacccacctgctctttagcctgggagctgtgtgtctggacagccgggtgggcttggactgggcgtgctccatggcagagatcctgcggtcactcaacagtgccccactgtggcgtgatgtcattgccaccttcacagaccactgcatcaagcagctgccattccagctgaagcacaccaacatcttcaccctgctcgtgctggttggcttcccccaggtcctctgtgtgggaacccgctgcgtttatatggataatgccaatgaaccccataatgtgatcatcttgaagcactttactgagaagaacagggctgtgattgttgatgtcaaaactcggaagaggaaaacagtgaaggactaccagctggtccagaagggaggaggacaagagtgtggtgactctcgggcccagctgagccagtactcccagcactttgcctttatcgccagtcaccttctgcaaagcagcatggacagccattgtcccgaggcagtagaagcaacttgggtcctgtccctggccctgaaaggattgtataaaacactaaaggctcacggttttgaggagatccgtgctactttccttcagaccgatttgctgaagttgctggtgaaaaagtgcagcaaagggactggctttagtaaaacgtggctcctccgggacctggaagtaagagacgagagggactcctgctcctctttcctggtgcagatgtgctggcctaggagttagaagcatcaccgagttccagctgcttctgccctgtgcacactcctttagtacagtgttgaaaactcccttgcttctgtattccctgttggaaatagggattatgacacctgtctacccctgtcagggaaaatgaatttaatgtttgttcaaagaacagtggaagagaagcattttatggaaacacatgattaaccattatatcatggtaataaagtatacccttgaattca

SEQ ID NO: 204745 - DNA, 558 bp, Homo sapiens
  Payload ID: 20388
  Gene Name: zinc finger, ZZ-type with EF-hand domain 1
  ENST ID: ENST00000572831
  CDS Start-End: 1-200
ttgcatccctgctcgccgagtggcctagccacgtgccagtgagcgaggacatcctggagctcagtggccctgcccatatgacctacattttggatatgttcatgcagctggaagaaaagcatgagtgggagaaggccaatccacctgcttggctggggactccttcaaggaccaggaccctttatgattggttcagttagttctttcagaccacctctaagtagcatcattctgaaaggactgcagtgtcctgattgacaccaagagcctggtcaaatcctgcagaaagtgctccagggctgccgagaggacatgctggggaccatggccctggctgcatgccagttcatggaggagccaggaatggaggtgcaagtgagggagtcgaaacacccgtataacaacaacaccaacttcgaggataaagttcacattcctggtgccatctacctctcaatcaaattcgactctcagtgcaacacagaggagggctgtgacgagttagccatgtccagcagcagtgacttccagcaagaccgacacagcttcagcgggtct

SEQ ID NO: 204746 - DNA, 689 bp, Homo sapiens
  Payload ID: 20388
  Gene Name: zinc finger, ZZ-type with EF-hand domain 1
  ENST ID: ENST00000572699
  CDS Start-End: 1-447
aggtatgattatctggaatttaccgacgctagaggtcggaaaacacgctatgacacaaaagttggcactgataaatggcccaagaaagtgaccttcaaggccggtcctcggttgcagttcctctttcactctgacagcagtcacaacgaatggggctacaaattcactgtcactgcctgtgggctgcccgatgttgccgtgtcttgggggctggatttacagctcctcgtctcccggctgatgggacgcctggcttcccagtgcatggcgctcaagtctgtgcgccagttaggaagtaacatggtagtacctcaggcaaaaatggcattagtcctaagctccccactgtggaaacctgtcttcaggcatcaggtttgtccagagttggaattagaagcaagctggcccactcacccacaccggaatagtaaggagggtgaagtctaactcctcaatgtgacagtcaaggctctctgcagtctcctttcaccttacctatctgactctagttcccatcactccccagctgagacttcaggccaggttaagaacattcctgacgacccctgccgccattttcttcttgattttgcccagtcagagcctgctcagaacttctgtgggccatattcagaacttttcaaaggattcatacaggcatgtagaaaacaggccccaaagacagatat

SEQ ID NO: 204747 - DNA, 5200 bp, Homo sapiens
  Payload ID: 20389
  Gene Name: zinc fingers and homeoboxes 1
  Uniprot ID: Q9UKY1
  ENST ID: ENST00000297857
  CDS Start-End: 706-3327
gacgcgcgcgcgggagggccccgccttggccggctctctcccttccccctccgcccccggacggccgctggggcgcgcgcctctcctcgcacccccaccctgagtccccacactccgcggggccaccgagctgctgaggcccctttgcgggcccgccgagcggttccgggtttagggttcacaggtcagagttgactccctgaaaagtgcagccggtttgaaatgcaagatggcggcggcgtggcgctgagaggcgcggcggcccctgcaggtagtggcgcgagccggctccgcgaccagcgggcccggagactctgggctgcgggtgggaactggagcgcagagtccgcggccggcacgggaaaggagaagacagactgctgctttggacctgttggtaatgatggcctgagctaaacatctaactagaagggatacccttccatttcaaagaacagaatgctaaggaagctgtggcaagtgattggagttgtgcttcaaaaatttcagaaattcagcagtattttatctgccaacaataagctctttacttgattgcaccatgagaaagctgctaatgagacttgttgagcacaaaaatggacttgaagaaccaaaagccattgttttcaaatgaagaacactgaacagttttaagcctcgatgctttttaatcaccactgagcttttcctcataacatcagaatggcaagcaggcgaaaatcaacaacaccttgcatggtccttgccagtgaacaagatccagaccttgagttgatatcagatttggatgaaggtcctcctgtgcttacacctgtagaaaacaccagagcagagagtatctcaagtgatgaagaggttcatgaatctgtggattcagacaatcagcaaaataaaaaagttgaaggtggatatgaatgtaaatattgtacttttcaaactccagatctaaatatgtttacttttcatgtggattcggaacatcccaatgtagtgctaaattcatcctatgtttgtgtcgaatgcaattttcttaccaaaaggtatgatgcactttctgagcataatctgaaatatcacccaggagaagagaattttaagttgactatggtgaaacgtaataaccagacaatctttgaacaaacaataaatgatctgacttttgatggtagttttgttaaagaggagaatgcagagcaagcagaatctacagaagtttcttcttcgggaatatctatcagtaaaactcctatcatgaaaatgatgaaaaataaagtggaaaataaacggattgcagttcatcataactcagttgaggacgttcctgaagagaaagagaatgaaatcaaaccagaccgtgaagaaattgtagaaaatccaagttcttcagcttctgaatctaatacaagtacttccattgtaaacagaatacatccaagtactgccagcacggtagtgacaccagcagcagttcttcctggattggcacaggtgataactgctgtatctgctcagcagaattctaatttgattcccaaagtcttaatccctgttaatagcattcccacctacaatgctgcattggataacaatccccttttacttaacacctacaacaagttcccttacccaacaatgtcagaaattacagttctttctgctcaagcaaaatatacagaggaacagatcaagatatggttttcagcccaacgtttaaaacatggtgttagttggactcccgaggaagtagaggaggcaagaaggaaacaattcaatggaacagtgcatactgtacctcagaccataactgttattcctacacacatttccacagggagtaatggtttaccatctattttacagacatgccaaatagttggtcagcctggtctggtccttactcaagtggctggaacaaacaccttgccagttacagcacctatagccttgacagtggcaggcgttccaagtcaaaataatatacagaaaagtcaggtacctgctgctcagcctactgcagaaacaaagccagcaacagcagcagttccaacttctcaaagtgtcaaacatgaaactgcattggtaaaccctgattcatttggcattcgggcaaaaaagacaaaagagcaactggcagaattaaaagttagctaccttaaaaatcagtttccccatgattcagaaattatcagacttatgaaaataacaggcctgacgaaaggagagattaaaaaatggtttagtgacacaaggtacaaccagagaaattcaaagagtaatcagtgcttacatctcaacaatgattcctctaccaccattattatagactccagtgatgaaaccacggaatccccaactgttggtactgcacagcctaagcaatcctggaatccttttcctgactttactccccaaaagtttaaagagaaaactgcagagcagcttcgtgtccttcaggcaagttttctcaacagctctgtacttacagatgaagaattaaataggttaagggcacaaaccaaacttaccagaagagaaatcgatgcttggtttacagagaagaagaaatcaaaagctttaaaggaagagaaaatggaaatagatgaaagtaatgcaggtagttccaaagaagaagctggagaaacttctcctgcagatgaatctggtgcacctaagtcagggagtacaggcaagatatgtaaaaaaacacctgagcagctgcacatgcttaagagtgcatttgtccggacacagtggccatcaccagaagagtatgacaagttggccaaagaaagcgggcttgctagaacagacatagttagttggtttggggacacccgttatgcttggaagaatggaaacttgaaatggtactactactatcagagcgccaattcaagtagtatgaatggtctgtcttcccttaggaaaagagggagagggagacccaaaggacggggaagaggaagaccgcgtgggcggcctagaggaagcaaaagaattaacaactgggacaggggaccatcactcataaaatttaaaactggaactgcaatacttaaggattattacctgaagcacaagtttcttaatgagcaagaccttgatgaacttgttaacaaatcacatatgggctatgagcaggtcagagagtggtttgcagaaagacagagaagatcagaattaggtatagaattatttgaggaaaatgaggaggaagatgaagttattgatgaccaggaagaggatgaagaagaaacagatgatagtgacacttgggaacctccacgacatgtgaaacggaagctgtctaaatcagatgactgaaatctgcctaaaacgttgaaggagaatcaattcttcaactcaagatgtctgatttactgtgaatttgcccaatctttgatgacattgaaaacgttttggggcatacacactcaaaaagcaggatccaatacccaaaagaaatggaacttaatgttgtgccaaagttaaactactgcagttggtggaagttctgcaatgtaaatagaacactaattaaaaaacaacttgtaaaaatgcaatttaaattttaatacagtacatttttcttctaatatgatggagacattctgaatcttagactttctgagggggtttaatgaccactagagcttgtcctcatattcagtccagtttaatactgtatgtctagtaagatgggctatatattgcctctattctttgagatgtgattaagcttagaactttgaccaaaaattttacagtaaaaattgttagaaatgggtaaaaaaaaaaaaaaaaaaaaaaccctgatttattactatgtcttatttatcagaccctgcactaagattaaaagttgtgcatgggcttatacaatttcaaatgtaaaaacagcctatttatatatgttgaaacaataagattttatggtttcactggcccttaataattggatccttcattaaacacatccatgaataccactgtttctactgttacttgttccattagaagctgatttgctttttattaaactgcaggaaattaattctgaagaaggaaaagaaactgacatggtaatttggatagggtgaagctttgaaataaatactgcaccaaaaatgtgaaaaagaatcacgtagtaaatgtatacttagtgttttcttacaatcgtggaaatcagaaatgtttatacaggtgtcagatcagaatttttaagagttatctttcagtgaaattttataacagtttcagtgaatagagaaaaaattctgaactgatcataatgagttaaaagttagcttttcacttatgaatcatgggagtgttaactgttaactcttgccgtatcaggagactgaaagttcatactaatttacaaactttgtaaagactggtgctgttcattcatattgggaagaaccctttcttttgtgaccataggaccatttttcaaaatgcgctttcttcgtagaagaaatgttcagtttaattagctttggattttaacatgtttttctgaatgaccagatgtaggcttagccagtttattttctctaatttaatggataataaatattaagctcttggttaaatgtttttcagccattgaaaatgttatgaaaaagccttgaatatgcatgctgctttcatttttataaactttttattttttaactatagctttattagtaattccaaaatgctgcaatgtagctgatttcctcactcagacagctggctttgtgggtggcttttttcatactactgttaacttttttaaaaaagaagcaatgtaaagaccgtaatgcactaagctttttttttttcttttacacgtttaaaaacttcttaaagcactctgtaatataatgattaaattgctcccttttataaacattgctaatgtggtctgagttttgtttgacaataattttaatgttctcaaaatttgaaatgtcaagtattagaaatgaagcctttgaatatagttgtttcccttgcaatatgttaactctgtgtagctgtatataactattaatttccctcatctcttttataggcctgataaaactcttctctgacgtttgctagcttttaaatatatttatttgacagagcaaaagaaccctcttctggttgattgtgaccttgaatacaaaataaaagtagtgattagtagtttacagtg

SEQ ID NO: 204748 - DNA, 5108 bp, Homo sapiens
  Payload ID: 20389
  Gene Name: zinc fingers and homeoboxes 1
  Uniprot ID: Q9UKY1
  ENST ID: ENST00000395571
  CDS Start-End: 619-3240
gcgcggaggacgcgcgcgcgggagggccccgccttggccggctctctcccttccccctccgcccccggacggccgctggggcgcgcgcctctcctcgcacccccaccctgagtccccacactccgcggggccaccgagctgctgaggcccctttgcgggcccgccgagcggttccgggtttagggttcacaggtcagagttgactccctgaaaagtgcagccggtttgaaatgcaagatggcggcggcgtggcgctgagaggcgcggcggcccctgcaggagaagacagactgctgctttggacctgttggtaatgatggcctgagctaaacatctaactagaagggatacccttccatttcaaagaacagaatgctaaggaagctgtggcaagtgattggagttgtgcttcaaaaatttcagaaattcagcagtattttatctgccaacaataagctctttacttgattgcaccatgagaaagctgctaatgagacttgttgagcacaaaaatggacttgaagaaccaaaagccattgttttcaaatgaagaacactgaacagttttaagcctcgatgctttttaatcaccactgagcttttcctcataacatcagaatggcaagcaggcgaaaatcaacaacaccttgcatggtccttgccagtgaacaagatccagaccttgagttgatatcagatttggatgaaggtcctcctgtgcttacacctgtagaaaacaccagagcagagagtatctcaagtgatgaagaggttcatgaatctgtggattcagacaatcagcaaaataaaaaagttgaaggtggatatgaatgtaaatattgtacttttcaaactccagatctaaatatgtttacttttcatgtggattcggaacatcccaatgtagtgctaaattcatcctatgtttgtgtcgaatgcaattttcttaccaaaaggtatgatgcactttctgagcataatctgaaatatcacccaggagaagagaattttaagttgactatggtgaaacgtaataaccagacaatctttgaacaaacaataaatgatctgacttttgatggtagttttgttaaagaggagaatgcagagcaagcagaatctacagaagtttcttcttcgggaatatctatcagtaaaactcctatcatgaaaatgatgaaaaataaagtggaaaataaacggattgcagttcatcataactcagttgaggacgttcctgaagagaaagagaatgaaatcaaaccagaccgtgaagaaattgtagaaaatccaagttcttcagcttctgaatctaatacaagtacttccattgtaaacagaatacatccaagtactgccagcacggtagtgacaccagcagcagttcttcctggattggcacaggtgataactgctgtatctgctcagcagaattctaatttgattcccaaagtcttaatccctgttaatagcattcccacctacaatgctgcattggataacaatccccttttacttaacacctacaacaagttcccttacccaacaatgtcagaaattacagttctttctgctcaagcaaaatatacagaggaacagatcaagatatggttttcagcccaacgtttaaaacatggtgttagttggactcccgaggaagtagaggaggcaagaaggaaacaattcaatggaacagtgcatactgtacctcagaccataactgttattcctacacacatttccacagggagtaatggtttaccatctattttacagacatgccaaatagttggtcagcctggtctggtccttactcaagtggctggaacaaacaccttgccagttacagcacctatagccttgacagtggcaggcgttccaagtcaaaataatatacagaaaagtcaggtacctgctgctcagcctactgcagaaacaaagccagcaacagcagcagttccaacttctcaaagtgtcaaacatgaaactgcattggtaaaccctgattcatttggcattcgggcaaaaaagacaaaagagcaactggcagaattaaaagttagctaccttaaaaatcagtttccccatgattcagaaattatcagacttatgaaaataacaggcctgacgaaaggagagattaaaaaatggtttagtgacacaaggtacaaccagagaaattcaaagagtaatcagtgcttacatctcaacaatgattcctctaccaccattattatagactccagtgatgaaaccacggaatccccaactgttggtactgcacagcctaagcaatcctggaatccttttcctgactttactccccaaaagtttaaagagaaaactgcagagcagcttcgtgtccttcaggcaagttttctcaacagctctgtacttacagatgaagaattaaataggttaagggcacaaaccaaacttaccagaagagaaatcgatgcttggtttacagagaagaagaaatcaaaagctttaaaggaagagaaaatggaaatagatgaaagtaatgcaggtagttccaaagaagaagctggagaaacttctcctgcagatgaatctggtgcacctaagtcagggagtacaggcaagatatgtaaaaaaacacctgagcagctgcacatgcttaagagtgcatttgtccggacacagtggccatcaccagaagagtatgacaagttggccaaagaaagcgggcttgctagaacagacatagttagttggtttggggacacccgttatgcttggaagaatggaaacttgaaatggtactactactatcagagcgccaattcaagtagtatgaatggtctgtcttcccttaggaaaagagggagagggagacccaaaggacggggaagaggaagaccgcgtgggcggcctagaggaagcaaaagaattaacaactgggacaggggaccatcactcataaaatttaaaactggaactgcaatacttaaggattattacctgaagcacaagtttcttaatgagcaagaccttgatgaacttgttaacaaatcacatatgggctatgagcaggtcagagagtggtttgcagaaagacagagaagatcagaattaggtatagaattatttgaggaaaatgaggaggaagatgaagttattgatgaccaggaagaggatgaagaagaaacagatgatagtgacacttgggaacctccacgacatgtgaaacggaagctgtctaaatcagatgactgaaatctgcctaaaacgttgaaggagaatcaattcttcaactcaagatgtctgatttactgtgaatttgcccaatctttgatgacattgaaaacgttttggggcatacacactcaaaaagcaggatccaatacccaaaagaaatggaacttaatgttgtgccaaagttaaactactgcagttggtggaagttctgcaatgtaaatagaacactaattaaaaaacaacttgtaaaaatgcaatttaaattttaatacagtacatttttcttctaatatgatggagacattctgaatcttagactttctgagggggtttaatgaccactagagcttgtcctcatattcagtccagtttaatactgtatgtctagtaagatgggctatatattgcctctattctttgagatgtgattaagcttagaactttgaccaaaaattttacagtaaaaattgttagaaatgggtaaaaaaaaaaaaaaaaaaaaaaccctgatttattactatgtcttatttatcagaccctgcactaagattaaaagttgtgcatgggcttatacaatttcaaatgtaaaaacagcctatttatatatgttgaaacaataagattttatggtttcactggcccttaataattggatccttcattaaacacatccatgaataccactgtttctactgttacttgttccattagaagctgatttgctttttattaaactgcaggaaattaattctgaagaaggaaaagaaactgacatggtaatttggatagggtgaagctttgaaataaatactgcaccaaaaatgtgaaaaagaatcacgtagtaaatgtatacttagtgttttcttacaatcgtggaaatcagaaatgtttatacaggtgtcagatcagaatttttaagagttatctttcagtgaaattttataacagtttcagtgaatagagaaaaaattctgaactgatcataatgagttaaaagttagcttttcacttatgaatcatgggagtgttaactgttaactcttgccgtatcaggagactgaaagttcatactaatttacaaactttgtaaagactggtgctgttcattcatattgggaagaaccctttcttttgtgaccataggaccatttttcaaaatgcgctttcttcgtagaagaaatgttcagtttaattagctttggattttaacatgtttttctgaatgaccagatgtaggcttagccagtttattttctctaatttaatggataataaatattaagctcttggttaaatgtttttcagccattgaaaatgttatgaaaaagccttgaatatgcatgctgctttcatttttataaactttttattttttaactatagctttattagtaattccaaaatgctgcaatgtagctgatttcctcactcagacagctggctttgtgggtggcttttttcatactactgttaacttttttaaaaaagaagcaatgtaaagaccgtaatgcactaagctttttttttttcttttacacgtttaaaaacttcttaaagcactctgtaatataatgattaaattgctcccttttataaacattgctaatgtggtctgagttttgtttgacaataattttaatgttctcaaaatttgaaatgtcaagtattagaaatgaagcctttgaatatagttgtttcccttgcaatatgttaactctgtgtagctgtatataactattaatttccctcatctcttttataggcctgataaaactcttctctgacgtttgctagcttttaaatatatttatttgacagagcaaaagaaccctcttctggttgattgtgaccttgaatacaaaataaaagtagtgattagtagttta

SEQ ID NO: 204749 - DNA, 3357 bp, Homo sapiens
  Payload ID: 20389
  Gene Name: zinc fingers and homeoboxes 1
  Uniprot ID: Q9UKY1
  ENST ID: ENST00000522655
  CDS Start-End: 542-3163
aaaaaatcagacttccacttgaagcaattgcatcttttaggattaatgtggctcagcggagctctgctgtgcttttaggattactgtggctcagcggagctctgcacaaagggtccgcgactgggatgggggtggggagtgaacgtcaaggggcccaggagcgctcgagcgtccaaggcccggcgtgtggagcagctggagggagaagacagactgctgctttggacctgttggtaatgatggcctgagctaaacatctaactagaagggatacccttccatttcaaagaacagaatgctaaggaagctgtggcaagtgattggagttgtgcttcaaaaatttcagaaattcagcagtattttatctgccaacaataagctctttacttgattgcaccatgagaaagctgctaatgagacttgttgagcacaaaaatggacttgaagaaccaaaagccattgttttcaaatgaagaacactgaacagttttaagcctcgatgctttttaatcaccactgagcttttcctcataacatcagaatggcaagcaggcgaaaatcaacaacaccttgcatggtccttgccagtgaacaagatccagaccttgagttgatatcagatttggatgaaggtcctcctgtgcttacacctgtagaaaacaccagagcagagagtatctcaagtgatgaagaggttcatgaatctgtggattcagacaatcagcaaaataaaaaagttgaaggtggatatgaatgtaaatattgtacttttcaaactccagatctaaatatgtttacttttcatgtggattcggaacatcccaatgtagtgctaaattcatcctatgtttgtgtcgaatgcaattttcttaccaaaaggtatgatgcactttctgagcataatctgaaatatcacccaggagaagagaattttaagttgactatggtgaaacgtaataaccagacaatctttgaacaaacaataaatgatctgacttttgatggtagttttgttaaagaggagaatgcagagcaagcagaatctacagaagtttcttcttcgggaatatctatcagtaaaactcctatcatgaaaatgatgaaaaataaagtggaaaataaacggattgcagttcatcataactcagttgaggacgttcctgaagagaaagagaatgaaatcaaaccagaccgtgaagaaattgtagaaaatccaagttcttcagcttctgaatctaatacaagtacttccattgtaaacagaatacatccaagtactgccagcacggtagtgacaccagcagcagttcttcctggattggcacaggtgataactgctgtatctgctcagcagaattctaatttgattcccaaagtcttaatccctgttaatagcattcccacctacaatgctgcattggataacaatccccttttacttaacacctacaacaagttcccttacccaacaatgtcagaaattacagttctttctgctcaagcaaaatatacagaggaacagatcaagatatggttttcagcccaacgtttaaaacatggtgttagttggactcccgaggaagtagaggaggcaagaaggaaacaattcaatggaacagtgcatactgtacctcagaccataactgttattcctacacacatttccacagggagtaatggtttaccatctattttacagacatgccaaatagttggtcagcctggtctggtccttactcaagtggctggaacaaacaccttgccagttacagcacctatagccttgacagtggcaggcgttccaagtcaaaataatatacagaaaagtcaggtacctgctgctcagcctactgcagaaacaaagccagcaacagcagcagttccaacttctcaaagtgtcaaacatgaaactgcattggtaaaccctgattcatttggcattcgggcaaaaaagacaaaagagcaactggcagaattaaaagttagctaccttaaaaatcagtttccccatgattcagaaattatcagacttatgaaaataacaggcctgacgaaaggagagattaaaaaatggtttagtgacacaaggtacaaccagagaaattcaaagagtaatcagtgcttacatctcaacaatgattcctctaccaccattattatagactccagtgatgaaaccacggaatccccaactgttggtactgcacagcctaagcaatcctggaatccttttcctgactttactccccaaaagtttaaagagaaaactgcagagcagcttcgtgtccttcaggcaagttttctcaacagctctgtacttacagatgaagaattaaataggttaagggcacaaaccaaacttaccagaagagaaatcgatgcttggtttacagagaagaagaaatcaaaagctttaaaggaagagaaaatggaaatagatgaaagtaatgcaggtagttccaaagaagaagctggagaaacttctcctgcagatgaatctggtgcacctaagtcagggagtacaggcaagatatgtaaaaaaacacctgagcagctgcacatgcttaagagtgcatttgtccggacacagtggccatcaccagaagagtatgacaagttggccaaagaaagcgggcttgctagaacagacatagttagttggtttggggacacccgttatgcttggaagaatggaaacttgaaatggtactactactatcagagcgccaattcaagtagtatgaatggtctgtcttcccttaggaaaagagggagagggagacccaaaggacggggaagaggaagaccgcgtgggcggcctagaggaagcaaaagaattaacaactgggacaggggaccatcactcataaaatttaaaactggaactgcaatacttaaggattattacctgaagcacaagtttcttaatgagcaagaccttgatgaacttgttaacaaatcacatatgggctatgagcaggtcagagagtggtttgcagaaagacagagaagatcagaattaggtatagaattatttgaggaaaatgaggaggaagatgaagttattgatgaccaggaagaggatgaagaagaaacagatgatagtgacacttgggaacctccacgacatgtgaaacggaagctgtctaaatcagatgactgaaatctgcctaaaacgttgaaggagaatcaattcttcaactcaagatgtctgatttactgtgaatttgcccaatctttgatgacattgaaaacgttttggggcatacacactcaaaaagcaggatccaatacccaaaagaaatggaacttaatgttgtgccaaagttaaactactgcagttggtggaagttctgc

SEQ ID NO: 204750 - DNA, 1014 bp, Homo sapiens
  Payload ID: 20389
  Gene Name: zinc fingers and homeoboxes 1
  ENST ID: ENST00000602651
  CDS Start-End: 1-118
tgaggaggaagatgaagttattgatgaccaggaagaggatgaagaagaaacagatgatagtgacacttgggaacctccacgacatgtgaaacggaagctgtctaaatcagatgactgaaatgtaagttaagaaaatttttaatctgcgtatatgttcatcaaccacatacattttgaacagtcaccttgttgtatcagtcatcttcatttttgatattttctgaagtagtttttcttttccctaataagactaggtaccactagtatagctaagagataaatgattatcatgtgtagttttattattattatgtagagtttaatgtcttaattattatttttcatatgaattgggttttttttactttgttttgaaggaaagttacccaatctctatgaagggagactggcaggcaggttgaggggattcacaaacaaatactaaagataactaaaatgtattttattgcaatgcccccttcactaaagcttcattttttgcctatttaaggaaataattcaaaaatgaaaactaaaaagaaggggaaaagtacaccaaaggaaagacttaccacagggttgaggattgtgcagttttaggaaactaggtgaaaatgggtatcttttcatcttcattgcattgctcccaaaactttactagacttttaactagagtttaaaatgctttatgtatttatgaaattactcagtatctttttagtaatttataaaattactcaatatctttttctgttaaaagtcaaaggtctgttttaggccatatataaattcatgtttgcttaggcggcatctgtctttgaaaactgtgatataaattatttctgttttagagatcaaaaggcaaataacagatttgatataaacccaattgcttaaaatatcttttcattctttggtataaaacaaacctgctaccagcactaacattgtatttgatttaaagtatatctctgtagtcttaaaaatgcaaataaatatggcttaaatttgaaa

SEQ ID NO: 204751 - DNA, 4624 bp, Homo sapiens
  Payload ID: 20390
  Gene Name: zinc fingers and homeoboxes 2
  Uniprot ID: Q9Y6X8
  ENST ID: ENST00000314393
  CDS Start-End: 836-3349
ccccctcctcttctcgcagaaattccaccgagtccgttactgggctcagacttttaagttaatttactgcccccctaccttggccagtaaccagcgcctttagggctagcctcccccccagctcctgcctgaaaaatgacatttcgccggtgtctccggagggggctgaatttcactttgtaactttctgcggaacccgagcccgggtggcagctcgggtggtggtatcgtatgcaaatacgcatgctgacgttacagatcatgtgggttttggcgtagattccccactgatcgaggcattttttttccctttttttttcctttttttttttcttttaaaaattttggccatcgttctccgtacgggggctttttctgtctgtctgtctggctggcaggctggctttccccctctttcccacggagcccgagccgggcgcccggtggggagtggggagtgggtggggggagccagcagagttccattttggaacgcccgtgccgcgtctccgcgttcccagcccgggtccccgcgttcacagccccagcgcaggtctggatgtaccgactgcttttggaataaaaagattcccaggatgtgagcaacacgggaccgatatgatgcttcctggtgtgtttagtggttggtgccattccaattttctgtgctgaaatcattctgaaaactcaaacagtagacttcagcacacaaggaaagccaaagccatttgagggggaataaagccaaaagcctttcaccttattcgttccaagaatctcaccgccccctccttatccccctccaaaaataagccattgcacacagacaggcagcatggctagcaaacgaaaatctacaactccatgcatggttcggacatcacaagtagtagaacaagatgtgcccgaggaagtagacagggccaaagagaaaggaatcggcacaccacagcctgacgtggccaaggacagttgggcagcagaacttgaaaactcttccaaagaaaacgaagtgatagaggtgaaatctatgggggaaagccagtccaaaaaactccaaggtggttatgagtgcaaatactgcccctactccacgcaaaacctgaacgagttcacggagcatgtcgacatgcagcatcccaacgtgattctcaaccccctctacgtgtgtgcagaatgtaacttcacaaccaaaaagtacgactccctatccgaccacaactccaagttccatcccggggaggccaacttcaagctgaagttaattaaacgcaataatcaaactgtcttggaacagtccatcgaaaccaccaaccatgtcgtgtccatcaccaccagtggccctggaactggtgacagtgattctgggatctcggtgagtaaaacccccatcatgaagcctggaaaaccaaaagcggatgccaagaaggtgcccaagaagcccgaggagatcacccccgagaaccacgtggaagggaccgcccgcctggtgacagacacagctgagatcctctcgagactcggcggggtggagctcctccaagacacattaggacacgtcatgccttctgtacagctgccaccaaatatcaaccttgtgcccaaggtccctgtcccactaaatactaccaaatacaactctgccctggatacaaatgccacgatgatcaactctttcaacaagtttccttacccgacccaggctgagttgtcctggctgacagctgcctccaaacacccagaggagcacatcagaatctggtttgccacccagcgcttaaagcatggcatcagctggtccccagaagaggtggaggaggcccggaagaagatgttcaacggcaccatccagtcagtacccccgaccatcactgtgctgcccgcccagttggcccccacaaaggtgacgcagcccatcctccagacggctctaccgtgccagatcctcggccagactagcctggtgctgactcaggtgaccagcgggtcaacaaccgtctcttgctcccccatcacacttgccgtggcaggagtcaccaaccatggccagaagagacccttggtgactccccaagctgcccccgaacccaagcgtccacacatcgctcaggtgccagagcccccacccaaggtggccaaccccccgctcacaccagccagtgaccgcaagaagacaaaggagcagatagcacatctcaaggccagctttctccagagccagttccctgacgatgccgaggtttaccggctcatcgaggtgactggccttgccaggagcgagatcaagaagtggttcagtgaccaccgatatcggtgtcaaaggggcatcgtccacatcaccagcgaatcccttgccaaagaccagttggccatcgcggcctcccgacacggtcgcacgtatcatgcgtacccagactttgccccccagaagttcaaagagaaaacacagggtcaggttaaaatcttggaagacagctttttgaaaagttcttttcctacccaagcagaactggatcggctaagggtggagaccaagctgagcaggagagagatcgactcctggttctcggagaggcggaagcttcgagacagcatggaacaagctgtcttggattccatggggtctggcaaaaaaggccaagatgtgggagcccccaatggtgctctgtctcgactcgaccagctctccggtgcccagttaacaagttctctgcccagcccttcgccagcaattgcaaaaagtcaagaacaggttcatctcctgaggagcacgtttgcaagaacccagtggcctactccccaggagtacgaccagttagcggccaagactggcctggtccgaactgagattgtgcgttggttcaaggagaacagatgcttgctgaaaacgggaaccgtgaagtggatggagcagtaccagcaccagcccatggcagatgatcacggctacgatgccgtagcaaggaaagcaacaaaacccatggccgagagcccaaagaacgggggtgatgtggttccacaatattacaaggaccccaaaaagctctgcgaagaggacttggagaagttggtgaccagggtaaaagtaggcagcgagccagcaaaagactgtttgccagcaaagccctcagaggccacctcagaccggtcagagggcagcagccgggacggccagggtagcgacgagaacgaggagtcgagcgttgtggattacgtggaggtgacggtcggggaggaggatgcgatctcagatagatcagatagctggagtcaggctgcggcagaaggtgtgtcggaactggctgaatcagactccgactgcgtccctgcagaggctggccaggcctagacagggaagtctgttagaactgctgtgctgatcaacgggacgctccgtctttgaagaaagaagagatggtctctccccagccatgggccacccttgccagtgactccaagtggaactacttagctcgcgtgtgcctggagggtgcgggaagtccagcgactctcagacgcacctcccagaggaccggtgggaattgttcatagtgccaaagtcctactactgcgttttcaatgggtccttgtacatagtttgctcctctgccctagccctcacctcttgctatactggaaccgatttgtacaatgtgggaattttgttacctttttaatcaagggcaacttccttttccagcactaccattgtaaggtttttttcaggagggagggctaaccaccttgcttttctcttttctctttttcttttttttatttttgttttattaatttggggaaaggggtgttagcattagtgccatgatatctactggattttaagtagggagactttatttttaaaggtaggttgaaatttgggagatttctcggcaggaagggctgaaatccaggcccctgtctcaacttggagagaggtgacagacggcagatcttccaaatcaaattcctttccagttcttcccctggctgcctttttgggggtccctgccttagccccacacaaggctttctgaactgccaagaggggatctggcttctcaactgctcggcctcttgggccaggctgtgcccagccagccctgggagaactgggtagcaggtggctgacttctttaagcacctttctaaataccagcagaagaggctcccgcctctgttagcatgatcagtactattgtgacattaaaacaacaacaataagatcttcctatctggagggtacagaggtgaatggctttggttttcatttctcttcttcactgccttttctcggtgtggtatttgacaagattttagctcaaagcctcaccatgaattgattttttttgtttgtgtgtgtgtttgttttgggacaattttagatacctgagtgcactttttcagttagtcctaacttttaaaagaaggaaaaccaagagacatatctggtgtacgtgttgcagtatgaactctggttgcaatccctccccgtcccacactgccccccatttgagtacaccgcacaagtcaaacgctaggaagtttgaataaaaccaatttttctaacttgttgctcatttgttgtaactcaataaagcaaagactaaacatttttataacc

SEQ ID NO: 204752 - DNA, 873 bp, Homo sapiens
  Payload ID: 20390
  Gene Name: zinc fingers and homeoboxes 2
  ENST ID: ENST00000534247
  CDS Start-End: 375-873
cccagtcccccattgactccatcctgctagaaaagagatggacacccaattgctctgccctgcttttgatactgagtttctgtcccctgtaggtctggatgtaccgactgcttttggaataaaaagattcccaggatgtgagcaacacgggaccgatatgatgcttcctggtgtgtttagtggttggtgccattccaattttctgtgctgaaatcattctgaaaactcaaacagtagacttcagcacacaaggaaagccaaagccatttgagggggaataaagccaaaagcctttcaccttattcgttccaagaatctcaccgccccctccttatccccctccaaaaataagccattgcacacagacaggcagcatggctagcaaacgaaaatctacaactccatgcatggttcggacatcacaagtagtagaacaagatgtgcccgaggaagtagacagggccaaagagaaaggaatcggcacaccacagcctgacgtggccaaggacagttgggcagcagaacttgaaaactcttccaaagaaaacgaagtgatagaggtgaaatctatgggggaaagccagtccaaaaaactccaaggtggttatgagtgcaaatactgcccctactccacgcaaaacctgaacgagttcacggagcatgtcgacatgcagcatcccaacgtgattctcaaccccctctacgtgtgtgcagaatgtaacttcacaaccaaaaagtacgactccctatccgaccacaactccaagttccatcccggggaggccaacttcaagctgaagttaattaaacgcaataatcaaactgtcttggaacagtccatcgaaaccaccaaccatgtcgtgtccatcacca

SEQ ID NO: 204753 - DNA, 10030 bp, Homo sapiens
  Payload ID: 20391
  Gene Name: zinc fingers and homeoboxes 3
  Uniprot ID: Q9H4I2
  ENST ID: ENST00000309060
  CDS Start-End: 417-3287
aaatagactgaatgaaagatgagcttctgcctttatatccttctctcctgctacccaactcattgtggtgaaggaaaaagaaaacgcgggtggagactgcactatatgcttaggactgaaatgcaactgcagaagcaacatgtgaccttttagagatgcttgtgggactgcataaagtgaagagggaaactggaaaaaaacaatgaagtaaggaaaaaatgaggaaactgagacacagcttaagaattttgcccaaagctacaaagattgaatagggaaaacctgctttctgcaaacaactgaaaaagctgcatttagaaactgtttctttggccctcatcgagaagctggaacttgtattgttaggccccttatgggacaagctctcaactgctgatcacccagtgattgtcaccatggccagcaagaggaaatccaccacaccatgcatgatcccagtgaagactgtggtgttgcaagatgccagcatggaggcccagcccgctgagaccttgcctgaaggaccccagcaggatctgcccccagaagcatctgctgccagcagtgaggcagcacagaaccccagcagtactgatggctctacactggccaatgggcatcggagcactttagatggctatttatattcctgtaaatactgcgatttcagatcccatgacatgacccaatttgtgggacatatgaactcagagcacacagactttaataaagacccaacctttgtatgcagtgggtgcagttttctggcaaaaacccctgaggggctttccttgcacaatgccacatgtcactccggggaagccagctttgtgtggaacgtggccaagccagacaatcatgtggttgtggagcagagcatccctgagagcaccagcactcctgacctagcgggtgagcccagtgctgaaggggctgatggacaggcagaaatcatcattaccaaaactccaatcatgaagataatgaaaggcaaagctgaagccaaaaaaattcatacactcaaggagaatgtccctagccagcctgtgggtgaggccttaccaaagctgtcgactggagaaatggaggtgagagagggggaccattccttcatcaatggggcagttccagtcagccaggcatctgccagctctgcaaaaaacccccatgccgccaacgggcccctgataggaacagtgccagttttgccagctggcatagcacagttcctctccctccagcagcagcccccagtgcatgcccaacaccatgtccaccagccactgcccacggccaaggcccttcccaaagtgatgatccccctgagcagcattccaacgtacaatgcagccatggactctaacagcttcctgaagaactccttccacaagttcccctaccccaccaaagccgagctctgctatttgactgtggtgaccaagtatccagaagaacagctcaagatctggttcacagcccaaaggctgaagcaggggatcagctggtcccctgaggagattgaggatgcccggaaaaagatgttcaatacagtcatccagtctgtgcctcagcccacaattacggttctaaataccccactcgtcgccagtgctggcaatgtccagcatctcatccaggccgctcttccaggtcacgttgtggggcagccagagggtacaggagggggacttctggtcactcagccattgatggccaatgggttgcaagcaacaagttcccctctccccctcacggtgacatccgtccccaagcagccaggtgtggcacccattaacactgtgtgttcaaatacaacgtcagctgtgaaggtggtcaatgcggcccagtcgctcctcacggcctgccccagcataacctcccaagccttccttgatgctagcatctacaaaaataagaaatctcatgaacagctgtcagctctgaaagggagcttctgtcggaaccagttcccagggcagagcgaagttgaacatctcacaaaagtgacgggcctcagtaccagagaggtgcggaaatggttcagtgatcgtagataccactgccggaacttgaagggctccagagcgatgatacctggagatcacagttccatcatcattgactctgtgccagaggtgtccttctccccatcgtccaaggtccctgaggtaacctgcattccgacaacagccacactagcaacccacccttctgccaaacgacaatcttggcaccagactcctgacttcacaccaaccaaatacaaggagagagcccctgagcagctcagagccctggagagcagttttgcacaaaaccctcttcctcttgatgaggaactggaccgcctgagaagtgaaaccaaaatgacccgacgagaaattgatagctggttttcagagagacggaaaaaagtgaatgctgaggagaccaagaaggctgaggagaatgcctctcaggaggaagaggaggctgctgaggatgagggtggagaagaggatttggccagtgagctaagggtctctggtgaaaatggctctctggaaatgcccagcagccatatcttggcagagcgcaaagtcagccccattaaaatcaacctgaagaacctgagggtcactgaagccaatggcaggaacgagattccagggctgggtgcctgtgaccctgaggatgatgagtcaaacaaactggcagagcagctcccaggcaaagtgagctgcaaaaagactgcccagcagcggcacttgctgcggcagctctttgtccagacacagtggccaagcaaccaggactatgactccatcatggcccagacgggtctgccacggccagaggtggtgcgctggtttggagatagcaggtacgcactgaagaacggccaactcaaatggtacgaagactataagcgaggcaacttcccaccagggctactggtcattgcccctggcaaccgggagctcctgcaggactattacatgacacacaagatgctgtatgaagaggacctgcagaacctctgtgacaagacccagatgagctcccagcaggtcaagcagtggtttgctgagaaaatgggggaggagaccagagccgtggcagacacaggcagtgaggaccagggccctggtactggtgagctcacagcagttcacaaagggatgggtgacacctattcagaggtgtctgagaacagtgagtcgtgggagccccgtgtccctgaggccagctcagagccctttgacacatcgagtccccaggctggacgtcagctcgaaacagactgaatttgatctgattaatgtgaaggactggccagtctgggaaaccgcctgccacgtggaagagccaaacccgactctctgctgccacatgccgttcccatgcccggctgctgggcacctgggagagcttccagaatcctcgcagacagcccagagcctgccgctaccctcggcctgcccaccaccaagcaagcagcaagcaagatggggttctcatcagttcttcctcccacaatgtaggacctttcctttaccttccaatggataaaatagttcagagttcatagtcatattcatagacacagaatcaagcttttaacatatacatccacctctatatgttaaataaaacatcagattatcaacactgtcattacgtagaaactttggttagccaagcagtgcattgtcagttacgtcatctctaaaaatgacctgtgtctgttctctggggattgctgggtcacaggtgcccctcaccttccacagtcaggcagggaagttataggcacaaagctacgtctggaacccctttgtgccccctttgtgttcctcaaggaagcagtacctttgaagagatctctgctgcattaagtgatgaccggctacgtttcatgtcaggcttgctttgccttgtgggctactcagtgcagaacctgctgtaaccctcagttcaaaaaatggactggcaatgtgattagcgttggatgctttaccattctctttagttgttaccgtaattctgctttttcatgggagtttgaatcatggaccataacttttcagttatcagatcaactaaagaaacatttgttgttaagcctaatgtgctgacctatgtgcctgcattttttttttaatctagacatgtttggagtgagagaaagatggaaaaaagacatggggtagggacgtaagtggaaatctatagccacagcctgaagctttgaccactgcggttttcagagccctttctccacactcatttcagagcctcctatggtttgggaaggaataacacactggcccattagtaagggtgaaggctggagggatttgttgacttcttggaattatcagaggtagggtggtctttagcacaaagacttgcatgcagagatccctggcagaacacccagagtgcccgtggctcccaccccagggtctggccggtgtgctggatgcatgcccaagggtgctgggcatcactggtccttgtgaggatgcttttaaagttttatatttatgtccccaaacttggaaacaagaactctactttagcctaaccctcatgtccttttttgaattgagaaaattacaggaaatggtgcctttgaaaattagaaaacttgcttacagagctgttctaaatggtaaatcctcaatttccccaagaccggttgctctgagagtagctggtaaagaggggcgaactaaagacctgtccacctgtagctccgctcatttcttagaaaccacctgcttcccagagtgccaagccacaagtaccaggcttcgtgggcacagacacctcctgggctgggcagagtgacagtgctagaagaccccagagagagggcaagggctttgggcaagaagcactggtggtgttttagggaccgtccttctcccctacccagggaactggacctggcagggcaccgtgctcatgtggctccaaggacaagcatggcggtggccccttctgccttccaggagaggtcttgcttttgaaaccaaaatcatgttcttctaaagtgtcatcttctgccctccctgtcccaatagggaccacatcttatttgtctcaaacagggacttgtgagtacttggcaagttttgcagcctatttttgtattcttaatttggggagtaaagatgtttggtctcaaaaacctttgaggaattgccaagaatggcgagtgattgctttccttcagagaacagacacttggaatttctccttttagtgtttatatacgtgcagattaatttatatatatatatatacacacacacatatacagtataaatactcatttgattctcgtaaaacgcgcatctggcgtgtgcagttgagaaacttggtggcacatgggtgttgggggagtagcctgtgttggagggacaccagtgcactaggcagctggggcggcccaggctgaagccatctccgggtgtctgagaaaccacccagtgcctcacctccagatcctgctggcatcacctccagagccctgcatgcactggctgaagagttggtctgtggagaggattttcttggttacttgtattcacggttaatttacaacccaaacagcaaaacacagttggtggacaagttcatgcaggacctacagtgacccagccatgggcactagctcatctttcaggtggaaaagtacagtgctgcctgccctggtatgtttttcttatagatgttagccctgcccaacagccagggctacactacaaaaggcaagaatgcccatgtaaggagcccagcagtctggacagatccttcttcctctgctgttggatgagagtgagtgagtatgctctggaccttatccttgaaagatgatcaaaagcgatgatgagggaggcagtcatcacgcaggtgcttaaagggacattgtaggaggtactcaagggtttgggggcaaaaccctgaatccagccagtcgtgcacagagacacacccacactagcccagtggcagtgggggatgtgggatggcagcagccaggtatgtagccctgtcacaggacagctcactgtggttttgcacactgcctaagggttaaattgtgttgttgccttcagtagaaggcatttgtgggctgcagagttgagagttgggtgaggttagtctctcctgaagaaaaagcctataaaaagtggctaatcttatcccttttctctgtatgcagttggactcgtcagagatagtaaaatcatcttttagtgtttttttgttgctgatgtcttgtacccatttgttttttacatggggttgtagatcgagttctcaaaggtgaaaccagatgatcattctgataaaggaaatttaaatttgatacatatgctttgtatattttgattacttgttttcgtttttgactataaaggagcttttttattttgggaggggaggagtgtcatttttgagaatcttgggttcctgaaaaagaacgccctagttggatggcttgccagggccttggggtttggtagtgattgtacaacttaaagctcctttctcttggctgagtgacaggtggctgttcaggtggaccaaagcaccttgacacaaggactccacactgtgctctctagtagcacaaggaggaagttggacagaacattgggtagtgccttgcgggctcacacatgtactagtggtctcatctccagctagccttgggaggccgtcccaccaggaaatctctctattccgtagcctgagatgtgcccttgtgggttttatcctgctcagtcagtggcctaggggcaggtcctgtgttctctccctctctctcctggctctgggacatctgtccctggctgcctttcatggaggaaggacactggcctttctggttggatgctgtgtggatgctctctgcttgagcctcgtggtctcttgtctctttttggaccaatatcctcagattggtgcagctttttcagttcagatatcacaccccaagtggataaaggcaacttgcaggagaggagagccagccaagaagaaaattttaaaaccaaacctcgtttaggattttcctaaagtcatcttctcttttttcttgctcagagtttacctgggagatttcaccagtttgactcaccatttgcagatgtgcttttgtattaaatttaaattttcacatatcacatccattctcaaggtagttatatgctggagaagaaaaatcctctagacacatgaaggcccacatagtcaagtcttccagggcaaagccagcagcccacccaggtcaggtagccagcagggctcagttcccctcactccagacacggaccctcctcttcagggtctcttgacccagcttccttctctccttttacctgagagcacagacctctctcagccagcctgcccagaccacggggggctactcccatgtagtttggggagcacttgatctcagaaaagctccattgtctgagcaaatgggcagttgtggagctcaagcctttctcctgtgctcaagtcccttccccaagcaaggcttcaacctcatctacccaccatgtagttttctctggccatttaagtggggcggcagggacatggttgggccatgccacaccagggctggtgaggcaaccagttttgattttgacagagtggctggaggaaaagtggcaatcaaggtgctgcttggtttgctctgagtgcaaatggaaccaacaggtttctgctgcaatctgtgtgttcccagtgccaggtcacaccaggaggggtggggcagggctaaccaagtggtctctgaactcaccgagcgtctgcacttggttgtgaagttaatgggagtacagagagcgtctggccttggagaggggttgagagcctcctttttggttcttcattcctgagctcttgcctgcccacaaatctgacctctttgaatggggacgcagtccttcaacagagaagtttctatggcaaagaagtttctatttagctctagatccagcagagtcatccattctaactgccctgaagtctagagcaggggagggaacccagaggctggggatgagactaggcagaccctggttaccatatggacaaggacaggggaaagcacccccttcctcaatttctgaaagttctatctttgggttcgcaggactttgaggatgataaagaacatataggtactagcttgttgttgctggtccaaagcttccacagccctgagaatttggctttcgtggctgctctggcagctgagcgaagggaggaaggcagccgctctggtggggactctaggcaccttccctgctgtccacttggataggcggtgagccccagggtactgagaggagcctgagcatttacctgccattagtgcctcttccttcaggagactggcttgaaacgtgtgttcatgtgcgcgtgcacacacacacatgagcacctgtatgtgttaatgaatagtttttcttggttaatgctttttaacttctgttcctttccgtaagtggatgattcaaaattaacgtgacttggctgggcgcagtggctcacacctgtaatcccagcactttgggaggccaagggaggcggatcacctgaggtcaggagttcgagaccagcctgatcggcatggtgaaaccccgtttctactaaaaatacaaaaattagccgggcgtggtggtgcgcgcctgtaatcccagctactcaggaggctgaggaaggagaatcacttgaacccgggaggtggaggttgcagtgagctgagatcgtgccactgcactccagcctgggcgacagagcgaaactccgtctcaaaaaaaaaaaaaaaacttaatgtgactggagttaaaagtgaaatgtcaggttgtttagtcactgaatagagagctacaagtgcttggtctttcccaagaatcaaacctgagtagaaatacatttaaaagaaaaatctacatggtacctatgaatcctgtaatttgtttagggagatcttgtcactcatccctggttcctgcccatactgtttggtctcgttcttgcagtttgcttggaacagggccagagccccacatgagattgtcagcaggagtgaggagcgccagtccctactcctcagcagggacccagcacagcaatccggttgttctcggttagactgggtcggggccaggggagaagcagtcacccctgtgtagagggttcccgctgtgcttctgagcagttgctttgttcagaagtgttaggagggtcagattgtgccataattgttattaaagagaaaacacgcccaccttcctttctcccctgctggccattgttcattgagttttactgagggcagcctttgtggaagtcagggaggttgccaaaggcctgtagatgcctcctgacaaggtcttgattcctggttttctagcacccatttgcattttggtcttcagcacaaagccttgttccctgtggccggacttctgggcaataagactggggagtgactgttgagcagtctgctgtcaggagagatggctgaaaaggtgatcatcttggtgctaaacaagtaagaggcaactgccctgtttttgtttgttttgaggcacaatgaaactttagccaaactctgcaagagggtcccatctcctgccatggccaggtgtgagagaccaaaccgagaaaacagcatactctatcacttaagccttgggtagaatgggaattctttaccctgggtaaacgttttaacaaaaaaatggaacttaacttcggtttggactgtggtcgtgctgaggcaggagtggggttgccctcttggggctgaatctccaggcctcacgaggtcccctgtggggatgctgctatttctaagatgcaaattgcacatttcctagattttgtatctgtggatttggataagggaggggaacacggacaaattgcttgtacaatttgaaatgggcctcaatggtacttcaaaccttttgattattcctaaataaaaacataaatatatttcaca

SEQ ID NO: 204754 - DNA, 657 bp, Homo sapiens
  Payload ID: 20391
  Gene Name: zinc fingers and homeoboxes 3
  ENST ID: ENST00000373261
  CDS Start-End: 369-657
aaatagactgaatgaaagatgagcttctgcctttatatccttctctcctgctacccaactcattgtggtgaaggaaaaagaaaacgcgggtggagactgcactatatgcttaggactgaaatgcaactgcagaagcaacatgtgaccttttagagatgcttgtgggactgcataaagtgaagagggaaactggaaaaaaacaatgaagtaaggaaaaaattgaatagggaaaacctgctttctgcaaacaactgaaaaagctgcatttagaaactgtttctttggccctcatcgagaagctggaacttgtattgttaggccccttatgggacaagctctcaactgctgatcacccagtgattgtcaccatggccagcaagaggaaatccaccacaccatgcatgatcccagtgaagactgtggtgttgcaagatgccagcatggaggcccagcccgctgagaccttgcctgaaggaccccagcaggatctgcccccagaagcatctgctgccagcagtgaggcagcacagaaccccagcagtactgatggctctacactggccaatgggcatcggagcactttagatggctatttatattcctgtaaatactgcgatttcagatcccatgacatgacccaatttgtgggacatatga

SEQ ID NO: 204755 - DNA, 688 bp, Homo sapiens
  Payload ID: 20391
  Gene Name: zinc fingers and homeoboxes 3
  ENST ID: ENST00000441102
  CDS Start-End: 334-688
gccggccgcccgcccggccgcggggagggaggcccgcagcgcgggaagagcggcccggtcgcgggcgccgccaccgccgccgctgccaggactgaaatgcaactgcagaagcaacatgtgaccttttagagatgcttgtgggactgcataaagtgaagagggaaactggaaaaaaacaatgaaattgaatagggaaaacctgctttctgcaaacaactgaaaaagctgcatttagaaactgtttctttggccctcatcgagaagctggaacttgtattgttaggccccttatgggacaagctctcaactgctgatcacccagtgattgtcaccatggccagcaagaggaaatccaccacaccatgcatgatcccagtgaagactgtggtgttgcaagatgccagcatggaggcccagcccgctgagaccttgcctgaaggaccccagcaggatctgcccccagaagcatctgctgccagcagtgaggcagcacagaaccccagcagtactgatggctctacactggccaatgggcatcggagcactttagatggctatttatattcctgtaaatactgcgatttcagatcccatgacatgacccaatttgtgggacatatgaactcagagcacacagactttaataaagacccaacctttgtatgcagtgggtgcagttttctggcaa

SEQ ID NO: 204756 - DNA, 573 bp, Homo sapiens
  Payload ID: 20391
  Gene Name: zinc fingers and homeoboxes 3
  ENST ID: ENST00000419740
  CDS Start-End: 435-573
ttctttccagctctggacaggaaaacatgaaaacagatgatcccaaggaggtttctccctaaactaacaattaaagaatatagttttactttttcatttttatttgttgaaactgaatccacaccaggaaaacccgaatggaagaacatcagaaaatagcacatccttgaagttacaaagcaacacatctgactgaaatgcaactgcagaagcaacatgtgaccttttagagatgcttgtgggactgcataaagtgaagagggaaactggaaaaaaacaatgaaattgaatagggaaaacctgctttctgcaaacaactgaaaaagctgcatttagaaactgtttctttggccctcatcgagaagctggaacttgtattgttaggccccttatgggacaagctctcaactgctgatcacccagtgattgtcaccatggccagcaagaggaaatccaccacaccatgcatgatcccagtgaagactgtggtgttgcaagatgccagcatggaggcccagcccgctgagaccttgcctgaaggaccccagcaggatctgcccccagaagcatctg

SEQ ID NO: 204757 - DNA, 712 bp, Homo sapiens
  Payload ID: 20391
  Gene Name: zinc fingers and homeoboxes 3
  ENST ID: ENST00000436099
  CDS Start-End: 570-712
agactgaatgaaagatgagcttctgcctttatatccttctctcctgctacccaactcattgtggtgaaggaaaaagaaaacgcgggtggagactgcactatatgcttaggactgaaatgcaactgcagaagcaacatgtgaccttttagagatgcttgtgggactgcataaagtgaagagggaaactggaaaaaaacaatgaatcccttccataggaaacagggaatgtttgtttctgtcttctggtaggagaaggattggtcccacccccagctccagggatggatcttgattgtttaagcccagtcagtgattctaacccatggaccaagaccctgccttggagattggggaacaggtgttggaagggctctattttggcaaagaatggattatttatgtgagcatatttccgcaaaattgaatagggaaaacctgctttctgcaaacaactgaaaaagctgcatttagaaactgtttctttggccctcatcgagaagctggaacttgtattgttaggccccttatgggacaagctctcaactgctgatcacccagtgattgtcaccatggccagcaagaggaaatccaccacaccatgcatgatcccagtgaagactgtggtgttgcaagatgccagcatggaggcccagcccgctgagaccttgcctgaaggaccccagcaggatctgcccccagaagcatctgctgc

SEQ ID NO: 204758 - DNA, 792 bp, Homo sapiens
  Payload ID: 20391
  Gene Name: zinc fingers and homeoboxes 3
  ENST ID: ENST00000436440
  CDS Start-End: 524-792
aaatagactgaatgaaagatgagcttctgcctttatatccttctctcctgctacccaactcattgtggtgaaggaaaaagaaaacgcgggtggagactgcactatatgcttaggactgaaatgcaactgcagaagcaacatgtgaccttttagagatgcttgtgggactgcataaagtgaagagggaaactggaaaaaaacaatgaagctaatcccgaactcctggcctcaaatgatcttcctaccttggcttcccaaagtgctgggattacagacgtgagctgctgtgcctggccaagacttaattttgaatgacattgggactattgccaaaaatcaaatccatcttcatgttgtccacttctcagccttaattgaatagggaaaacctgctttctgcaaacaactgaaaaagctgcatttagaaactgtttctttggccctcatcgagaagctggaacttgtattgttaggccccttatgggacaagctctcaactgctgatcacccagtgattgtcaccatggccagcaagaggaaatccaccacaccatgcatgatcccagtgaagactgtggtgttgcaagatgccagcatggaggcccagcccgctgagaccttgcctgaaggaccccagcaggatctgcccccagaagcatctgctgccagcagtgaggcagcacagaaccccagcagtactgatggctctacactggccaatgggcatcggagcactttagatggctatttatattcctgtaaatactgcgatttcagatcccatgacatgac

SEQ ID NO: 204759 - DNA, 8838 bp, Homo sapiens
  Payload ID: 20391
  Gene Name: zinc fingers and homeoboxes 3
  ENST ID: ENST00000421422
  CDS Start-End: 1-2035
ggccaaggcccttcccaaagtgatgatccccctgagcagcattccaacgtacaatgcagccatggactctaacagcttcctgaagaactccttccacaagttcccctaccccaccaaagccgagctctgctatttgactgtggtgaccaagtatccagaagaacagctcaagatctggttcacagcccaaaggctgaagcaggggatcagctggtcccctgaggagattgaggatgcccggaaaaagatgttcaatacagtcatccagtctgtgcctcagcccacaattacggttctaaataccccactcgtcgccagtgctggcaatgtccagcatctcatccaggccgctcttccaggtcacgttgtggggcagccagagggtacaggagggggacttctggtcactcagccattgatggccaatgggttgcaagcaacaagttcccctctccccctcacggtgacatccgtccccaagcagccaggtgtggcacccattaacactgtgtgttcaaatacaacgtcagctgtgaaggtggtcaatgcggcccagtcgctcctcacggcctgccccagcataacctcccaagccttccttgatgctagcatctacaaaaataagaaatctcatgaacagctgtcagctctgaaagggagcttctgtcggaaccagttcccagggcagagcgaagttgaacatctcacaaaagtgacgggcctcagtaccagagaggtgcggaaatggttcagtgatcgtagataccactgccggaacttgaagggctccagagcgatgatacctggagatcacagttccatcatcattgactctgtgccagaggtgtccttctccccatcgtccaaggtccctgaggtaacctgcattccgacaacagccacactagcaacccacccttctgccaaacgacaatcttggcaccagactcctgacttcacaccaaccaaatacaaggagagagcccctgagcagctcagagccctggagagcagttttgcacaaaaccctcttcctcttgatgaggaactggaccgcctgagaagtgaaaccaaaatgacccgacgagaaattgatagctggttttcagagagacggaaaaaagtgaatgctgaggagaccaagaaggctgaggagaatgcctctcaggaggaagaggaggctgctgaggatgagggtggagaagaggatttggccagtgagctaagggtctctggtgaaaatggctctctggaaatgcccagcagccatatcttggcagagcgcaaagtcagccccattaaaatcaacctgaagaacctgagggtcactgaagccaatggcaggaacgagattccagggctgggtgcctgtgaccctgaggatgatgagtcaaacaaactggcagagcagctcccaggcaaagtgagctgcaaaaagactgcccagcagcggcacttgctgcggcagctctttgtccagacacagtggccaagcaaccaggactatgactccatcatggcccagacgggtctgccacggccagaggtggtgcgctggtttggagatagcaggtacgcactgaagaacggccaactcaaatggtacgaagactataagcgaggcaacttcccaccagggctactggtcattgcccctggcaaccgggagctcctgcaggactattacatgacacacaagatgctgtatgaagaggacctgcagaacctctgtgacaagacccagatgagctcccagcaggtcaagcagtggtttgctgagaaaatgggggaggagaccagagccgtggcagacacaggcagtgaggaccagggccctggtactggtgagctcacagcagttcacaaagggatgggtgacacctattcagaggtgtctgagaacagtgagtcgtgggagccccgtgtccctgaggccagctcagagccctttgacacatcgagtccccaggctggacgtcagctcggttcctggtcactgagttcccagcctctcccttccctccttaccctttgacatttgtgttctcattagagaccccatcagagggcagccagaagctcagaaacagactgaatttgatctgattaatgtgaaggactggccagtctgggaaaccgcctgccacgtggaagagccaaacccgactctctgctgccacatgccgttcccatgcccggctgctgggcacctgggagagcttccagaatcctcgcagacagcccagagcctgccgctaccctcggcctgcccaccaccaagcaagcagcaagcaagatggggttctcatcagttcttcctcccacaatgtaggacctttcctttaccttccaatggataaaatagttcagagttcatagtcatattcatagacacagaatcaagcttttaacatatacatccacctctatatgttaaataaaacatcagattatcaacactgtcattacgtagaaactttggttagccaagcagtgcattgtcagttacgtcatctctaaaaatgacctgtgtctgttctctggggattgctgggtcacaggtgcccctcaccttccacagtcaggcagggaagttataggcacaaagctacgtctggaacccctttgtgccccctttgtgttcctcaaggaagcagtacctttgaagagatctctgctgcattaagtgatgaccggctacgtttcatgtcaggcttgctttgccttgtgggctactcagtgcagaacctgctgtaaccctcagttcaaaaaatggactggcaatgtgattagcgttggatgctttaccattctctttagttgttaccgtaattctgctttttcatgggagtttgaatcatggaccataacttttcagttatcagatcaactaaagaaacatttgttgttaagcctaatgtgctgacctatgtgcctgcattttttttttaatctagacatgtttggagtgagagaaagatggaaaaaagacatggggtagggacgtaagtggaaatctatagccacagcctgaagctttgaccactgcggttttcagagccctttctccacactcatttcagagcctcctatggtttgggaaggaataacacactggcccattagtaagggtgaaggctggagggatttgttgacttcttggaattatcagaggtagggtggtctttagcacaaagacttgcatgcagagatccctggcagaacacccagagtgcccgtggctcccaccccagggtctggccggtgtgctggatgcatgcccaagggtgctgggcatcactggtccttgtgaggatgcttttaaagttttatatttatgtccccaaacttggaaacaagaactctactttagcctaaccctcatgtccttttttgaattgagaaaattacaggaaatggtgcctttgaaaattagaaaacttgcttacagagctgttctaaatggtaaatcctcaatttccccaagaccggttgctctgagagtagctggtaaagaggggcgaactaaagacctgtccacctgtagctccgctcatttcttagaaaccacctgcttcccagagtgccaagccacaagtaccaggcttcgtgggcacagacacctcctgggctgggcagagtgacagtgctagaagaccccagagagagggcaagggctttgggcaagaagcactggtggtgttttagggaccgtccttctcccctacccagggaactggacctggcagggcaccgtgctcatgtggctccaaggacaagcatggcggtggccccttctgccttccaggagaggtcttgcttttgaaaccaaaatcatgttcttctaaagtgtcatcttctgccctccctgtcccaatagggaccacatcttatttgtctcaaacagggacttgtgagtacttggcaagttttgcagcctatttttgtattcttaatttggggagtaaagatgtttggtctcaaaaacctttgaggaattgccaagaatggcgagtgattgctttccttcagagaacagacacttggaatttctccttttagtgtttatatacgtgcagattaatttatatatatatatatacacacacacatatacagtataaatactcatttgattctcgtaaaacgcgcatctggcgtgtgcagttgagaaacttggtggcacatgggtgttgggggagtagcctgtgttggagggacaccagtgcactaggcagctggggcggcccaggctgaagccatctccgggtgtctgagaaaccacccagtgcctcacctccagatcctgctggcatcacctccagagccctgcatgcactggctgaagagttggtctgtggagaggattttcttggttacttgtattcacggttaatttacaacccaaacagcaaaacacagttggtggacaagttcatgcaggacctacagtgacccagccatgggcactagctcatctttcaggtggaaaagtacagtgctgcctgccctggtatgtttttcttatagatgttagccctgcccaacagccagggctacactacaaaaggcaagaatgcccatgtaaggagcccagcagtctggacagatccttcttcctctgctgttggatgagagtgagtgagtatgctctggaccttatccttgaaagatgatcaaaagcgatgatgagggaggcagtcatcacgcaggtgcttaaagggacattgtaggaggtactcaagggtttgggggcaaaaccctgaatccagccagtcgtgcacagagacacacccacactagcccagtggcagtgggggatgtgggatggcagcagccaggtatgtagccctgtcacaggacagctcactgtggttttgcacactgcctaagggttaaattgtgttgttgccttcagtagaaggcatttgtgggctgcagagttgagagttgggtgaggttagtctctcctgaagaaaaagcctataaaaagtggctaatcttatcccttttctctgtatgcagttggactcgtcagagatagtaaaatcatcttttagtgtttttttgttgctgatgtcttgtacccatttgttttttacatggggttgtagatcgagttctcaaaggtgaaaccagatgatcattctgataaaggaaatttaaatttgatacatatgctttgtatattttgattacttgttttcgtttttgactataaaggagcttttttattttgggaggggaggagtgtcatttttgagaatcttgggttcctgaaaaagaacgccctagttggatggcttgccagggccttggggtttggtagtgattgtacaacttaaagctcctttctcttggctgagtgacaggtggctgttcaggtggaccaaagcaccttgacacaaggactccacactgtgctctctagtagcacaaggaggaagttggacagaacattgggtagtgccttgcgggctcacacatgtactagtggtctcatctccagctagccttgggaggccgtcccaccaggaaatctctctattccgtagcctgagatgtgcccttgtgggttttatcctgctcagtcagtggcctaggggcaggtcctgtgttctctccctctctctcctggctctgggacatctgtccctggctgcctttcatggaggaaggacactggcctttctggttggatgctgtgtggatgctctctgcttgagcctcgtggtctcttgtctctttttggaccaatatcctcagattggtgcagctttttcagttcagatatcacaccccaagtggataaaggcaacttgcaggagaggagagccagccaagaagaaaattttaaaaccaaacctcgtttaggattttcctaaagtcatcttctcttttttcttgctcagagtttacctgggagatttcaccagtttgactcaccatttgcagatgtgcttttgtattaaatttaaattttcacatatcacatccattctcaaggtagttatatgctggagaagaaaaatcctctagacacatgaaggcccacatagtcaagtcttccagggcaaagccagcagcccacccaggtcaggtagccagcagggctcagttcccctcactccagacacggaccctcctcttcagggtctcttgacccagcttccttctctccttttacctgagagcacagacctctctcagccagcctgcccagaccacggggggctactcccatgtagtttggggagcacttgatctcagaaaagctccattgtctgagcaaatgggcagttgtggagctcaagcctttctcctgtgctcaagtcccttccccaagcaaggcttcaacctcatctacccaccatgtagttttctctggccatttaagtggggcggcagggacatggttgggccatgccacaccagggctggtgaggcaaccagttttgattttgacagagtggctggaggaaaagtggcaatcaaggtgctgcttggtttgctctgagtgcaaatggaaccaacaggtttctgctgcaatctgtgtgttcccagtgccaggtcacaccaggaggggtggggcagggctaaccaagtggtctctgaactcaccgagcgtctgcacttggttgtgaagttaatgggagtacagagagcgtctggccttggagaggggttgagagcctcctttttggttcttcattcctgagctcttgcctgcccacaaatctgacctctttgaatggggacgcagtccttcaacagagaagtttctatggcaaagaagtttctatttagctctagatccagcagagtcatccattctaactgccctgaagtctagagcaggggagggaacccagaggctggggatgagactaggcagaccctggttaccatatggacaaggacaggggaaagcacccccttcctcaatttctgaaagttctatctttgggttcgcaggactttgaggatgataaagaacatataggtactagcttgttgttgctggtccaaagcttccacagccctgagaatttggctttcgtggctgctctggcagctgagcgaagggaggaaggcagccgctctggtggggactctaggcaccttccctgctgtccacttggataggcggtgagccccagggtactgagaggagcctgagcatttacctgccattagtgcctcttccttcaggagactggcttgaaacgtgtgttcatgtgcgcgtgcacacacacacatgagcacctgtatgtgttaatgaatagtttttcttggttaatgctttttaacttctgttcctttccgtaagtggatgattcaaaattaacgtgacttggctgggcgcagtggctcacacctgtaatcccagcactttgggaggccaagggaggcggatcacctgaggtcaggagttcgagaccagcctgatcggcatggtgaaaccccgtttctactaaaaatacaaaaattagccgggcgtggtggtgcgcgcctgtaatcccagctactcaggaggctgaggaaggagaatcacttgaacccgggaggtggaggttgcagtgagctgagatcgtgccactgcactccagcctgggcgacagagcgaaactccgtctcaaaaaaaaaaaaaaaacttaatgtgactggagttaaaagtgaaatgtcaggttgtttagtcactgaatagagagctacaagtgcttggtctttcccaagaatcaaacctgagtagaaatacatttaaaagaaaaatctacatggtacctatgaatcctgtaatttgtttagggagatcttgtcactcatccctggttcctgcccatactgtttggtctcgttcttgcagtttgcttggaacagggccagagccccacatgagattgtcagcaggagtgaggagcgccagtccctactcctcagcagggacccagcacagcaatccggttgttctcggttagactgggtcggggccaggggagaagcagtcacccctgtgtagagggttcccgctgtgcttctgagcagttgctttgttcagaagtgttaggagggtcagattgtgccataattgttattaaagagaaaacacgcccaccttcctttctcccctgctggccattgttcattgagttttactgagggcagcctttgtggaagtcagggaggttgccaaaggcctgtagatgcctcctgacaaggtcttgattcctggttttctagcacccatttgcattttggtcttcagcacaaagccttgttccctgtggccggacttctgggcaataagactggggagtgactgttgagcagtctgctgtcaggagagatggctgaaaaggtgatcatcttggtgctaaacaagtaagaggcaactgccctgtttttgtttgttttgaggcacaatgaaactttagccaaactctgcaagagggtcccatctcctgccatggccaggtgtgagagaccaaaccgagaaaacagcatactctatcacttaagccttgggtagaatgggaattctttaccctgggtaaacgttttaacaaaaaaatggaacttaacttcggtttggactgtggtcgtgctgaggcaggagtggggttgccctcttggggctgaatctccaggcctcacgaggtcccctgtggggatgctgctatttctaagatgcaaattgcacatttcctagattttgtatctgtggatttggataagggaggggaacacggacaaattgcttgtacaatttgaaatgggcctcaatggtacttcaaaccttttgattattcctaaataaaaacataaatatatttcaca

SEQ ID NO: 204760 - DNA, 3551 bp, Homo sapiens
  Payload ID: 20391
  Gene Name: zinc fingers and homeoboxes 3
  Uniprot ID: Q9H4I2
  ENST ID: ENST00000432768
  CDS Start-End: 406-3276
agcactaacattcttgtgtgctgaattgtgatagccgtcaaaggcagcaaatagactgaatgaaagatgagcttctgcctttatatccttctctcctgctacccaactcattgtggtgaaggaaaaagaaaacgcgggtggagactgcactatatgcttaggactgaaatgcaactgcagaagcaacatgtgaccttttagagatgcttgtgggactgcataaagtgaagagggaaactggaaaaaaacaatgaaattgaatagggaaaacctgctttctgcaaacaactgaaaaagctgcatttagaaactgtttctttggccctcatcgagaagctggaacttgtattgttaggccccttatgggacaagctctcaactgctgatcacccagtgattgtcaccatggccagcaagaggaaatccaccacaccatgcatgatcccagtgaagactgtggtgttgcaagatgccagcatggaggcccagcccgctgagaccttgcctgaaggaccccagcaggatctgcccccagaagcatctgctgccagcagtgaggcagcacagaaccccagcagtactgatggctctacactggccaatgggcatcggagcactttagatggctatttatattcctgtaaatactgcgatttcagatcccatgacatgacccaatttgtgggacatatgaactcagagcacacagactttaataaagacccaacctttgtatgcagtgggtgcagttttctggcaaaaacccctgaggggctttccttgcacaatgccacatgtcactccggggaagccagctttgtgtggaacgtggccaagccagacaatcatgtggttgtggagcagagcatccctgagagcaccagcactcctgacctagcgggtgagcccagtgctgaaggggctgatggacaggcagaaatcatcattaccaaaactccaatcatgaagataatgaaaggcaaagctgaagccaaaaaaattcatacactcaaggagaatgtccctagccagcctgtgggtgaggccttaccaaagctgtcgactggagaaatggaggtgagagagggggaccattccttcatcaatggggcagttccagtcagccaggcatctgccagctctgcaaaaaacccccatgccgccaacgggcccctgataggaacagtgccagttttgccagctggcatagcacagttcctctccctccagcagcagcccccagtgcatgcccaacaccatgtccaccagccactgcccacggccaaggcccttcccaaagtgatgatccccctgagcagcattccaacgtacaatgcagccatggactctaacagcttcctgaagaactccttccacaagttcccctaccccaccaaagccgagctctgctatttgactgtggtgaccaagtatccagaagaacagctcaagatctggttcacagcccaaaggctgaagcaggggatcagctggtcccctgaggagattgaggatgcccggaaaaagatgttcaatacagtcatccagtctgtgcctcagcccacaattacggttctaaataccccactcgtcgccagtgctggcaatgtccagcatctcatccaggccgctcttccaggtcacgttgtggggcagccagagggtacaggagggggacttctggtcactcagccattgatggccaatgggttgcaagcaacaagttcccctctccccctcacggtgacatccgtccccaagcagccaggtgtggcacccattaacactgtgtgttcaaatacaacgtcagctgtgaaggtggtcaatgcggcccagtcgctcctcacggcctgccccagcataacctcccaagccttccttgatgctagcatctacaaaaataagaaatctcatgaacagctgtcagctctgaaagggagcttctgtcggaaccagttcccagggcagagcgaagttgaacatctcacaaaagtgacgggcctcagtaccagagaggtgcggaaatggttcagtgatcgtagataccactgccggaacttgaagggctccagagcgatgatacctggagatcacagttccatcatcattgactctgtgccagaggtgtccttctccccatcgtccaaggtccctgaggtaacctgcattccgacaacagccacactagcaacccacccttctgccaaacgacaatcttggcaccagactcctgacttcacaccaaccaaatacaaggagagagcccctgagcagctcagagccctggagagcagttttgcacaaaaccctcttcctcttgatgaggaactggaccgcctgagaagtgaaaccaaaatgacccgacgagaaattgatagctggttttcagagagacggaaaaaagtgaatgctgaggagaccaagaaggctgaggagaatgcctctcaggaggaagaggaggctgctgaggatgagggtggagaagaggatttggccagtgagctaagggtctctggtgaaaatggctctctggaaatgcccagcagccatatcttggcagagcgcaaagtcagccccattaaaatcaacctgaagaacctgagggtcactgaagccaatggcaggaacgagattccagggctgggtgcctgtgaccctgaggatgatgagtcaaacaaactggcagagcagctcccaggcaaagtgagctgcaaaaagactgcccagcagcggcacttgctgcggcagctctttgtccagacacagtggccaagcaaccaggactatgactccatcatggcccagacgggtctgccacggccagaggtggtgcgctggtttggagatagcaggtacgcactgaagaacggccaactcaaatggtacgaagactataagcgaggcaacttcccaccagggctactggtcattgcccctggcaaccgggagctcctgcaggactattacatgacacacaagatgctgtatgaagaggacctgcagaacctctgtgacaagacccagatgagctcccagcaggtcaagcagtggtttgctgagaaaatgggggaggagaccagagccgtggcagacacaggcagtgaggaccagggccctggtactggtgagctcacagcagttcacaaagggatgggtgacacctattcagaggtgtctgagaacagtgagtcgtgggagccccgtgtccctgaggccagctcagagccctttgacacatcgagtccccaggctggacgtcagctcgaaacagactgaatttgatctgattaatgtgaaggactggccagtctgggaaaccgcctgccacgtggaagagccaaacccgactctctgctgccacatgccgttcccatgcccggctgctgggcacctgggagagcttccagaatcctcgcagacagcccagagcctgccgctaccctcggcctgcccaccaccaagcaagcagcaagcaagatggggttctcatcagttcttcctcccacaatgtaggacctttcctttaccttccaatggataaaatagttcag

SEQ ID NO: 204761 - DNA, 3933 bp, Homo sapiens
  Payload ID: 20391
  Gene Name: zinc fingers and homeoboxes 3
  Uniprot ID: Q9H4I2
  ENST ID: ENST00000544979
  CDS Start-End: 466-3375
ggaagttctttccagctctggacaggaaaacatgaaaacagatgatcccaaggaggactgaaatgcaactgcagaagcaacatgtgaccttttagagatgcttgtgggactgcataaagtgaagagggaaactggaaaaaaacaatgaagctaatcccgaactcctggcctcaaatgatcttcctaccttggcttcccaaagtgctgggattacagacgtgagctgctgtgcctggccaagacttaattttgaatgacattgggactattgccaaaaatcaaatccatcttcatgttgtccacttctcagccttaattgaatagggaaaacctgctttctgcaaacaactgaaaaagctgcatttagaaactgtttctttggccctcatcgagaagctggaacttgtattgttaggccccttatgggacaagctctcaactgctgatcacccagtgattgtcaccatggccagcaagaggaaatccaccacaccatgcatgatcccagtgaagactgtggtgttgcaagatgccagcatggaggcccagcccgctgagaccttgcctgaaggaccccagcaggatctgcccccagaagcatctgctgccagcagtgaggcagcacagaaccccagcagtactgatggctctacactggccaatgggcatcggagcactttagatggctatttatattcctgtaaatactgcgatttcagatcccatgacatgacccaatttgtgggacatatgaactcagagcacacagactttaataaagacccaacctttgtatgcagtgggtgcagttttctggcaaaaacccctgaggggctttccttgcacaatgccacatgtcactccggggaagccagctttgtgtggaacgtggccaagccagacaatcatgtggttgtggagcagagcatccctgagagcaccagcactcctgacctagcgggtgagcccagtgctgaaggggctgatggacaggcagaaatcatcattaccaaaactccaatcatgaagataatgaaaggcaaagctgaagccaaaaaaattcatacactcaaggagaatgtccctagccagcctgtgggtgaggccttaccaaagctgtcgactggagaaatggaggtgagagagggggaccattccttcatcaatggggcagttccagtcagccaggcatctgccagctctgcaaaaaacccccatgccgccaacgggcccctgataggaacagtgccagttttgccagctggcatagcacagttcctctccctccagcagcagcccccagtgcatgcccaacaccatgtccaccagccactgcccacggccaaggcccttcccaaagtgatgatccccctgagcagcattccaacgtacaatgcagccatggactctaacagcttcctgaagaactccttccacaagttcccctaccccaccaaagccgagctctgctatttgactgtggtgaccaagtatccagaagaacagctcaagatctggttcacagcccaaaggctgaagcaggggatcagctggtcccctgaggagattgaggatgcccggaaaaagatgttcaatacagtcatccagtctgtgcctcagcccacaattacggttctaaataccccactcgtcgccagtgctggcaatgtccagcatctcatccaggccgctcttccaggtcacgttgtggggcagccagagggtacaggagggggacttctggtcactcagccattgatggccaatgggttgcaagcaacaagttcccctctccccctcacggtgacatccgtccccaagcagccaggtgtggcacccattaacactgtgtgttcaaatacaacgtcagctgtgaaggtggtcaatgcggcccagtcgctcctcacggcctgccccagcataacctcccaagccttccttgatgctagcatctacaaaaataagaaatctcatgaacagctgtcagctctgaaagggagcttctgtcggaaccagttcccagggcagagcgaagttgaacatctcacaaaagtgacgggcctcagtaccagagaggtgcggaaatggttcagtgatcgtagataccactgccggaacttgaagggctccagagcgatgatacctggagatcacagttccatcatcattgactctgtgccagaggtgtccttctccccatcgtccaaggtccctgaggtaacctgcattccgacaacagccacactagcaacccacccttctgccaaacgacaatcttggcaccagactcctgacttcacaccaaccaaatacaaggagagagcccctgagcagctcagagccctggagagcagttttgcacaaaaccctcttcctcttgatgaggaactggaccgcctgagaagtgaaaccaaaatgacccgacgagaaattgatagctggttttcagagagacggaaaaaagtgaatgctgaggagaccaagaaggctgaggagaatgcctctcaggaggaagaggaggctgctgaggatgagggtggagaagaggatttggccagtgagctaagggtctctggtgaaaatggctctctggaaatgcccagcagccatatcttggcagagcgcaaagtcagccccattaaaatcaacctgaagaacctgagggtcactgaagccaatggcaggaacgagattccagggctgggtgcctgtgaccctgaggatgatgagtcaaacaaactggcagagcagctcccaggcaaagtgagctgcaaaaagactgcccagcagcggcacttgctgcggcagctctttgtccagacacagtggccaagcaaccaggactatgactccatcatggcccagacgggtctgccacggccagaggtggtgcgctggtttggagatagcaggtacgcactgaagaacggccaactcaaatggtacgaagactataagcgaggcaacttcccaccagggctactggtcattgcccctggcaaccgggagctcctgcaggactattacatgacacacaagatgctgtatgaagaggacctgcagaacctctgtgacaagacccagatgagctcccagcagaaacagactgaatttgatctgattaatgtgaaggactggccagtctgggaaaccgcctgccacgtggaagagccaaacccgactctctgctgccacatgccgttcccatgcccggctgctgggcacctgggagagcttccagaatcctcgcagacagcccagagcctgccgctaccctcggcctgcccaccaccaagcaagcagcaagcaagatggggttctcatcagttcttcctcccacaatgtaggacctttcctttaccttccaatggataaaatagttcagagttcatagtcatattcatagacacagaatcaagcttttaacatatacatccacctctatatgttaaataaaacatcagattatcaacactgtcattacgtagaaactttggttagccaagcagtgcattgtcagttacgtcatctctaaaaatgacctgtgtctgttctctggggattgctgggtcacaggtgcccctcaccttccacagtcaggcagggaagttataggcacaaagctacgtctggaacccctttgtgccccctttgtgttcctcaaggaagcagtacctttgaagagatctctgctgcattaagtgatgaccggctacgtttcatgtcaggcttgctttgccttgtgggctactcagtgcagaacctgctgtaaccctcagttcaaaaaatggactggcaatgtgattagcgttggatgctttaccattctctttagttgttaccgtaattctgctttttcatgggagtttgaatcatggaccataacttttcagttatcagatcaactaaagaaacatttgttgttaagcctaa

SEQ ID NO: 204762 - DNA, 6296 bp, Homo sapiens
  Payload ID: 20391
  Gene Name: zinc fingers and homeoboxes 3
  Uniprot ID: Q9H4I2
  ENST ID: ENST00000559234
  CDS Start-End: 350-3220
cctgcgccggccgcccgcccggccgcggggagggaggcccgcagcgcgggaagagcggcccggtcgcgggcgccgccaccgccgccgctgccaggactgaaatgcaactgcagaagcaacatgtgaccttttagagatgcttgtgggactgcataaagtgaagagggaaactggaaaaaaacaatgaagtaaggaaaaaattgaatagggaaaacctgctttctgcaaacaactgaaaaagctgcatttagaaactgtttctttggccctcatcgagaagctggaacttgtattgttaggccccttatgggacaagctctcaactgctgatcacccagtgattgtcaccatggccagcaagaggaaatccaccacaccatgcatgatcccagtgaagactgtggtgttgcaagatgccagcatggaggcccagcccgctgagaccttgcctgaaggaccccagcaggatctgcccccagaagcatctgctgccagcagtgaggcagcacagaaccccagcagtactgatggctctacactggccaatgggcatcggagcactttagatggctatttatattcctgtaaatactgcgatttcagatcccatgacatgacccaatttgtgggacatatgaactcagagcacacagactttaataaagacccaacctttgtatgcagtgggtgcagttttctggcaaaaacccctgaggggctttccttgcacaatgccacatgtcactccggggaagccagctttgtgtggaacgtggccaagccagacaatcatgtggttgtggagcagagcatccctgagagcaccagcactcctgacctagcgggtgagcccagtgctgaaggggctgatggacaggcagaaatcatcattaccaaaactccaatcatgaagataatgaaaggcaaagctgaagccaaaaaaattcatacactcaaggagaatgtccctagccagcctgtgggtgaggccttaccaaagctgtcgactggagaaatggaggtgagagagggggaccattccttcatcaatggggcagttccagtcagccaggcatctgccagctctgcaaaaaacccccatgccgccaacgggcccctgataggaacagtgccagttttgccagctggcatagcacagttcctctccctccagcagcagcccccagtgcatgcccaacaccatgtccaccagccactgcccacggccaaggcccttcccaaagtgatgatccccctgagcagcattccaacgtacaatgcagccatggactctaacagcttcctgaagaactccttccacaagttcccctaccccaccaaagccgagctctgctatttgactgtggtgaccaagtatccagaagaacagctcaagatctggttcacagcccaaaggctgaagcaggggatcagctggtcccctgaggagattgaggatgcccggaaaaagatgttcaatacagtcatccagtctgtgcctcagcccacaattacggttctaaataccccactcgtcgccagtgctggcaatgtccagcatctcatccaggccgctcttccaggtcacgttgtggggcagccagagggtacaggagggggacttctggtcactcagccattgatggccaatgggttgcaagcaacaagttcccctctccccctcacggtgacatccgtccccaagcagccaggtgtggcacccattaacactgtgtgttcaaatacaacgtcagctgtgaaggtggtcaatgcggcccagtcgctcctcacggcctgccccagcataacctcccaagccttccttgatgctagcatctacaaaaataagaaatctcatgaacagctgtcagctctgaaagggagcttctgtcggaaccagttcccagggcagagcgaagttgaacatctcacaaaagtgacgggcctcagtaccagagaggtgcggaaatggttcagtgatcgtagataccactgccggaacttgaagggctccagagcgatgatacctggagatcacagttccatcatcattgactctgtgccagaggtgtccttctccccatcgtccaaggtccctgaggtaacctgcattccgacaacagccacactagcaacccacccttctgccaaacgacaatcttggcaccagactcctgacttcacaccaaccaaatacaaggagagagcccctgagcagctcagagccctggagagcagttttgcacaaaaccctcttcctcttgatgaggaactggaccgcctgagaagtgaaaccaaaatgacccgacgagaaattgatagctggttttcagagagacggaaaaaagtgaatgctgaggagaccaagaaggctgaggagaatgcctctcaggaggaagaggaggctgctgaggatgagggtggagaagaggatttggccagtgagctaagggtctctggtgaaaatggctctctggaaatgcccagcagccatatcttggcagagcgcaaagtcagccccattaaaatcaacctgaagaacctgagggtcactgaagccaatggcaggaacgagattccagggctgggtgcctgtgaccctgaggatgatgagtcaaacaaactggcagagcagctcccaggcaaagtgagctgcaaaaagactgcccagcagcggcacttgctgcggcagctctttgtccagacacagtggccaagcaaccaggactatgactccatcatggcccagacgggtctgccacggccagaggtggtgcgctggtttggagatagcaggtacgcactgaagaacggccaactcaaatggtacgaagactataagcgaggcaacttcccaccagggctactggtcattgcccctggcaaccgggagctcctgcaggactattacatgacacacaagatgctgtatgaagaggacctgcagaacctctgtgacaagacccagatgagctcccagcaggtcaagcagtggtttgctgagaaaatgggggaggagaccagagccgtggcagacacaggcagtgaggaccagggccctggtactggtgagctcacagcagttcacaaagggatgggtgacacctattcagaggtgtctgagaacagtgagtcgtgggagccccgtgtccctgaggccagctcagagccctttgacacatcgagtccccaggctggacgtcagctcgaaacagactgaatttgatctgattaatgtgaaggactggccagtctgggaaaccgcctgccacgtggaagagccaaacccgactctctgctgccacatgccgttcccatgcccggctgctgggcacctgggagagcttccagaatcctcgcagacagcccagagcctgccgctaccctcggcctgcccaccaccaagcaagcagcaagcaagatggggttctcatcagttcttcctcccacaatgtaggacctttcctttaccttccaatggataaaatagttcagagttcatagtcatattcatagacacagaatcaagcttttaacatatacatccacctctatatgttaaataaaacatcagattatcaacactgtcattacgtagaaactttggttagccaagcagtgcattgtcagttacgtcatctctaaaaatgacctgtgtctgttctctggggattgctgggtcacaggtgcccctcaccttccacagtcaggcagggaagttataggcacaaagctacgtctggaacccctttgtgccccctttgtgttcctcaaggaagcagtacctttgaagagatctctgctgcattaagtgatgaccggctacgtttcatgtcaggcttgctttgccttgtgggctactcagtgcagaacctgctgtaaccctcagttcaaaaaatggactggcaatgtgattagcgttggatgctttaccattctctttagttgttaccgtaattctgctttttcatgggagtttgaatcatggaccataacttttcagttatcagatcaactaaagaaacatttgttgttaagcctaatgtgctgacctatgtgcctgcattttttttttaatctagacatgtttggagtgagagaaagatggaaaaaagacatggggtagggacgtaagtggaaatctatagccacagcctgaagctttgaccactgcggttttcagagccctttctccacactcatttcagagcctcctatggtttgggaaggaataacacactggcccattagtaagggtgaaggctggagggatttgttgacttcttggaattatcagaggtagggtggtctttagcacaaagacttgcatgcagagatccctggcagaacacccagagtgcccgtggctcccaccccagggtctggccggtgtgctggatgcatgcccaagggtgctgggcatcactggtccttgtgaggatgcttttaaagttttatatttatgtccccaaacttggaaacaagaactctactttagcctaaccctcatgtccttttttgaattgagaaaattacaggaaatggtgcctttgaaaattagaaaacttgcttacagagctgttctaaatggtaaatcctcaatttccccaagaccggttgctctgagagtagctggtaaagaggggcgaactaaagacctgtccacctgtagctccgctcatttcttagaaaccacctgcttcccagagtgccaagccacaagtaccaggcttcgtgggcacagacacctcctgggctgggcagagtgacagtgctagaagaccccagagagagggcaagggctttgggcaagaagcactggtggtgttttagggaccgtccttctcccctacccagggaactggacctggcagggcaccgtgctcatgtggctccaaggacaagcatggcggtggccccttctgccttccaggagaggtcttgcttttgaaaccaaaatcatgttcttctaaagtgtcatcttctgccctccctgtcccaatagggaccacatcttatttgtctcaaacagggacttgtgagtacttggcaagttttgcagcctatttttgtattcttaatttggggagtaaagatgtttggtctcaaaaacctttgaggaattgccaagaatggcgagtgattgctttccttcagagaacagacacttggaatttctccttttagtgtttatatacgtgcagattaatttatatatatatatatacacacacacatatacagtataaatactcatttgattctcgtaaaacgcgcatctggcgtgtgcagttgagaaacttggtggcacatgggtgttgggggagtagcctgtgttggagggacaccagtgcactaggcagctggggcggcccaggctgaagccatctccgggtgtctgagaaaccacccagtgcctcacctccagatcctgctggcatcacctccagagccctgcatgcactggctgaagagttggtctgtggagaggattttcttggttacttgtattcacggttaatttacaacccaaacagcaaaacacagttggtggacaagttcatgcaggacctacagtgacccagccatgggcactagctcatctttcaggtggaaaagtacagtgctgcctgccctggtatgtttttcttatagatgttagccctgcccaacagccagggctacactacaaaaggcaagaatgcccatgtaaggagcccagcagtctggacagatccttcttcctctgctgttggatgagagtgagtgagtatgctctggaccttatccttgaaagatgatcaaaagcgatgatgagggaggcagtcatcacgcaggtgcttaaagggacattgtaggaggtactcaagggtttgggggcaaaaccctgaatccagccagtcgtgcacagagacacacccacactagcccagtggcagtgggggatgtgggatggcagcagccaggtatgtagccctgtcacaggacagctcactgtggttttgcacactgcctaagggttaaattgtgttgttgccttcagtagaaggcatttgtgggctgcagagttgagagttgggtgaggttagtctctcctgaagaaaaagcctataaaaagtggctaatcttatcccttttctctgtatgcagttggactcgtcagagatagtaaaatcatcttttagtgtttttttgttgctgatgtcttgtacccatttgttttttacatggggttgtagatcgagttctcaaaggtgaaaccagatgatcattctgataaaggaaatttaaatttg

SEQ ID NO: 204763 - DNA, 490 bp, Homo sapiens
  Payload ID: 20391
  Gene Name: zinc fingers and homeoboxes 3
  ENST ID: ENST00000559436
  CDS Start-End: 1-384
gtcattgcccctggcaaccgggagctcctgcaggactattacatgacacacaagatgctgtatgaagaggacctgcagaacctctgtgacaagacccagatgagctcccagcagactgaatttgatctgattaatgtgaaggactggccagtctgggaaaccgcctgccacgtggaagagccaaacccgactctctgctgccacatgccgttcccatgcccggctgctgggcacctgggagagcttccagaatcctcgcagacagcccagagcctgccgctaccctcggcctgcccaccaccaagcaagcagcaagcaagatggggttctcatcagttcttcctcccacaatgtaggacctttcctttaccttccaatggataaaatagttcagagttcatagtcatattcatagacacagaatcaagcttttaacatatacatccacctctatatgttaaataaaacatcagattatcaacactgtcat

SEQ ID NO: 204764 - DNA, 4283 bp, Homo sapiens
  Payload ID: 20391
  Gene Name: zinc fingers and homeoboxes 3
  ENST ID: ENST00000560364
  CDS Start-End: 524-1471
aaaggcagcaaatagactgaatgaaagatgagcttctgcctttatatccttctctcctgctacccaactcattgtggtgaaggaaaaagaaaacgcgggtggagactgcactatatgcttaggactgaaatgcaactgcagaagcaacatgtgaccttttagagatgcttgtgggactgcataaagtgaagagggaaactggaaaaaaacaatgaaatgaggaaactgagacacagcttaagaattttgcccaaagctacaaagtgattctaacccatggaccaagaccctgccttggagattggggaacaggtgttggaagggctctattttggcaaagaatggattatttatgtgagcatatttccgcaaaattgaatagggaaaacctgctttctgcaaacaactgaaaaagctgcatttagaaactgtttctttggccctcatcgagaagctggaacttgtattgttaggccccttatgggacaagctctcaactgctgatcacccagtgattgtcaccatggccagcaagaggaaatccaccacaccatgcatgatcccagtgaagactgtggtgttgcaagatgccagcatggaggcccagcccgctgagaccttgcctgaaggaccccagcaggatctgcccccagaagcatctgctgccagcagtgaggcagcacagaaccccagcagtactgatggctctacactggccaatgggcatcggagcactttagatggctatttatattcctgtaaatactgcgatttcagatcccatgacatgacccaatttgtgggacatatgaactcagagcacacagactttaataaagacccaacctttgtatgcagtgggtgcagttttctggcaaaaacccctgaggggctttccttgcacaatgccacatgtcactccggggaagccagctttgtgtggaacgtggccaagccagacaatcatgtggttgtggagcagagcatccctgagagcaccagcactcctgacctagcgggtgagcccagtgctgaaggggctgatggacaggcagaaatcatcattaccaaaactccaatcatgaagataatgaaaggcaaagctgaagccaaaaaaattcatacactcaaggagaatgtccctagccagcctgtgggtgaggccttaccaaagctgtcgactggagaaatggagaaacagactgaatttgatctgattaatgtgaaggactggccagtctgggaaaccgcctgccacgtggaagagccaaacccgactctctgctgccacatgccgttcccatgcccggctgctgggcacctgggagagcttccagaatcctcgcagacagcccagagcctgccgctaccctcggcctgcccaccaccaagcaagcagcaagcaagatggggttctcatcagttcttcctcccacaatgtaggacctttcctttaccttccaatggataaaatagttcagagttcatagtcatattcatagacacagaatcaagcttttaacatatacatccacctctatatgttaaataaaacatcagattatcaacactgtcattacgtagaaactttggttagccaagcagtgcattgtcagttacgtcatctctaaaaatgacctgtgtctgttctctggggattgctgggtcacaggtgcccctcaccttccacagtcaggcagggaagttataggcacaaagctacgtctggaacccctttgtgccccctttgtgttcctcaaggaagcagtacctttgaagagatctctgctgcattaagtgatgaccggctacgtttcatgtcaggcttgctttgccttgtgggctactcagtgcagaacctgctgtaaccctcagttcaaaaaatggactggcaatgtgattagcgttggatgctttaccattctctttagttgttaccgtaattctgctttttcatgggagtttgaatcatggaccataacttttcagttatcagatcaactaaagaaacatttgttgttaagcctaatgtgctgacctatgtgcctgcattttttttttaatctagacatgtttggagtgagagaaagatggaaaaaagacatggggtagggacgtaagtggaaatctatagccacagcctgaagctttgaccactgcggttttcagagccctttctccacactcatttcagagcctcctatggtttgggaaggaataacacactggcccattagtaagggtgaaggctggagggatttgttgacttcttggaattatcagaggtagggtggtctttagcacaaagacttgcatgcagagatccctggcagaacacccagagtgcccgtggctcccaccccagggtctggccggtgtgctggatgcatgcccaagggtgctgggcatcactggtccttgtgaggatgcttttaaagttttatatttatgtccccaaacttggaaacaagaactctactttagcctaaccctcatgtccttttttgaattgagaaaattacaggaaatggtgcctttgaaaattagaaaacttgcttacagagctgttctaaatggtaaatcctcaatttccccaagaccggttgctctgagagtagctggtaaagaggggcgaactaaagacctgtccacctgtagctccgctcatttcttagaaaccacctgcttcccagagtgccaagccacaagtaccaggcttcgtgggcacagacacctcctgggctgggcagagtgacagtgctagaagaccccagagagagggcaagggctttgggcaagaagcactggtggtgttttagggaccgtccttctcccctacccagggaactggacctggcagggcaccgtgctcatgtggctccaaggacaagcatggcggtggccccttctgccttccaggagaggtcttgcttttgaaaccaaaatcatgttcttctaaagtgtcatcttctgccctccctgtcccaatagggaccacatcttatttgtctcaaacagggacttgtgagtacttggcaagttttgcagcctatttttgtattcttaatttggggagtaaagatgtttggtctcaaaaacctttgaggaattgccaagaatggcgagtgattgctttccttcagagaacagacacttggaatttctccttttagtgtttatatacgtgcagattaatttatatatatatatatacacacacacatatacagtataaatactcatttgattctcgtaaaacgcgcatctggcgtgtgcagttgagaaacttggtggcacatgggtgttgggggagtagcctgtgttggagggacaccagtgcactaggcagctggggcggcccaggctgaagccatctccgggtgtctgagaaaccacccagtgcctcacctccagatcctgctggcatcacctccagagccctgcatgcactggctgaagagttggtctgtggagaggattttcttggttacttgtattcacggttaatttacaacccaaacagcaaaacacagttggtggacaagttcatgcaggacctacagtgacccagccatgggcactagctcatctttcaggtggaaaagtacagtgctgcctgccctggtatgtttttcttatagatgttagccctgcccaacagccagggctacactacaaaaggcaagaatgcccatgtaaggagcccagcagtctggacagatccttcttcctctgctgttggatgagagtgagtgagtatgctctggaccttatccttgaaagatgatcaaaagcgatgatgagggaggcagtcatcacgcaggtgcttaaagggacattgtaggaggtactcaagggtttgggggcaaaaccctgaatccagccagtcgtgcacagagacacacccacactagcccagtggcagtgggggatgtgggatggcagcagccaggtatgtagccctgtcacaggacagctcactgtggttttgcacactgcctaagggttaaattgtgttgttgccttcagtagaaggcatttgtgggctgcagagttgagagttgggtgaggttagtctctcctgaagaaaaagcctataaaaagtggctaatcttatcccttttctctgtatgcagttggactcgtcagagatagtaaaatcatcttttagtgtttttttgttgctgatgtcttgtacccatttgttttttacatggggttgtagatcgagttctcaaaggtgaaaccagatgatcattctgataaaggaaatttaaatttga

SEQ ID NO: 204765 - DNA, 4140 bp, Homo sapiens
  Payload ID: 20391
  Gene Name: zinc fingers and homeoboxes 3
  Uniprot ID: Q9H4I2
  ENST ID: ENST00000560361
  CDS Start-End: 906-3776
agccgtcaaaggcagcaaatagactgaatgaaagatgagcttctgcctttatatccttctctcctgctacccaactcattgtggtgaaggaaaaagaaaacgcgggtggagactgcactatatgcttaggactgaaatgcaactgcagaagcaacatgtgaccttttagagatgcttgtgggactgcataaagtgaagagggaaactggaaaaaaacaatgaacatttatcaccatccagccactgtagataaatttgattggctgtctccctgccttcccttcacacccagtaccttccctgcctgaaatcctcattgagggcaagaactttatccccaggatctaaaccagtgctggacaatagatgctcatcccttccataggaaacagggaatgtttgtttctgtcttctggtaggagaaggattggtcccacccccagctccagggatggatcttgattgtttaagcccagtcagtgattctaacccatggaccaagaccctgccttggagattggggaacaggtgttggaagggctctattttggcaaagaatggattatttatgtgagcatatttccgcaaagctaatcccgaactcctggcctcaaatgatcttcctaccttggcttcccaaagtgctgggattacagacgtgagctgctgtgcctggccaagacttaattttgaatgacattgggactattgccaaaaatcaaatccatcttcatgttgtccacttctcagccttaattgaatagggaaaacctgctttctgcaaacaactgaaaaagctgcatttagaaactgtttctttggccctcatcgagaagctggaacttgtattgttaggccccttatgggacaagctctcaactgctgatcacccagtgattgtcaccatggccagcaagaggaaatccaccacaccatgcatgatcccagtgaagactgtggtgttgcaagatgccagcatggaggcccagcccgctgagaccttgcctgaaggaccccagcaggatctgcccccagaagcatctgctgccagcagtgaggcagcacagaaccccagcagtactgatggctctacactggccaatgggcatcggagcactttagatggctatttatattcctgtaaatactgcgatttcagatcccatgacatgacccaatttgtgggacatatgaactcagagcacacagactttaataaagacccaacctttgtatgcagtgggtgcagttttctggcaaaaacccctgaggggctttccttgcacaatgccacatgtcactccggggaagccagctttgtgtggaacgtggccaagccagacaatcatgtggttgtggagcagagcatccctgagagcaccagcactcctgacctagcgggtgagcccagtgctgaaggggctgatggacaggcagaaatcatcattaccaaaactccaatcatgaagataatgaaaggcaaagctgaagccaaaaaaattcatacactcaaggagaatgtccctagccagcctgtgggtgaggccttaccaaagctgtcgactggagaaatggaggtgagagagggggaccattccttcatcaatggggcagttccagtcagccaggcatctgccagctctgcaaaaaacccccatgccgccaacgggcccctgataggaacagtgccagttttgccagctggcatagcacagttcctctccctccagcagcagcccccagtgcatgcccaacaccatgtccaccagccactgcccacggccaaggcccttcccaaagtgatgatccccctgagcagcattccaacgtacaatgcagccatggactctaacagcttcctgaagaactccttccacaagttcccctaccccaccaaagccgagctctgctatttgactgtggtgaccaagtatccagaagaacagctcaagatctggttcacagcccaaaggctgaagcaggggatcagctggtcccctgaggagattgaggatgcccggaaaaagatgttcaatacagtcatccagtctgtgcctcagcccacaattacggttctaaataccccactcgtcgccagtgctggcaatgtccagcatctcatccaggccgctcttccaggtcacgttgtggggcagccagagggtacaggagggggacttctggtcactcagccattgatggccaatgggttgcaagcaacaagttcccctctccccctcacggtgacatccgtccccaagcagccaggtgtggcacccattaacactgtgtgttcaaatacaacgtcagctgtgaaggtggtcaatgcggcccagtcgctcctcacggcctgccccagcataacctcccaagccttccttgatgctagcatctacaaaaataagaaatctcatgaacagctgtcagctctgaaagggagcttctgtcggaaccagttcccagggcagagcgaagttgaacatctcacaaaagtgacgggcctcagtaccagagaggtgcggaaatggttcagtgatcgtagataccactgccggaacttgaagggctccagagcgatgatacctggagatcacagttccatcatcattgactctgtgccagaggtgtccttctccccatcgtccaaggtccctgaggtaacctgcattccgacaacagccacactagcaacccacccttctgccaaacgacaatcttggcaccagactcctgacttcacaccaaccaaatacaaggagagagcccctgagcagctcagagccctggagagcagttttgcacaaaaccctcttcctcttgatgaggaactggaccgcctgagaagtgaaaccaaaatgacccgacgagaaattgatagctggttttcagagagacggaaaaaagtgaatgctgaggagaccaagaaggctgaggagaatgcctctcaggaggaagaggaggctgctgaggatgagggtggagaagaggatttggccagtgagctaagggtctctggtgaaaatggctctctggaaatgcccagcagccatatcttggcagagcgcaaagtcagccccattaaaatcaacctgaagaacctgagggtcactgaagccaatggcaggaacgagattccagggctgggtgcctgtgaccctgaggatgatgagtcaaacaaactggcagagcagctcccaggcaaagtgagctgcaaaaagactgcccagcagcggcacttgctgcggcagctctttgtccagacacagtggccaagcaaccaggactatgactccatcatggcccagacgggtctgccacggccagaggtggtgcgctggtttggagatagcaggtacgcactgaagaacggccaactcaaatggtacgaagactataagcgaggcaacttcccaccagggctactggtcattgcccctggcaaccgggagctcctgcaggactattacatgacacacaagatgctgtatgaagaggacctgcagaacctctgtgacaagacccagatgagctcccagcaggtcaagcagtggtttgctgagaaaatgggggaggagaccagagccgtggcagacacaggcagtgaggaccagggccctggtactggtgagctcacagcagttcacaaagggatgggtgacacctattcagaggtgtctgagaacagtgagtcgtgggagccccgtgtccctgaggccagctcagagccctttgacacatcgagtccccaggctggacgtcagctcgaaacagactgaatttgatctgattaatgtgaaggactggccagtctgggaaaccgcctgccacgtggaagagccaaacccgactctctgctgccacatgccgttcccatgcccggctgctgggcacctgggagagcttccagaatcctcgcagacagcccagagcctgccgctaccctcggcctgcccaccaccaagcaagcagcaagcaagatggggttctcatcagttcttcctcccacaatgtaggacctttcctttaccttccaatggataaaatagttcagagttcatagtcatattcatagacacagaatcaagcttttaacatatacatccacctctatatgttaaataaaacatcagattatcaaca

SEQ ID NO: 204766 - DNA, 1528 bp, Homo sapiens
  Payload ID: 20391
  Gene Name: zinc fingers and homeoboxes 3
  ENST ID: ENST00000558993
  CDS Start-End: 476-1423
cgtagaaggcgcaaaagggggtggtagaggggaagcgggggcgttcgcgcaggcccgcctgaccgtgtgagagtgcatgcccgagtgtgcgttccgcgtgtgcacccgagagccgcctgcgtccacgcccgagggcccttgcactctgctgggatgtggcagcccatgcccccggtgtaaagagcgtcagctcgaccagtgaaggcggcagagccaggactcgaaccactcggggtacagtagcaccctgaatcttgggacccttgtctgcccacgcgaaaacactacacgtgggccccaggtcctcggattccctgagtggcgtattgaatagggaaaacctgctttctgcaaacaactgaaaaagctgcatttagaaactgtttctttggccctcatcgagaagctggaacttgtattgttaggccccttatgggacaagctctcaactgctgatcacccagtgattgtcaccatggccagcaagaggaaatccaccacaccatgcatgatcccagtgaagactgtggtgttgcaagatgccagcatggaggcccagcccgctgagaccttgcctgaaggaccccagcaggatctgcccccagaagcatctgctgccagcagtgaggcagcacagaaccccagcagtactgatggctctacactggccaatgggcatcggagcactttagatggctatttatattcctgtaaatactgcgatttcagatcccatgacatgacccaatttgtgggacatatgaactcagagcacacagactttaataaagacccaacctttgtatgcagtgggtgcagttttctggcaaaaacccctgaggggctttccttgcacaatgccacatgtcactccggggaagccagctttgtgtggaacgtggccaagccagacaatcatgtggttgtggagcagagcatccctgagagcaccagcactcctgacctagcgggtgagcccagtgctgaaggggctgatggacaggcagaaatcatcattaccaaaactccaatcatgaagataatgaaaggcaaagctgaagccaaaaaaattcatacactcaaggagaatgtccctagccagcctgtgggtgaggccttaccaaagctgtcgactggagaaatggagaaacagactgaatttgatctgattaatgtgaaggactggccagtctgggaaaccgcctgccacgtggaagagccaaacccgactctctgctgccacatgccgttcccatgcccggctgctgggcacctgggagagcttccagaatcctcgcagacagcccagagcctgccgctaccctcggcctgcccaccaccaagcaagcagcaagcaagatggggttctcatcagttcttcctcccacaatgtaggacctttcctttaccttccaatggataaaatagttcagagttcatagtcatattcatagacacagaatcaagcttttaacatatacatccacctctatatgttaaataaaacatcagattatcaacactgtca

SEQ ID NO: 204767 - DNA, 3108 bp, Homo sapiens
  Payload ID: 20392
  Gene Name: zinc metallopeptidase STE24
  Uniprot ID: O75844
  ENST ID: ENST00000372759
  CDS Start-End: 166-1593
ctgtgacactgccagcagcgcgcagagggagggatgggggcgggtatcggcgtaggggccctcggaaagaacggatattgctgtgacaccgcggggacgctctgaagggacgagtgtcggtgtggcaccggtgcacgctgaaggagccggcggaaccgggtggccatggggatgtgggcatcgctggacgctttgtgggagatgccggccgagaagcgtatcttcggggccgtgctgctcttttcctggacagtgtatctttgggagaccttcctagcacagcggcagagaaggatatataaaacaacaactcatgtaccaccggagttaggacagatcatggattctgaaacatttgagaaatctcgactctatcaactggataaaagcactttcagcttctggtcaggactctattcagagactgaaggcactcttattcttctctttggaggaataccttatctctggagactttctggacggttctgtggttatgctggctttggaccagaatatgagatcactcagtccctggtgtttctgctgttggctacacttttcagtgcattgactggtttgccatggagtctttataatacttttgtgatagaagaaaaacatggcttcaatcaacagactttggggttcttcatgaaagatgcaatcaagaaatttgttgtgactcagtgtattttgttgcctgtgtcttcacttctactttacattattaaaattgggggtgactatttttttatttatgcctggctgttcacattagttgtgtctctggttcttgtcacaatctatgctgattatattgcccctttatttgacaaattcacacctctgcctgagggaaagcttaaagaagaaattgaagtaatggcaaagagtattgactttcctttgacgaaggtgtatgttgtggaaggatctaaacgctcttcccacagcaatgcttatttttatggcttcttcaagaacaagcgaatagttttgtttgacactctactagaagagtactctgtactaaacaaagacatccaggaggattctggcatggaaccccgcaatgaggaagaagggaacagtgaagaaataaaagctaaagttaaaaataagaaacaaggatgtaaaaatgaggaggtactcgctgtactaggccatgaactggggcactggaagttgggacatacagtcaaaaatatcattattagccagatgaattctttcctgtgtttttttttatttgctgtattaattggtcgaaaggagctttttgctgcatttggtttttatgatagccaacccactcttattggactattgatcatcttccagtttattttttcaccttacaatgaggttctttctttttgcctaacagtcctaagccgcagatttgagtttcaagctgatgcatttgccaagaaacttgggaaggctaaagacttatattctgctttaatcaaacttaacaaagataacttgggattccctgtttctgactggttgttctcaatgtggcattattctcatcctccactgctagagagacttcaagctttgaaaactatgaagcaacactgagatgtccaggatctgtgactgaagacatttctgattatttctgtcctggcagcatgttccagctcttgatgtttttaaacttttttttagaagaaaaattaagtacagaaaagcccagatttaaatacatttaatatgtcattttaaaaatgattttaataattcatttcttaaaacactgaatgaattttgaagcttaatgtttttaaaggcatagttttatctttgacatctaatttaccatcaagttgtaaaattatttggaaaaatacagaactcgttttatttgtatacttatatggaatctgcatgtgaggtgtttgagggcatatgtttgaaagagggagcatcaccacaggaatcctttctgtgaggtggaaacagtggtcctgaatcattgtgctcacacctaacttgaaatctggtcttactttcatgctgttatgatttcacctggtgaatcagtgttttaaataagaaaggtaatagttggtaaggccaatgttatttaaatgaaagtagttagaaaaatgctctcctattctaccaaatttttaatttctttcttccctttcttgctacacagtgatcaagagtttctcatagtgctttgaagttagaaattatgtataggatattttaaatcattgagttttgtggggtttttttgtttgtttgtttcttttgttttttggaaaatccgtgtctttatctttttttcccacgtggtagatatgatcccattggaggtaaattgtagcttcttctcattcatgcagtaaataatacatcctttcactcagcagagatggccatattaaacacgttttgctatgttaaaagtggcagaacaggaaagacgaattaaaaataacattttttaagcgacataaggatgaaatactgatgaatctctgtgacattacagggaaaaaaatatagttttctatctctttcaagggcagaagagttttcatttttatttttgtaattttatctgtaagtcataaatattacttaatcaggcctgattctacttttgaaaattacagttcttgaaatgcagataatgtttactttgaaaacaaatgtcatgaatgatttccagtttttaaagctatatgtttcactgcttcatatctctgtccactttctgaatgagaacttattttgtgcctagagctctcactcactgataatgcttattaccttctgggcatttattccaaagtgggatcaactgtacgcctttggtatctgaccataaagtcttttgctccgctgacatttgggtgatgtcttcacatggaaatataataaaaataaaaatctagtttaatactgcattatttattttcctaaggctaaagaggagcagtcctatgcttttattcagcatcctttatctgtgacttcatgctctgataactgcctttccttccttctgtgcctttgaatacaaatttcagttctgcaaaagtgaaacattaaacattgccaacgcaaatgtatgta

SEQ ID NO: 204768 - DNA, 864 bp, Homo sapiens
  Payload ID: 20393
  Gene Name: zinc ribbon domain containing 1
  Uniprot ID: Q9P1U0
  ENST ID: ENST00000332435
  CDS Start-End: 272-652
gccgcgggcgcagagctggcgctctagcccacggagttggttaactcctctcaccggcccctggaaagggttccaagtcctttagtacccgacgctgtctgggaattccgggcgtttcggctccttggtcgcagaggcaggaggcgtgcgtggcaggagggttcgggttatatactcctaggtcctgggacagaatagttacgacctctgggacaggaactcttctctcttttgttaataaacttccaactccctcctcagacccgaccgcatgtctgtcatggacctcgccaatacttgctccagctttcagtcggacctggatttctgttcagattgcggctcggtcctgcctctgcccggggctcaggatacggtcacctgtattcgctgtggcttcaacatcaacgttcgggactttgaggggaaggttgtgaagacttcggttgtgttccaccaactggggacagccatgcctatgtcggtggaggaagggcctgagtgccagggacctgtggttgacaggcgctgccctcgatgtggtcatgaaggaatggcataccacaccagacagatgcgttcagccgatgaagggcaaactgtcttctacacctgtaccaactgcaagttccaggagaaggaagactcttgacctttttcctgggcaactctacagtccctccctcctttcggaaggtgaaggatactgggtttttagatgccttgtccatcctgtctggttgcaatgttttgctcccagaagagaatcagatcatcatgtggggattaccattgttcctggagtactcctacccttagttgaatttccttattaaagttatatttttctataagaccctgaca

SEQ ID NO: 204769 - DNA, 743 bp, Homo sapiens
  Payload ID: 20393
  Gene Name: zinc ribbon domain containing 1
  Uniprot ID: Q9P1U0
  ENST ID: ENST00000359374
  CDS Start-End: 151-531
gggcgcagagctggcgctctagcccacggagttggttaactcctctcaccggcccctggaaagggttccaagtcctttagtacccgacgctgtctgggaattccgggcgtttcggctccttggtcgcagaggcaggaggcacccgaccgcatgtctgtcatggacctcgccaatacttgctccagctttcagtcggacctggatttctgttcagattgcggctcggtcctgcctctgcccggggctcaggatacggtcacctgtattcgctgtggcttcaacatcaacgttcgggactttgaggggaaggttgtgaagacttcggttgtgttccaccaactggggacagccatgcctatgtcggtggaggaagggcctgagtgccagggacctgtggttgacaggcgctgccctcgatgtggtcatgaaggaatggcataccacaccagacagatgcgttcagccgatgaagggcaaactgtcttctacacctgtaccaactgcaagttccaggagaaggaagactcttgacctttttcctgggcaactctacagtccctccctcctttcggaaggtgaaggatactgggtttttagatgccttgtccatcctgtctggttgcaatgttttgctcccagaagagaatcagatcatcatgtggggattaccattgttcctggagtactcctacccttagttgaatttccttattaaagttatatttttctataagaccctgaca

SEQ ID NO: 204770 - DNA, 736 bp, Homo sapiens
  Payload ID: 20393
  Gene Name: zinc ribbon domain containing 1
  Uniprot ID: Q9P1U0
  ENST ID: ENST00000376782
  CDS Start-End: 144-524
gcgggcgcagagctggcgctctagcccacggagttggttaactcctctcaccggcccctggaaagggttccaagtcctttagtacccgacgctgtctgggaattccgggcgtttcggctccttggtcgcagagacccgaccgcatgtctgtcatggacctcgccaatacttgctccagctttcagtcggacctggatttctgttcagattgcggctcggtcctgcctctgcccggggctcaggatacggtcacctgtattcgctgtggcttcaacatcaacgttcgggactttgaggggaaggttgtgaagacttcggttgtgttccaccaactggggacagccatgcctatgtcggtggaggaagggcctgagtgccagggacctgtggttgacaggcgctgccctcgatgtggtcatgaaggaatggcataccacaccagacagatgcgttcagccgatgaagggcaaactgtcttctacacctgtaccaactgcaagttccaggagaaggaagactcttgacctttttcctgggcaactctacagtccctccctcctttcggaaggtgaaggatactgggtttttagatgccttgtccatcctgtctggttgcaatgttttgctcccagaagagaatcagatcatcatgtggggattaccattgttcctggagtactcctacccttagttgaatttccttattaaagttatatttttctataagaccctgaca

SEQ ID NO: 204771 - DNA, 754 bp, Homo sapiens
  Payload ID: 20393
  Gene Name: zinc ribbon domain containing 1
  Uniprot ID: Q9P1U0
  ENST ID: ENST00000376785
  CDS Start-End: 162-542
gcagagctggcgctctagcccacggagttggttaactcctctcaccggcccctggaaagggttccaagtcctttagtacccgacgctgtctgggaattccgggcgtttcggctccttggtcgcagaggcaggaggcgtgcgtggcaggaggacccgaccgcatgtctgtcatggacctcgccaatacttgctccagctttcagtcggacctggatttctgttcagattgcggctcggtcctgcctctgcccggggctcaggatacggtcacctgtattcgctgtggcttcaacatcaacgttcgggactttgaggggaaggttgtgaagacttcggttgtgttccaccaactggggacagccatgcctatgtcggtggaggaagggcctgagtgccagggacctgtggttgacaggcgctgccctcgatgtggtcatgaaggaatggcataccacaccagacagatgcgttcagccgatgaagggcaaactgtcttctacacctgtaccaactgcaagttccaggagaaggaagactcttgacctttttcctgggcaactctacagtccctccctcctttcggaaggtgaaggatactgggtttttagatgccttgtccatcctgtctggttgcaatgttttgctcccagaagagaatcagatcatcatgtggggattaccattgttcctggagtactcctacccttagttgaatttccttattaaagttatatttttctataagaccctgaca

SEQ ID NO: 204772 - DNA, 736 bp, Homo sapiens
  Payload ID: 20393
  Gene Name: zinc ribbon domain containing 1
  Uniprot ID: Q9P1U0
  ENST ID: ENST00000383613
  CDS Start-End: 144-524
gcgggcgcagagctggcgctctagcccacggagttggttaactcctctcaccggcccctggaaagggttccaagtgctttagtacccgacgctgtctgggaattccgggcgtttcggctccttggtcgcagagacccgaccgcatgtctgtcatggacctcgccaatacttgctccagctttcagtcggacctggatttctgttcagattgcggctcggtcctgcctctgcccggggctcaggatacggtcacctgtattcgctgtggcttcaacatcaacgttcgggactttgaggggaaggttgtgaagacttcggttgtgttccaccaactggggacagccatgcctatgtcggtggaggaagggcctgagtgccagggacctgtggttgacaggcgctgccctcgatgtggtcatgaaggaatggcataccacaccagacaaatgcgttcagccgatgaagggcaaactgtcttctacacctgtaccaactgcaagttccaggagaaggaagactcttgacctttttcctgggcaactctgcagtccctccctcctttcggaaggtgaaggatactgggtttttagatgccttgtccatcctgtctggttgcaatgttttgctcccagaagagaatcagatcatcatgtggggattaccattgttcctggagtactcctacccttagttgaatttccttattaaagttatatttttctataagaccctgaca

SEQ ID NO: 204773 - DNA, 755 bp, Homo sapiens
  Payload ID: 20393
  Gene Name: zinc ribbon domain containing 1
  Uniprot ID: Q9P1U0
  ENST ID: ENST00000400659
  CDS Start-End: 163-543
gcagagctggcgctctagcccacggagttggttaactcctctcaccggcccctggaaagggttccaagtgctttagtacccgacgctgtctgggaattccgggcgtttcggctccttggtcgcagaggcaggagggcgtgcgtggcaggaggacccgaccgcatgtctgtcatggacctcgccaatacttgctccagctttcagtcggacctggatttctgttcagattgcggctcggtcctgcctctgcccggggctcaggatacggtcacctgtattcgctgtggcttcaacatcaacgttcgggactttgaggggaaggttgtgaagacttcggttgtgttccaccaactggggacagccatgcctatgtcggtggaggaagggcctgagtgccagggacctgtggttgacaggcgctgccctcgatgtggtcatgaaggaatggcataccacaccagacaaatgcgttcagccgatgaagggcaaactgtcttctacacctgtaccaactgcaagttccaggagaaggaagactcttgacctttttcctgggcaactctgcagtccctccctcctttcggaaggtgaaggatactgggtttttagatgccttgtccatcctgtctggttgcaatgttttgctcccagaagagaatcagatcatcatgtggggattaccattgttcctggagtactcctacccttagttgaatttccttattaaagttatatttttctataagaccctgaca

SEQ ID NO: 204774 - DNA, 744 bp, Homo sapiens
  Payload ID: 20393
  Gene Name: zinc ribbon domain containing 1
  Uniprot ID: Q9P1U0
  ENST ID: ENST00000400660
  CDS Start-End: 152-532
gggcgcagagctggcgctctagcccacggagttggttaactcctctcaccggcccctggaaagggttccaagtgctttagtacccgacgctgtctgggaattccgggcgtttcggctccttggtcgcagaggcaggagggcacccgaccgcatgtctgtcatggacctcgccaatacttgctccagctttcagtcggacctggatttctgttcagattgcggctcggtcctgcctctgcccggggctcaggatacggtcacctgtattcgctgtggcttcaacatcaacgttcgggactttgaggggaaggttgtgaagacttcggttgtgttccaccaactggggacagccatgcctatgtcggtggaggaagggcctgagtgccagggacctgtggttgacaggcgctgccctcgatgtggtcatgaaggaatggcataccacaccagacaaatgcgttcagccgatgaagggcaaactgtcttctacacctgtaccaactgcaagttccaggagaaggaagactcttgacctttttcctgggcaactctgcagtccctccctcctttcggaaggtgaaggatactgggtttttagatgccttgtccatcctgtctggttgcaatgttttgctcccagaagagaatcagatcatcatgtggggattaccattgttcctggagtactcctacccttagttgaatttccttattaaagttatatttttctataagaccctgaca

SEQ ID NO: 204775 - DNA, 865 bp, Homo sapiens
  Payload ID: 20393
  Gene Name: zinc ribbon domain containing 1
  Uniprot ID: Q9P1U0
  ENST ID: ENST00000400662
  CDS Start-End: 273-653
gccgcgggcgcagagctggcgctctagcccacggagttggttaactcctctcaccggcccctggaaagggttccaagtgctttagtacccgacgctgtctgggaattccgggcgtttcggctccttggtcgcagaggcaggagggcgtgcgtggcaggagggttcgggttatatactcctaggtcctgggacagaatagttacgacctctgggacaggaactcttctctcttttgttaataaacttccaactccctcctcagacccgaccgcatgtctgtcatggacctcgccaatacttgctccagctttcagtcggacctggatttctgttcagattgcggctcggtcctgcctctgcccggggctcaggatacggtcacctgtattcgctgtggcttcaacatcaacgttcgggactttgaggggaaggttgtgaagacttcggttgtgttccaccaactggggacagccatgcctatgtcggtggaggaagggcctgagtgccagggacctgtggttgacaggcgctgccctcgatgtggtcatgaaggaatggcataccacaccagacaaatgcgttcagccgatgaagggcaaactgtcttctacacctgtaccaactgcaagttccaggagaaggaagactcttgacctttttcctgggcaactctgcagtccctccctcctttcggaaggtgaaggatactgggtttttagatgccttgtccatcctgtctggttgcaatgttttgctcccagaagagaatcagatcatcatgtggggattaccattgttcctggagtactcctacccttagttgaatttccttattaaagttatatttttctataagaccctgaca

SEQ ID NO: 204776 - DNA, 754 bp, Homo sapiens
  Payload ID: 20393
  Gene Name: zinc ribbon domain containing 1
  Uniprot ID: Q9P1U0
  ENST ID: ENST00000451875
  CDS Start-End: 162-542
gcagagctggcgctctagcccacggagttggttaactcctctcaccggcccctggaaagggttccaagtcctttagtacccgacgctgtctgggaattccgggcgtttcggctccttggtcgcagaggcaggaggcgtgcgtggcaggaggacccgaccgcatgtctgtcatggacctcgccaatacttgctccagctttcagtcggacctggatttctgttcagattgcggctcggtcctgcctctgcccggggctcaggatacggtcacctgtattcgctgtggcttcaacatcaacgttcgggactttgaggggaaggttgtgaagacttcggttgtgttccaccaactggggacagccatgcctatgtcggtggaggaagggcctgagtgccagggacctgtggttgacaggcgctgccctcgatgtggtcatgaaggaatggcataccacaccagacagatgcgttcagccgatgaagggcaaactgtcttctacacctgtaccaactgcaagttccaggagaaggaagactcttgacctttttcctgggcaactctacagtccctccctcctttcggaaggtgcaggatactgggtttttagatgccttgtccatcctgtctggttgcaatgttttgctcccagaagagaatcagatcatcatgtggggattaccattgttcctggagtactcctacccttagttgaatttccttattaaagttatatttttctataagaccctgaca

SEQ ID NO: 204777 - DNA, 743 bp, Homo sapiens; identical to SEQ ID NO: 204769
  Payload ID: 20393
  Gene Name: zinc ribbon domain containing 1
  Uniprot ID: Q9P1U0
  ENST ID: ENST00000443142
  CDS Start-End: 151-531

SEQ ID NO: 204778 - DNA, 743 bp, Homo sapiens; identical to SEQ ID NO: 204769
  Payload ID: 20393
  Gene Name: zinc ribbon domain containing 1
  Uniprot ID: Q9P1U0
  ENST ID: ENST00000433264
  CDS Start-End: 151-531

SEQ ID NO: 204779 - DNA, 743 bp, Homo sapiens; identical to SEQ ID NO: 204769
  Payload ID: 20393
  Gene Name: zinc ribbon domain containing 1
  Uniprot ID: Q9P1U0
  ENST ID: ENST00000442585
  CDS Start-End: 151-531

SEQ ID NO: 204780 - DNA, 754 bp, Homo sapiens; identical to SEQ ID NO: 204771
  Payload ID: 20393
  Gene Name: zinc ribbon domain containing 1
  Uniprot ID: Q9P1U0
  ENST ID: ENST00000431416
  CDS Start-End: 162-542

SEQ ID NO: 204781 - DNA, 864 bp, Homo sapiens; identical to SEQ ID NO: 204768
  Payload ID: 20393
  Gene Name: zinc ribbon domain containing 1
  Uniprot ID: Q9P1U0
  ENST ID: ENST00000443494
  CDS Start-End: 272-652

SEQ ID NO: 204782 - DNA, 754 bp, Homo sapiens; identical to SEQ ID NO: 204771
  Payload ID: 20393
  Gene Name: zinc ribbon domain containing 1
  Uniprot ID: Q9P1U0
  ENST ID: ENST00000444027
  CDS Start-End: 162-542

SEQ ID NO: 204783 - DNA, 754 bp, Homo sapiens; identical to SEQ ID NO: 204771
  Payload ID: 20393
  Gene Name: zinc ribbon domain containing 1
  Uniprot ID: Q9P1U0
  ENST ID: ENST00000412396
  CDS Start-End: 162-542

SEQ ID NO: 204784 - DNA, 864 bp, Homo sapiens; identical to SEQ ID NO: 204768
  Payload ID: 20393
  Gene Name: zinc ribbon domain containing 1
  Uniprot ID: Q9P1U0
  ENST ID: ENST00000417275
  CDS Start-End: 272-652

SEQ ID NO: 204785 - DNA, 743 bp, Homo sapiens; identical to SEQ ID NO: 204769
  Payload ID: 20393
  Gene Name: zinc ribbon domain containing 1
  Uniprot ID: Q9P1U0
  ENST ID: ENST00000432227
  CDS Start-End: 151-531

SEQ ID NO: 204786 - DNA, 743 bp, Homo sapiens
  Payload ID: 20393
  Gene Name: zinc ribbon domain containing 1
  Uniprot ID: Q9P1U0
  ENST ID: ENST00000446493
  CDS Start-End: 151-531
gggcgcagagctggcgctctagcccacggagttggttaactcctctcaccggcccctggaaagggttccaagtcctttagtacccgacgctgtctgggaattccgggcgtttcggctccttggtcgcagaggcaggaggcacccgaccgcatgtctgtcatggacctcgccaatacttgctccagctttcagtcggacctggatttctgttcagattgcggctcggtcctgcctctgcccggggctcaggatacggtcacctgtattcgctgtggcttcaacatcaacgttcgggactttgaggggaaggttgtgaagacttcggttgtgttccaccaactggggacagccatgcctatgtcggtggaggaagggcctgagtgccagggacctgtggttgacaggcgctgccctcgatgtggtcatgaaggaatggcataccacaccagacagatgcgttcagccgatgaagggcaaactgtcttctacacctgtaccaactgcaagttccaggagaaggaagactcttgacctttttcctgggcaactctacagtccctccctcctttcggaaggtgcaggatactgggtttttagatgccttgtccatcctgtctggttgcaatgttttgctcccagaagagaatcagatcatcatgtggggattaccattgttcctggagtactcctacccttagttgaatttccttattaaagttatatttttctataagaccctgaca

SEQ ID NO: 204787 - DNA, 864 bp, Homo sapiens
  Payload ID: 20393
  Gene Name: zinc ribbon domain containing 1
  Uniprot ID: Q9P1U0
  ENST ID: ENST00000455948
  CDS Start-End: 272-652
gccgcgggcgcagagctggcgctctagcccacggagttggttaactcctctcaccggcccctggaaagggttccaagtcctttagtacccgacgctgtctgggaattccgggcgtttcggctccttggtcgcagaggcaggaggcgtgcgtggcaggagggttcgggttatatactcctaggtcctgggacagaatagttacgacctctgggacaggaactcttctctcttttgttaataaacttccaactccctcctcagacccgaccgcatgtctgtcatggacctcgccaatacttgctccagctttcagtcggacctggatttctgttcagattgcggctcggtcctgcctctgcccggggctcaggatacggtcacctgtattcgctgtggcttcaacatcaacgttcgggactttgaggggaaggttgtgaagacttcggttgtgttccaccaactggggacagccatgcctatgtcggtggaggaagggcctgagtgccagggacctgtggttgacaggcgctgccctcgatgtggtcatgaaggaatggcataccacaccagacagatgcgttcagccgatgaagggcaaactgtcttctacacctgtaccaactgcaagttccaggagaaggaagactcttgacctttttcctgggcaactctacagtccctccctcctttcggaaggtgcaggatactgggtttttagatgccttgtccatcctgtctggttgcaatgttttgctcccagaagagaatcagatcatcatgtggggattaccattgttcctggagtactcctacccttagttgaatttccttattaaagttatatttttctataagaccctgaca

SEQ ID NO: 204788 - DNA, 754 bp, Homo sapiens; identical to SEQ ID NO: 204771
  Payload ID: 20393
  Gene Name: zinc ribbon domain containing 1
  Uniprot ID: Q9P1U0
  ENST ID: ENST00000432545
  CDS Start-End: 162-542

SEQ ID NO: 204789 - DNA, 754 bp, Homo sapiens; identical to SEQ ID NO: 204771
  Payload ID: 20393
  Gene Name: zinc ribbon domain containing 1
  Uniprot ID: Q9P1U0
  ENST ID: ENST00000453694
  CDS Start-End: 162-542

SEQ ID NO: 204790 - DNA, 736 bp, Homo sapiens; identical to SEQ ID NO: 204770
  Payload ID: 20393
  Gene Name: zinc ribbon domain containing 1
  Uniprot ID: Q9P1U0
  ENST ID: ENST00000444794
  CDS Start-End: 144-524

SEQ ID NO: 204791 - DNA, 864 bp, Homo sapiens; identical to SEQ ID NO: 204768
  Payload ID: 20393
  Gene Name: zinc ribbon domain containing 1
  Uniprot ID: Q9P1U0
  ENST ID: ENST00000417738
  CDS Start-End: 272-652

SEQ ID NO: 204792 - DNA, 864 bp, Homo sapiens; identical to SEQ ID NO: 204768
  Payload ID: 20393
  Gene Name: zinc ribbon domain containing 1
  Uniprot ID: Q9P1U0
  ENST ID: ENST00000437373
  CDS Start-End: 272-652

SEQ ID NO: 204793 - DNA, 736 bp, Homo sapiens; identical to SEQ ID NO: 204770
  Payload ID: 20393
  Gene Name: zinc ribbon domain containing 1
  Uniprot ID: Q9P1U0
  ENST ID: ENST00000420100
  CDS Start-End: 144-524

SEQ ID NO: 204794 - DNA, 736 bp, Homo sapiens; identical to SEQ ID NO: 204770
  Payload ID: 20393
  Gene Name: zinc ribbon domain containing 1
  Uniprot ID: Q9P1U0
  ENST ID: ENST00000429558
  CDS Start-End: 144-524

SEQ ID NO: 204795 - DNA, 736 bp, Homo sapiens; identical to SEQ ID NO: 204770
  Payload ID: 20393
  Gene Name: zinc ribbon domain containing 1
  Uniprot ID: Q9P1U0
  ENST ID: ENST00000437507
  CDS Start-End: 144-524

SEQ ID NO: 204796 - DNA, 743 bp, Homo sapiens; identical to SEQ ID NO: 204769
  Payload ID: 20393
  Gene Name: zinc ribbon domain containing 1
  Uniprot ID: Q9P1U0
  ENST ID: ENST00000441251
  CDS Start-End: 151-531

SEQ ID NO: 204797 - DNA, 736 bp, Homo sapiens
  Payload ID: 20393
  Gene Name: zinc ribbon domain containing 1
  Uniprot ID: Q9P1U0
  ENST ID: ENST00000428913
  CDS Start-End: 144-524
gcgggcgcagagctggcgctctagcccacggagttggttaactcctctcaccggcccctggaaagggttccaagtcctttagtacccgacgctgtctgggaattccgggcgtttcggctccttggtcgcagagacccgaccgcatgtctgtcatggacctcgccaatacttgctccagctttcagtcggacctggatttctgttcagattgcggctcggtcctgcctctgcccggggctcaggatacggtcacctgtattcgctgtggcttcaacatcaacgttcgggactttgaggggaaggttgtgaagacttcggttgtgttccaccaactggggacagccatgcctatgtcggtggaggaagggcctgagtgccagggacctgtggttgacaggcgctgccctcgatgtggtcatgaaggaatggcataccacaccagacagatgcgttcagccgatgaagggcaaactgtcttctacacctgtaccaactgcaagttccaggagaaggaagactcttgacctttttcctgggcaactctacagtccctccctcctttcggaaggtgcaggatactgggtttttagatgccttgtccatcctgtctggttgcaatgttttgctcccagaagagaatcagatcatcatgtggggattaccattgttcctggagtactcctacccttagttgaatttccttattaaagttatatttttctataagaccctgaca

SEQ ID NO: 204798 - DNA, 864 bp, Homo sapiens; identical to SEQ ID NO: 204768
  Payload ID: 20393
  Gene Name: zinc ribbon domain containing 1
  Uniprot ID: Q9P1U0
  ENST ID: ENST00000432904
  CDS Start-End: 272-652

SEQ ID NO: 204799 - DNA, 736 bp, Homo sapiens; identical to SEQ ID NO: 204770
  Payload ID: 20393
  Gene Name: zinc ribbon domain containing 1
  Uniprot ID: Q9P1U0
  ENST ID: ENST00000431032
  CDS Start-End: 144-524

SEQ ID NO: 204800 - DNA, 922 bp, Homo sapiens
  Payload ID: 20394
  Gene Name: ZMYM6 neighbor
  Uniprot ID: Q8NCS4
  ENST ID: ENST00000373337
  CDS Start-End: 49-513
aggggcgggttttcggcggggccaacccacggtggggggagcgcggccatggcgctcctgctttcggtgctgcgtgtactgctgggcggcttcttcgcgctcgtggggttggccaagctctcggaggagatctcggctccagtttcggagcggatgaatgccctgttcgtgcagtttgctgaggtgttcccgctgaaggtatttggctaccagccagatcccctgaactaccaaatagctgtgggctttctggaactgctggctgggttgctgctggtcatgggcccaccgatgctgcaagagatcagtaacttgttcttgattctgctcatgatgggggctatcttcaccttggcagctctgaaagagtcactaagcacctgtatcccagccattgtctgcctggggttcctgctgctgctgaatgtcggccagctcttagcccagactaagaaggtggtcagacccactaggaagaagactctaagtacattcaaggaatcctggaagtagagcatctctgtctctttatgccatgcagctgtcacagcaggaacatggtagaacacagagtctatcatcttgttaccagtataatatccagggtcagccagtgttgaaagagacattttgtctacctggcactgctttctctttttagctttactactcttttgtgaggagtacatgttatgcatattaacattcctcatgtcatatgaaaatacaaaataagcagaaaagaaatttaaatcaaccaaaattctgatgccccaaataaccacttttaatgccttggtgtaagtatacctctgaacttttttctgtgcctttaaacagatatatattttttttaaatgaaaataaaaccatatatcctattttatttcctccttttaaaaccttataaactataacactg

SEQ ID NO: 204801 - DNA, 2470 bp, Homo sapiens
  Payload ID: 20395
  Gene Name: ZNF559-ZNF177 readthrough
  ENST ID: ENST00000446085
  CDS Start-End: 533-895
ggcgcatgcgcataacggccgccatcttaacagcgcgttcccgttggcgtctgaggaacagcatctctgccttcctgttcacggtgaccttcgcttggtgtcctcctggcctcagcaacctgacaattctgtcgtgtcccgggctgggtataagtaagcaagaagagggcctgggagaagagtctgacgagcaaggggaaggtagccaaggatggagtgaaatacagggtgacctgtgtttttcccctggctgctttggaaattatgggaaaaaatcaaataccaaggaagaaaaatctataatgaaattagatgtggatttctttttatgtattcagcttgggggcttatgatacttctagtacccaaagagatgcggtcttgctgtgttgcctaggctggtctcaaactcctgctctcaagtgatcctcctgcctcagcctcctgagtacatttatatttaaagtaattattgatggctctgcctgcttaggactctgcccagccaggaaggaaacctacaggaggaagaatggctgcagggtggctgacaacctggtcacagaactcagtaaccttccaggaagtggcagtggacttttcccaggaggagtgggcattgctggaccctgctcaaaaaaatctatacaaagatgtgatgctggagaactttaggaacctggcctcagtagggtatcagctctgcagacacagtctgatctccaaggtggatcaagaacagctgaagacagatgaaagaggaattttacaaggtgactgtgcagactgggaaactcaacttaaaccaaaagatacaattgctatgcagaacattcctgggggaaaaacatccaatggcataaacacgaatcctcatggaagagaattcctgtgaataaggtgaaagtgaaaaagcctctagtcaccacttactcccttttcaacaggcagaaaatcaacctggtgagcactccctggagtgtaaccattgtgggaaattcagaaagaacactcgctttatttgtacaagatattgcaagggagagaaatgctataaatatataaagtatagcaaagtcttcaaccatccctcaactcttaggagtcatgtgagcattcacattggagagaaaactcttgaatttactgattgtagaaaagctttcaatcaagagtcatccctcaggaaacacttaagaactcccacaggacagaagtttcaggagtatgagcaatgtgatatgtccttcagcctacactcttcctgctcagtacgtgagcaaatacctactggagagaaaggtgatgaatgcagtgactatggcaaaatatctccccttagtgtccacacaaaaactggtagtgtggaggagggtttggaatgtaatgaacatgagaaaactttcactgaccctttgtcccttcagaactgtgtcagaactcactctggagagatgccctatgaatgcagtgactgtgggaaagccttcatttttcagtcttcccttaagaaacacatgagatctcatactggagagaagccttatgagtgtgatcactgtggaaaatcctttagccagagctctcatctgaatgtgcacaaaagaactcacactggagagaaaccctatgactgtaaggaatgtgggaaggctttcactgttccttcatcccttcagaaacatgtgagaacccacactggagagaaaccctatgaatgcagtgactgtggaaaagccttcatcgatcagtcatcccttaagaaacacacacgctctcacactggagagaagccttatgagtgtaaccagtgtggaaagtccttcagcacaggctcttaccttattgtgcacaagagaactcacactggtgagaaaacctatgagtgtaaagaatgtgggaaggcctttaggaattcctcttgcctgagggtacacgtgagaactcacactggagagaagccttataaatgtattcagtgtgaaaaagcctttagcacaagcactaaccttataatgcacaagcgaatccacaatggccagaaactccatgaatgaaatgactcagggaagtgtttgttgcccctcatgcctcctttctcactttagaacatatattggagagaagccctgttatggtcacctggaaacagccttctggcccaactctggatgcctgttatactgggacaaaccttataaatgttatagctatgattgtttttatcagtgagtatttcattcttatatgtgtcacaactgtagatcctatgaatattttagttatcttttcagtttaattgcattgtgaacagaacacatggtcttcaatatgtagattctgtgtgacatagatttgaacataattgctggacactgactgatgtactgtggcagacagaactagttgctgtctcaatatccattcctcccttctttcttaaagtaataaaatttaccatttagttcaa

SEQ ID NO: 204802 - DNA, 2340 bp, Homo sapiens
  Payload ID: 20395
  Gene Name: ZNF559-ZNF177 readthrough
  ENST ID: ENST00000434737
  CDS Start-End: 57-1502
tagctctgcctgcttaggactctgcccagccaggaaggaaacctacaggaggaagaatggctgcagggtggctgacaacctggtcacagaactcagtaaccttccaggaagtggcagtggacttttcccaggaggagtgggcattgctggaccctgctcaaaaaaatctatacaaagatgtgatgctggagaactttaggaacctggcctcagtagggtatcagctctgcagacacagtctgatctccaaggtggatcaagaacagctgaagacagatgaaagaggaattttacaaggtgactgtgcagactgggaaactcaacttaaaccaaaagatacaattgctatgcagaacattcctgggggaaaaacatccaatggcataaacacggcagaaaatcaacctggtgagcactccctggagtgtaaccattgtgggaaattcagaaagaacactcgctttatttgtacaagatattgcaagggagagaaatgctataaatatataaagtatagcaaagtcttcaaccatccctcaactcttaggagtcatgtgagcattcacattggagagaaaactcttgaatttactgattgtagaaaagctttcaatcaagagtcatccctcaggaaacacttaagaactcccacaggacagaagtttcaggagtatgagcaatgtgatatgtccttcagcctacactcttcctgctcagtacgtgagcaaatacctactggagagaaaggtgatgaatgcagtgactatggcaaaatatctccccttagtgtccacacaaaaactggtagtgtggaggagggtttggaatgtaatgaacatgagaaaactttcactgaccctttgtcccttcagaactgtgtcagaactcactctggagagatgccctatgaatgcagtgactgtgggaaagccttcatttttcagtcttcccttaagaaacacatgagatctcatactggagagaagccttatgagtgtgatcactgtggaaaatcctttagccagagctctcatctgaatgtgcacaaaagaactcacactggagagaaaccctatgactgtaaggaatgtgggaaggctttcactgttccttcatcccttcagaaacatgtgagaacccacactggagagaaaccctatgaatgcagtgactgtggaaaagccttcatcgatcagtcatcccttaagaaacacacacgctctcacactggagagaagccttatgagtgtaaccagtgtggaaagtccttcagcacaggctcttaccttattgtgcacaagagaactcacactggtgagaaaacctatgagtgtaaagaatgtgggaaggcctttaggaattcctcttgcctgagggtacacgtgagaactcacactggagagaagccttataaatgtattcagtgtgaaaaagcctttagcacaagcactaaccttataatgcacaagcgaatccacaatggccagaaactccatgaatgaaatgactcagggaagtgtttgttgcccctcatgcctcctttctcactttagaacatatattggagagaagccctgttatggtcacctggaaacagccttctggcccaactctggatgcctgttatactgggacaaaccttataaatgttatagctatgattgtttttatcagtgagtatttcattcttatatgtgtcacaactgtagatcctatgaatattttagttatcttttcagtttaattgcattgtgaacagaacacatggtcttcaatatgtagattctgtgtgacatagatttgaacataattgctggacactgactgatgtactgtggcagacagaactagttgctgtctcaatatccattcctcccttctttcttaaagtaataaaatttaccatttagttcaagctggcaatgtggacagttttcacccagcttcccttacagctgtgagcggccaaatatgttcacatccctagcccatgcaaagtaggcagaagtcactggatacagctgctaaggaagctcatggaaatgggaatatctcatctggtgtttttttcttaactatttgccctttgtcttgtcccttatttcctagaaaatatatacaccaagaggaggacagagaaaggatactaaatgaaacaacaggggagatacaatattatctggttgcactaatcctgtgctgcttatctctggatttcatgttacatgagaaaaattaactgccatgtggtttaaaccactcttgtgggaagttcctctttcagctgatttcagtcccaactgttacatctaataaatggtcaagttttaggaatcgttc

SEQ ID NO: 204803 - DNA, 2435 bp, Homo sapiens
  Payload ID: 20395
  Gene Name: ZNF559-ZNF177 readthrough
  ENST ID: ENST00000541595
  CDS Start-End: 630-1595
gggcatttcgagcatcttgtgggctctcccaagtcgcggcccctcctctgagagccacagtcaggaacagcatctctgccttcctgttcacggtgaccttcgcttggtgtcctcctggcctcagcaacctgacaattctgtcgtgtcccgatcatctttctcaagatgttttctgtcttcatgagtcaaaatttgaagaggaaaggatggtggctgggtggttgacaaattactctcagttgctttgattagaaagtttggctttgctgagatacgtagttggaaaagagagaagcattttcagtttcttcagtgtactagatggctgactgggaagattccagggtcccaacaggcttcagagttgcgaaggctctagagggctgggtataagtaagcaagaagagggcctgggagaagagtctgacgagcaaggggaaggtagccaaggatggagtgaaatacaggagatgcggtcttgctgtgttgcctaggctggtctcaaactcctgctctcaagtgatcctcctgcctcagcctcctgagtacatttatatttaaagtaattattgatggctctgcctgcttaggactctgcccagccaggaaggaaacctacaggaggaagaatggctgcagggtggctgacaacctggtcacagaactcagtaaccttccaggaagtggcagtggacttttcccaggaggagtgggcattgctggaccctgctcaaaaaaatctatacaaagatgtgatgctggagaactttaggaacctggcctcagtagggtatcagctctgcagacacagtctgatctccaaggtggatcaagaacagctgaagacagatgaaagaggaattttacaaggtgactgtgcagactgggaaactcaacttaaaccaaaagatacaattgctatgcagaacattcctgggggaaaaacatccaatggcataaacacgaactgtgtcagaactcactctggagagatgccctatgaatgcagtgactgtgggaaagccttcatttttcagtcttcccttaagaaacacatgagatctcatactggagagaagccttatgagtgtgatcactgtggaaaatcctttagccagagctctcatctgaatgtgcacaaaagaactcacactggagagaaaccctatgactgtaaggaatgtgggaaggctttcactgttccttcatcccttcagaaacatgtgagaacccacactggagagaaaccctatgaatgcagtgactgtggaaaagccttcatcgatcagtcatcccttaagaaacacacacgctctcacactggagagaagccttatgagtgtaaccagtgtggaaagtccttcagcacaggctcttaccttattgtgcacaagagaactcacactggtgagaaaacctatgagtgtaaagaatgtgggaaggcctttaggaattcctcttgcctgagggtacacgtgagaactcacactggagagaagccttataaatgtattcagtgtgaaaaagcctttagcacaagcactaaccttataatgcacaagcgaatccacaatggccagaaactccatgaatgaaatgactcagggaagtgtttgttgcccctcatgcctcctttctcactttagaacatatattggagagaagccctgttatggtcacctggaaacagccttctggcccaactctggatgcctgttatactgggacaaaccttataaatgttatagctatgattgtttttatcagtgagtatttcattcttatatgtgtcacaactgtagatcctatgaatattttagttatcttttcagtttaattgcattgtgaacagaacacatggtcttcaatatgtagattctgtgtgacatagatttgaacataattgctggacactgactgatgtactgtggcagacagaactagttgctgtctcaatatccattcctcccttctttcttaaagtaataaaatttaccatttagttcaagctggcaatgtggacagttttcacccagcttcccttacagctgtgagcggccaaatatgttcacatccctagcccatgcaaagtaggcagaagtcactggatacagctgctaaggaagctcatggaaatgggaatatctcatctggtgtttttttcttaactatttgccctttgtcttgtcccttatttcctagaaaatatatacaccaagaggaggacagagaaaggatactaaatgaaacaacaggggagatacaatattatctggttgcactaatcctgtgctgcttatctctggatttcatgttacatgagaaaaattaactgccatgtggtttaaaccactcttgtgggaagttcctctttcagctgatttcagtcccaactgttacatctaataaatggtcaagttttaggaatcgttcaa

SEQ ID NO: 204804 - DNA, 419 bp, Homo sapiens
  Payload ID: 20395
  Gene Name: ZNF559-ZNF177 readthrough
  ENST ID: ENST00000602856
  CDS Start-End: 57-419
tagctctgcctgcttaggactctgcccagccaggaaggaaacctacaggaggaagaatggctgcagggtggctgacaacctggtcacagaactcagtaaccttccaggaagtggcagtggacttttcccaggaggagtgggcattgctggaccctgctcaaaaaaatctatacaaagatgtgatgctggagaactttaggaacctggcctcagtagggtatcagctctgcagacacagtctgatctccaaggtggatcaagaacagctgaagacagatgaaagaggaattttacaaggtgactgtgcagactgggaaactcaacttaaaccaaaagatacaattgctatgcagaacattcctgggggaaaaacatccaatggcataaacacgaatcctcatggaagagaattcctgtga

SEQ ID NO: 204805 - DNA, 911 bp, Homo sapiens
  Payload ID: 20395
  Gene Name: ZNF559-ZNF177 readthrough
  ENST ID: ENST00000603974
  CDS Start-End: 189-524
tcctgttcacggtgaccttcgcttggtgtcctcctggcctcagcaacctgacaattctgtcgtgtcccgagagatggctaatgaatggcgcttgatgacagatgagtaatgcctgttgctgaaagattgacgatcatctttctcaagatgttttctgtcttcatgagtcaaaatttgaagaggaaaggatggtggctgggtggttgacaaattactctcaggactcagtgacctttgaggatgtggctgtggacttcacccaggaggagtggactttgctggatcaaactcagagaaacttatacagagatgtgatgctggagaactataagaatctagttgcagtagattgggagagtcatattaataccaaatggtcagcacctcagcagaattttttgcaggggaaaacatccagtgtggtggaaatgagatgcggtcttgctgtgttgcctaggctggtctcaaactcctgctctcaagtgatcctcctgcctcagcctcctgagtacatttatatttaaagtaattattgatggctctgcctgcttaggactctgcccagccaggaaggaaacctacaggaggaagaatggctgcagggtggctgacaacctggtcacagaactcagtaaccttccaggaagtggcagtggacttttcccaggaggagtgggcattgctggaccctgctcaaaaaaatctatacaaagatgtgatgctggagaactttaggaacctggcctcagtagggtatcagctctgcagacacagtctgatctccaaggtggatcaagaacagctgaagacagatgaaagaggaattttacaaggtgactgtgcagactgggaaactcaacttaaaccaaaagatacaattgctatgcagaacattcctgggggaaaaacat

SEQ ID NO: 204806 - DNA, 587 bp, Homo sapiens
  Payload ID: 20395
  Gene Name: ZNF559-ZNF177 readthrough
  ENST ID: ENST00000604886
  CDS Start-End: 1-249
atgcgcataacggccgccatcttaacagcgcgttcccgttggcgtctgaggaacagcatctctgccttcctgttcacggtgaccttcgcttggtgtcctcctggcctcagcaacctgacaattctgtcgtgtcccgggctgggtataagtaagcaagaagagggcctgggagaagagtctgacgagcaaggggaaggtagccaaggatggagtgaaatacaggagatgcggtcttgctgtgttgcctaggctggtctcaaactcctgctctcaagtgatcctcctgcctcagcctcctgagtacatttatatttaaagtaattattgatggctctgcctgcttaggactctgcccagccaggaaggaaacctacaggaggaagaatggctgcagggtggctgacaacctggtcacagaactcagtaaccttccaggaagtggcagtggacttttcccaggaggagtgggcattgctggaccctgctcaaaaaaatctatacaaagatgtgatgctggagaactttaggaacctggcctcagtagggtatcagctctgcagacacagtctgatctccaaggtggatca

SEQ ID NO: 204807 - DNA, 597 bp, Homo sapiens
  Payload ID: 20395
  Gene Name: ZNF559-ZNF177 readthrough
  ENST ID: ENST00000605006
  CDS Start-End: 1-144
atcttaacagcgcgttcccgttggcgtctgaggaacagcatctctgccttcctgttcacggtgaccttcgcttggtgtcctcctggcctcagcaacctgacaattctgtcgtgtcccgagatgcggtcttgctgtgttgcctaggctggtctcaaactcctgctctcaagtgatcctcctgcctcagcctcctgagtacatttatatttaaagtaattattgatggctctgcctgcttaggactctgcccagccaggaaggaaacctacaggaggaagaatggctgcagggtggctgacaacctggtcacagaactcagtaaccttccaggaagtggcagtggacttttcccaggaggagtgggcattgctggaccctgctcaaaaaaatctatacaaagatgtgatgctggagaactttaggaacctggcctcagtagggtatcagctctgcagacacagtctgatctccaaggtggatcaagaacagctgaagacagatgaaagaggaattttacaaggtgactgtgcagactgggaaactcaacttaaaccaaaagatacaattgctatgcagaacattcctgggggaaaaaca

SEQ ID NO: 204808 - DNA, 725 bp, Homo sapiens
  Payload ID: 20395
  Gene Name: ZNF559-ZNF177 readthrough
  ENST ID: ENST00000605071
  CDS Start-End: 253-507
gaaaggggaggtgcccagtgaaatggagcctgtcccgtgcactttcgggcatttcgagcatcttgtgggctctcccaagtcgcggcccctcctctgagagccacagtcaggaacagcatctctgccttcctgttcacggtgaccttcgcttggtgtcctcctggcctcagcaacctgacaattctgtcgtgtcccgatcatctttctcaagatgttttctgtcttcatgagtcaaaatttgaagaggaaaggatggtggctgggtggttgacaaattactctcaggactcagtgacctttgaggatgtggctgtggacttcacccaggaggagtggactttgctggatcaaactcagagaaacttatacagagatgtgatgctggagaactataagaatctagttgcagtagattgggagagtcatattaataccaaatggtcagcacctcagcagaattttttgcaggggaaaacatccagtgtggtggaaatgggctgggtataagtaagcaagaagagggcctgggagaagagtctgacgagcaaggggaaggtagccaaggatggagtgaaatacagggtgacctgtgtttttcccctggctgctttggaaattatgggaaaaaatcaaataccaaggaagaaaaatctataatgaaattagatgtggatttctttttatgtattcagcttgggggcttatgatacttctagtacccaaag

SEQ ID NO: 204809 - DNA, 586 bp, Homo sapiens
  Payload ID: 20395
  Gene Name: ZNF559-ZNF177 readthrough
  ENST ID: ENST00000593242
  CDS Start-End: 1-204
ctgaggaacagcatctctgccttcctgttcacggtgaccttcgcttggtgtcctcctggcctcagcaacctgacaattctgtcgtgtcccgggctgggtataagtaagcaagaagagggcctgggagaagagtctgacgagcaaggggaaggtagccaaggatggagtgaaatacaggagatgcggtcttgctgtgttgcctaggctggtctcaaactcctgctctcaagtgatcctcctgcctcagcctcctgagtacatttatatttaaagtaattattgatggctctgcctgcttaggactctgcccagccaggaaggaaacctacaggaggaagaatggctgcagggtggctgacaacctggtcacagaactcagtaaccttccaggaagtggcagtggacttttcccaggaggagtgggcattgctggaccctgctcaaaaaaatctatacaaagatgtgatgctggagaactttaggaacctggcctcagtaggtaaggctggcctcatttcttcatttgtttatgtagcaaatagttcttaagcacatattatgttccagaatctgtggaaagaatagc

SEQ ID NO: 204810 - DNA, 604 bp, Homo sapiens
  Payload ID: 20395
  Gene Name: ZNF559-ZNF177 readthrough
  ENST ID: ENST00000605775
  CDS Start-End: 1-162
atgcgcataacggccgccatcttaacagcgcgttcccgttggcgtctgaggaacagcatctctgccttcctgttcacggtgaccttcgcttggtgtcctcctggcctcagcaacctgacaattctgtcgtgtcccgagatgcggtcttgctgtgttgcctaggctggtctcaaactcctgctctcaagtgatcctcctgcctcagcctcctgagtacatttatatttaaagtaattattgatggctctgcctgcttaggactctgcccagccaggaaggaaacctacaggaggaagaatggctgcagggtggctgacaacctggtcacaggtacacaagaaatttctctatttccaaaagcacactgccattcctgaaaagaacacatctcttgcccctgacctgaagcttcacagcccaatctgagctggcttcatcttccgcagctcccaggctgcttcatgtggaagagggaatccctgggaaaggcttctgttcccacatttgttaactttctccagatattcttccatatttttgagtatgaattccatactgtagtgagtgctgtaaagaaagacttttactaggaaaattatttatc

SEQ ID NO: 204811 - DNA, 827 bp, Homo sapiens
  Payload ID: 20395
  Gene Name: ZNF559-ZNF177 readthrough
  ENST ID: ENST00000603656
  CDS Start-End: 449-827
ggtggaaaggggaggtgcccagtgaaatggagcctgtcccgtgcactttcgggcatttcgagcatcttgtgggctctcccaagtcgcggcccctcctctgagagccacagtcaggaacagcatctctgccttcctgttcacggtgaccttcgcttggtgtcctcctggcctcagcaacctgacaattctgtcgtgtcccgggctgggtataagtaagcaagaagagggcctgggagaagagtctgacgagcaaggggaaggtagccaaggatggagtgaaatacaggagatgcggtcttgctgtgttgcctaggctggtctcaaactcctgctctcaagtgatcctcctgcctcagcctcctgagtacatttatatttaaagtaattattgatggctctgcctgcttaggactctgcccagccaggaaggaaacctacaggaggaagaatggctgcagggtggctgacaacctggtcacagaactcagtaaccttccaggaagtggcagtggacttttcccaggaggagtgggcattgctggaccctgctcaaaaaaatctatacaaagatgtgatgctggagaactttaggaacctggcctcagtagggtatcagctctgcagacacagtctgatctccaaggtggatcaagaacagctgaagacagatgaaagaggaattttacaaggtgactgtgcagactgggaaactcaacttaaaccaaaagatacaattgctatgcagaacattcctgggggaaaaacatccaatggcataaacacgaactgtgtcagaactcactctggagagatgccctatgaatgca

SEQ ID NO: 204812 - DNA, 585 bp, Homo sapiens
  Payload ID: 20395
  Gene Name: ZNF559-ZNF177 readthrough
  ENST ID: ENST00000604543
  CDS Start-End: 1-200
tcttaacagcgcgttcccgttggcgtctgaggaacagcatctctgccttcctgttcacggtgaccttcgcttggtgtcctcctggcctcagcaacctgacaattctgtcgtgtcccggcaggagtacagtggtgagatcacggttcactgcagcattgacctccctaggctcaggtgttgctcccacctcagtcttctgaatagcttggagtatagattgggagagtcatattaataccaaatggtcagcacctcagcagaattttttgcaggggaaaacatccagtgtggtggaaatgagatgcggtcttgctgtgttgcctaggctggtctcaaactcctgctctcaagtgatcctcctgcctcagcctcctgagtacatttatatttaaagtaattattgatggctctgcctgcttaggactctgcccagccaggaaggaaacctacaggaggaagaatggctgcagggtggctgacaacctggtcacagaactcagtaaccttccaggaagtggcagtggacttttcccaggaggagtgggcattgctggaccctgctcaaaaaaatctatacaaagatgt

SEQ ID NO: 204813 - DNA, 591 bp, Homo sapiens
  Payload ID: 20395
  Gene Name: ZNF559-ZNF177 readthrough
  ENST ID: ENST00000605093
  CDS Start-End: 1-139
aacagcgcgttcccgttggcgtctgaggaacagcatctctgccttcctgttcacggtgaccttcgcttggtgtcctcctggcctcagcaacctgacaattctgtcgtgtcccgagatgcggtcttgctgtgttgcctaggctggtctcaaactcctgctctcaagtgatcctcctgcctcagcctcctgagtacatttatatttaaagtaattattgatggctctgcctgcttaggactctgcccagccaggaaggaaacctacaggaggaagaatggctgcagggtggctgacaacctggtcacagaactcagtaaccttccaggaagtggcagtggacttttcccaggaggagtgggcattgctggaccctgctcaaaaaaatctatacaaagatgtgatgctggagaactttaggaacctggcctcagtagggtatcagctctgcagacacagtctgatctccaaggtggatcaagaacagctgaagacagatgaaagaggaattttacaaggtgactgtgcaggtgagccttgggcagaacagggtgcagccttggccagtgagggttagtacatttgggaatgtca

SEQ ID NO: 204814 - DNA, 610 bp, Homo sapiens
  Payload ID: 20395
  Gene Name: ZNF559-ZNF177 readthrough
  ENST ID: ENST00000603024
  CDS Start-End: 1-231
atgcgcataacggccgccatcttaacagcgcgttcccgttggcgtctgaggaacagcatctctgccttcctgttcacggtgaccttcgcttggtgtcctcctggcctcagcaacctgacaattctgtcgtgtcccgattgggagagtcatattaataccaaatggtcagcacctcagcagaattttttgcaggggaaaacatccagtgtggtggaaatgggctgggtataagtaagcaagaagagggcctgggagaagagtctgacgagcaaggggaaggtagccaaggatggagtgaaatacagggtgacctgtgtttttcccctggctgctttggaaattatgggaaaaaatcaaataccaaggaagaaaaatctataatgaaattagatgtggatttctttttatgtattcagcttgggggcttatgatacttctagtacccaaagagatgcggtcttgctgtgttgcctaggctggtctcaaactcctgctctcaagtgatcctcctgcctcagcctcctgagtacatttatatttaaagtaattattgatggctctgcctgcttaggactctgcccagccaggaaggaaacctacaggaggaaga

SEQ ID NO: 204815 - DNA, 2651 bp, Homo sapiens
  Payload ID: 20396
  Gene Name: ZNF625-ZNF20 readthrough (NMD candidate)
  ENST ID: ENST00000430024
  CDS Start-End: 174-551
gctttcctgactcccaggcgtcttgcaccaaagggaggtcgggatctcggttttccggccccgagagggaccaggtgcctccgccatagcttctgtcgctccatcgcccgcactgtgactggactgttagagggatccgtggagaggaggccaggacacctggaagccgggaaatggattcagtggtctttgaggatgtagatgtgaacttcacccaggaggagtgggctttgctggatccttcccagaagaatctctacagagatgtgatgcaggaaaccttcaggaacctggcttctgtaggaaaaaaatggaaagatcagaaaattgaagatgagtacaaaaatcccaggagaaacctaagtcttagaaagtggagttggtcgctgtacgcaagacagacattggggctggactcaccatcagtggccccgaaaaggttgttgtcgggataccagatttcctactccgagaggccccgggtccctctgccacaacttctgtcgctctgccgcctgcaccgtgacccgcactattcacgggagccctagagaggacaccgggacacccagaagccgggaaatgatgtttcaggattcagtggcctttgaggatgtggctgtcagcttcacccaggaggagtgggctttgctggatccttcccagaagaatctctacagggatgtgatgcaggaaaccttcaagaacctgacctctgtaggaaaaacatggaaagttcagaacattgaagatgagtacaaaaatcccaggagaaatctaagtcttatgagagagaaactctgtgaaagtaaagaaagtcatcactgtggagaaagcttcaaccagattgcagatgacatgctgaacaggaaaactcttcctggaataacaccatgtgaaagcagtgtgtgtggagaagttggcacgggtcattcatctcttaatacgcatatcagagctgacactggacacaagtcatctgagtatcaggaatatggagagaatccatatagaaataaggaatgtaagaaagccttcagttatcttgactcctttcaatcacatgataaagcttgcactaaagagaaaccctatgatggtaaagaatgtacagaaaccttcatttcccattcatgcattcaaagacacagggtaatgcacagtggagatggaccttataaatgtaagttttgtgggaaagccttctattttctcaatttatgtcttatccatgaacgaattcacactggtgtgaaaccatataagtgtaaacaatgtggtaaggcctttactcgttccactacccttccagtacatgaaagaactcacacaggagtgaatgccgatgaatgtaaagaatgtgggaatgcattcagttttcctagtgaaattcgtagacataaaaggtctcacactggagaaaaaccctatgagtgtaagcaatgtgggaaagtcttcatttctttcagttccattcagtatcataagatgactcacactggagagaaaccctatgaatgtaagcagtgtgggaaagcctttagatgtggctcacaccttcaaaagcatggaaggactcacactggagagaaaccctatgaatgtaggcaatgtggtaaagccttcagatgtacctcggaccttcaaaggcatgaaaagacacacactgaggataaaccctatggatgtaagcagtgtgggaaaggctttagatgtgcttcacaacttcaaattcatgaaaggacgcacagtggagagaaaccccatgaatgtaaggaatgtggaaaagtattcaagtatttttcttccttgcgtatacatgaaaggacgcacactggagagaagccccatgaatgtaagcaatgtggaaaagcattcaggtatttctcttccttgcatatacatgaaaggacacacactggagataagccatatgagtgtaaggtatgtggcaaagccttcacttgttccagttccattcgatatcatgaaaggactcacactggagagaaaccctatgaatgtaagcactgtggtaaggcctttatttccaattacattcgatatcatgaaaggactcacactggagagaaaccctatcaatgcaagcaatgtggcaaagcctttattcgtgccagttcatgtcgagaacatgaaagaactcataccattaatagatgagaaatccttttagtggaagcaacgggagaagctttctgttgtcccacttcctttgaaacacaagaaaagagagtggtgaaagaacctctggataactgctttttgaattgagaagagagacttgcgataggacaataaaatctagaagaacttggatggtttcgtaatacaattcacctatagccaatcttgcatgagatttcaaaggcacagaaaaggaaggcatcagtcacatattagaggccccacacagggagagaggtgtgtggctacccgcttccagcccattttcctgattctttggcttgttaatcgagaatatcccccaaatcacttgtctctgttcctcagagttgtaggtctccagatatgtccccagtgctccacattaaagatacatgcccactttgctgtttcttcagaaatgttaaaatgtttaccagagaactaataaatgttgttatggctgg

SEQ ID NO: 204816 - DNA, 1532 bp, Homo sapiens
  Payload ID: 20396
  Gene Name: ZNF625-ZNF20 readthrough (NMD candidate)
  ENST ID: ENST00000434822
  CDS Start-End: 174-359
gctttcctgactcccaggcgtcttgcaccaaagggaggtcgggatctcggttttccggccccgagagggaccaggtgcctccgccatagcttctgtcgctccatcgcccgcactgtgactggactgttagagggatccgtggagaggaggccaggacacctggaagccgggaaatggattcagtggtctttgaggatgtagatgtgaacttcacccaggaggagtgggctttgctggatccttcccagaagaatctctacagagatgtgatgcaggaaaccttcaggaacctggcttctgaaaaaaatggaaagatcagaaaattgaagatgagtacaaaaatcccaggagaaacctaagaggtcttatgggagagagactcttagaaagtaagaaagatcatcagcatggagaaattttgacccaggttccagatgacatgctgaagaagaaaactccccgagtaaaatcatgtggagaagtcagcgtgggtcatgcatcccttaataggcaccacagagctgacactggacacaagccatatgagtatcaggaatatggacagaagccatataaatgtacatactgtaagaaagccttcagtgatctcccctactttcgaacacatgaatgggctcacactggggggaaaccttatgattgtgaggaatgtggaaaaagctttatttcccgttcaagcattcgaagacacaggataatgcacagtggagatggaccctacaaatgtaacttttgtgggaaagccttgatgtgtctcagtttgtatcttatccacaaacgaactcacactggagagaaaccatatgaatgtaaacagtgtggtaaagcctttagtcattctggtagccttcgaatacatgaaagaactcacactggagagaagccttatgaatgcagtgagtgtgggaaagcattccatagttccacatgcctccatgcacataaaataactcacactggggagaagccgtatgaatgtaaacagtgtgggaaagcctttgtttctttcaattccgttcgatatcatgaaagaactcacactggagagaagccctatgaatgtaagcaatgtgggaaagccttcagatctgcctcgcaccttcgaacacatggaaggactcacactggagagaaaccctatgaatgtaaacaatgtggtaaagcctttggatgtgcctcgagcgttaaaatccatgaaaggactcacactggagaaaaaccctgtagctccaacacttcgaaaggccaaggcgagaagattgcttaattcacataagattcctagaagccaccgaatccaatcatgaaattatgtgtaccatttcagtcttagaaagtggagttggtcgctgtacgcaagacagacattggggctggactcaccatcagtggccccgaaaaggttgttgtcgggataccagatttcctactccgagaggccccgggtccctctgccacaacttctgtcgctctgccgcctgcaccgtgacccgcactattcacgggagccc

SEQ ID NO: 204817 - DNA, 2751 bp, Homo sapiens
  Payload ID: 20397
  Gene Name: ZNF670-ZNF695 readthrough (NMD candidate)
  ENST ID: ENST00000474541
  CDS Start-End: 216-572
actctcaagcgcgccgcgaaaggagggagcagcttccgggacctggcgcggcttttgtgttgggcagcgcgaatgtggcgagctcggtgcgtctccgctgctccttccccttatccctgggaggtccaagtggtcccgcggcagcttctgttgctctgggacctgcaggtcccggaaggtccttagggaggaccccagacaccggagactgggaaatgggactattggcattcagggatgtggctctagaattctctccagaggagtgggaatgcctggacccagctcagcggagtttgtatagggatgtgatgttagagaactacagaaacctgatctcccttggtcttgctatgtctaagccagaactgatcatctgtctggaggcaaggaaagagccctggaacgtgaacacagagaagacagccagacactcagtagagacgaggtttcgccatgttggccaggctggtctcaaactccttacctcaggtgatccacctgccttggcctcccaaagtgctgggattacaggcacgggccaccactgccagcctatttgtgtattctgaattatatttaaccattcatttggtgagttttgtcttcttatcttactgaagacattttgccagagcagggcctgcaagtttcattccaaaaagtgatgctgagaagatatgaaagatgttgtcttgagaaattacgcttaaggaatgactgggaaattgtggattatccagactcaggtagttctttataacaatgtgagaatgaactaatacagaaaagtggtaccagagagttgggacattgctataaagatacctgaaaatgtggaagtgactttggaactgggtaacaggcagaagttggaagagtttggagggctcagaagaagacaggaagataaggaaaagtttggaacttcctagagacttgttgaatggttgtaaccaaaatgctgatggtgatatggacaatgaagtccaggctgaggagttctcagatggagatgaggaccttattgggagctacagtaaaggtcactcttgctatgctttagcaaagagactagtggcattgtgcccctgctatagggatctgttgaactttgaacttgagagagatgatttagggtatctggcagaaaatatttctaagtagcaaagcattcaagatatggcctggctccttctaacagtgtatgctcatatttctgaggaaagagattatctgaaactggaacttacatttaaaagggaaatggagtattaaagtttggaaatgtgcagcctagccatgtattagaaaagaaaaaaccattttctggggaggaattcaacctagctgcaaaaatttgtgtaagtaaagaggagccgtatgttaacagccaagacaatgggaaaaatgcccccaagacatttcagagactttcgtggcagcccctctcatcacaggcctggaggcctaggagggaaaaacagttttgtgggtcaggcttagggccctgctattctgtgcagccttgggaccctgttccctgtgctttagctgctccagctccagccatggctaaaaggactccagatatgtttcaggttgctgctccagagggtataagacacaagccttggaggcttccagatggtgttaagcctgcaggtgctcagagggcaagagttgaggcttgggagcctccattctttcagatttctgaggatgtatggaaacaactggatatccaggcagaaatttgcttcaggggcggagcccttgtggagaacctctactagggtactgtggaggggaaatatggggttgaagtccccacaaagagtctccactggggcactgccaagtggagctgtgagaagagggccactgtcctccacaccccagaatggtagctccatcaacagtttgcactgtgtgcttggaaaagccacaggcactcaacaccagcctgtgagagcggccatggggcactaagccctgcagagccgccagaagcagagctgtccaagaccttgggagcctaccccttgcatcagtgtggcctggatgttagacatggaatcaaaggatattattttggagctctaagatttaatgactgccctgctgggtttcggacttgcatggggcctgtaacccctttgttttggccaatgtctcccttttggaacaggaacatttacccaatgcctgtacccttattgtatcctagatgtaactaacttgcttttgattttacaggctcataggcagaagggactgccttatctcagatgaaactttggacttggacttttgagttaatgctgaaatgagttaagactttgggagactgtttggaaagcataattgtgttttgaaatgtgaggacatgatatttgggatgggccaggagtggaatgatatggtttggctctgtgtccccacccaaatttcatgtcaaattgtaatcttcaatgttggaggagggtcctggtgggaaggtaattggatcatgggggcagacttctcctttgctgttctcatgatgagtgagttctcatgatacttgattgtttaaaagtgtatagcatttccccctttgctctctctctcctgccagccatgtgaagatgtgcttgcttcccctttgccttctgccatgattctaagtttcctgaggcctccccagaagcagaagcatgtaaagcccacagaaccgtgagttgattaaatctcttttctttataaatt

SEQ ID NO: 204818 - DNA, 1042 bp, Homo sapiens
  Payload ID: 20397
  Gene Name: ZNF670-ZNF695 readthrough (NMD candidate)
  ENST ID: ENST00000465049
  CDS Start-End: 141-554
tggcgagctcggtgcgtctccgctgctccttccccttatccctgggaggtccaagtggtcccgcggcagcttctgttgctctgggacctgcaggtcccggaaggtccttagggaggaccccagacaccggagactgggaaatgggactattggcattcagggatgtggctctagaattctctccagaggagtgggaatgcctggacccagctcagcggagtttgtatagggatgtgatgttagagaactacagaaacctgatctcccttggtcttgctatgtctaagccagaactgatcatctgtctggaggcaaggaaagagccctggaacgtgaacacagagaagacagccagacactcagttttgtcttcttatcttactgaagacattttgccagagcagggcctgcaagtttcattccaaaaagtgatgctgagaagatatgaaagatgttgtcttgagaaattacgcttaaggaatgactgggaaattgtggtagagacggggtttcaccgtgttagccaggatggtctcaatctcctgacctcgtgatccgcctgtctcggcctcccaaagtgctgggattacagacgtgagccactgcacccggccagcataagatttttatatgagtaattgggaaggcttctataaatataagccatgtgaagatgtgcttgcttcccctttgccttctgccatgattctaagtttcctgaggcctccccagaagcagaagcatgtaaagcccacagaaccggtccagtcgtcgaccatcgagctgctttgaagaccctgcggaggttccgtcgctgcttgaacacagtgcctggactccctgctccgtgaggcgaatttacaccgggtccagctgcgtcagcccgagttctgaattaaaacatgcctcccacagaatctatttctgatgaatatgaaaggaagattgttcttccatgttggtttttattgagatatctctttttttcccttttcatttggttgtcctaactccatgaatagaaaagaaaatgtattaattc

SEQ ID NO: 204819 - DNA, 1252 bp, Homo sapiens
  Payload ID: 20398
  Gene Name: ZNF816-ZNF321P readthrough
  Uniprot ID: Q8N8H1
  ENST ID: ENST00000391777
  CDS Start-End: 123-824
agttgtctggtgctgctatataggggacgtggggtccccacagacctgcaggttccggcccctcttttctcaacccagagcaaattgaaacgtccgggtgagagtccgatttccaaagactcatgttacgtgaggaagccaccaagaagagcaaagaaaaggagccagggatggctcttcctcagggacgcttgactttcagggatgtggctatagagttctctttggaggagtggaaatgcctgaaccctgcacagagggctttatacagggctgtgatgttggagaactacaggaacctggagtttgtggatatctcttccaaatgcatgatgaaggagttctcatccacagcgcaaggcaatacagaagtgatccacacagggacattgcaaagacatgaaagtcatcacattagagatttttgcttccaggaaattgagaaagatattcataactttgagtttcagtggcaagaagaggaaaggaatggtcacgaagcacccatgacagaaatcaaagagttgactggtagtacagaccgacatgatcaaaggcatgctggaaacaagcctattaaagatcagcttggatccagctttcattcgcatctgcctgaactccacatatttcagcctgaatggaaaattggtaatcaagttgagaagtctatcatcaatgcctccttaattttgacatcccaaagaatttcttgtagtcccaaaacccgtatttctaataactatgggaataattccctccattcttcattacccatacaaaaattgggaagtacacatgagagaaaaatctttccaatgtaatgagagtggcaaatcctttaattatagctaactcttaaggaaatatcagataatccatttaggatagaaacaatataaatgtgaggtatgtgacaaggtctttaatcagaattgattccttgtatgccataatagatgtcacactggtaagaaaccttacagttgttatgagtgtggcaagaccttcagtcagacgtcatcctttacatgctatcgtagacttcatactggagggaaaccttacaagtgtagtgagcataacaagacctttggttgaaattcagcccttgtaattcataaggcaattcatactggagagaatccttgcaagtgtaatgaatgtggcaaggtttttaatcagaaagcacaccttgcacgtcatcatagacttcatactagagagaagccttacaaatgtgaagaatgtg

SEQ ID NO: 204820 - DNA, 1213 bp, Homo sapiens
  Payload ID: 20399
  Gene Name: zona pellucida binding protein
  Uniprot ID: Q9BS86
  ENST ID: ENST00000046087
  CDS Start-End: 71-1126
ggctgcaggtgggcgcgcgttgcctaacgaccttccgcgcggacggtgggcaggcgacggcggcgtgtggatggaggccttcgcccttggcccagcgcggcggggcaggcggcggacccgggccgccggctccctgctctctcgggccgccatcctcctctttatctccgccttcctggtgcgggtgccctcatcagttggacacttggttcgattaccaagagcttttcgcttgaccaaagattcagtgaaaatagtgggatcaacaagttttccagtgaaagcgtatgtcatgctccatcaaaagagtccacacgtgttatgtgtaacgcaacaactgcgaaatgctgaactgatagacccatcattccaatggtatgggcctaaaggaaaagttgtttcagtagaaaaccgcactgcacaaataacatccacaggaagccttgtattccaaaattttgaggagagtatgagtggaatttatacatgtttcctcgaatataaacctactgtggaagaaattgttaaacgtcttcaactaaaatatgctatatatgcttatcgtgagcctcattattattatcagttcacagctcgatatcatgcagctccctgcaatagcatttataatatttcttttgagaagaaacttcttcagattttaagcaaactgcttcttgacctttcatgtgaaatttccttacttaagtctgaatgccatcgcgttaaaatgcaaagagctggtttgcaaaatgaattgttctttgcattttcagtttcatctctagacactgaaaaaggacccaagcgatgtacagaccataactgtgaaccttacaaaagactttttaaggctaaaaatctcatagagagattttttaatcaacaagtagaaattcttggcagacgtgcagaacaattacctcaaatatactatattgaaggtactctccaaatggtttggattaatcgctgctttccaggatatggaatgaatgtccagcaacatccaaaatgtcctgagtgctgtgtgatctgcagccctggatcatataacccccgtgatggaattcattgccttcaatgcaatagcagcctggtgtatggagcaaaaacgtgcttataagccattatcttcagttattcagtggtttattaaatgcaaagtatatatttgaaatattaacataataaattattatgccaaaattaa

SEQ ID NO: 204821 - DNA, 589 bp, Homo sapiens
  Payload ID: 20399
  Gene Name: zona pellucida binding protein
  ENST ID: ENST00000450231
  CDS Start-End: 373-589
tagattacagtttattacatacgtaggagagtggcttcttcccatttaaaccctggaaaatataattggctacaaatttcaagattttttcccaatttatggattaccttcaagttccatacaactggcaccatctaccaacaagagtgagcatccaggaacctcgttagaaacttttctcagtggaaattaacttatcttcattccactttaagtgtgcaagacttgcaaataaaggtcgtgtcttaaaagcggctcagatgaaactaccaatttggctgctgctgctaccgcttttaaacaattaaaatatggcttagctactgagtccaatcacaggctataatatgtgattggcctctattttccttcatgtttttggttggacacttggttcgattaccaagagcttttcgcttgaccaaagattcagtgaaaatagtgggatcaacaagttttccagtgaaagcgtatgtcatgctccatcaaaagagtccacacgtgttatgtgtaacgcaacaactgcgaaatgctgaactgatagacccatcattccaatggtatgggcctaaaggaaaagttgtttcag

SEQ ID NO: 204822 - DNA, 1095 bp, Homo sapiens
  Payload ID: 20399
  Gene Name: zona pellucida binding protein
  Uniprot ID: Q9BS86
  ENST ID: ENST00000419417
  CDS Start-End: 43-1095
gaccttccgcgcggacggtgggcaggcgacggcggcgtgtggatggaggccttcgcccttggcccagcgcggcggggcaggcggcggacccgggccgccggctccctgctctctcgggccgccatcctcctctttatctccgccttcctggtgcgggtgccctcatcagttggacacttggttcgattaccaagagcttttcgcttgaccaaagattcagtgaaaatagtgggatcaacaagttttccagtgaaagcgtatgtcatgctccatcaaaagagtccacacgtgttatgtgtaacgcaacaactgcgaaatgctgaactgatagacccatcattccaatggtatgggcctaaaggaaaagttgtttcagaaaaccgcactgcacaaataacatccacaggaagccttgtattccaaaattttgaggagagtatgagtggaatttatacatgtttcctcgaatataaacctactgtggaagaaattgttaaacgtcttcaactaaaatatgctatatatgcttatcgtgagcctcattattattatcagttcacagctcgatatcatgcagctccctgcaatagcatttataatatttcttttgagaagaaacttcttcagattttaagcaaactgcttcttgacctttcatgtgaaatttccttacttaagtctgaatgccatcgcgttaaaatgcaaagagctggtttgcaaaatgaattgttctttgcattttcagtttcatctctagacactgaaaaaggacccaagcgatgtacagaccataactgtgaaccttacaaaagactttttaaggctaaaaatctcatagagagattttttaatcaacaagtagaaattcttggcagacgtgcagaacaattacctcaaatatactatattgaaggtactctccaaatggtttggattaatcgctgctttccaggatatggaatgaatgtccagcaacatccaaaatgtcctgagtgctgtgtgatctgcagccctggatcatataacccccgtgatggaattcattgccttcaatgcaatagcagcctggtgtatggagcaaaaacgtgcttataa

SEQ ID NO: 204823 - DNA, 491 bp, Homo sapiens
  Payload ID: 20399
  Gene Name: zona pellucida binding protein
  ENST ID: ENST00000413331
  CDS Start-End: 39-266
ttccgcgcggacggtgggcaggcgacggcggcgtgtggatggaggccttcgcccttggcccagcgcggcggggcaggcggcggacccgggccgccggctccctgctctctcgggccgccatcctcctctttatctccgccttcctggtgcgggtgccctcatcaggtgagggtccgcgccgccctgccggctccgcagggacaaccgcagcttcccccactcttcgaattgccttttcttgtgtcacgtgcatccgttttatatagagacaccttgctcactaatacgtgacaagaaaggcttattttttatggaagtcgtacaaagtcactctgcatttgcatagaggagtgaatgacaggaaattaagttggacacttggttcgattaccaagagcttttcgcttgaccaaagattcagtgaaaatagtgggatcaacaagttttccagtgaaagcgtatgtcatgctccatcaaaagagtccacacgt

SEQ ID NO: 204824 - DNA, 1543 bp, Homo sapiens
  Payload ID: 20400
  Gene Name: zona pellucida binding protein 2
  Uniprot ID: Q6X784
  ENST ID: ENST00000348931
  CDS Start-End: 192-1208
ccccgcgcgcgagaatcgaagcacgcacgcgttctcctgcgcgtccgctcccgccgttgcgacggacgggtaggggaggcgaccccggcgttctgctccgcactgtggaggaggtggggaggtgttgggccagggctgaggtaggagggagtctgtccctcgacgcctcctgcgacgccagcccctgagcgatgatgcgaacgtgcgtcctactctccgcggtgctctggtgcctcacaggagtccaatgcccgcgttttaccttattcaataagaagggcttcatttatggcaagacaggacagccagacaaaatatatgtagagttacatcaaaatagtccagtccttatctgtatggattttaagctttctaaaaaagaaatagtggaccccacctacttatggattgggcctaatgaaaagacgttaacaggaaataatagaataaatataactgaaactggacagctgatggtgaaagattttttggagcctttgtctggactttacacatgtactctttcttataagactgttaaagcagaaactcaagaagaaaaaacagtcaaaaagagatatgactttatggtctttgcctatcgggaacctgattattcatatcagatggctgtacgttttaccacaaggtcttgtatagggagatacaatgatgtattctttagagtgctgaagaaaatcttggatagtctaatttctgatttgtcatgccatgtcatagagccatcatataaatgccattctgttgaaattccagaacatggcctcatacatgagctatttatagcatttcaagttaatccttttgcgccggggtggaaaggtgcttgcaatggatctgttgactgtgaagataccactaatcataatatcctccaggcaagagatcgaatagaagacttttttcggagccaagcatatattttctaccataactttaataaaactctaccagcaatgcattttgtggaccacagtttgcaagtagtacgtctggatagctgtcgaccaggctttggaaaaaatgaacgtctacacagtaattgcgctagctgttgtgtggtttgtagtcctgcgacttttagtcctgatgttaatgtaacttgtcagacctgcgtttccgtccttacctatggagctaaatcttgcccacaaacttcaaacaaaaatcagcaatatgaagattagaggtgaaagcattgttacttacttgtggaagtcggggacataagatgattttcacatcccagagcatcatagatagttccattaagtaaaatcagtaagaccaaaccactggaaaacatgcattttggaaactttaaaataaatggttaacatggcatttctaagaaggcatttaatccagtatctctagtgtacaaaggaaacttgaagttttaatggattatttttaatgaaatgttttattgtttacaaacggtatgttgctgtgtacctaagagtatagtaaggtcaagaagagtatcaaagtataataaaataaaaattgtatactctcc

SEQ ID NO: 204825 - DNA, 2177 bp, Homo sapiens
  Payload ID: 20400
  Gene Name: zona pellucida binding protein 2
  Uniprot ID: Q6X784
  ENST ID: ENST00000377940
  CDS Start-End: 140-1090
gccgttgcgacggacgggtaggggaggcgaccccggcgttctgctccgcactgtggaggaggtggggaggtgttgggccagggctgaggtaggagggagtctgtccctcgacgcctcctgcgacgccagcccctgagcgatgatgcgaacgtgcgtcctactctccgcggtgctctggtgcctcacaggagacaaaatatatgtagagttacatcaaaatagtccagtccttatctgtatggattttaagctttctaaaaaagaaatagtggaccccacctacttatggattgggcctaatgaaaagacgttaacaggaaataatagaataaatataactgaaactggacagctgatggtgaaagattttttggagcctttgtctggactttacacatgtactctttcttataagactgttaaagcagaaactcaagaagaaaaaacagtcaaaaagagatatgactttatggtctttgcctatcgggaacctgattattcatatcagatggctgtacgttttaccacaaggtcttgtatagggagatacaatgatgtattctttagagtgctgaagaaaatcttggatagtctaatttctgatttgtcatgccatgtcatagagccatcatataaatgccattctgttgaaattccagaacatggcctcatacatgagctatttatagcatttcaagttaatccttttgcgccggggtggaaaggtgcttgcaatggatctgttgactgtgaagataccactaatcataatatcctccaggcaagagatcgaatagaagacttttttcggagccaagcatatattttctaccataactttaataaaactctaccagcaatgcattttgtggaccacagtttgcaagtagtacgtctggatagctgtcgaccaggctttggaaaaaatgaacgtctacacagtaattgcgctagctgttgtgtggtttgtagtcctgcgacttttagtcctgatgttaatgtaacttgtcagacctgcgtttccgtccttacctatggagctaaatcttgcccacaaacttcaaacaaaaatcagcaatatgaagattagaggtgaaagcattgttacttacttgtggaagtcggggacataagatgattttcacatcccagagcatcatagatagttccattaagtaaaatcagtaagaccaaaccactggaaaacatgcattttggaaactttaaaataaatggttaacatggcatttctaagaaggcatttaatccagtatctctagtgtacaaaggaaacttgaagttttaatggattatttttaatgaaatgttttattgtttacaaacggtatgttgctgtgtacctaagagtatagtaaggtcaagaagagtatcaaagtataataaaataaaaattgtatactctccatatatttatttgtttggaatcactcttgtgtgatataaaggcgtgtatattatctttgtattagaaccaaaaaagttatttattttggtccctatgattttattttttaagataaattaatatactgtattttttaaagtataggtttaggtttacagaataatagagcagataatatatagagttccatacacccactgcaccccataccctcattcctccttacacaatttctcctattattaagatggtgcattagtgtggcacatttgttacaaatgatgaaccaatattaatttattattaattatagcccatagttcacattaagattcattgtgttgtaaggttatgtgggttttgacaaattcataatggcatgtgtgcaccattgcagtctcatacagaatagtttcaccaccctcaaaatcctgtgcttcacttatttatccctcccgccgtgccctggcaaccactgatctttttactgtctctacagttttgccttttccaaaatgtcatgtagttggttggagttatgcagtatgtagactttttagactggcttctttcacttagcaatatgcatttaaggttcctccatgtctttttgtgacttgatagctcattttttattgctgaataatgttcattgtatggatatagcatagtatgtttatccattcgcccattaaaggaaatcttgattgcttccagttttcagtgattaaaaataaagccgctataaaca

SEQ ID NO: 204826 - DNA, 1277 bp, Homo sapiens
  Payload ID: 20400
  Gene Name: zona pellucida binding protein 2
  ENST ID: ENST00000584588
  CDS Start-End: 140-937
gccgttgcgacggacgggtaggggaggcgaccccggcgttctgctccgcactgtggaggaggtggggaggtgttgggccagggctgaggtaggagggagtctgtccctcgacgcctcctgcgacgccagcccctgagcgatgatgcgaacgtgcgtcctactctccgcggtgctctggtgcctcacaggagtccaatgcccgcgttttaccttattcaataagaagggcttcatttatggcaagacaggacagccagacaaaatatatgtagagttacatcaaaatagtccagtccttatctgtatggattttaagctttctaaaaaagaaatagtggaccccacctacttatggattgggcctaatgaaaagacgttaacaggaaataatagaataaatataactgaaactggacagctgatggtgaaagattttttggagcctttgtctggactttacacatgtactctttcttataagactgttaaagcagaaactcaagaagaaaaaacagtcaaaaagagatatgactttatggtctttgttaatccttttgcgccggggtggaaaggtgcttgcaatggatctgttgactgtgaagataccactaatcataatatcctccaggcaagagatcgaatagaagacttttttcggagccaagcatatattttctaccataactttaataaaactctaccagcaatgcattttgtggaccacagtttgcaagtagtacgtctggatagctgtcgaccaggctttggaaaaaatgaacgtctacacagtaattgcgctagctgttgtgtggtttgtagtcctgcgacttttagtcctgatgttaatgtaacttgtcagacctgcgtttccgtccttacctatggagctaaatcttgcccacaaacttcaaacaaaaatcagcaatatgaagattagaggtgaaagcattgttacttacttgtggaagtcggggacataagatgattttcacatcccagagcatcatagatagttccattaagtaaaatcagtaagaccaaaccactggaaaacatgcattttggaaactttaaaataaatggttaacatggcatttctaagaaggcatttaatccagtatctctagtgtacaaaggaaacttgaagttttaatggattatttttaatgaaatgttttattgtttacaaacggtatgttgctgtgtacctaagagtatagtaaggtcaagaagagtatcaaagtataataaaataaaaattgtatactctccatata

SEQ ID NO: 204827 - DNA, 795 bp, Homo sapiens
  Payload ID: 20400
  Gene Name: zona pellucida binding protein 2
  ENST ID: ENST00000583811
  CDS Start-End: 140-795
gccgttgcgacggacgggtaggggaggcgaccccggcgttctgctccgcactgtggaggaggtggggaggtgttgggccagggctgaggtaggagggagtctgtccctcgacgcctcctgcgacgccagcccctgagcgatgatgcgaacgtgcgtcctactctccgcggtgctctggtgcctcacaggagcctatcgggaacctgattattcatatcagatggctgtacgttttaccacaaggtcttgtatagggagatacaatgatgtattctttagagtgctgaagaaaatcttggatagtctaatttctgatttgtcatgccatgtcatagagccatcatataaatgccattctgttgaaattccagaacatggcctcatacatgagctatttatagcatttcaagttaatccttttgcgccggggtggaaaggtgcttgcaatggatctgttgactgtgaagataccactaatcataatatcctccaggcaagagatcgaatagaagacttttttcggagccaagcatatattttctaccataactttaataaaactctaccagcaatgcattttgtggaccacagtttgcaagtagtacgtctggatagctgtcgaccaggctttggaaaaaatgaacgtctacacagtaattgcgctagctgttgtgtggtttgtagtcctgcgacttttagtcctgatgttaatgtaacttgtcagacctgcgtttccgtccttacctatggagctaaatcttgcccacaaacttcaaacaaaaatcagcaatatga

SEQ ID NO: 204828 - DNA, 1954 bp, Homo sapiens
  Payload ID: 20401
  Gene Name: zona pellucida glycoprotein 1 (sperm receptor)
  Uniprot ID: P60852
  ENST ID: ENST00000278853
  CDS Start-End: 1-1917
atggcaggaggctcagccacgacctggggttaccctgtggccctgctactgctggttgccaccctggggctgggtaggtggctccagcccgaccctggcctcccaggcctccggcacagctacgactgtgggatcaagggaatgcagctgctggtgttccccaggccaggccagactctccgcttcaaggtggtggatgaatttgggaaccgatttgatgtcaacaactgctccatctgctaccactgggtcacctccaggccgcaggagcctgcagtcttctcggccgattacagaggctgccacgtgctggagaaggatgggcgtttccacctgagggtgttcatggaggctgtgctgcccaatggtcgtgtggatgtggcacaagacgctactctgatctgtcccaaacctgacccctcccggactctggactcccagctggcaccacccgccatgttctctgtctcaaccccacaaaccctttccttcctccccacctctggccatacctcccaaggctctggccatgcctttcccagcccactggacccagggcacagctctgtccacccaacccctgctttaccatcccctggacctggacctaccctcgccaccctggctcaaccccactggggcaccttggaacactgggatgtgaacaaacgagattacataggtacccacctgagccaggagcagtgccaggtggcctcagggcacctcccctgcatcgtgagaagaacttcaaaagaagcctgtcagcaggctggctgctgctatgacaacaccagagaggttccctgttactatggcaacacagctactgtccagtgcttcagagatggctacttcgtcctcgtggtgtcccaagaaatggccttgacacacaggatcacactggccaacatccacctggcctatgcccccaccagctgctccccaacacagcacacggaagctttcgtggtcttctacttccctctcacccactgtggaaccacaatgcaggtggctggcgaccagctcatctatgagaactggctggtgtctggcatccacatccaaaaggggccacagggttccatcacgcgggacagcaccttccagcttcatgtgcgctgtgtcttcaacgccagtgacttcctgcccattcaggcatccattttcccacccccatcgcctgctcctatgacccagcccggccccctgcggcttgagctgcggattgccaaagacgagaccttcagctcgtactatggggaggatgactatcccatcgtgaggctgctccgagaaccagtccatgtggaggtccggcttctgcagaggacagaccccaacctggtcctgctgctgcaccagtgctggggcgctcccagtgccaaccccttccagcagccccagtggcccatcctgtcagacggatgccctttcaagggcgacagctacagaacccaaatggtagccttggacggggccacacctttccagtcgcactaccagcgattcactgttgctaccttcgccctcctggactcaggctcccagagagccctcagaggactggtttacttgttctgcagcacctctgcctgccacacctcagggctggagacttgctccactgcatgtagcactggcactacaagacagcgacgatcctcaggtcaccgtaatgacactgccaggccccaggacatcgtgagctctccggggccagtgggctttgaggattcttatgggcaggagcccacacttgggcccacagactccaatgggaactccagcctgagacctctcctttgggcggtccttttgctgccagctgttgccctggtccttgggtttggtgtctttgtgggcctgagccagacctgggcccagaagctctgggaaagcaacagacagtgaatgggcccaataaacaatcatttcaaacctactgaaa

SEQ ID NO: 204829 - DNA, 418 bp, Homo sapiens
  Payload ID: 20401
  Gene Name: zona pellucida glycoprotein 1 (sperm receptor)
  ENST ID: ENST00000540908
  CDS Start-End: 1-122
accgatttgatgtcaacaactgctccatctgctaccactgggtcacctccaggccgcaggagcctgcagtcttctcggccgattacagaggctgccacgtgctggagaaggtacccacctgagccaggagcagtgccaggtggcctcagggcacctcccctgcatcgtgagaagaacttcaaaagaagcctgtcagcaggctggctgctgctatgacaacaccagagaggttccctgttactatggcaacacagctactgtccagtgcttcagagatggctacttcgtcctcgtggtgtcccaagaaatggccttgacacacaggatcacactggccaacatccacctggcctatgcccccaccagctgctccccaacacagcacacggaagctttcgtggtcttctacttccctctc

SEQ ID NO: 204830 - DNA, 1569 bp, Homo sapiens
  Payload ID: 20401
  Gene Name: zona pellucida glycoprotein 1 (sperm receptor)
  ENST ID: ENST00000620319
  CDS Start-End: 499-1491
ggattctgaagcggaaggagagctgtctcctccagctggtggaaactgcttcctatcctcctcctggagagcccaactcccagagcagatggcagaggagacctttagatggggcggtcacatgtcccagctggccttataacaactgtcccagggaactattaatagatctaccttacacacatctggactttcagatctgaaacgccctggtttggatgacagattatatggtgaacctacttttagagtgtagttcaactcatttgtcacatggatgagaaaatcagtccataaagggtttgctggggccaacaccagcctaagtggagagtaagcgtccattctcctagaccggcacttaaagcctggctgtcacccagccatcccgtctctgtgctggatggacaccaaaccccaaggccctcatctgcctttgtcccagctactgtccagtgcttcagagatggctacttcgtcctcgtggtgtcccaagaaatggccttgacacacaggatcacactggccaacatccacctggcctatgcccccaccagctgctccccaacacagcacacggaagctttcgtggtcttctacttccctctcacccactgtggaaccacaatgcaggtggctggcgaccagctcatctatgagaactggctggtgtctggcatccacatccaaaaggggccacagggttccatcacgcgggacagcaccttccagcttcatgtgcgctgtgtcttcaacgccagtgacttcctgcccattcaggcatccattttcccacccccatcgcctgctcctatgacccagcccggccccctgcggcttgagctgcggattgccaaagacgagaccttcagctcgtactatggggaggatgactatcccatcgtgaggctgctccgagaaccagtccatgtggaggtccggcttctgcagaggacagaccccaacctggtcctgctgctgcaccagtgctggggcgctcccagtgccaaccccttccagcagccccagtggcccatcctgtcagacggatgccctttcaagggcgacagctacagaacccaaatggtagccttggacggggccacacctttccagtcgcactaccagcgattcactgttgctaccttcgccctcctggactcaggctcccagagagccctcagaggactggtttacttgttctgcagcacctctgcctgccacacctcagggctggagacttgctccactgcatgtagcactggcactacaagacagcgacgatcctcaggtcaccgtaatgacactgccaggccccaggacatcgtgagctctccggggccagtgggctttgaggattcttatgggcaggagcccacacttgggcccacagactccaatgggaactccagcctgagacctctcctttgggcggtccttttgctgccagctgttgccctggtccttgggtttggtgtctttgtggcctgagccagacctgggcccagaagctctgggaaagcaacagacagtgaatgggcccaataaacaatcatttcaaacctactg

SEQ ID NO: 204831 - DNA, 2241 bp, Homo sapiens
  Payload ID: 20402
  Gene Name: zona pellucida glycoprotein 2 (sperm receptor)
  Uniprot ID: Q05996
  ENST ID: ENST00000574091
  CDS Start-End: 1-2211
atggcgtgcaggcagagaggaggctcttggagtccctcaggctggttcaatgcaggctggagcacctacaggtcgatttctctcttcttcgcccttgtgacttcagggaactccatagatgtttctcagttggtaaatcctgcctttccaggcactgtcacttgcgatgaaagggaaataacagtggagttcccaagcagtcctggcaccaagaaatggcatgcatctgtggtggatcctcttggtctcgacatgccgaactgcacttacatcctggacccagaaaagctcaccctgagggctacctatgataactgtaccaggagagtgcatggtggacaccagatgaccatcagagtcatgaacaacagtgctgccttaagacacggagctgtcatgtatcagttcttctgtccagctatgcaagtagaagagacccaggggctttcagcatctacaatctgccagaaggatttcatgtctttttccttgccacgggtcttctctggcttggctgacgacagtaaggggaccaaagttcagatgggatggagcattgaggttggtgatggtgcaagagccaaaactctgaccctgccagaggccatgaaggaaggcttcagcctcttgattgacaaccacaggatgaccttccatgtgccattcaatgccactggagtgactcactatgtgcaaggtaacagtcatctctacatggtgtctctgaagcttacatttatatctcctggacagaaggtgatcttctcttcacaagctatttgtgcaccagatcctgtgacctgcaatgccacacacatgactctcaccataccagagtttcctgggaagcttaagtctgtgagctttgaaaaccagaacattgatgtgagccagctgcatgacaatggaattgatctagaagcaacaaatggcatgaaattgcatttcagcaaaactctgctcaaaacgaaattatctgaaaaatgcctactccatcagttctacttagcttcactcaagctgacctttctccttcggccagagacagtatccatggtgatctatcctgagtgtctctgtgagtcacccgtttctatagttacaggggagctgtgcacccaggatgggtttatggacgtcgaggtctacagctaccaaacacaaccagctcttgacctgggtactctgagggtgggaaactcatcctgccagcctgtctttgaggctcagtctcaggggctggtacggttccacatacccctgaatggatgtggaacgagatataagttcgaagatgataaagtcgtctatgaaaacgaaatacatgctctctggacggattttcctccaagcaaaatatctagagacagtgagttcaggaatgacatgctactaaacatcaacgttgaaagccttactcctccagtggcctcagtgaagttgggtccatttaccttgatcctgcaaagctacccagataattcctaccaacaaccttatggggaaaacgagtaccctctagtgagattcctccgccaaccaatttacatggaagtgagagtcctaaacagggatgaccccaacatcaagctggtcttagatgactgctgggcgacgtccaccatggatccagactctttcccccagtggaacgttgtcgtggatggctgtgcatatgacctggacaactaccagaccaccttccatccagtcggctcctctgtgacccatcctgatcactatcagaggtttgacatgaaggcttttgcctttgtatcagaagcccacgtgctctctagcctggtctacttccactgcagtgccttaatctgtaatcgactctcccctgactccccactgtgttctgtgacctgccctgtgtcctctaggcacaggcgagccacaggggccactgaagcagagaaaatgacagtcagcctcccaggacccattctcctgttgtcagatgactcctcattcagaggtgtcggctcatctgatctaaaagcaagtgggagcagtggggagaagagtaggagtgaaacaggggaggaggttggctcacgaggtgctatggacaccaaagggcacaagactgctggagatgttggttccaaagctgtggctgctgtggctgcctttgcaggtgtggtggcaactctaggcttcatctactacctgtacgagaaaaggactgtgtcaaatcactaaatgggcttctaaataaagcagtcaaaataa

SEQ ID NO: 204832 - DNA, 2749 bp, Homo sapiens
  Payload ID: 20402
  Gene Name: zona pellucida glycoprotein 2 (sperm receptor)
  Uniprot ID: Q05996
  ENST ID: ENST00000574002
  CDS Start-End: 484-2721
gtgtgatgttcccctccctgtgtccatgtgttctcattgttcagctcccacttataagtgagaacagaatgttaagaatcatttttgtaataactttagtttttcctacctcctgataggagacactgttttacggagcagctatttcttcctgtgttcaaagtcagttgctgaacagatggtagcttcctgcttttccggagcagaatcctagacatggatgctcctgggcccagagccatttgttcggtggctgtccccagcacaccacaggtctgggttagggcagctggcagaatacccggcgcaagctgtcaggaatcagaggccacttccttccccaatccttccgtttcagctgggagaatgggacaagattcaggtgcccccaatggggagagggtgtggatgcggctggcttcctgctataaaaacacagagcagcctaccctctacctggttgatctggtagtgtcttctgctatggcgtgcaggcagagaggaggctcttggagtccctcaggctggttcaatgcaggctggagcacctacaggtcgatttctctcttcttcgcccttgtgacttcagggaactccatagatgtttctcagttggtaaatcctgcctttccaggcactgtcacttgcgatgaaagggaaataacagtggagttcccaagcagtcctggcaccaagaaatggcatgcatctgtggtggatcctcttggtctcgacatgccgaactgcacttacatcctggacccagaaaagctcaccctgagggctacctatgataactgtaccaggagagtgcatggtggacaccagatgaccatcagagtcatgaacaacagtgctgccttaagacacggagctgtcatgtatcagttcttctgtccagctatgcaagtagaagagacccaggggctttcagcatctacaatctgccagaaggatttcatgtctttttccttgccacgggtcttctctggcttggctgacgacagtaaggggaccaaagttcagatgggatggagcattgaggttggtgatggtgcaagagccaaaactctgaccctgccagaggccatgaaggaaggcttcagcctcttgattgacaaccacaggatgaccttccatgtgccattcaatgccactggagtgactcactatgtgcaaggtaacagtcatctctacatggtgtctctgaagcttacatttatatctcctggacagaaggtgatcttctcttcacaagctatttgtgcaccagatcctgtgacctgcaatgccacacacatgactctcaccataccagagtttcctgggaagcttaagtctgtgagctttgaaaaccagaacattgatgtgagccagctgcatgacaatggaattgatctagaagcaacaaatggcatgaaattgcatttcagcaaaactctgctcaaaacgaaattatctgaaaaatgcctactccatcagttctacttagcttcactcaagctgacctttctccttcggccagagacagtatccatggtgatctatcctgagtgtctctgtgagtcacccgtttctatagttacaggggagctgtgcacccaggatgggtttatggacgtcgaggtctacagctaccaaacacaaccagctcttgacctgggtactctgagggtgggaaactcatcctgccagcctgtctttgaggctcagtctcaggggctggtacggttccacatacccctgaatggatgtggaacgagatataagttcgaagatgataaagtcgtctatgaaaacgaaatacatgctctctggacggattttcctccaagcaaaatatctagagacagtgagttcagaatgacagtgaagtgttcttatagcaggaatgacatgctactaaacatcaacgttgaaagccttactcctccagtggcctcagtgaagttgggtccatttaccttgatcctgcaaagctacccagataattcctaccaacaaccttatggggaaaacgagtaccctctagtgagattcctccgccaaccaatttacatggaagtgagagtcctaaacagggatgaccccaacatcaagctggtcttagatgactgctgggcgacgtccaccatggatccagactctttcccccagtggaacgttgtcgtggatggctgtgcatatgacctggacaactaccagaccaccttccatccagtcggctcctctgtgacccatcctgatcactatcagaggtttgacatgaaggcttttgcctttgtatcagaagcccacgtgctctctagcctggtctacttccactgcagtgccttaatctgtaatcgactctcccctgactccccactgtgttctgtgacctgccctgtgtcctctaggcacaggcgagccacaggggccactgaagcagagaaaatgacagtcagcctcccaggacccattctcctgttgtcagatgactcctcattcagaggtgtcggctcatctgatctaaaagcaagtgggagcagtggggagaagagtaggagtgaaacaggggaggaggttggctcacgaggtgctatggacaccaaagggcacaagactgctggagatgttggttccaaagctgtggctgctgtggctgcctttgcaggtgtggtggcaactctaggcttcatctactacctgtacgagaaaaggactgtgtcaaatcactaaatgggcttctaaataaagcagtcaaaat

SEQ ID NO: 204833 - DNA, 1483 bp, Homo sapiens
  Payload ID: 20403
  Gene Name: zona pellucida glycoprotein 3 (sperm receptor)
  Uniprot ID: P21754
  ENST ID: ENST00000336517
  CDS Start-End: 347-1468
ctgcgcagagcgcgcccgcgtcctcgtggtggccgcagttgtgcacaccccagcccaggctctggcaggctgccaggcggggctcgccgccttcgcagtgcacgttgtccagcaggatgtgtccggtgccatagccgaagaaggcgttggtggtggcggccatggccgccccgcagcccagctgacgacagaccacagcggcatccggcagcccccagtcgtcgtcacacacggtgccccacaggccactgtgcaggatctccactcggccctgacacagggtggagccagccatcctgagacgtccgtacagcccgtactggtggagtgtcaggaggccactctgatggtcatggtcagcaaagacctttttggcaccgggaagctcatcagggctgctgacctcaccttgggcccagaggcctgtgagcctctggtctccatggacacagaagatgtggtcaggtttgaggttggactccacgagtgtggcaacagcatgcaggtaactgacgatgccctggtgtacagcaccttcctgctccatgacccccgccccgtgggaaacctgtccatcgtgaggactaaccgcgcagagattcccatcgagtgccgctaccccaggcagggcaatgtgagcagccaggccatcctgcccacctggttgcccttcaggaccacggtgttctcagaggagaagctgactttctctctgcgtctgatggaggagaactggaacgctgagaagaggtcccccaccttccacctgggagatgcagcccacctccaggcagaaatccacactggcagccacgtgccactgcggttgtttgtggaccactgcgtggccacaccgacaccagaccagaatgcctccccttatcacaccatcgtggacttccatggctgtcttgtcgacggtctcactgatgcctcttctgcattcaaagttcctcgacccgggccagatacactccagttcacagtggatgtcttccactttgctaatgactccagaaacatgatatacatcacctgccacctgaaggtcaccctagctgagcaggacccagatgaactcaacaaggcctgttccttcagcaagccttccaacagctggttcccagtggaaggctcggctgacatctgtcaatgctgtaacaaaggtgactgtggcactccaagccattccaggaggcagcctcatgtcatgagccagtggtccaggtctgcttcccgtaaccgcaggcatgtgacagaagaagcagatgtcaccgtggggccactgatcttcctggacaggaggggtgaccatgaagtagagcagtgggctttgccttctgacacctcagtggtgctgctgggcgtaggcctggctgtggtggtgtccctgactctgactgctgttatcctggttctcaccaggaggtgtcgcactgcctcccaccctgtgtctgcttccgaataaaagaagaaagcaata

SEQ ID NO: 204834 - DNA, 1348 bp, Homo sapiens
  Payload ID: 20403
  Gene Name: zona pellucida glycoprotein 3 (sperm receptor)
  Uniprot ID: P21754
  ENST ID: ENST00000394857
  CDS Start-End: 59-1333
ccagcatcccacgggtataagatggccagaggcggctgcctgctgctctgcaggtaccatggagctgagctataggctcttcatctgcctcctgctctggggtagtactgagctgtgctacccccaacccctctggctcttgcagggtggagccagccatcctgagacgtccgtacagcccgtactggtggagtgtcaggaggccactctgatggtcatggtcagcaaagacctttttggcaccgggaagctcatcagggctgctgacctcaccttgggcccagaggcctgtgagcctctggtctccatggacacagaagatgtggtcaggtttgaggttggactccacgagtgtggcaacagcatgcaggtaactgacgatgccctggtgtacagcaccttcctgctccatgacccccgccccgtgggaaacctgtccatcgtgaggactaaccgcgcagagattcccatcgagtgccgctaccccaggcagggcaatgtgagcagccaggccatcctgcccacctggttgcccttcaggaccacggtgttctcagaggagaagctgactttctctctgcgtctgatggaggagaactggaacgctgagaagaggtcccccaccttccacctgggagatgcagcccacctccaggcagaaatccacactggcagccacgtgccactgcggttgtttgtggaccactgcgtggccacaccgacaccagaccagaatgcctccccttatcacaccatcgtggacttccatggctgtcttgtcgacggtctcactgatgcctcttctgcattcaaagttcctcgacccgggccagatacactccagttcacagtggatgtcttccactttgctaatgactccagaaacatgatatacatcacctgccacctgaaggtcaccctagctgagcaggacccagatgaactcaacaaggcctgttccttcagcaagccttccaacagctggttcccagtggaaggctcggctgacatctgtcaatgctgtaacaaaggtgactgtggcactccaagccattccaggaggcagcctcatgtcatgagccagtggtccaggtctgcttcccgtaaccgcaggcatgtgacagaagaagcagatgtcaccgtggggccactgatcttcctggacaggaggggtgaccatgaagtagagcagtgggctttgccttctgacacctcagtggtgctgctgggcgtaggcctggctgtggtggtgtccctgactctgactgctgttatcctggttctcaccaggaggtgtcgcactgcctcccaccctgtgtctgcttccgaataaaagaagaaagcaata

SEQ ID NO: 204835 - DNA, 783 bp, Homo sapiens
  Payload ID: 20403
  Gene Name: zona pellucida glycoprotein 3 (sperm receptor)
  ENST ID: ENST00000394860
  CDS Start-End: 1-776
agaactggaacgctgagaagaggtcccccaccttccacctgggagatgcagcccacctccaggcagaaatccacactggcagccacgtgccactgcggttgtttgtggaccactgcgtggccacaccgacaccagaccagaatgcctccccttatcacaccatcgtggacttccatggctgtcttgtcgacggtctcactgatgcctcttctgcattcaaagttcctcgacccgggccagatacactccagttcacagtggatgtcttccactttgctaatgactccagaaacatgatatacatcacctgccacctgaaggtcaccctagctgagcaggacccagatgaactcaacaaggcctgttccttcagcaagccttccaacaggcaacaaaaatctaagctgcttctctttcatctcagctggttcccagtggaaggctcggctgacatctgtcaatgctgtaacaaaggtgactgtggcactccaagccattccaggaggcagcctcatgtcatgagccagtggtccaggtctgcttcccgtaaccgcaggcatgtgacagaagaagcagatgtcaccgtggggccactgatcttcctggacaggaggggtgaccatgaagtagagcagtgggctttgccttctgacacctcagtggtgctgctgggcgtaggcctggctgtggtggtgtccctgactctgactgctgttatcctggttctcaccaggaggtgtcgcactgcctcccaccctgtgtctgcttccgaataaaagaaga

SEQ ID NO: 204836 - DNA, 1846 bp, Homo sapiens
  Payload ID: 20403
  Gene Name: zona pellucida glycoprotein 3 (sperm receptor)
  ENST ID: ENST00000416245
  CDS Start-End: 1094-1840
gaaatgggcttgaataggttagaagctgatgtgggttgttgtgttttttgtttgtttttgtttttgagagttttgctcttgttgcccaggctagaatgcaatggcacgatctccgctcactgcaacctctgcctcccgggttcaagcgattcttctgcctcagtctcccgagtagctgggattacaggcacgtgccaccacactcagctaattttttttttttaagtagagatggggtttcaccatgttggtcaggctggtctcaaactcctgacctcagatgatctgccctcctcagcctcccaaagtgctgggattacgggcgtgagccacagcgcccagccagaagctgataagtgttaacagctgggcacttcctgactgcttcctggcggctatcttggccctgggcctctcctgaaagaggaaactgtatgtactggggggcatggagggggagtgtcagaagggatgtgtcatgtgccctgatgcctctattgcttgggtgttacatggtatctgccatgtggttgatccagtctgcctgtggtggtgtcaatatgtggtgtcaggtaaagattccgaggtacaaagacagtacctgtcctgcctctttcctgaccagtggcagagcctgtgttctcttttgtagagatggggtcttgctatgtttcccaggccagtctcaaactcctggcctcaagcaatccttggcctcccaaagtgctggggttacaggcatgagtcactgcacctggccttgaccctgtggtctttctgtccccttgtgggctgccctccctgagcactcaggtatggcttgggagtacccgggcaggtgatggccggcagcattaacttctcacctttcctccaggtaactgacgatgccctggtgtacagcaccttcctgctccatgacccccgccccgtgggaaacctgtccatcgtgaggactaaccgcgcagagattcccatcgagtgccgctaccccaggcagggcaatgtgagcagccaggccatcctgcccacctggttgcccttcaggaccacggtgttctcagaggagaagctgactttctctctgcgtctgatggaggagaactggaacgctgagaagaggtcccccaccttccacctgggagatgcagcccacctccaggcagaaatccacactggcagccacgtgccactgcggttgtttgtggaccactgcgtggccacaccgacaccagaccagaatgcctccccttatcacaccatcgtggacttccatggctgtcttgtcgacggtctcactgatgcctcttctgcattcaaagttcctcgacccgggccagatacactccagttcacagtggatgtcttccactttgctaatgactccagaaacatgatatacatcacctgccacctgaaggtcaccctagctgagcaggacccagatgaactcaacaaggcctgttccttcagcaagccttccaacagctggttcccagtggaaggctcggctgacatctgtcaatgctgtaacaaaggtgactgtggcactccaagccattccaggaggcagcctcatgtcatgagccagtggtccaggtctgcttcccgtaaccgcaggcatgtgacagaagaagcagatgtcaccgtggggccactgatcttcctggacaggaggggtgaccatgaagtagagcagtgggctttgccttctgacacctcagtggtgctgctgggcgtaggcctggctgtggtggtgtccctgactctgactgctgttatcctggttctcaccaggaggtgtcgcactgcctcccaccctgtgtctgcttccgaataaaagaag

SEQ ID NO: 204837 - DNA, 1799 bp, Homo sapiens
  Payload ID: 20404
  Gene Name: zona pellucida glycoprotein 4
  Uniprot ID: Q12836
  ENST ID: ENST00000366570
  CDS Start-End: 160-1782
gaattcccctttctgaaggcatcccacctgagtgtcacaaagatgtgcagctgaaaacaagcctgacttctgtatataaaggaatctgggcaggcagaccctcggctcttgggagaggaggcggagagtctgcagccggcaggaactcctggtagcattatgtggctgctgcggtgcgttttgctgtgtgtttcattatctcttgctgtgagtggccagcataagcctgaggcaccagattattccagtgtgctccactgtgggccgtggagcttccagtttgctgtaaacctcaaccaggaggcaacgtctcctcctgtactaatagcttgggacaaccaagggctgctgcacgagctgcagaatgactccgactgtggcacctggataagaaaaggtccaggcagctccgtggtgttggaggcaacctatagcagctgctatgtcactgagtgggactcccactacatcatgccagttggagttgaaggagcaggcgcggctgaacacaaggtggttacagagaggaagctgctcaagtgtcctatggatcttctagcccgagatgctccagatactgactggtgtgactccatcccagcacgggacagactgccatgtgcaccttcacccatctctcgaggagactgtgaagggctaggctgttgttatagctctgaagaggtgaattcctgctactatggaaacactgtgaccttgcattgtacccgagagggccatttctctattgctgtgtctcggaacgtgacctcgccaccactgctcttggattctgtgcgcttggcccttaggaatgacagtgcgtgtaaccctgtgatggcaacacaagcttttgttctgttccagtttccatttacttcctgtggcaccacaagacagatcactggagaccgagcagtatatgaaaatgaactggtggcaactagggatgtgaaaaatgggagccgtggctctgtcactcgtgacagcatcttcaggctccatgtcagctgcagctactcagtaagtagcaactctctcccaatcaatgtccaggttttcactctcccaccaccctttcctgagacccagcctggacccctcactctggaacttcagattgccaaagataaaaactatggctcttactacggtgttggtgactacccagtggtgaagttgcttcgggatcccatttacgtggaggtctccatccttcacagaacagacccctacctggggctgctcctacaacagtgttgggcaacacccagcactgaccccctgagtcagccacagtggcccatcctggtaaagggctgcccctacattggagacaactatcagacccagctgatccctgtccagaaagccttggatcttccatttccctctcaccaccagcgcttcagcatcttcaccttcagctttgtgaaccctacagtggagaaacaggccctcaggggaccggtgcatctgcactgcagcgtgtcagtctgccagcctgctgagacaccatcctgtgtggtgacctgtcctgatctcagtcgaagaagaaattttgacaacagttctcagaacactactgctagtgtttctagcaaaggccccatgattctactccaagccactaaggaccctccagaaaagctccgtgttcctgtagactcgaaagttctgtgggtggcaggcctttctgggaccttaatccttggagccttgttagtatcctacttggctgtcaagaaacagaagagttgcccagaccaaatgtgtcaataaaaccagagtgtattccc

SEQ ID NO: 204838 - DNA, 2474 bp, Homo sapiens
  Payload ID: 20404
  Gene Name: zona pellucida glycoprotein 4
  Uniprot ID: Q12836
  ENST ID: ENST00000611898
  CDS Start-End: 288-1910
agctttctttccttcctttctgttagctaaaagttactacatttttcttgggctctgaagtctgcctggattgtggtatttaatgtgaggcagctgcagactgtgccccaaagcaaatgaggctagaggaattcccctttctgaaggcatcccacctgagtgtcacaaagatgtgcagctgaaaacaagcctgacttctgtatataaaggaatctgggcaggcagaccctcggctcttgggagaggaggcggagagtctgcagccggcaggaactcctggtagcattatgtggctgctgcggtgcgttttgctgtgtgtttcattatctcttgctgtgagtggccagcataagcctgaggcaccagattattccagtgtgctccactgtgggccgtggagcttccagtttgctgtaaacctcaaccaggaggcaacgtctcctcctgtactaatagcttgggacaaccaagggctgctgcacgagctgcagaatgactccgactgtggcacctggataagaaaaggtccaggcagctccgtggtgttggaggcaacctatagcagctgctatgtcactgagtgggactcccactacatcatgccagttggagttgaaggagcaggcgcggctgaacacaaggtggttacagagaggaagctgctcaagtgtcctatggatcttctagcccgagatgctccagatactgactggtgtgactccatcccagcacgggacagactgccatgtgcaccttcacccatctctcgaggagactgtgaagggctaggctgttgttatagctctgaagaggtgaattcctgctactatggaaacactgtgaccttgcattgtacccgagagggccatttctctattgctgtgtctcggaacgtgacctcgccaccactgctcttggattctgtgcgcttggcccttaggaatgacagtgcgtgtaaccctgtgatggcaacacaagcttttgttctgttccagtttccatttacttcctgtggcaccacaagacagatcactggagaccgagcagtatatgaaaatgaactggtggcaactagggatgtgaaaaatgggagccgtggctctgtcactcgtgacagcatcttcaggctccatgtcagctgcagctactcagtaagtagcaactctctcccaatcaatgtccaggttttcactctcccaccaccctttcctgagacccagcctggacccctcactctggaacttcagattgccaaagataaaaactatggctcttactacggtgttggtgactacccagtggtgaagttgcttcgggatcccatttacgtggaggtctccatccttcacagaacagacccctacctggggctgctcctacaacagtgttgggcaacacccagcactgaccccctgagtcagccacagtggcccatcctggtaaagggctgcccctacattggagacaactatcagacccagctgatccctgtccagaaagccttggatcttccatttccctctcaccaccagcgcttcagcatcttcaccttcagctttgtgaaccctacagtggagaaacaggccctcaggggaccggtgcatctgcactgcagcgtgtcagtctgccagcctgctgagacaccatcctgtgtggtgacctgtcctgatctcagtcgaagaagaaattttgacaacagttctcagaacactactgctagtgtttctagcaaaggccccatgattctactccaagccactaaggaccctccagaaaagctccgtgttcctgtagactcgaaagttctgtgggtggcaggcctttctgggaccttaatccttggagccttgttagtatcctacttggctgtcaagaaacagaagagttgcccagaccaaatgtgtcaataaaaccagagtgtattcccagcctgtgctgagcttctcatttgaaagggaaatatttatcttggcttcttggaagtctaacctgagaacctaaggaagctggcaggtgactggaaacagcatcttgactttaccctccatgtattgaaacattttattggatccttattttggacaaagttcccttttatattaggaaatgaagtcagtactctggtccaacaaccaacaacatggaacttgtttacatggtctggtaacaagaataatggtaggaaaccagaagttgaagctgatgttatagcagccgtttggaaagaagcctattctaacaatgtcacgttccctgccactcccatcttcactcagaatattcagatcagaagagccagatacagacacagagatgtaatctctgtgaactcaactttctcacctctgaaatagaaaactatcaattgtttctagctgtctggctctaaatttttggttcttagaaccttcttaatccccttcagtttttttccacgggtcttgatttgcagctgtcctttggaaactctactc

SEQ ID NO: 204839 - DNA, 3619 bp, Homo sapiens
  Payload ID: 20405
  Gene Name: zona pellucida-like domain containing 1
  Uniprot ID: Q8TCW7
  ENST ID: ENST00000306176
  CDS Start-End: 101-1396
taaagggtgttaacataatcccccaatcccatacaattcaatttcagaaaagtatttagggactgtgctaaaatagcatctccaagcttgctatggcaagatgatgctcaggttttccatgtgcaggggaaatgatgaaggttttgcaatggaacaaatatggttgctgctgcttctaacaattagagtgcttccggggtctgctcagttcaacggctacaactgtgatgccaacctccacagtagatttcctgctgaaagagacatcagtgtctattgtggagtgcaggctattacgatgaagattaatttttgcacggtacttttctcgggttattcggaaacagatctggcactgaatggaaggcatggggactcccactgcagagggttcatcaataacaacacctttccagcagtggtcatttttatcatcaatctcagcaccttggagggctgtggaaacaacctggtggtatccacaattcctggagtcagtgcttatggaaatgcaacttcagtgcaagtaggaaatatttcaggatatattgatactccagacccaccaacaatcatcagctatctacctgggcttctttacaaatttagttgtagttatccattggaatacctggttaataatacccagcttgcttcgtcctcagcggctatttctgtgagagagaacaatggcacatttgtcagcactttgaacctgctcctttataacgattcaacctacaaccagcagttaattatccccagtataggattacctttgaaaaccaaagtatttgcagctgtccaagccactaatttggatggcagatggaatgttttaatggattattgctatactaccccatcaggaaacccaaatgatgacattcgatatgatcttttccttagctgtgacaaggaccctcagaccaccgtcattgagaatggccgaagccagcggggccggttttcttttgaagtgttccgatttgtgaaacacaagaatcagaaaatgtccactgtcttcttgcactgcgttaccaagctctgcagagcagatgactgccccttccttatgccgatttgcagccacagagaaaggagagatgctgggaggaggacgacttggagcccccagagctcttctggcagcgcggtgctctctgctggtcccatcattactcggagtgatgagactccaaccaacaattcgcaacttggttctccaagtatgcctcccttccagctgaacgccatcaccagcgcactgatatcaggaatggtcattctgggagttacgagcttttctcttcttctgtgctcactggcccttctgcacaggaagggacccacaagtttagtgttgaatggcataagaaacccagtctttgactgactataacagattcctgctctctggagaaggcttcactgactaaactatgtgtgactgcagtcagtgttccgtctgaatttcatgtcagtccacattcaatatttgtaggtttgataaatttcacagtatagcttgtcagcataatgatagtgaaagaagtttattatattgctattgtcacttatgtacgtggcgagccgtatttttatgccaccagtgaatatattgacaataagtgaaaaatattcaggacttagggcttacaggatcagtaatatttcattttatttcagttttcttttgattgttggttaaaagataaaaggtgggagtagacaaaaaatgaaatgtgttgcatttcccccttaagcattaatggcatttagatttgcacacgtggtcctagaataaatgttgctttttgttttaatccggatattcccagcttcaggatgtgttttaataggactggccaatttggatacctgagatttaactactcattctatgacctcctgtgtttttggccgattttcatgtctgaccatattcattttaaaagaaactcttgggacatatctcttaacctggggcacccttttgtgtagaagatagtgaaaatagttgttagcttccaaggctactgctaagtggccctagatcattattcattagaataggaatggctgcgatcagttttcttcttctggttcaggtgagaacaccagcacatgttaactctcctcccaggtaaacagttcagctgctgttgcagctgtgcttccagcagtgaggtaactatgcaaagattatttttaattcaagaatcatcacatgtgaaaacaagctgtagttgtgaaaagagttcctagaagggtttttaacaatttagattccctttttcctaaaacaaaaaggaaacttaggttaagtgtagtttgcagaacattgttggaatctacataaaaagatattccttcccccatattttcgatgccaggcaataatcaggagagggtttctttttaaggtatcttcttgtaggtgtcataattgccatgaataaacaatattttcctctaacagtaaactgcaagaagcttctgatcctttatcagttttgcaaaaaagcaagctttaagcagcccatgttcttacaaaaaaaatcaacattctctttgtttaagctacctatgcactgaacaaacaaaacaatttaatagccaacaccaaaacccagcatgtgaagttactagaattgccatgttaactataagcaattgctgtaatcactaatttctattcaacatttgtgacccattagtccggacttaatttactatactgcatgcaaatcatcaagcaattgcttcaaaggaaatgtctacaatgtgagttaataattaaatcaatcctcaagttgaaaaacactttttctccaatttgcctgaatatttcaggaggaagtgtttatattataataattagctatataattgcatcaactttttatttcaaggtatagttgccaagtaaagtgggatctggaaagtctctggataatttctttacaaaaaaagtttaaatcacataaaaagccaatctactcttccctgtgttactttaaaataactttgaagtgactattctgagctttatctgtgttaacatgattaactgaccatactactaatgtgaccctgtatatacatggatagtattgaaatatgctggtaaatctatttcagatactttaagtgaattgccattgattctacgattaagttctgtgaataggacattatatcatttaagctgttttgtcaatttgatttttatgcttttggaacggctgctgtttcagctgttggccttttcaattctatactccattttatagaattgaataatggacacatgtcacttgggaagcaacgtaagtatcacattattttttgccaccctttcatcataaatggaagaatcagagttataatgagataaaccaggtctgttttttacaactttgttcttataaatctgcagttatatggagtatttagttatactgaattttacagttattatagtgtgaaaaaccttacaaaatatgtgcaaatgtttcttcagttttaatacctcaaactgttttttgcacttcaggggtaaggtctgatgacatgtaaaagatgatcgtttaataaaataattgtttaaaatgtt

SEQ ID NO: 204840 - DNA, 1531 bp, Homo sapiens
  Payload ID: 20405
  Gene Name: zona pellucida-like domain containing 1
  Uniprot ID: Q8TCW7
  ENST ID: ENST00000466937
  CDS Start-End: 245-1492
tcccccaatcccatacaattcaatttcagaaaagtatttagggactgtgctaaaatagcatctccaagcttgctatggcaagatgatgctcaggttttccatgtgcaggggaaatgatgaaggatacacctctgtgttggggacaacagtgtgggtctagagtttccaatgtcttccaggagttcttgggacccatcatgagaaggaagtggtggagcatggagcatggaataaatgttttgcaatggaacaaatatggttgctgctgcttctaacaattagagtgcttccggggtctgctcagttcaacggctacaactgtgatgccaacctccacagtagatttcctgctgaaagagacatcagtgtctattgtggagtgcaggctattacgatgaagattaatttttgcacggtacttttctcgggttattcggaaacagatctggcactgaatggaaggcatggggactcccactgcagagggttcatcaataacaacacctttccagcagtggtcatttttatcatcaatctcagcaccttggagggctgtggaaacaacctggtggtatccacaattcctggagtcagtgcttatggaaatgcaacttcagtgcaagtaggaaatatttcaggatatattgatactccagacccaccaacaatcatcagctatctacctgggcttctttacaaatttagttgtagttatccattggaatacctggttaataatacccagcttgcttcgtcctcagcggctatttctgtgagagagaacaatggcacatttgtcagcactttgaacctgctcctttataacgattcaacctacaaccagcagttaattatccccagtataggattacctttgaaaaccaaagtatttgcagctgtccaagccactaatttggatggcagatggaatgttttaatggattattgctatactaccccatcaggaaacccaaatgatgacattcgatatgatcttttccttagctgtgacaaggaccctcagaccaccgtcattgagaatggccgaagccagcggggccggttttcttttgaagtgttccgatttgtgaaacacaagaatcagaaaatgtccactgtcttcttgcactgcgttaccaagctctgcagagcagatgactgccccttccttatgccgatttgcagccacagagaaaggagagatgctgggaggaggacgacttggagcccccagagctcttctggcagcgcggtgctctctgctggtcccatcattactcggagtgatgagactccaaccaacaattcgcaacttggttctccaagtatgcctcccttccagctgaacgccatcaccagcgcactgatatcaggaatggtcattctgggagttacgagcttttctcttcttctgtgctcactggcccttctgcacaggaagggacccacaagtttagtgttgaatggcataagaaacccagtctttgactgactataacagattcctgctctctggagaaggcttcactga

SEQ ID NO: 204841 - DNA, 2189 bp, Homo sapiens
  Payload ID: 20405
  Gene Name: zona pellucida-like domain containing 1
  Uniprot ID: Q8TCW7
  ENST ID: ENST00000491959
  CDS Start-End: 883-2130
agtatgtataaagtgcttagaagagggcctggaacataggacatggatgaagctggaaaccatcattctcagcagactaacacaggaacagaaaaccaaacaccagtgttccagatttgcattaagctgtcacccggtggctgtgtaactagctgcttttgtgactgttacagccgcaaaagccttaacagacctgcagttacagactcagggaaaagcttgtactgttgtttgtggatcgcagggaagccagagttgcagctgactttctgtccacgagatggcggtagaggagcacagaaaaaagaaaccatcttgggctgttaatcatgttgactgttgagaagctaagagggaagccgatctgtcattagggtgaaaaaaaaagtcactgtaacaggagtcaagaaggggcttagaacctagtcatgtgaatattttcaagtttttcttgccttgtgttttttcatcaaatgaggttcagtgaattcgggactcagtaactccattagtgactgcacccacatagacctttttctaaaagtctccacatttgtccagttgtttcctccttggtccaatgccaacgctccgtcaatgctattgccacccccattctgcctcttccaaaagcctgcatcagtcatggagtcctcttcacctgaaataagcacttagtataaaccgatgcaactggttttgtgctggaagacaagcttagcaacgacatttcaaaaagagcagctcttctctcatttgaagccttgactcttttctgaaaaagtttggtaaggtcaggcatttgaacactcagtcacatgcggcagaacctagcacatggaggacagctgactccacagaaccagggatttgggttttgcaatggaacaaatatggttgctgctgcttctaacaattagagtgcttccggggtctgctcagttcaacggctacaactgtgatgccaacctccacagtagatttcctgctgaaagagacatcagtgtctattgtggagtgcaggctattacgatgaagattaatttttgcacggtacttttctcgggttattcggaaacagatctggcactgaatggaaggcatggggactcccactgcagagggttcatcaataacaacacctttccagcagtggtcatttttatcatcaatctcagcaccttggagggctgtggaaacaacctggtggtatccacaattcctggagtcagtgcttatggaaatgcaacttcagtgcaagtaggaaatatttcaggatatattgatactccagacccaccaacaatcatcagctatctacctgggcttctttacaaatttagttgtagttatccattggaatacctggttaataatacccagcttgcttcgtcctcagcggctatttctgtgagagagaacaatggcacatttgtcagcactttgaacctgctcctttataacgattcaacctacaaccagcagttaattatccccagtataggattacctttgaaaaccaaagtatttgcagctgtccaagccactaatttggatggcagatggaatgttttaatggattattgctatactaccccatcaggaaacccaaatgatgacattcgatatgatcttttccttagctgtgacaaggaccctcagaccaccgtcattgagaatggccgaagccagcggggccggttttcttttgaagtgttccgatttgtgaaacacaagaatcagaaaatgtccactgtcttcttgcactgcgttaccaagctctgcagagcagatgactgccccttccttatgccgatttgcagccacagagaaaggagagatgctgggaggaggacgacttggagcccccagagctcttctggcagcgcggtgctctctgctggtcccatcattactcggagtgatgagactccaaccaacaattcgcaacttggttctccaagtatgcctcccttccagctgaacgccatcaccagcgcactgatatcaggaatggtcattctgggagttacgagcttttctcttcttctgtgctcactggcccttctgcacaggaagggacccacaagtttagtgttgaatggcataagaaacccagtctttgactgactataacagattcctgctctctggagaaggcttcactgactaaactatgtgtgactgca

SEQ ID NO: 204842 - DNA, 8470 bp, Homo sapiens
  Payload ID: 20406
  Gene Name: zonadhesin (gene/pseudogene)
  ENST ID: ENST00000546213
  CDS Start-End: 166-7971
gccatgttgatttctgatccttgagcttttctgtgtttctctgttcattcttcatggcatccttggaaggatgccaagctaaggaggccaggggggaataaaaggagtccaggctcccaactgtgcccttcccctctcccctgggagcaaccacttagggtcctcatggttcctccagtctggactctgctgcttctggtgggggctgcccttttcaggaaagagaagcctccggaccagaagctggttgttcgcagctctagggacaactatgtcctcacccagtgtgattttgaggatgacgccaaacccctctgtgactggtcccaagtgtccgcagacgatgaagactgggttcgagccagtgggccctctcccaccggctccaccggggcccccggggggtaccctaacggagagggcagctatctgcatatggaatcgaacagcttccaccgtgggggagtggcccgcctgctcagccccgacctatgggagcaaggccccctctgtgtgcactttgcccaccacatgttcgggctgtcttggggcgcccagctcaggctgctgctgctctcgggtgaagagggccgccgccccgatgtgctctggaaacactggaacacccagagaccctcctggatgctcaccaccgtcactgtgcccgcagggttcaccctgcccacccggctgatgtttgagggaacacggggtagcactgcctacctggacatcgccctggatgccctctctatccgccggggctcctgtaatcgcgtctgtatgatgcaaacatgcagctttgacattccaaatgacctctgtgactggacctggatcccaactgcctccggggccaagtggactcagaagaaagggtcatcaggaaagccaggcgtggggcctgatggcgacttctctagccctggtagtggctgctacatgctcctggaccccaagaatgcaagacctgggcagaaagctgtcctcctgagccccgtgagcctgtcctctggctgtctgagcttttccttccactacatcctccggggccagtctcctggtgcagccctccacatttatgcttcagtcttggggagtatccggaaacacactctcttctcaggacaacctgggcccaactggcaggctgtttctgtcaattacacagccgtgggacggatacagtttgccgtggtaggcgtttttggaaagaccccagagccagctgtggcagttgatgcaaccagcattgctccttgtggggagggttttcctcagtgtgactttgaagacaacgcccatcccttctgtgactgggtccagacttccggggatggtggacactgggccctcggacataaaaatggacccgtccatggcatgggccctgcgggaggtttccctaatgcagggggtcactatatctaccttgaggctgacgagttctcccaggcaggccagtcagtcagactggtgagccggcccttctgcgccccaggtgacatctgcgtggagttcgcataccacatgtatggccttggggagggtactatgctcgaactcctcctgggaagtcctgcggggagtcccccgattcctctctggaaacgcgtggggtctcagcgcccttactggcagaacacctccgtcaccgtcccctcaggacaccaacagcccatgcagcttattttcaagggcatccagggaagcaacacggcctctgtggttgctatgggtttcatcttgatcaatcctgggacttgtccagtaaaagtgctaccagagcttcctcccgtatctccagtttcttccactggcccttctgaaaccactggcctcacagaaaaccctacaatctccaccaagaaacctacagtttccatagaaaaacccagtgtcaccacagaaaagcccacagtccccaaagaaaagcccaccattcccacagaaaaacccaccatctccacagaaaaacccaccattccttcagaaaaacccaacatgccctcagaaaaacccaccattccctcagaaaaacccaccatcctcacagaaaaacccaccattccctcagaaaaacccaccattccctcagaaaaacccaccatttccacagaaaaacccaccgtccccacagaagagcccaccacccccactgaggagaccaccacctccatggaagagcctgtcatccctacagaaaaacccagcatccctacagaaaaacccagcatccccacggaaaaacccaccatctccatggaagagactatcatctccacagaaaaacccaccatctccccagaaaaacccaccatccccacagaaaaacccaccatccccacagaaaaatccaccatctccccagaaaaacccaccacccccacagaaaaacccaccatccccacagaaaaacccaccatctccccagaaaaacccaccacccccacagaaaaacccaccatctccccagaaaaactcaccatccccacagaaaaacccaccatccccacagaaaaacccaccattcccacagaaaaacccaccatctccacagaagagcccaccacccccactgaggagaccaccatctccacagaaaaacccagcatccccatggaaaaacccactctccccactgaagaaaccaccacctctgttgaagagactaccatctctacagaaaaactcaccatccccatggaaaaacccaccatctccacagaaaaacccaccatccccacagaaaaacccaccatctccccagaaaaactcaccatccccacggaaaaactcaccatccccacggaaaaacccaccatccccattgaagagactaccatctccacagaaaaactcaccatccccacagaaaaacccaccatctccccagaaaaacccaccatctccacggaaaaacccaccatccccacggaaaaacccaccatccccactgaagagactaccatctccacagaaaaactcaccatccccacagaaaaacccaccatctccccagaaaaactcaccatccccacagaaaaacccaccatctccacggaaaaacccaccatccccacggaaaaacttaccatccccacggaaaaacccaccatccccacagaaaaacccaccattcccacagagaagctcacagccctgaggccaccccatcccagccccacagccactgggctggcagccttggtgatgtctccacatgctccaagtacccctatgaccagtgtgattctgggcactaccacaacctccagatccagtacagagcgctgccctccaaatgcccgctacgaatcctgtgcttgtcctgcttcgtgcaagagccccaggcctagctgtgggcccctctgtcgggagggctgtgtctgcaaccctggctttttgtttagtgacaaccactgcatccaggcctcttcctgcaattgcttctacaacaacgactactatgagcctggggcagagtggttcagccccaactgcacagaacattgccgctgctggcccggcagtcgggtcgagtgccagatctctcagtgtgggacacacaccgtgtgccagcttaagaatggccagtatggatgccacccctacgcaggcactgccacctgcttggtctacggagaccctcattatgtcacctttgacgggaggcactttggcttcatgggcaagtgcacttacatcttggcccagccctgtggcaactcaacagacccattcttcagggtgacagccaagaatgaggagcagggacaggaaggcgtgtcctgcctgagcaaagtctacgtgaccctgcccgagagcaccgtcaccctgcttaagggcagacgcactctggttgggggtcagcaagttactctcccagccataccctctaaaggcgtcttcctgggtgcaagcgggcggtttgtggagctgcagacggagttcggtttgcgggtgagatgggatggtgaccagcagctgtatgttactgtgtccagcacatactctggcaaactctgtggtttgtgtgggaactatgacggcaacagtgacaatgaccacctgaagttggacggcagcccagcaggagacaaggaggagctggggaacagctggcagacggaccaggacgaggaccaggagtgtcagaagtaccaggtggtgaattccccgtcttgtgattcatctctgcagagcagcatgtcggggccagggttctgtggacggctggtcgacactcatggcccatttgagacatgcctgctgcacgtgaaggccgcttccttcttcgacagctgcatgcttgatatgtgcggattccaggggctgcagcacctgctgtgcacacacatgtccaccatgaccaccacctgccaggacgcaggccacgctgtgaagccctggagggaaccccacttctgcccaatggcctgcccgcccaacagcaagtactccctgtgtgcgaagccatgccctgacacctgccattcaggattctccggcatgttctgctcagaccggtgcgtggaggcctgtgaatgcaatccgggcttcgtcctcagtggcctcgagtgcatacctcgctcccagtgtgggtgcctccaccctgcaggcagctacttcaaggtaggggagcggtggtacaagccaggctgcaaagagttgtgcgtctgtgaaagcaacaacagaattcgctgccagccctggaggtgtagggcccaggagttctgtggccaacaggatggtatctatggctgccatgcccaaggtgccgccacctgcacagcctcgggtgacccccactacctgaccttcgatggcgccttgcaccacttcatgggcacctgcacctatgtcctgacccggccttgctggtccaggtcccaagacagctattttgttgtgagcgccaccaacgagaaccgcggggggatcctggaggtctcctacatcaaagccgtccacgtgacagtctttgacctcagcatctcactgctcagaggctgtaaggtcatgctgaatggccatcgggtggccctacctgtgtggcttgcacaaggccgggtgaccataaggctcagcagcaacctcgtcctcctctacacgaactttgggctccaagttcgctacgacgggagccacttggtggaagtgacagtcccctcctcctatggcggccagctctgtgggctgtgtgggaactacaacaacaacagcttggatgacaacctgcgccccgacagaaagcttgcaggcgattccatgcagctgggggccgcctggaagttacctgaatcctctgaacctggctgtttccttgtgggtggcaagccctccagctgccaggagaacagcatggcagacgcctggaacaagaactgtgcgatcttaataaaccctcagggacccttctctcaatgtcaccaggtggtgcctccccagtccagctttgccagttgcgtgcatggtcagtgtgggaccaagggcgacaccacagccctgtgccgctccctgcaggcctacgcgtccctgtgtgcccaggctggccaggcccctgcctggcggaacagaaccttctgccctatgaggtgcccacctggcagcagctacagcccctgcagcagcccctgcccagacacctgcagcagcataaacaacccgagggactgccccaaagcactgccctgtgctgagagctgtgaatgtcagaaaggccacatcttgagtggaacctcctgcgtgccccttggccagtgtggctgcactgacccagcgggctcctaccacccggtcggggagcgctggtacacagagaacacctgcaccaggctctgcacctgctccgtccacaacaacatcacctgcttccagagcacctgcaaacccaaccagatatgctgggccctggatgggctgctccattgtcgggcctcaggtgtgggagtgtgtcagctcccaggggagtcccactacgtgagctttgatggtagtaaccattctatcccggacgcctgcactcttgtcctggtgaaagtgtgccaccccgccatggccttgcccttcttcaagatcagtgccaagcatgagaaggaggaaggtggaactgaggctttccgccttcatgaggtctacattgacatctacgatgcccaggtcaccctgcagaagggccaccgtgtgctaatcaacagcaaacaggtcaccctccccgccatctcccagatccctggggtcagtgtcaagtccagcagcatctacagcattgttaacatcaagatcggggtgcaagtcaagtttgacgggaatcatctcttagagattgaaatccccacaacctactatggaaaggtctgcggcatgtgtgggaacttcaatgatgaggaagaggacgaactaatgatgcccagcgatgaagtagcaaatagtgacagtgaatttgtgaacagttggaaagataaggacattgacccaagttgtcagagtctcctggtagatgagcagcagattccagcggaacagcaggagaacccgagtggaaactgcagggcggccgacctccgcagggcgcgggaaaagtgcgaggcagcgctccgggctcctgtgtgggcccagtgcgcctcccgcatagacctcacgcccttcctggtggactgtgcaaacaccctctgtgagttcggaggtctctaccaggccctctgccaggctctgcaagccttcggggccacctgccagagccaggggctcaagcccccactctggagaaacagcagcttctgccctctggaatgccctgcctacagcagctacaccaactgccttccctcctgctcaccctcctgctgggacctggatggccggtgtgagggcgccaaagtcccctctgcctgcgctgagggctgcatttgtcagcccggctatgtgctgagtgaagacaagtgtgtccccagaagtcagtgtggctgcaaggatgcccatggtggctccatccctctgggcaagagctgggtctccagcggttgcacggagaagtgtgtctgcacgggaggagccattcagtgcggggacttccgatgcccctctgggtcccactgccagctcacttccgacaacagcaacagcaattgtgtctcagacaagtctgaacaatgctcagtctatggcgacccccgttacctcacatttgacggcttcagctaccgcttgcaaggccgcatgacctatgttctgatcaagactgtggacgtactgcctgagggggtggagcccctcctcgtggaaggacgcaacaagatggatccgcccaggagctccatcttcttgcaggaagtgattaccaccgtctacggctataaagtgcagctccaagctggtctggagcttgtggtcaacaaccagaagatggccgtcccctacaggccaaatgaacacctgcgggtcaccctgtggggccaacggctctacctggtcaccgactttgagctggtcgtcagctttggtggaaggaaaaatgcagtgatctccctacccagcatgtacgaggggcttgtgagtggcctgtgcggaaactacgacaagaaccgcaagaatgacatgatgctgcccagtggcgccctgacccagaacctcaacacctttggcaacagctgggaggtgaagaccgaggacgcactcctgcgcttccccagggctataccagcggaggaggagggacaaggggcggagctgggcctccgcacgggcctccaagtgtccgaatgtagcccggagcagctggcgagcaacagcacccaggcctgtagggtgctggcagacccccagggcccctttgctgcctgtcaccagacggtggccccagagcccttccaagagcactgcgtgctggatctgtgctctgctcaggacccaagagagcaagaggagctgcgttgccaggtcctcagtggctgggcagcagctttctgactgaggactgctctcagcggtgcacctgtgccagctcacggatcctgctgtgtgagcccttcagctgcagagcgggggaggtctgcaccctggggaaccacacccaaggctgctttccagaaagcccgtgtctgcagaacccctgtcagaatgacgggcagtgtcgggagcagggagccaccttcacctgcgagtgtgaagttggttacgggggaggcctgtgtatggagcctcgagatgcgccacctcccagaaagccagcatctaacctggtgggcgtcctactgggactgctggtgcctgtggtggtcgtactactggccgtgaccagagagtgcatttacagaacgaggaggaagagagagaaaacgcaggagggagacagactggccaggctggtggacacagatactgttctggactgtgcctgttaagttgctcagttttgagctgtcttcagacaagaagattaaataaatttatatatttatttatttga

SEQ ID NO: 204843 - DNA, 8734 bp, Homo sapiens
  Payload ID: 20406
  Gene Name: zonadhesin (gene/pseudogene)
  ENST ID: ENST00000542585
  CDS Start-End: 166-8235
gccatgttgatttctgatccttgagcttttctgtgtttctctgttcattcttcatggcatccttggaaggatgccaagctaaggaggccaggggggaataaaaggagtccaggctcccaactgtgcccttcccctctcccctgggagcaaccacttagggtcctcatggttcctccagtctggactctgctgcttctggtgggggctgcccttttcaggaaagagaagcctccggaccagaagctggttgttcgcagctctagggacaactatgtcctcacccagtgtgattttgaggatgacgccaaacccctctgtgactggtcccaagtgtccgcagacgatgaagactgggttcgagccagtgggccctctcccaccggctccaccggggcccccggggggtaccctaacggagagggcagctatctgcatatggaatcgaacagcttccaccgtgggggagtggcccgcctgctcagccccgacctatgggagcaaggccccctctgtgtgcactttgcccaccacatgttcgggctgtcttggggcgcccagctcaggctgctgctgctctcgggtgaagagggccgccgccccgatgtgctctggaaacactggaacacccagagaccctcctggatgctcaccaccgtcactgtgcccgcagggttcaccctgcccacccggctgatgtttgagggaacacggggtagcactgcctacctggacatcgccctggatgccctctctatccgccggggctcctgtaatcgcgtctgtatgatgcaaacatgcagctttgacattccaaatgacctctgtgactggacctggatcccaactgcctccggggccaagtggactcagaagaaagggtcatcaggaaagccaggcgtggggcctgatggcgacttctctagccctggtagtggctgctacatgctcctggaccccaagaatgcaagacctgggcagaaagctgtcctcctgagccccgtgagcctgtcctctggctgtctgagcttttccttccactacatcctccggggccagtctcctggtgcagccctccacatttatgcttcagtcttggggagtatccggaaacacactctcttctcaggacaacctgggcccaactggcaggctgtttctgtcaattacacagccgtgggacggatacagtttgccgtggtaggcgtttttggaaagaccccagagccagctgtggcagttgatgcaaccagcattgctccttgtggggagggttttcctcagtgtgactttgaagacaacgcccatcccttctgtgactgggtccagacttccggggatggtggacactgggccctcggacataaaaatggacccgtccatggcatgggccctgcgggaggtttccctaatgcagggggtcactatatctaccttgaggctgacgagttctcccaggcaggccagtcagtcagactggtgagccggcccttctgcgccccaggtgacatctgcgtggagttcgcataccacatgtatggccttggggagggtactatgctcgaactcctcctgggaagtcctgcggggagtcccccgattcctctctggaaacgcgtggggtctcagcgcccttactggcagaacacctccgtcaccgtcccctcaggacaccaacagcccatgcagcttattttcaagggcatccagggaagcaacacggcctctgtggttgctatgggtttcatcttgatcaatcctgggacttgtccagtaaaagtgctaccagagcttcctcccgtatctccagtttcttccactggcccttctgaaaccactggcctcacagaaaaccctacaatctccaccaagaaacctacagtttccatagaaaaacccagtgtcaccacagaaaagcccacagtccccaaagaaaagcccaccattcccacagaaaaacccaccatctccacagaaaaacccaccattccttcagaaaaacccaacatgccctcagaaaaacccaccattccctcagaaaaacccaccatcctcacagaaaaacccaccattccctcagaaaaacccaccattccctcagaaaaacccaccatttccacagaaaaacccaccgtccccacagaagagcccaccacccccactgaggagaccaccacctccatggaagagcctgtcatccctacagaaaaacccagcatccctacagaaaaacccagcatccccacggaaaaacccaccatctccatggaagagactatcatctccacagaaaaacccaccatctccccagaaaaacccaccatccccacagaaaaacccaccatccccacagaaaaatccaccatctccccagaaaaacccaccacccccacagaaaaacccaccatccccacagaaaaacccaccatctccccagaaaaacccaccacccccacagaaaaacccaccatctccccagaaaaactcaccatccccacagaaaaacccaccatccccacagaaaaacccaccattcccacagaaaaacccaccatctccacagaagagcccaccacccccactgaggagaccaccatctccacagaaaaacccagcatccccatggaaaaacccactctccccactgaagaaaccaccacctctgttgaagagactaccatctctacagaaaaactcaccatccccatggaaaaacccaccatctccacagaaaaacccaccatccccacagaaaaacccaccatctccccagaaaaactcaccatccccacggaaaaactcaccatccccacggaaaaacccaccatccccattgaagagactaccatctccacagaaaaactcaccatccccacagaaaaacccaccatctccccagaaaaacccaccatctccacggaaaaacccaccatccccacggaaaaacccaccatccccactgaagagactaccatctccacagaaaaactcaccatccccacagaaaaacccaccatctccccagaaaaactcaccatccccacagaaaaacccaccatctccacggaaaaacccaccatccccacggaaaaacttaccatccccacggaaaaacccaccatccccacagaaaaacccaccattcccacagagaagctcacagccctgaggccaccccatcccagccccacagccactgggctggcagccttggtgatgtctccacatgctccaagtacccctatgaccagtgtgattctgggcactaccacaacctccagatccagtacagagcgctgccctccaaatgcccgctacgaatcctgtgcttgtcctgcttcgtgcaagagccccaggcctagctgtgggcccctctgtcgggagggctgtgtctgcaaccctggctttttgtttagtgacaaccactgcatccaggcctcttcctgcaattgcttctacaacaacgactactatgagcctggggcagagtggttcagccccaactgcacagaacattgccgctgctggcccggcagtcgggtcgagtgccagatctctcagtgtgggacacacaccgtgtgccagcttaagaatggccagtatggatgccacccctacgcaggcactgccacctgcttggtctacggagaccctcattatgtcacctttgacgggaggcactttggcttcatgggcaagtgcacttacatcttggcccagccctgtggcaactcaacagacccattcttcagggtgacagccaagaatgaggagcagggacaggaaggcgtgtcctgcctgagcaaagtctacgtgaccctgcccgagagcaccgtcaccctgcttaagggcagacgcactctggttgggggtcagcaagttactctcccagccataccctctaaaggcgtcttcctgggtgcaagcgggcggtttgtggagctgcagacggagttcggtttgcgggtgagatgggatggtgaccagcagctgtatgttactgtgtccagcacatactctggcaaactctgtggtttgtgtgggaactatgacggcaacagtgacaatgaccacctgaagttggacggcagcccagcaggagacaaggaggagctggggaacagctggcagacggaccaggacgaggaccaggagtgtcagaagtaccaggtggtgaattccccgtcttgtgattcatctctgcagagcagcatgtcggggccagggttctgtggacggctggtcgacactcatggcccatttgagacatgcctgctgcacgtgaaggccgcttccttcttcgacagctgcatgcttgatatgtgcggattccaggggctgcagcacctgctgtgcacacacatgtccaccatgaccaccacctgccaggacgcaggccacgctgtgaagccctggagggaaccccacttctgcccaatggcctgcccgcccaacagcaagtactccctgtgtgcgaagccatgccctgacacctgccattcaggattctccggcatgttctgctcagaccggtgcgtggaggcctgtgaatgcaatccgggcttcgtcctcagtggcctcgagtgcatacctcgctcccagtgtgggtgcctccaccctgcaggcagctacttcaaggtaggggagcggtggtacaagccaggctgcaaagagttgtgcgtctgtgaaagcaacaacagaattcgctgccagccctggaggtgtagggcccaggagttctgtggccaacaggatggtatctatggctgccatgcccaaggtgccgccacctgcacagcctcgggtgacccccactacctgaccttcgatggcgccttgcaccacttcatgggcacctgcacctatgtcctgacccggccttgctggtccaggtcccaagacagctattttgttgtgagcgccaccaacgagaaccgcggggggatcctggaggtctcctacatcaaagccgtccacgtgacagtctttgacctcagcatctcactgctcagaggctgtaaggtcatgctgaatggccatcgggtggccctacctgtgtggcttgcacaaggccgggtgaccataaggctcagcagcaacctcgtcctcctctacacgaactttgggctccaagttcgctacgacgggagccacttggtggaagtgacagtcccctcctcctatggcggccagctctgtgggctgtgtgggaactacaacaacaacagcttggatgacaacctgcgccccgacagaaagcttgcaggcgattccatgcagctgggggccgcctggaagttacctgaatcctctgaacctggctgtttccttgtgggtggcaagccctccagctgccaggagaacagcatggcagacgcctggaacaagaactgtgcgatcttaataaaccctcagggacccttctctcaatgtcaccaggtggtgcctccccagtccagctttgccagttgcgtgcatggtcagtgtgggaccaagggcgacaccacagccctgtgccgctccctgcaggcctacgcgtccctgtgtgcccaggctggccaggcccctgcctggcggaacagaaccttctgccctatgaggtgcccacctggcagcagctacagcccctgcagcagcccctgcccagacacctgcagcagcataaacaacccgagggactgccccaaagcactgccctgtgctgagagctgtgaatgtcagaaaggccacatcttgagtggaacctcctgcgtgccccttggccagtgtggctgcactgacccagcgggctcctaccacccggtcggggagcgctggtacacagagaacacctgcaccaggctctgcacctgctccgtccacaacaacatcacctgcttccagagcacctgcaaacccaaccagatatgctgggccctggatgggctgctccattgtcgggcctcaggtgtgggagtgtgtcagctcccaggggagtcccactacgtgagctttgatggtagtaaccattctatcccggacgcctgcactcttgtcctggtgaaagtgtgccaccccgccatggccttgcccttcttcaagatcagtgccaagcatgagaaggaggaaggtggaactgaggctttccgccttcatgaggtctacattgacatctacgatgcccaggtcaccctgcagaagggccaccgtgtgctaatcaacagcaaacaggtcaccctccccgccatctcccagatccctggggtcagtgtcaagtccagcagcatctacagcattgttaacatcaagatcggggtgcaagtcaagtttgacgggaatcatctcttagagattgaaatccccacaacctactatggaaaggtctgcggcatgtgtgggaacttcaatgatgaggaagaggacgaactaatgatgcccagcgatgaagtagcaaatagtgacagtgaatttgtgaacagttggaaagataaggacattgacccaagttgtcagagtctcctggtagatgagcagcagattccagcggaacagcaggagaacccgagtggaaactgcagggcggccgacctccgcagggcgcgggaaaagtgcgaggcagcgctccgggctcctgtgtgggcccagtgcgcctcccgcatagacctcacgcccttcctggtggactgtgcaaacaccctctgtgagttcggaggtctctaccaggccctctgccaggctctgcaagccttcggggccacctgccagagccaggggctcaagcccccactctggagaaacagcagcttctgccctctggaatgccctgcctacagcagctacaccaactgccttccctcctgctcaccctcctgctgggacctggatggccggtgtgagggcgccaaagtcccctctgcctgcgctgagggctgcatttgtcagcccggctatgtgctgagtgaagacaagtgtgtccccagaagtcagtgtggctgcaaggatgcccatggtggctccatccctctgggcaagagctgggtctccagcggttgcacggagaagtgtgtctgcacgggaggagccattcagtgcggggacttccgatgcccctctgggtcccactgccagctcacttccgacaacagcaacagcaattgtgtctcagacaagtctgaacaatgctcagtctatggcgacccccgttacctcacatttgacggcttcagctaccgcttgcaaggccgcatgacctatgttctgatcaagactgtggacgtactgcctgagggggtggagcccctcctcgtggaaggacgcaacaagatggatccgcccaggagctccatcttcttgcaggaagtgattaccaccgtctacggctataaagtgcagctccaagctggtctggagcttgtggtcaacaaccagaagatggccgtcccctacaggccaaatgaacacctgcgggtcaccctgtggggccaacggctctacctggtcaccgactttgagctggtcgtcagctttggtggaaggaaaaatgcagtgatctccctacccagcatgtacgaggggcttgtgagtggcctgtgcggaaactacgacaagaaccgcaagaatgacatgatgctgcccagtggcgccctgacccagaacctcaacacctttggcaacagctgggaggtgaagaccgaggacgcactcctgcgcttccccagggctataccagcggaggaggagggacaaggggcggagctgggcctccgcacgggcctccaagtgtccgaatgtagcccggagcagctggcgagcaacagcacccaggcctgtagggtgctggcagacccccagggcccctttgctgcctgtcaccagacggtggccccagagcccttccaagagcactgcgtgctggatctgtgctctgctcaggacccaagagagcaagaggagctgcgttgccaggtcctcagtgggtacgccatcctctgccaggaggcgggcgctgccctggctggctggcgggaccgcaccctctgcgccatggagtgtccagcaggtaccatatatcagagctgtatgacaccctgcccagcatcctgtgccaacctggcagaccccggggactgcgagggcccctgcgtggaaggctgcgccagcatcccaggctatgcctacagtggcacccagagcctcccctggctgactgtggctgcaccagcaatggcatctactaccagctgggcagcagctttctgactgaggactgctctcagcggtgcacctgtgccagctcacggatcctgctgtgtgagcccttcagctgcagagcgggggaggtctgcaccctggggaaccacacccaaggctgctttccagaaagcccgtgtctgcagaacccctgtcagaatgacgggcagtgtcgggagcagggagccaccttcacctgcgagtgtgaagttggttacgggggaggcctgtgtatggagcctcgagatgcgccacctcccagaaagccagcatctaacctggtgggcgtcctactgggactgctggtgcctgtggtggtcgtactactggccgtgaccagagagtgcatttacagaacgaggaggaagagagagaaaacgcaggagggagacagactggccaggctggtggacacagatactgttctggactgtgcctgttaagttgctcagttttgagctgtcttcagacaagaagattaaataaatttatatatttatttatttga

SEQ ID NO: 204844 - DNA, 8535 bp, Homo sapiens
  Payload ID: 20406
  Gene Name: zonadhesin (gene/pseudogene)
  ENST ID: ENST00000538115
  CDS Start-End: 166-8040
gccatgttgatttctgatccttgagcttttctgtgtttctctgttcattcttcatggcatccttggaaggatgccaagctaaggaggccaggggggaataaaaggagtccaggctcccaactgtgcccttcccctctcccctgggagcaaccacttagggtcctcatggttcctccagtctggactctgctgcttctggtgggggctgcccttttcaggaaagagaagcctccggaccagaagctggttgttcgcagctctagggacaactatgtcctcacccagtgtgattttgaggatgacgccaaacccctctgtgactggtcccaagtgtccgcagacgatgaagactgggttcgagccagtgggccctctcccaccggctccaccggggcccccggggggtaccctaacggagagggcagctatctgcatatggaatcgaacagcttccaccgtgggggagtggcccgcctgctcagccccgacctatgggagcaaggccccctctgtgtgcactttgcccaccacatgttcgggctgtcttggggcgcccagctcaggctgctgctgctctcgggtgaagagggccgccgccccgatgtgctctggaaacactggaacacccagagaccctcctggatgctcaccaccgtcactgtgcccgcagggttcaccctgcccacccggctgatgtttgagggaacacggggtagcactgcctacctggacatcgccctggatgccctctctatccgccggggctcctgtaatcgcgtctgtatgatgcaaacatgcagctttgacattccaaatgacctctgtgactggacctggatcccaactgcctccggggccaagtggactcagaagaaagggtcatcaggaaagccaggcgtggggcctgatggcgacttctctagccctggtagtggctgctacatgctcctggaccccaagaatgcaagacctgggcagaaagctgtcctcctgagccccgtgagcctgtcctctggctgtctgagcttttccttccactacatcctccggggccagtctcctggtgcagccctccacatttatgcttcagtcttggggagtatccggaaacacactctcttctcaggacaacctgggcccaactggcaggctgtttctgtcaattacacagccgtgggacggatacagtttgccgtggtaggcgtttttggaaagaccccagagccagctgtggcagttgatgcaaccagcattgctccttgtggggagggttttcctcagtgtgactttgaagacaacgcccatcccttctgtgactgggtccagacttccggggatggtggacactgggccctcggacataaaaatggacccgtccatggcatgggccctgcgggaggtttccctaatgcagggggtcactatatctaccttgaggctgacgagttctcccaggcaggccagtcagtcagactggtgagccggcccttctgcgccccaggtgacatctgcgtggagttcgcataccacatgtatggccttggggagggtactatgctcgaactcctcctgggaagtcctgcggggagtcccccgattcctctctggaaacgcgtggggtctcagcgcccttactggcagaacacctccgtcaccgtcccctcaggacaccaacagcccatgcagcttattttcaagggcatccagggaagcaacacggcctctgtggttgctatgggtttcatcttgatcaatcctgggacttgtccagtaaaagtgctaccagagcttcctcccgtatctccagtttcttccactggcccttctgaaaccactggcctcacagaaaaccctacaatctccaccaagaaacctacagtttccatagaaaaacccagtgtcaccacagaaaagcccacagtccccaaagaaaagcccaccattcccacagaaaaacccaccatctccacagaaaaacccaccattccttcagaaaaacccaacatgccctcagaaaaacccaccattccctcagaaaaacccaccatcctcacagaaaaacccaccattccctcagaaaaacccaccattccctcagaaaaacccaccatttccacagaaaaacccaccgtccccacagaagagcccaccacccccactgaggagaccaccacctccatggaagagcctgtcatccctacagaaaaacccagcatccctacagaaaaacccagcatccccacggaaaaacccaccatctccatggaagagactatcatctccacagaaaaacccaccatctccccagaaaaacccaccatccccacagaaaaacccaccatccccacagaaaaatccaccatctccccagaaaaacccaccacccccacagaaaaacccaccatccccacagaaaaacccaccatctccccagaaaaacccaccacccccacagaaaaacccaccatctccccagaaaaactcaccatccccacagaaaaacccaccatccccacagaaaaacccaccattcccacagaaaaacccaccatctccacagaagagcccaccacccccactgaggagaccaccatctccacagaaaaacccagcatccccatggaaaaacccactctccccactgaagaaaccaccacctctgttgaagagactaccatctctacagaaaaactcaccatccccatggaaaaacccaccatctccacagaaaaacccaccatccccacagaaaaacccaccatctccccagaaaaactcaccatccccacggaaaaactcaccatccccacggaaaaacccaccatccccattgaagagactaccatctccacagaaaaactcaccatccccacagaaaaacccaccatctccccagaaaaacccaccatctccacggaaaaacccaccatccccacggaaaaacccaccatccccactgaagagactaccatctccacagaaaaactcaccatccccacagaaaaacccaccatctccccagaaaaactcaccatccccacagaaaaacccaccatctccacggaaaaacccaccatccccacggaaaaacttaccatccccacggaaaaacccaccatccccacagaaaaacccaccattcccacagagaagctcacagccctgaggccaccccatcccagccccacagccactgggctggcagccttggtgatgtctccacatgctccaagtacccctatgaccagtgtgattctgggcactaccacaacctccagatccagtacagagcgctgccctccaaatgcccgctacgaatcctgtgcttgtcctgcttcgtgcaagagccccaggcctagctgtgggcccctctgtcgggagggctgtgtctgcaaccctggctttttgtttagtgacaaccactgcatccaggcctcttcctgcaattgcttctacaacaacgactactatgagcctggggcagagtggttcagccccaactgcacagaacattgccgctgctggcccggcagtcgggtcgagtgccagatctctcagtgtgggacacacaccgtgtgccagcttaagaatggccagtatggatgccacccctacgcaggcactgccacctgcttggtctacggagaccctcattatgtcacctttgacgggaggcactttggcttcatgggcaagtgcacttacatcttggcccagccctgtggcaactcaacagacccattcttcagggtgacagccaagaatgaggagcagggacaggaaggcgtgtcctgcctgagcaaagtctacgtgaccctgcccgagagcaccgtcaccctgcttaagggcagacgcactctggttgggggtcagcaagttactctcccagccataccctctaaaggcgtcttcctgggtgcaagcgggcggtttgtggagctgcagacggagttcggtttgcgggtgagatgggatggtgaccagcagctgtatgttactgtgtccagcacatactctggcaaactctgtggtttgtgtgggaactatgacggcaacagtgacaatgaccacctgaagttggacggcagcccagcaggagacaaggaggagctggggaacagctggcagacggaccaggacgaggaccaggagtgtcagaagtaccaggtggtgaattccccgtcttgtgattcatctctgcagagcagcatgtcggggccagggttctgtggacggctggtcgacactcatggcccatttgagacatgcctgctgcacgtgaaggccgcttccttcttcgacagctgcatgcttgatatgtgcggattccaggggctgcagcacctgctgtgcacacacatgtccaccatgaccaccacctgccaggacgcaggccacgctgtgaagccctggagggaaccccacttctgcccaatggcctgcccgcccaacagcaagtactccctgtgtgcgaagccatgccctgacacctgccattcaggattctccggcatgttctgctcagaccggtgcgtggaggcctgtgaatgcaatccgggcttcgtcctcagtggcctcgagtgcatacctcgctcccagtgtgggtgcctccaccctgcaggcagctacttcaaggtaggggagcggtggtacaagccaggctgcaaagagttgtgcgtctgtgaaagcaacaacagaattcgctgccagccctggaggtgtagggcccaggagttctgtggccaacaggatggtatctatggctgccatgcccaaggtgccgccacctgcacagcctcgggtgacccccactacctgaccttcgatggcgccttgcaccacttcatgggcacctgcacctatgtcctgacccggccttgctggtccaggtcccaagacagctattttgttgtgagcgccaccaacgagaaccgcggggggatcctggaggtctcctacatcaaagccgtccacgtgacagtctttgacctcagcatctcactgctcagaggctgtaaggtcatgctgaatggccatcgggtggccctacctgtgtggcttgcacaaggccgggtgaccataaggctcagcagcaacctcgtcctcctctacacgaactttgggctccaagttcgctacgacgggagccacttggtggaagtgacagtcccctcctcctatggcggccagctctgtgggctgtgtgggaactacaacaacaacagcttggatgacaacctgcgccccgacagaaagcttgcaggcgattccatgcagctgggggccgcctggaagttacctgaatcctctgaacctggctgtttccttgtgggtggcaagccctccagctgccaggagaacagcatggcagacgcctggaacaagaactgtgcgatcttaataaaccctcagggacccttctctcaatgtcaccaggtggtgcctccccagtccagctttgccagttgcgtgcatggtcagtgtgggaccaagggcgacaccacagccctgtgccgctccctgcaggcctacgcgtccctgtgtgcccaggctggccaggcccctgcctggcggaacagaaccttctgccctatgaggtgcccacctggcagcagctacagcccctgcagcagcccctgcccagacacctgcagcagcataaacaacccgagggactgccccaaagcactgccctgtgctgagagctgtgaatgtcagaaaggccacatcttgagtggaacctcctgcgtgccccttggccagtgtggctgcactgacccagcgggctcctaccacccggtcggggagcgctggtacacagagaacacctgcaccaggctctgcacctgctccgtccacaacaacatcacctgcttccagagcacctgcaaacccaaccagatatgctgggccctggatgggctgctccattgtcgggcctcaggtgtgggagtgtgtcagctcccaggggagtcccactacgtgagctttgatggtagtaaccattctatcccggacgcctgcactcttgtcctggtgaaagtgtgccaccccgccatggccttgcccttcttcaagatcagtgccaagcatgagaaggaggaaggtggaactgaggctttccgccttcatgaggtctacattgacatctacgatgcccaggtcaccctgcagaagggccaccgtgtgctaatcaacagcaaacaggtcaccctccccgccatctcccagatccctggggtcagtgtcaagtccagcagcatctacagcattgttaacatcaagatcggggtgcaagtcaagtttgacgggaatcatctcttagagattgaaatccccacaacctactatggaaaggtctgcggcatgtgtgggaacttcaatgatgaggaagaggacgaactaatgatgcccagcgatgaagtagcaaatagtgacagtgaatttgtgaacagttggaaagataaggacattgacccaagttgtcagagtctcctggtagatgagcagcagattccagcggaacagcaggagaacccgagtggaaactgcagggcggccgacctccgcagggcgcgggaaaagtgcgaggcagcgctccgggctcctgtgtgggcccagtgcgcctcccgcatagacctcacgcccttcctggtggactgtgcaaacaccctctgtgagttcggaggtctctaccaggccctctgccaggctctgcaagccttcggggccacctgccagagccaggggctcaagcccccactctggagaaacagcagcttctgccctctggaatgccctgcctacagcagctacaccaactgccttccctcctgctcaccctcctgctgggacctggatggccggtgtgagggcgccaaagtcccctctgcctgcgctgagggctgcatttgtcagcccggctatgtgctgagtgaagacaagtgtgtccccagaagtcagtgtggctgcaaggatgcccatggtggctccatccctctgggcaagagctgggtctccagcggttgcacggagaagtgtgtctgcacgggaggagccattcagtgcggggacttccgatgcccctctgggtcccactgccagctcacttccgacaacagcaacagcaattgtgtctcagacaagtctgaacaatgctcagtctatggcgacccccgttacctcacatttgacggcttcagctaccgcttgcaaggccgcatgacctatgttctgatcaagactgtggacgtactgcctgagggggtggagcccctcctcgtggaaggacgcaacaagatggatccgcccaggagctccatcttcttgcaggaagtgattaccaccgtctacggctataaagtgcagctccaagctggtctggagcttgtggtcaacaaccagaagatggccgtcccctacaggccaaatgaacacctgcgggtcaccctgtggggccaacggctctacctggtcaccgactttgagctggtcgtcagctttggtggaaggaaaaatgcagtgatctccctacccagcatgtacgaggggcttgtgagtggcctgtgcggaaactacgacaagaaccgcaagaatgacatgatgctgcccagtggcgccctgacccagaacctcaacacctttggcaacagctgggaggtgaagaccgaggacgcactcctgcgcttccccagggctataccagcggaggaggagggacaaggggcggagctgggcctccgcacgggcctccaagtgtccgaatgtagcccggagcagctggcgagcaacagcacccaggcctgtagggtgctggcagacccccagggcccctttgctgcctgtcaccagacggtggccccagagcccttccaagagcactgcgtgctggatctgtgctctgctcaggacccaagagagcaagaggagctgcgttgccaggtcctcagtgggtacgccatcctctgccaggaggcgggcgctgccctggctggctggcgggaccgcaccctctgcgctgggcagcagctttctgactgaggactgctctcagcggtgcacctgtgccagctcacggatcctgctgtgtgagcccttcagctgcagagcgggggaggtctgcaccctggggaaccacacccaaggctgctttccagaaagcccgtgtctgcagaacccctgtcagaatgacgggcagtgtcgggagcagggagccaccttcacctgcgagtgtgaagttggttacgggggaggcctgtgtatggagcctcgagatgcgccacctcccagaaagccagcatctaacctggtgggcgtcctactgggactgctggtgcctgtggtggtcgtactactggccgtgaccagagagtgcatttacagaacgaggaggaagagagagaaaacgcaggagggagacagactggccaggctggtggacacagatactgttctggactgtgcctgttaagttgctcagttttgagctgtcttcagacaagaagattaaataaatttatatatttatttatttga

SEQ ID NO: 204845 - DNA, 8378 bp, Homo sapiens
  Payload ID: 20406
  Gene Name: zonadhesin (gene/pseudogene)
  ENST ID: ENST00000546292
  CDS Start-End: 149-8314
tcccagagcttttctgtgtttctctgttcattcttcatggcatccttggaaggatgccaagctaaggaggccaggggggaataaaaggagtccaggctcccaactgtgcccttcccctctcccctgggagcaaccacttagggtcctcatggttcctccagtctggactctgctgcttctggtgggggctgcccttttcaggaaagagaagcctccggaccagaagctggttgttcgcagctctagggacaactatgtcctcacccagtgtgattttgaggatgacgccaaacccctctgtgactggtcccaagtgtccgcagacgatgaagactgggttcgagccagtgggccctctcccaccggctccaccggggcccccggggggtaccctaacggagagggcagctatctgcatatggaatcgaacagcttccaccgtgggggagtggcccgcctgctcagccccgacctatgggagcaaggccccctctgtgtgcactttgcccaccacatgttcgggctgtcttggggcgcccagctcaggctgctgctgctctcgggtgaagagggccgccgccccgatgtgctctggaaacactggaacacccagagaccctcctggatgctcaccaccgtcactgtgcccgcagggttcaccctgcccacccggctgatgtttgagggaacacggggtagcactgcctacctggacatcgccctggatgccctctctatccgccggggctcctgtaatcgcgtctgtatgatgcaaacatgcagctttgacattccaaatgacctctgtgactggacctggatcccaactgcctccggggccaagtggactcagaagaaagggtcatcaggaaagccaggcgtggggcctgatggcgacttctctagccctggtagtggctgctacatgctcctggaccccaagaatgcaagacctgggcagaaagctgtcctcctgagccccgtgagcctgtcctctggctgtctgagcttttccttccactacatcctccggggccagtctcctggtgcagccctccacatttatgcttcagtcttggggagtatccggaaacacactctcttctcaggacaacctgggcccaactggcaggctgtttctgtcaattacacagccgtgggacggatacagtttgccgtggtaggcgtttttggaaagaccccagagccagctgtggcagttgatgcaaccagcattgctccttgtggggagggttttcctcagtgtgactttgaagacaacgcccatcccttctgtgactgggtccagacttccggggatggtggacactgggccctcggacataaaaatggacccgtccatggcatgggccctgcgggaggtttccctaatgcagggggtcactatatctaccttgaggctgacgagttctcccaggcaggccagtcagtcagactggtgagccggcccttctgcgccccaggtgacatctgcgtggagttcgcataccacatgtatggccttggggagggtactatgctcgaactcctcctgggaagtcctgcggggagtcccccgattcctctctggaaacgcgtggggtctcagcgcccttactggcagaacacctccgtcaccgtcccctcaggacaccaacagcccatgcagcttattttcaagggcatccagggaagcaacacggcctctgtggttgctatgggtttcatcttgatcaatcctgggacttgtccagtaaaagtgctaccagagcttcctcccgtatctccagtttcttccactggcccttctgaaaccactggcctcacagaaaaccctacaatctccaccaagaaacctacagtttccatagaaaaacccagtgtcaccacagaaaagcccacagtccccaaagaaaagcccaccattcccacagaaaaacccaccatctccacagaaaaacccaccattccttcagaaaaacccaacatgccctcagaaaaacccaccattccctcagaaaaacccaccatcctcacagaaaaacccaccattccctcagaaaaacccaccattccctcagaaaaacccaccatttccacagaaaaacccaccgtccccacagaagagcccaccacccccactgaggagaccaccacctccatggaagagcctgtcatccctacagaaaaacccagcatccctacagaaaaacccagcatccccacggaaaaacccaccatctccatggaagagactatcatctccacagaaaaacccaccatctccccagaaaaacccaccatccccacagaaaaacccaccatccccacagaaaaatccaccatctccccagaaaaacccaccacccccacagaaaaacccaccatccccacagaaaaacccaccatctccccagaaaaacccaccacccccacagaaaaacccaccatctccccagaaaaactcaccatccccacagaaaaacccaccatccccacagaaaaacccaccattcccacagaaaaacccaccatctccacagaagagcccaccacccccactgaggagaccaccatctccacagaaaaacccagcatccccatggaaaaacccactctccccactgaagaaaccaccacctctgttgaagagactaccatctctacagaaaaactcaccatccccatggaaaaacccaccatctccacagaaaaacccaccatccccacagaaaaacccaccatctccccagaaaaactcaccatccccacggaaaaactcaccatccccacggaaaaacccaccatccccattgaagagactaccatctccacagaaaaactcaccatccccacagaaaaacccaccatctccccagaaaaacccaccatctccacggaaaaacccaccatccccacggaaaaacccaccatccccactgaagagactaccatctccacagaaaaactcaccatccccacagaaaaacccaccatctccccagaaaaactcaccatccccacagaaaaacccaccatctccacggaaaaacccaccatccccacggaaaaacttaccatccccacggaaaaacccaccatccccacagaaaaacccaccattcccacagagaagctcacagccctgaggccaccccatcccagccccacagccactgggctggcagccttggtgatgtctccacatgctccaagtacccctatgaccagtgtgattctgggcactaccacaacctccagatccagtacagagcgctgccctccaaatgcccgctacgaatcctgtgcttgtcctgcttcgtgcaagagccccaggcctagctgtgggcccctctgtcgggagggctgtgtctgcaaccctggctttttgtttagtgacaaccactgcatccaggcctcttcctgcaattgcttctacaacaacgactactatgagcctggggcagagtggttcagccccaactgcacagaacattgccgctgctggcccggcagtcgggtcgagtgccagatctctcagtgtgggacacacaccgtgtgccagcttaagaatggccagtatggatgccacccctacgcaggcactgccacctgcttggtctacggagaccctcattatgtcacctttgacgggaggcactttggcttcatgggcaagtgcacttacatcttggcccagccctgtggcaactcaacagacccattcttcagggtgacagccaagaatgaggagcagggacaggaaggcgtgtcctgcctgagcaaagtctacgtgaccctgcccgagagcaccgtcaccctgcttaagggcagacgcactctggttgggggtcagcaagttactctcccagccataccctctaaaggcgtcttcctgggtgcaagcgggcggtttgtggagctgcagacggagttcggtttgcgggtgagatgggatggtgaccagcagctgtatgttactgtgtccagcacatactctggcaaactctgtggtttgtgtgggaactatgacggcaacagtgacaatgaccacctgaagttggacggcagcccagcaggagacaaggaggagctggggaacagctggcagacggaccaggacgaggaccaggagtgtcagaagtaccaggtggtgaattccccgtcttgtgattcatctctgcagagcagcatgtcggggccagggttctgtggacggctggtcgacactcatggcccatttgagacatgcctgctgcacgtgaaggccgcttccttcttcgacagctgcatgcttgatatgtgcggattccaggggctgcagcacctgctgtgcacacacatgtccaccatgaccaccacctgccaggacgcaggccacgctgtgaagccctggagggaaccccacttctgcccaatggcctgcccgcccaacagcaagtactccctgtgtgcgaagccatgccctgacacctgccattcaggattctccggcatgttctgctcagaccggtgcgtggaggcctgtgaatgcaatccgggcttcgtcctcagtggcctcgagtgcatacctcgctcccagtgtgggtgcctccaccctgcaggcagctacttcaaggtaggggagcggtggtacaagccaggctgcaaagagttgtgcgtctgtgaaagcaacaacagaattcgctgccagccctggaggtgtagggcccaggagttctgtggccaacaggatggtatctatggctgccatgcccaaggtgccgccacctgcacagcctcgggtgacccccactacctgaccttcgatggcgccttgcaccacttcatgggcacctgcacctatgtcctgacccggccttgctggtccaggtcccaagacagctattttgttgtgagcgccaccaacgagaaccgcggggggatcctggaggtctcctacatcaaagccgtccacgtgacagtctttgacctcagcatctcactgctcagaggctgtaaggtcatgctgaatggccatcgggtggccctacctgtgtggcttgcacaaggccgggtgaccataaggctcagcagcaacctcgtcctcctctacacgaactttgggctccaagttcgctacgacgggagccacttggtggaagtgacagtcccctcctcctatggcggccagctctgtgggctgtgtgggaactacaacaacaacagcttggatgacaacctgcgccccgacagaaagcttgcaggcgattccatgcagctgggggccgcctggaagttacctgaatcctctgaacctggctgtttccttgtgggtggcaagccctccagctgccaggagaacagcatggcagacgcctggaacaagaactgtgcgatcttaataaaccctcagggacccttctctcaatgtcaccaggtggtgcctccccagtccagctttgccagttgcgtgcatggtcagtgtgggaccaagggcgacaccacagccctgtgccgctccctgcaggcctacgcgtccctgtgtgcccaggctggccaggcccctgcctggcggaacagaaccttctgccctatgaggtgcccacctggcagcagctacagcccctgcagcagcccctgcccagacacctgcagcagcataaacaacccgagggactgccccaaagcactgccctgtgctgagagctgtgaatgtcagaaaggccacatcttgagtggaacctcctgcgtgccccttggccagtgtggctgcactgacccagcgggctcctaccacccggtcggggagcgctggtacacagagaacacctgcaccaggctctgcacctgctccgtccacaacaacatcacctgcttccagagcacctgcaaacccaaccagatatgctgggccctggatgggctgctccattgtcgggcctcaggtgtgggagtgtgtcagctcccaggggagtcccactacgtgagctttgatggtagtaaccattctatcccggacgcctgcactcttgtcctggtgaaagtgtgccaccccgccatggccttgcccttcttcaagatcagtgccaagcatgagaaggaggaaggtggaactgaggctttccgccttcatgaggtctacattgacatctacgatgcccaggtcaccctgcagaagggccaccgtgtgctaatcaacagcaaacaggtcaccctccccgccatctcccagatccctggggtcagtgtcaagtccagcagcatctacagcattgttaacatcaagatcggggtgcaagtcaagtttgacgggaatcatctcttagagattgaaatccccacaacctactatggaaaggtctgcggcatgtgtgggaacttcaatgatgaggaagaggacgaactaatgatgcccagcgatgaagtagcaaatagtgacagtgaatttgtgaacagttggaaagataaggacattgacccaagttgtcagagtctcctggtagatgagcagcagattccagcggaacagcaggagaacccgagtggaaactgcagggcggccgacctccgcagggcgcgggaaaagtgcgaggcagcgctccgggctcctgtgtgggcccagtgcgcctcccgcatagacctcacgcccttcctggtggactgtgcaaacaccctctgtgagttcggaggtctctaccaggccctctgccaggctctgcaagccttcggggccacctgccagagccaggggctcaagcccccactctggagaaacagcagcttctgccctctggaatgccctgcctacagcagctacaccaactgccttccctcctgctcaccctcctgctgggacctggatggccggtgtgagggcgccaaagtcccctctgcctgcgctgagggctgcatttgtcagcccggctatgtgctgagtgaagacaagtgtgtccccagaagtcagtgtggctgcaaggatgcccatggtggctccatccctctgggcaagagctgggtctccagcggttgcacggagaagtgtgtctgcacgggaggagccattcagtgcggggacttccgatgcccctctgggtcccactgccagctcacttccgacaacagcaacagcaattgtgtctcagacaagtctgaacaatgctcagtctatggcgacccccgttacctcacatttgacggcttcagctaccgcttgcaaggccgcatgacctatgttctgatcaagactgtggacgtactgcctgagggggtggagcccctcctcgtggaaggacgcaacaagatggatccgcccaggagctccatcttcttgcaggaagtgattaccaccgtctacggctataaagtgcagctccaagctggtctggagcttgtggtcaacaaccagaagatggccgtcccctacaggccaaatgaacacctgcgggtcaccctgtggggccaacggctctacctggtcaccgactttgagctggtcgtcagctttggtggaaggaaaaatgcagtgatctccctacccagcatgtacgaggggcttgtgagtggcctgtgcggaaactacgacaagaaccgcaagaatgacatgatgctgcccagtggcgccctgacccagaacctcaacacctttggcaacagctgggaggtgaagaccgaggacgcactcctgcgcttccccagggctataccagcggaggaggagggacaaggggcggagctgggcctccgcacgggcctccaagtgtccgaatgtagcccggagcagctggcgagcaacagcacccaggcctgtagggtgctggcagacccccagggcccctttgctgcctgtcaccagacggtggccccagagcccttccaagagcactgcgtgctggatctgtgctctgctcaggacccaagagagcaagaggagctgcgttgccaggtcctcagtgggtacgccatcctctgccaggaggcgggcgctgccctggctggctggcgggaccgcaccctctgcgaaagcccgtgtctgcagaacccctgtcagaatgacgggcagtgtcgggagcagggagccaccttcacctgcgagtgtgaagttggttacgggggaggcctgtgtatggagcctcgagatgcgccacctcccagaaagccagcatctaacctggtgggcgtcctactgggactgctggtgcctgtggtggtcgtactactggccgtgaccagagagtgcatttacagaacgaggaggaagagagagaaaacgcaggagggagacagactggccaggctggtggacacagatactgttctggactgtgcctgttaagttgctcagttttgagctgtcttcagacaagaagattaaataaatttatatatttatttatttg

SEQ ID NO: 204846 - DNA, 8651 bp, Homo sapiens
  Payload ID: 20406
  Gene Name: zonadhesin (gene/pseudogene)
  ENST ID: ENST00000618565
  CDS Start-End: 149-8587
tcccagagcttttctgtgtttctctgttcattcttcatggcatccttggaaggatgccaagctaaggaggccaggggggaataaaaggagtccaggctcccaactgtgcccttcccctctcccctgggagcaaccacttagggtcctcatggttcctccagtctggactctgctgcttctggtgggggctgcccttttcaggaaagagaagcctccggaccagaagctggttgttcgcagctctagggacaactatgtcctcacccagtgtgattttgaggatgacgccaaacccctctgtgactggtcccaagtgtccgcagacgatgaagactgggttcgagccagtgggccctctcccaccggctccaccggggcccccggggggtaccctaacggagagggcagctatctgcatatggaatcgaacagcttccaccgtgggggagtggcccgcctgctcagccccgacctatgggagcaaggccccctctgtgtgcactttgcccaccacatgttcgggctgtcttggggcgcccagctcaggctgctgctgctctcgggtgaagagggccgccgccccgatgtgctctggaaacactggaacacccagagaccctcctggatgctcaccaccgtcactgtgcccgcagggttcaccctgcccacccggctgatgtttgagggaacacggggtagcactgcctacctggacatcgccctggatgccctctctatccgccggggctcctgtaatcgcgtctgtatgatgcaaacatgcagctttgacattccaaatgacctctgtgactggacctggatcccaactgcctccggggccaagtggactcagaagaaagggtcatcaggaaagccaggcgtggggcctgatggcgacttctctagccctggtagtggctgctacatgctcctggaccccaagaatgcaagacctgggcagaaagctgtcctcctgagccccgtgagcctgtcctctggctgtctgagcttttccttccactacatcctccggggccagtctcctggtgcagccctccacatttatgcttcagtcttggggagtatccggaaacacactctcttctcaggacaacctgggcccaactggcaggctgtttctgtcaattacacagccgtgggacggatacagtttgccgtggtaggcgtttttggaaagaccccagagccagctgtggcagttgatgcaaccagcattgctccttgtggggagggttttcctcagtgtgactttgaagacaacgcccatcccttctgtgactgggtccagacttccggggatggtggacactgggccctcggacataaaaatggacccgtccatggcatgggccctgcgggaggtttccctaatgcagggggtcactatatctaccttgaggctgacgagttctcccaggcaggccagtcagtcagactggtgagccggcccttctgcgccccaggtgacatctgcgtggagttcgcataccacatgtatggccttggggagggtactatgctcgaactcctcctgggaagtcctgcggggagtcccccgattcctctctggaaacgcgtggggtctcagcgcccttactggcagaacacctccgtcaccgtcccctcaggacaccaacagcccatgcagcttattttcaagggcatccagggaagcaacacggcctctgtggttgctatgggtttcatcttgatcaatcctgggacttgtccagtaaaagtgctaccagagcttcctcccgtatctccagtttcttccactggcccttctgaaaccactggcctcacagaaaaccctacaatctccaccaagaaacctacagtttccatagaaaaacccagtgtcaccacagaaaagcccacagtccccaaagaaaagcccaccattcccacagaaaaacccaccatctccacagaaaaacccaccattccttcagaaaaacccaacatgccctcagaaaaacccaccattccctcagaaaaacccaccatcctcacagaaaaacccaccattccctcagaaaaacccaccattccctcagaaaaacccaccatttccacagaaaaacccaccgtccccacagaagagcccaccacccccactgaggagaccaccacctccatggaagagcctgtcatccctacagaaaaacccagcatccctacagaaaaacccagcatccccacggaaaaacccaccatctccatggaagagactatcatctccacagaaaaacccaccatctccccagaaaaacccaccatccccacagaaaaacccaccatccccacagaaaaatccaccatctccccagaaaaacccaccacccccacagaaaaacccaccatccccacagaaaaacccaccatctccccagaaaaacccaccacccccacagaaaaacccaccatctccccagaaaaactcaccatccccacagaaaaacccaccatccccacagaaaaacccaccattcccacagaaaaacccaccatctccacagaagagcccaccacccccactgaggagaccaccatctccacagaaaaacccagcatccccatggaaaaacccactctccccactgaagaaaccaccacctctgttgaagagactaccatctctacagaaaaactcaccatccccatggaaaaacccaccatctccacagaaaaacccaccatccccacagaaaaacccaccatctccccagaaaaactcaccatccccacggaaaaactcaccatccccacggaaaaacccaccatccccattgaagagactaccatctccacagaaaaactcaccatccccacagaaaaacccaccatctccccagaaaaacccaccatctccacggaaaaacccaccatccccacggaaaaacccaccatccccactgaagagactaccatctccacagaaaaactcaccatccccacagaaaaacccaccatctccccagaaaaactcaccatccccacagaaaaacccaccatctccacggaaaaacccaccatccccacggaaaaacttaccatccccacggaaaaacccaccatccccacagaaaaacccaccattcccacagagaagctcacagccctgaggccaccccatcccagccccacagccactgggctggcagccttggtgatgtctccacatgctccaagtacccctatgaccagtgtgattctgggcactaccacaacctccagatccagtacagagcgctgccctccaaatgcccgctacgaatcctgtgcttgtcctgcttcgtgcaagagccccaggcctagctgtgggcccctctgtcgggagggctgtgtctgcaaccctggctttttgtttagtgacaaccactgcatccaggcctcttcctgcaattgcttctacaacaacgactactatgagcctggggcagagtggttcagccccaactgcacagaacattgccgctgctggcccggcagtcgggtcgagtgccagatctctcagtgtgggacacacaccgtgtgccagcttaagaatggccagtatggatgccacccctacgcaggcactgccacctgcttggtctacggagaccctcattatgtcacctttgacgggaggcactttggcttcatgggcaagtgcacttacatcttggcccagccctgtggcaactcaacagacccattcttcagggtgacagccaagaatgaggagcagggacaggaaggcgtgtcctgcctgagcaaagtctacgtgaccctgcccgagagcaccgtcaccctgcttaagggcagacgcactctggttgggggtcagcaagttactctcccagccataccctctaaaggcgtcttcctgggtgcaagcgggcggtttgtggagctgcagacggagttcggtttgcgggtgagatgggatggtgaccagcagctgtatgttactgtgtccagcacatactctggcaaactctgtggtttgtgtgggaactatgacggcaacagtgacaatgaccacctgaagttggacggcagcccagcaggagacaaggaggagctggggaacagctggcagacggaccaggacgaggaccaggagtgtcagaagtaccaggtggtgaattccccgtcttgtgattcatctctgcagagcagcatgtcggggccagggttctgtggacggctggtcgacactcatggcccatttgagacatgcctgctgcacgtgaaggccgcttccttcttcgacagctgcatgcttgatatgtgcggattccaggggctgcagcacctgctgtgcacacacatgtccaccatgaccaccacctgccaggacgcaggccacgctgtgaagccctggagggaaccccacttctgcccaatggcctgcccgcccaacagcaagtactccctgtgtgcgaagccatgccctgacacctgccattcaggattctccggcatgttctgctcagaccggtgcgtggaggcctgtgaatgcaatccgggcttcgtcctcagtggcctcgagtgcatacctcgctcccagtgtgggtgcctccaccctgcaggcagctacttcaaggtaggggagcggtggtacaagccaggctgcaaagagttgtgcgtctgtgaaagcaacaacagaattcgctgccagccctggaggtgtagggcccaggagttctgtggccaacaggatggtatctatggctgccatgcccaaggtgccgccacctgcacagcctcgggtgacccccactacctgaccttcgatggcgccttgcaccacttcatgggcacctgcacctatgtcctgacccggccttgctggtccaggtcccaagacagctattttgttgtgagcgccaccaacgagaaccgcggggggatcctggaggtctcctacatcaaagccgtccacgtgacagtctttgacctcagcatctcactgctcagaggctgtaaggtcatgctgaatggccatcgggtggccctacctgtgtggcttgcacaaggccgggtgaccataaggctcagcagcaacctcgtcctcctctacacgaactttgggctccaagttcgctacgacgggagccacttggtggaagtgacagtcccctcctcctatggcggccagctctgtgggctgtgtgggaactacaacaacaacagcttggatgacaacctgcgccccgacagaaagcttgcaggcgattccatgcagctgggggccgcctggaagttacctgaatcctctgaacctggctgtttccttgtgggtggcaagccctccagctgccaggagaacagcatggcagacgcctggaacaagaactgtgcgatcttaataaaccctcagggacccttctctcaatgtcaccaggtggtgcctccccagtccagctttgccagttgcgtgcatggtcagtgtgggaccaagggcgacaccacagccctgtgccgctccctgcaggcctacgcgtccctgtgtgcccaggctggccaggcccctgcctggcggaacagaaccttctgccctatgaggtgcccacctggcagcagctacagcccctgcagcagcccctgcccagacacctgcagcagcataaacaacccgagggactgccccaaagcactgccctgtgctgagagctgtgaatgtcagaaaggccacatcttgagtggaacctcctgcgtgccccttggccagtgtggctgcactgacccagcgggctcctaccacccggtcggggagcgctggtacacagagaacacctgcaccaggctctgcacctgctccgtccacaacaacatcacctgcttccagagcacctgcaaacccaaccagatatgctgggccctggatgggctgctccattgtcgggcctcaggtgtgggagtgtgtcagctcccaggggagtcccactacgtgagctttgatggtagtaaccattctatcccggacgcctgcactcttgtcctggtgaaagtgtgccaccccgccatggccttgcccttcttcaagatcagtgccaagcatgagaaggaggaaggtggaactgaggctttccgccttcatgaggtctacattgacatctacgatgcccaggtcaccctgcagaagggccaccgtgtgctaatcaacagcaaacaggtcaccctccccgccatctcccagatccctggggtcagtgtcaagtccagcagcatctacagcattgttaacatcaagatcggggtgcaagtcaagtttgacgggaatcatctcttagagattgaaatccccacaacctactatggaaaggtctgcggcatgtgtgggaacttcaatgatgaggaagaggacgaactaatgatgcccagcgatgaagtagcaaatagtgacagtgaatttgtgaacagttggaaagataaggacattgacccaagttgtcagagtctcctggtagatgagcagcagattccagcggaacagcaggagaacccgagtggaaactgcagggcggccgacctccgcagggcgcgggaaaagtgcgaggcagcgctccgggctcctgtgtgggcccagtgcgcctcccgcatagacctcacgcccttcctggtggactgtgcaaacaccctctgtgagttcggaggtctctaccaggccctctgccaggctctgcaagccttcggggccacctgccagagccaggggctcaagcccccactctggagaaacagcagcttctgccctctggaatgccctgcctacagcagctacaccaactgccttccctcctgctcaccctcctgctgggacctggatggccggtgtgagggcgccaaagtcccctctgcctgcgctgagggctgcatttgtcagcccggctatgtgctgagtgaagacaagtgtgtccccagaagtcagtgtggctgcaaggatgcccatggtggctccatccctctgggcaagagctgggtctccagcggttgcacggagaagtgtgtctgcacgggaggagccattcagtgcggggacttccgatgcccctctgggtcccactgccagctcacttccgacaacagcaacagcaattgtgtctcagacaagtctgaacaatgctcagtctatggcgacccccgttacctcacatttgacggcttcagctaccgcttgcaaggccgcatgacctatgttctgatcaagactgtggacgtactgcctgagggggtggagcccctcctcgtggaaggacgcaacaagatggatccgcccaggagctccatcttcttgcaggaagtgattaccaccgtctacggctataaagtgcagctccaagctggtctggagcttgtggtcaacaaccagaagatggccgtcccctacaggccaaatgaacacctgcgggtcaccctgtggggccaacggctctacctggtcaccgactttgagctggtcgtcagctttggtggaaggaaaaatgcagtgatctccctacccagcatgtacgaggggcttgtgagtggcctgtgcggaaactacgacaagaaccgcaagaatgacatgatgctgcccagtggcgccctgacccagaacctcaacacctttggcaacagctgggaggtgaagaccgaggacgcactcctgcgcttccccagggctataccagcggaggaggagggacaaggggcggagctgggcctccgcacgggcctccaagtgtccgaatgtagcccggagcagctggcgagcaacagcacccaggcctgtagggtgctggcagacccccagggcccctttgctgcctgtcaccagacggtggccccagagcccttccaagagcactgcgtgctggatctgtgctctgctcaggacccaagagagcaagaggagctgcgttgccaggtcctcagtggccatggagtgtccagcaggtaccatatatcagagctgtatgacaccctgcccagcatcctgtgccaacctggcagaccccggggactgcgagggcccctgcgtggaaggctgcgccagcatcccaggctatgcctacagtggcacccagagcctcccctggctgactgtggctgcaccagcaatggcatctactaccagctgggcagcagctttctgactgaggactgctctcagcggtgcacctgtgccagctcacggatcctgctgtgtgagcccttcagctgcagagcgggggaggtctgcaccctggggaaccacacccaaggctgctttccagaaagcccgtgtctgcagaacccctgtcagaatgacgggcagtgtcgggagcagggagccaccttcacctgcgagtgtgaagttggttacgggggaggcctgtgtatggagcctcgagatgcgccacctcccagaaagccagcatctaacctggtgggcgtcctactgggactgctggtgcctgtggtggtcgtactactggccgtgaccagagagtgcatttacagaacgaggaggaagagagagaaaacgcaggagggagacagactggccaggctggtggacacagatactgttctggactgtgcctgttaagttgctcagttttgagctgtcttcagacaagaagattaaataaatttatatatttatttatttg

SEQ ID NO: 204847 - DNA, 8669 bp, Homo sapiens
  Payload ID: 20406
  Gene Name: zonadhesin (gene/pseudogene)
  ENST ID: ENST00000613979
  CDS Start-End: 166-8604
gccatgttgatttctgatccttgagcttttctgtgtttctctgttcattcttcatggcatccttggaaggatgccaagctaaggaggccaggggggaataaaaggagtccaggctcccaactgtgcccttcccctctcccctgggagcaaccacttagggtcctcatggttcctccagtctggactctgctgcttctggtgggggctgcccttttcaggaaagagaagcctccggaccagaagctggttgttcgcagctctagggacaactatgtcctcacccagtgtgattttgaggatgacgccaaacccctctgtgactggtcccaagtgtccgcagacgatgaagactgggttcgagccagtgggccctctcccaccggctccaccggggcccccggggggtaccctaacggagagggcagctatctgcatatggaatcgaacagcttccaccgtgggggagtggcccgcctgctcagccccgacctatgggagcaaggccccctctgtgtgcactttgcccaccacatgttcgggctgtcttggggcgcccagctcaggctgctgctgctctcgggtgaagagggccgccgccccgatgtgctctggaaacactggaacacccagagaccctcctggatgctcaccaccgtcactgtgcccgcagggttcaccctgcccacccggctgatgtttgagggaacacggggtagcactgcctacctggacatcgccctggatgccctctctatccgccggggctcctgtaatcgcgtctgtatgatgcaaacatgcagctttgacattccaaatgacctctgtgactggacctggatcccaactgcctccggggccaagtggactcagaagaaagggtcatcaggaaagccaggcgtggggcctgatggcgacttctctagccctggtagtggctgctacatgctcctggaccccaagaatgcaagacctgggcagaaagctgtcctcctgagccccgtgagcctgtcctctggctgtctgagcttttccttccactacatcctccggggccagtctcctggtgcagccctccacatttatgcttcagtcttggggagtatccggaaacacactctcttctcaggacaacctgggcccaactggcaggctgtttctgtcaattacacagccgtgggacggatacagtttgccgtggtaggcgtttttggaaagaccccagagccagctgtggcagttgatgcaaccagcattgctccttgtggggagggttttcctcagtgtgactttgaagacaacgcccatcccttctgtgactgggtccagacttccggggatggtggacactgggccctcggacataaaaatggacccgtccatggcatgggccctgcgggaggtttccctaatgcagggggtcactatatctaccttgaggctgacgagttctcccaggcaggccagtcagtcagactggtgagccggcccttctgcgccccaggtgacatctgcgtggagttcgcataccacatgtatggccttggggagggtactatgctcgaactcctcctgggaagtcctgcggggagtcccccgattcctctctggaaacgcgtggggtctcagcgcccttactggcagaacacctccgtcaccgtcccctcaggacaccaacagcccatgcagcttattttcaagggcatccagggaagcaacacggcctctgtggttgctatgggtttcatcttgatcaatcctgggacttgtccagtaaaagtgctaccagagcttcctcccgtatctccagtttcttccactggcccttctgaaaccactggcctcacagaaaaccctacaatctccaccaagaaacctacagtttccatagaaaaacccagtgtcaccacagaaaagcccacagtccccaaagaaaagcccaccattcccacagaaaaacccaccatctccacagaaaaacccaccattccttcagaaaaacccaacatgccctcagaaaaacccaccattccctcagaaaaacccaccatcctcacagaaaaacccaccattccctcagaaaaacccaccattccctcagaaaaacccaccatttccacagaaaaacccaccgtccccacagaagagcccaccacccccactgaggagaccaccacctccatggaagagcctgtcatccctacagaaaaacccagcatccctacagaaaaacccagcatccccacggaaaaacccaccatctccatggaagagactatcatctccacagaaaaacccaccatctccccagaaaaacccaccatccccacagaaaaacccaccatccccacagaaaaatccaccatctccccagaaaaacccaccacccccacagaaaaacccaccatccccacagaaaaacccaccatctccccagaaaaacccaccacccccacagaaaaacccaccatctccccagaaaaactcaccatccccacagaaaaacccaccatccccacagaaaaacccaccattcccacagaaaaacccaccatctccacagaagagcccaccacccccactgaggagaccaccatctccacagaaaaacccagcatccccatggaaaaacccactctccccactgaagaaaccaccacctctgttgaagagactaccatctctacagaaaaactcaccatccccatggaaaaacccaccatctccacagaaaaacccaccatccccacagaaaaacccaccatctccccagaaaaactcaccatccccacggaaaaactcaccatccccacggaaaaacccaccatccccattgaagagactaccatctccacagaaaaactcaccatccccacagaaaaacccaccatctccccagaaaaacccaccatctccacggaaaaacccaccatccccacggaaaaacccaccatccccactgaagagactaccatctccacagaaaaactcaccatccccacagaaaaacccaccatctccccagaaaaactcaccatccccacagaaaaacccaccatctccacggaaaaacccaccatccccacggaaaaacttaccatccccacggaaaaacccaccatccccacagaaaaacccaccattcccacagagaagctcacagccctgaggccaccccatcccagccccacagccactgggctggcagccttggtgatgtctccacatgctccaagtacccctatgaccagtgtgattctgggcactaccacaacctccagatccagtacagagcgctgccctccaaatgcccgctacgaatcctgtgcttgtcctgcttcgtgcaagagccccaggcctagctgtgggcccctctgtcgggagggctgtgtctgcaaccctggctttttgtttagtgacaaccactgcatccaggcctcttcctgcaattgcttctacaacaacgactactatgagcctggggcagagtggttcagccccaactgcacagaacattgccgctgctggcccggcagtcgggtcgagtgccagatctctcagtgtgggacacacaccgtgtgccagcttaagaatggccagtatggatgccacccctacgcaggcactgccacctgcttggtctacggagaccctcattatgtcacctttgacgggaggcactttggcttcatgggcaagtgcacttacatcttggcccagccctgtggcaactcaacagacccattcttcagggtgacagccaagaatgaggagcagggacaggaaggcgtgtcctgcctgagcaaagtctacgtgaccctgcccgagagcaccgtcaccctgcttaagggcagacgcactctggttgggggtcagcaagttactctcccagccataccctctaaaggcgtcttcctgggtgcaagcgggcggtttgtggagctgcagacggagttcggtttgcgggtgagatgggatggtgaccagcagctgtatgttactgtgtccagcacatactctggcaaactctgtggtttgtgtgggaactatgacggcaacagtgacaatgaccacctgaagttggacggcagcccagcaggagacaaggaggagctggggaacagctggcagacggaccaggacgaggaccaggagtgtcagaagtaccaggtggtgaattccccgtcttgtgattcatctctgcagagcagcatgtcggggccagggttctgtggacggctggtcgacactcatggcccatttgagacatgcctgctgcacgtgaaggccgcttccttcttcgacagctgcatgcttgatatgtgcggattccaggggctgcagcacctgctgtgcacacacatgtccaccatgaccaccacctgccaggacgcaggccacgctgtgaagccctggagggaaccccacttctgcccaatggcctgcccgcccaacagcaagtactccctgtgtgcgaagccatgccctgacacctgccattcaggattctccggcatgttctgctcagaccggtgcgtggaggcctgtgaatgcaatccgggcttcgtcctcagtggcctcgagtgcatacctcgctcccagtgtgggtgcctccaccctgcaggcagctacttcaaggtaggggagcggtggtacaagccaggctgcaaagagttgtgcgtctgtgaaagcaacaacagaattcgctgccagccctggaggtgtagggcccaggagttctgtggccaacaggatggtatctatggctgccatgcccaaggtgccgccacctgcacagcctcgggtgacccccactacctgaccttcgatggcgccttgcaccacttcatgggcacctgcacctatgtcctgacccggccttgctggtccaggtcccaagacagctattttgttgtgagcgccaccaacgagaaccgcggggggatcctggaggtctcctacatcaaagccgtccacgtgacagtctttgacctcagcatctcactgctcagaggctgtaaggtcatgctgaatggccatcgggtggccctacctgtgtggcttgcacaaggccgggtgaccataaggctcagcagcaacctcgtcctcctctacacgaactttgggctccaagttcgctacgacgggagccacttggtggaagtgacagtcccctcctcctatggcggccagctctgtgggctgtgtgggaactacaacaacaacagcttggatgacaacctgcgccccgacagaaagcttgcaggcgattccatgcagctgggggccgcctggaagttacctgaatcctctgaacctggctgtttccttgtgggtggcaagccctccagctgccaggagaacagcatggcagacgcctggaacaagaactgtgcgatcttaataaaccctcagggacccttctctcaatgtcaccaggtggtgcctccccagtccagctttgccagttgcgtgcatggtcagtgtgggaccaagggcgacaccacagccctgtgccgctccctgcaggcctacgcgtccctgtgtgcccaggctggccaggcccctgcctggcggaacagaaccttctgccctatgaggtgcccacctggcagcagctacagcccctgcagcagcccctgcccagacacctgcagcagcataaacaacccgagggactgccccaaagcactgccctgtgctgagagctgtgaatgtcagaaaggccacatcttgagtggaacctcctgcgtgccccttggccagtgtggctgcactgacccagcgggctcctaccacccggtcggggagcgctggtacacagagaacacctgcaccaggctctgcacctgctccgtccacaacaacatcacctgcttccagagcacctgcaaacccaaccagatatgctgggccctggatgggctgctccattgtcgggcctcaggtgtgggagtgtgtcagctcccaggggagtcccactacgtgagctttgatggtagtaaccattctatcccggacgcctgcactcttgtcctggtgaaagtgtgccaccccgccatggccttgcccttcttcaagatcagtgccaagcatgagaaggaggaaggtggaactgaggctttccgccttcatgaggtctacattgacatctacgatgcccaggtcaccctgcagaagggccaccgtgtgctaatcaacagcaaacaggtcaccctccccgccatctcccagatccctggggtcagtgtcaagtccagcagcatctacagcattgttaacatcaagatcggggtgcaagtcaagtttgacgggaatcatctcttagagattgaaatccccacaacctactatggaaaggtctgcggcatgtgtgggaacttcaatgatgaggaagaggacgaactaatgatgcccagcgatgaagtagcaaatagtgacagtgaatttgtgaacagttggaaagataaggacattgacccaagttgtcagagtctcctggtagatgagcagcagattccagcggaacagcaggagaacccgagtggaaactgcagggcggccgacctccgcagggcgcgggaaaagtgcgaggcagcgctccgggctcctgtgtgggcccagtgcgcctcccgcatagacctcacgcccttcctggtggactgtgcaaacaccctctgtgagttcggaggtctctaccaggccctctgccaggctctgcaagccttcggggccacctgccagagccaggggctcaagcccccactctggagaaacagcagcttctgccctctggaatgccctgcctacagcagctacaccaactgccttccctcctgctcaccctcctgctgggacctggatggccggtgtgagggcgccaaagtcccctctgcctgcgctgagggctgcatttgtcagcccggctatgtgctgagtgaagacaagtgtgtccccagaagtcagtgtggctgcaaggatgcccatggtggctccatccctctgggcaagagctgggtctccagcggttgcacggagaagtgtgtctgcacgggaggagccattcagtgcggggacttccgatgcccctctgggtcccactgccagctcacttccgacaacagcaacagcaattgtgtctcagacaagtctgaacaatgctcagtctatggcgacccccgttacctcacatttgacggcttcagctaccgcttgcaaggccgcatgacctatgttctgatcaagactgtggacgtactgcctgagggggtggagcccctcctcgtggaaggacgcaacaagatggatccgcccaggagctccatcttcttgcaggaagtgattaccaccgtctacggctataaagtgcagctccaagctggtctggagcttgtggtcaacaaccagaagatggccgtcccctacaggccaaatgaacacctgcgggtcaccctgtggggccaacggctctacctggtcaccgactttgagctggtcgtcagctttggtggaaggaaaaatgcagtgatctccctacccagcatgtacgaggggcttgtgagtggcctgtgcggaaactacgacaagaaccgcaagaatgacatgatgctgcccagtggcgccctgacccagaacctcaacacctttggcaacagctgggaggtgaagaccgaggacgcactcctgcgcttccccagggctataccagcggaggaggagggacaaggggcggagctgggcctccgcacgggcctccaagtgtccgaatgtagcccggagcagctggcgagcaacagcacccaggcctgtagggtgctggcagacccccagggcccctttgctgcctgtcaccagacggtggccccagagcccttccaagagcactgcgtgctggatctgtgctctgctcaggacccaagagagcaagaggagctgcgttgccaggtcctcagtggccatggagtgtccagcaggtaccatatatcagagctgtatgacaccctgcccagcatcctgtgccaacctggcagaccccggggactgcgagggcccctgcgtggaaggctgcgccagcatcccaggctatgcctacagtggcacccagagcctcccctggctgactgtggctgcaccagcaatggcatctactaccagctgggcagcagctttctgactgaggactgctctcagcggtgcacctgtgccagctcacggatcctgctgtgtgagcccttcagctgcagagcgggggaggtctgcaccctggggaaccacacccaaggctgctttccagaaagcccgtgtctgcagaacccctgtcagaatgacgggcagtgtcgggagcagggagccaccttcacctgcgagtgtgaagttggttacgggggaggcctgtgtatggagcctcgagatgcgccacctcccagaaagccagcatctaacctggtgggcgtcctactgggactgctggtgcctgtggtggtcgtactactggccgtgaccagagagtgcatttacagaacgaggaggaagagagagaaaacgcaggagggagacagactggccaggctggtggacacagatactgttctggactgtgcctgttaagttgctcagttttgagctgtcttcagacaagaagattaaataaatttatatatttatttatttga

SEQ ID NO: 204848 - DNA, 8396 bp, Homo sapiens
  Payload ID: 20406
  Gene Name: zonadhesin (gene/pseudogene)
  ENST ID: ENST00000620596
  CDS Start-End: 166-8331
gccatgttgatttctgatccttgagcttttctgtgtttctctgttcattcttcatggcatccttggaaggatgccaagctaaggaggccaggggggaataaaaggagtccaggctcccaactgtgcccttcccctctcccctgggagcaaccacttagggtcctcatggttcctccagtctggactctgctgcttctggtgggggctgcccttttcaggaaagagaagcctccggaccagaagctggttgttcgcagctctagggacaactatgtcctcacccagtgtgattttgaggatgacgccaaacccctctgtgactggtcccaagtgtccgcagacgatgaagactgggttcgagccagtgggccctctcccaccggctccaccggggcccccggggggtaccctaacggagagggcagctatctgcatatggaatcgaacagcttccaccgtgggggagtggcccgcctgctcagccccgacctatgggagcaaggccccctctgtgtgcactttgcccaccacatgttcgggctgtcttggggcgcccagctcaggctgctgctgctctcgggtgaagagggccgccgccccgatgtgctctggaaacactggaacacccagagaccctcctggatgctcaccaccgtcactgtgcccgcagggttcaccctgcccacccggctgatgtttgagggaacacggggtagcactgcctacctggacatcgccctggatgccctctctatccgccggggctcctgtaatcgcgtctgtatgatgcaaacatgcagctttgacattccaaatgacctctgtgactggacctggatcccaactgcctccggggccaagtggactcagaagaaagggtcatcaggaaagccaggcgtggggcctgatggcgacttctctagccctggtagtggctgctacatgctcctggaccccaagaatgcaagacctgggcagaaagctgtcctcctgagccccgtgagcctgtcctctggctgtctgagcttttccttccactacatcctccggggccagtctcctggtgcagccctccacatttatgcttcagtcttggggagtatccggaaacacactctcttctcaggacaacctgggcccaactggcaggctgtttctgtcaattacacagccgtgggacggatacagtttgccgtggtaggcgtttttggaaagaccccagagccagctgtggcagttgatgcaaccagcattgctccttgtggggagggttttcctcagtgtgactttgaagacaacgcccatcccttctgtgactgggtccagacttccggggatggtggacactgggccctcggacataaaaatggacccgtccatggcatgggccctgcgggaggtttccctaatgcagggggtcactatatctaccttgaggctgacgagttctcccaggcaggccagtcagtcagactggtgagccggcccttctgcgccccaggtgacatctgcgtggagttcgcataccacatgtatggccttggggagggtactatgctcgaactcctcctgggaagtcctgcggggagtcccccgattcctctctggaaacgcgtggggtctcagcgcccttactggcagaacacctccgtcaccgtcccctcaggacaccaacagcccatgcagcttattttcaagggcatccagggaagcaacacggcctctgtggttgctatgggtttcatcttgatcaatcctgggacttgtccagtaaaagtgctaccagagcttcctcccgtatctccagtttcttccactggcccttctgaaaccactggcctcacagaaaaccctacaatctccaccaagaaacctacagtttccatagaaaaacccagtgtcaccacagaaaagcccacagtccccaaagaaaagcccaccattcccacagaaaaacccaccatctccacagaaaaacccaccattccttcagaaaaacccaacatgccctcagaaaaacccaccattccctcagaaaaacccaccatcctcacagaaaaacccaccattccctcagaaaaacccaccattccctcagaaaaacccaccatttccacagaaaaacccaccgtccccacagaagagcccaccacccccactgaggagaccaccacctccatggaagagcctgtcatccctacagaaaaacccagcatccctacagaaaaacccagcatccccacggaaaaacccaccatctccatggaagagactatcatctccacagaaaaacccaccatctccccagaaaaacccaccatccccacagaaaaacccaccatccccacagaaaaatccaccatctccccagaaaaacccaccacccccacagaaaaacccaccatccccacagaaaaacccaccatctccccagaaaaacccaccacccccacagaaaaacccaccatctccccagaaaaactcaccatccccacagaaaaacccaccatccccacagaaaaacccaccattcccacagaaaaacccaccatctccacagaagagcccaccacccccactgaggagaccaccatctccacagaaaaacccagcatccccatggaaaaacccactctccccactgaagaaaccaccacctctgttgaagagactaccatctctacagaaaaactcaccatccccatggaaaaacccaccatctccacagaaaaacccaccatccccacagaaaaacccaccatctccccagaaaaactcaccatccccacggaaaaactcaccatccccacggaaaaacccaccatccccattgaagagactaccatctccacagaaaaactcaccatccccacagaaaaacccaccatctccccagaaaaacccaccatctccacggaaaaacccaccatccccacggaaaaacccaccatccccactgaagagactaccatctccacagaaaaactcaccatccccacagaaaaacccaccatctccccagaaaaactcaccatccccacagaaaaacccaccatctccacggaaaaacccaccatccccacggaaaaacttaccatccccacggaaaaacccaccatccccacagaaaaacccaccattcccacagagaagctcacagccctgaggccaccccatcccagccccacagccactgggctggcagccttggtgatgtctccacatgctccaagtacccctatgaccagtgtgattctgggcactaccacaacctccagatccagtacagagcgctgccctccaaatgcccgctacgaatcctgtgcttgtcctgcttcgtgcaagagccccaggcctagctgtgggcccctctgtcgggagggctgtgtctgcaaccctggctttttgtttagtgacaaccactgcatccaggcctcttcctgcaattgcttctacaacaacgactactatgagcctggggcagagtggttcagccccaactgcacagaacattgccgctgctggcccggcagtcgggtcgagtgccagatctctcagtgtgggacacacaccgtgtgccagcttaagaatggccagtatggatgccacccctacgcaggcactgccacctgcttggtctacggagaccctcattatgtcacctttgacgggaggcactttggcttcatgggcaagtgcacttacatcttggcccagccctgtggcaactcaacagacccattcttcagggtgacagccaagaatgaggagcagggacaggaaggcgtgtcctgcctgagcaaagtctacgtgaccctgcccgagagcaccgtcaccctgcttaagggcagacgcactctggttgggggtcagcaagttactctcccagccataccctctaaaggcgtcttcctgggtgcaagcgggcggtttgtggagctgcagacggagttcggtttgcgggtgagatgggatggtgaccagcagctgtatgttactgtgtccagcacatactctggcaaactctgtggtttgtgtgggaactatgacggcaacagtgacaatgaccacctgaagttggacggcagcccagcaggagacaaggaggagctggggaacagctggcagacggaccaggacgaggaccaggagtgtcagaagtaccaggtggtgaattccccgtcttgtgattcatctctgcagagcagcatgtcggggccagggttctgtggacggctggtcgacactcatggcccatttgagacatgcctgctgcacgtgaaggccgcttccttcttcgacagctgcatgcttgatatgtgcggattccaggggctgcagcacctgctgtgcacacacatgtccaccatgaccaccacctgccaggacgcaggccacgctgtgaagccctggagggaaccccacttctgcccaatggcctgcccgcccaacagcaagtactccctgtgtgcgaagccatgccctgacacctgccattcaggattctccggcatgttctgctcagaccggtgcgtggaggcctgtgaatgcaatccgggcttcgtcctcagtggcctcgagtgcatacctcgctcccagtgtgggtgcctccaccctgcaggcagctacttcaaggtaggggagcggtggtacaagccaggctgcaaagagttgtgcgtctgtgaaagcaacaacagaattcgctgccagccctggaggtgtagggcccaggagttctgtggccaacaggatggtatctatggctgccatgcccaaggtgccgccacctgcacagcctcgggtgacccccactacctgaccttcgatggcgccttgcaccacttcatgggcacctgcacctatgtcctgacccggccttgctggtccaggtcccaagacagctattttgttgtgagcgccaccaacgagaaccgcggggggatcctggaggtctcctacatcaaagccgtccacgtgacagtctttgacctcagcatctcactgctcagaggctgtaaggtcatgctgaatggccatcgggtggccctacctgtgtggcttgcacaaggccgggtgaccataaggctcagcagcaacctcgtcctcctctacacgaactttgggctccaagttcgctacgacgggagccacttggtggaagtgacagtcccctcctcctatggcggccagctctgtgggctgtgtgggaactacaacaacaacagcttggatgacaacctgcgccccgacagaaagcttgcaggcgattccatgcagctgggggccgcctggaagttacctgaatcctctgaacctggctgtttccttgtgggtggcaagccctccagctgccaggagaacagcatggcagacgcctggaacaagaactgtgcgatcttaataaaccctcagggacccttctctcaatgtcaccaggtggtgcctccccagtccagctttgccagttgcgtgcatggtcagtgtgggaccaagggcgacaccacagccctgtgccgctccctgcaggcctacgcgtccctgtgtgcccaggctggccaggcccctgcctggcggaacagaaccttctgccctatgaggtgcccacctggcagcagctacagcccctgcagcagcccctgcccagacacctgcagcagcataaacaacccgagggactgccccaaagcactgccctgtgctgagagctgtgaatgtcagaaaggccacatcttgagtggaacctcctgcgtgccccttggccagtgtggctgcactgacccagcgggctcctaccacccggtcggggagcgctggtacacagagaacacctgcaccaggctctgcacctgctccgtccacaacaacatcacctgcttccagagcacctgcaaacccaaccagatatgctgggccctggatgggctgctccattgtcgggcctcaggtgtgggagtgtgtcagctcccaggggagtcccactacgtgagctttgatggtagtaaccattctatcccggacgcctgcactcttgtcctggtgaaagtgtgccaccccgccatggccttgcccttcttcaagatcagtgccaagcatgagaaggaggaaggtggaactgaggctttccgccttcatgaggtctacattgacatctacgatgcccaggtcaccctgcagaagggccaccgtgtgctaatcaacagcaaacaggtcaccctccccgccatctcccagatccctggggtcagtgtcaagtccagcagcatctacagcattgttaacatcaagatcggggtgcaagtcaagtttgacgggaatcatctcttagagattgaaatccccacaacctactatggaaaggtctgcggcatgtgtgggaacttcaatgatgaggaagaggacgaactaatgatgcccagcgatgaagtagcaaatagtgacagtgaatttgtgaacagttggaaagataaggacattgacccaagttgtcagagtctcctggtagatgagcagcagattccagcggaacagcaggagaacccgagtggaaactgcagggcggccgacctccgcagggcgcgggaaaagtgcgaggcagcgctccgggctcctgtgtgggcccagtgcgcctcccgcatagacctcacgcccttcctggtggactgtgcaaacaccctctgtgagttcggaggtctctaccaggccctctgccaggctctgcaagccttcggggccacctgccagagccaggggctcaagcccccactctggagaaacagcagcttctgccctctggaatgccctgcctacagcagctacaccaactgccttccctcctgctcaccctcctgctgggacctggatggccggtgtgagggcgccaaagtcccctctgcctgcgctgagggctgcatttgtcagcccggctatgtgctgagtgaagacaagtgtgtccccagaagtcagtgtggctgcaaggatgcccatggtggctccatccctctgggcaagagctgggtctccagcggttgcacggagaagtgtgtctgcacgggaggagccattcagtgcggggacttccgatgcccctctgggtcccactgccagctcacttccgacaacagcaacagcaattgtgtctcagacaagtctgaacaatgctcagtctatggcgacccccgttacctcacatttgacggcttcagctaccgcttgcaaggccgcatgacctatgttctgatcaagactgtggacgtactgcctgagggggtggagcccctcctcgtggaaggacgcaacaagatggatccgcccaggagctccatcttcttgcaggaagtgattaccaccgtctacggctataaagtgcagctccaagctggtctggagcttgtggtcaacaaccagaagatggccgtcccctacaggccaaatgaacacctgcgggtcaccctgtggggccaacggctctacctggtcaccgactttgagctggtcgtcagctttggtggaaggaaaaatgcagtgatctccctacccagcatgtacgaggggcttgtgagtggcctgtgcggaaactacgacaagaaccgcaagaatgacatgatgctgcccagtggcgccctgacccagaacctcaacacctttggcaacagctgggaggtgaagaccgaggacgcactcctgcgcttccccagggctataccagcggaggaggagggacaaggggcggagctgggcctccgcacgggcctccaagtgtccgaatgtagcccggagcagctggcgagcaacagcacccaggcctgtagggtgctggcagacccccagggcccctttgctgcctgtcaccagacggtggccccagagcccttccaagagcactgcgtgctggatctgtgctctgctcaggacccaagagagcaagaggagctgcgttgccaggtcctcagtgggtacgccatcctctgccaggaggcgggcgctgccctggctggctggcgggaccgcaccctctgcgaaagcccgtgtctgcagaacccctgtcagaatgacgggcagtgtcgggagcagggagccaccttcacctgcgagtgtgaagttggttacgggggaggcctgtgtatggagcctcgagatgcgccacctcccagaaagccagcatctaacctggtgggcgtcctactgggactgctggtgcctgtggtggtcgtactactggccgtgaccagagagtgcatttacagaacgaggaggaagagagagaaaacgcaggagggagacagactggccaggctggtggacacagatactgttctggactgtgcctgttaagttgctcagttttgagctgtcttcagacaagaagattaaataaatttatatatttatttatttga

SEQ ID NO: 204849 - DNA, 6566 bp, Homo sapiens
  Payload ID: 20407
  Gene Name: ZPR1 zinc finger
  Uniprot ID: O75312
  ENST ID: ENST00000227322
  CDS Start-End: 61-1440
gggtggggccgcgagagcggcggaagtaggaagccgaggtctgaattgcgcgtggtggccatggcggccagcggggctgtggaaccagggcccccgggggctgccgtcgccccgtcgcccgccccggccccgccgcctgcccctgatcacctgttccggcccatcagcgccgaggacgaggagcagcagcccaccgagatcgagtcgctatgcatgaactgttactgcaatggcatgacgcgcctcctgctcaccaagattcccttcttcagagaaataatagtgagctccttttcctgcgagcactgtggctggaacaacacggagatccagtcggcaggcaggatccaggaccagggagtgcgctacactttgtctgtcagggctctggaggacatgaacagagaagtggtgaagactgactctgctgccacaaggattcctgagctagattttgaaattcctgcctttagccagaaaggagctctgaccactgttgaaggattgatcacccgtgctatctctggcctggagcaggaccagcctgcacgaagggcaaacaaagatgctacagctgaaagaattgatgagttcattgtcaaactgaaggagctaaagcaagtagcctcccctttcactctgatcattgatgatccctcagggaacagttttgtggaaaacccacatgctcctcagaaagatgatgccctggtgatcacacactacaaccggacccgacagcaggaagagatgctggggcttcaagaagaagcaccagcagagaagccagaagaggaagatctcagaaatgaagtgctccagttcagcacaaactgcccagaatgcaatgcccccgctcagaccaacatgaagctagtacaaatccctcactttaaggaggttatcatcatggctaccaactgcgagaactgtgggcatcggaccaatgaggtgaaatctggaggagcagtagaacccttgggcaccaggatcaccctccacatcacagatgcctcagatatgaccagagacctcctcaagtctgagacttgcagtgtggaaatcccagagctagaatttgaactgggaatggcagtcctcgggggcaagttcaccacactggaagggctgctgaaagacatccgggaactggtgaccaaaaatcctttcacactgggcgacagttccaatcctggacagacggagagactacaggagtttagccagaagatggaccagatcatcgaaggtaacatgaaggcccactttattatggatgatccagcaggaaacagttacttgcagaatgtgtatgcgcctgaagatgatcctgagatgaaggtggagcgttacaagcgcacctttgaccaaaatgaggagctagggctcaatgacatgaagacagagggctatgaggcaggcctggctccgcaacggtagcagtgggtggctcaagggccagcctccagcgctgctctttctgtaggttatttattagtattggatgaaggcgaaggctgggagtgtctttcccaccagcccttgcccatggtggggaggacatctggtctgagtcagagatctgtgcacactttctaaacagcttgtgatgcaagtgtgagcctattgtgttacttgaccttattttggaagttttgaattggcctaggaggaaacccagaaatgaaccaggggtatgtcatcacttttttcatatcaagtcctcaccctccttccacataatgctctatcctctaaggttggaactctgaagttggagaaggtggaataaagttacacctggagtttgttgttggttttgagtatataaaatactgactttgaacaggaaaggagtctcctgaggggagaccgagtccagcacaagtgaaggagttaccattgaaatgatgactttcaaacagcactggcctctgtattgaccctatccttgtttgatatcatgctgttagaattcagcctcctaaagaaaattttcccgtgtatctactgtaatttggggattgcagctggcatttaattcattccttcagcagatgcttgcttatctactttatgccaagcacaccacagaacagaggacaaaataaatctctttcatggaacttgaagtctagtggggaaaaatgacaataaacagatcaggaaaacagtacatcagatggtgattagtgtcatggaggaatgtaaagcagggaatggggctgggttgtgcaaggaaatggggagtagggaagatcttctgaacaagaaggtgataatttgacatttgggcaaagctgaggaggaggtcagggagtgagctgtgtgggtatctgggggaagagatttcctggcagagggaactgcaaatgctagagctgtgaggttagagccagtgggggtacctgatcagttagccctactctcagttagaaatgttgaaacacattcatccagagagaaaggaggctctctgcagttcttctgaaagttaaggaccagtgaacactctgctgcttgggccctggacttcccagccagtgttctttgcactgtagtctcctgcctctcataaacaaaaggtgactcctgtggtgcagactgcagggtatttgttcaataaagaccagttcattgattaagatgttatcacaaaccttattgctttgtgttgcaaactttttttttttttttttttggtagagacagagtctcgcgctgttgcccaggctggagtgcagtggtgtgatcttggcttattgcaacctttgcctcccgggtttaagcaattctgcctcagcctcccgagtagcggggactacaggcgcacgccgccacacccagctaatttcttttgtattttagtagagacggggtttcaccgtgttgcccaggctggtctcgaactcctgagctcaggcaatccgccagccttggcctcccaaagtgctaggattacaggcgtgagctaccgcgtccggctgtgttgcaaacttaactctgaagaatgagttagagatgatttagcaatcagacatctactctcgttgctctgttaaactactctcaaaggtcacaagtgattttccacttggaaagtgttatctatttctgtcacatttgatagtggaccatctcttcttaacccttcttttggctctcgagatactgtacccttggttttcccttcactttgaatatttcttatttggacactttgcctcctcccctcttactaaatttgtttctgagagttctgctttcagacatctctccatatcagattctttggcatcttactatcatgtgggactaacttccatacctgtatctctaatttctgtaagtgagggcgagagtaaggtgtttggagactcaggttagcaaatgactcattcaaactataaagcttcagtactttgggcaaacttctcacaggcaactattctaccctaagagattatctctaggtatgtttccagctgacttgggaatctaagtttaccagacaaccctctgatctatcatttggtctcttaagtagacttccccatagtgtaggtgtgctctgttaagataaactgcagtatcaggttcattttccattgtgaaggaaaaaaaatggcactctggcttattactgaatctcttgtgagtttggttggtgtgaggcaatctcccagaatccacccagttcctaggaaatgatgacctgagtttctgaacttgaagactgaggaccaggtgccagactgggataacccagctaaggtacttcctgccctttgatgacaaggcattcttcagtttcatacccttctcttgaattatctttcagctcctttctcatttcataaagtgtgtcaggatgggagcttacatatagttaactgagtcttgctccacagcacccagcatatgacacatggttaataaaatctgttaaaatcctccatcatagattaaaccctattaggacactagggataacatctataggtaaaaagatagggaaagggtctcgctttaaggccagggtaggtgagtcaaagtgccaggaacatgtggattcagtttcacagccatgagtaacatttaagtggaaaaggtttgtgattgtgttaaaaaaggaaagtggttcatgcatgagggcacgcctcctactttcatgggtcaagtatgtgaaatgcagccatgttcggtcattagacgtgtggacgaacatacaggtaggtactgaatgtacatctgtgtcatgatgagtggaggaggggaggtgagtgttgggagcaagtatgaagggcagttgacttggccaactgaaaactttaatgatggcaacactttcattctaacatcagtatatttccttctttgtacacctgtggtatgtgcctgatgcacactgcagaaaatggtgtctctgcttacatttagggcagtggtggctaagactacttggctttattcctattaaaaaatgttttttacacacttctttttaaggcaaatggcagtgtttccaactgtggagagaaaaagctgcttattttgtgcgttcacctcagtttagtattggcacttccaatgcttgttttcctagtctgtaaaatggggataattaggataaacaaaattatccccattttacaggtgacaaaacagcctcagagaggttacttccagaaggaagcagagctttttttttttttttttttttttttttttttttttgagacggagtctcactctgttgcccagactggagtgcagtggcgtgatcttggctcaccacaacctctgcctcccaggttcaagcgattctcttgcctcagccttctgagtagctgggactacaggtgcacgccaccatgcctggctaattttttttttttttttttttttggagacagtcttgctctgtcacccaggatggagtgcagtggtgcgatcttggctcactgcagccttgcctcctgggttcaagcaattctcctgcctcagcctcctgagtagctgggattacagacgcccaccactgcacccagctaatttttgtatttttagtagagatggggtttcaccatgttggtcaggctggtctcaaacccctgacctcgtgatccacctgccttggcctcccaaagtgcagggattacaggcgtgagccaccgtgcctggccagaagtagagcttctaagaggcaggtgtcaaacccatgccagtcagactctgaaacctgaggtctgaatattttaagctcagctccacaattactgtatttgttctattagatacaactgcagagagaggccaaagctcagagcaggccattggcacggcatctgatcctgcttaactgccctgcagcacagggtggagacacttgggccttgtcaggctaagggactggggtaggatgggtagcagtggaattgaagacaaagaaaacaaatgggcagaagatgggtgggtggaagttcagagggctatcctggcagtgttcactggagcagaagtgtgaggctttctgaatgcctgctgacaccagggtggggcagggctgtgtagtgtgagatgcaccaaattggacgagaagccaaggcaggcttgtgtatggggtaccctggggccctccgcctagtgaagccctatcttctcagcccagcgtcctcgtctcacaagccctcagagccccagcctgctttcctttctgggcctgtgctgcaaccccctcaacatggcccactgggtaaaaattcatgcttcaagactgatccccaagcctgttttgtattatatgagtaaagaattttttaaacacttatccccagataatgtgtatttatttataaagtatagccctgtctgcttgactaatatattaaaaaagtgacctttttgactcttggtccaagaaactattgtttgcacttttgtgtagttgtgtatagcatcctgcaaattctgtcagaagtctgtgatttcagtaacactaaaacttctctctcaaatggtacaagttttcagttttaagacaagttctgggaatctaatgtacaacatgttgactatagctaataattctgtattgtttacttgaagtttgctaagacaaatttgcttaagtgcccccccaccgaactactacataaattagtgaaggatgttttacttaatttgattttggtaatcattacacaatgtataattatatccagtcatcacattgtacaccttgaatatatataattttttgtcaaataataaagctgggaagaaaacgataaaactgacaatctaacatatatgatgaggtaaaaagatctggtatttcaagaaatttggatgacctcttgcaccccacttcgctagcctctactccctagagtcatgttctgactatgtgaagttgagcaacttccttaatcttgccacgcttcagttcttatctgtaaaatatgataatgaaacgatttgagaattgtgagggttaaatgagataattcaggtaaagctctaaaccccctgcaaagaataaagtcttttctttccccccaaaa

SEQ ID NO: 204850 - DNA, 2497 bp, Homo sapiens
  Payload ID: 20407
  Gene Name: ZPR1 zinc finger
  ENST ID: ENST00000444935
  CDS Start-End: 1-1292
tggcggccagcggggctgtggaaccagggcccccgggggctgccgtcgccccgtcgcccgccccggccccgccgcctgcccctgatcacctgttccggcccatcagcgccgaggacgaggagcagcagcccaccgagatcgagtcgctatgcatgaactgttactgcaatggcatgacgcgcctcctgctcaccaagattcccttcttcagagaaataatagtgagctccttttcctgcgagcactgtggctggaacaacacggagatccagtcggcaggcaggatccaggaccagggagtgcgctacactttgtctgtcagggctctggaggacatgaacagagaagtggtgaagactgactctgctgccacaaggattcctgagctagattttgaaattcctgcctttagccagaaaggagctctgaccactgttgaaggattgatcacccgtgctatctctggcctggagcaggaccagcctgcacgaagggcaaacaaagatgctacagctgaaagaattgatgagttcattgtcaaactgaaggagctaaagcaagtagcctcccctttcactctgatcattgatgatccctcagggaacagttttgtggaaaacccacatgctcctcagaaagatgatgccctggtgatcacacactacaaccggacccgacagcaggaagagatgctggggcttcaagaagaagcaccagcagagaagccagaagaggaagatctcagaaatgaagtgctccagttcagcacaaactgcccagaatgcaatgcccccgctcagaccaacatgaagctagtacaaatccctcactttaaggaggttatcatcatggctaccaactgcgagaactgtgggcatcggaccaatgaggtgaaatctggaggagcagtagaacccttgggcaccaggatcaccctccacatcacagatgcctcagatatgaccagagacctcctcaagtctgagacttgcagtgtggaaatcccagagctagaatttgaactgggaatggcagtcctcgggggcaagttcaccacactggaagggctgctgaaagacatccgggaactgatcatcgaaggtaacatgaaggcccactttattatggatgatccagcaggaaacagttacttgcagaatgtgtatgcgcctgaagatgatcctgagatgaaggtggagcgttacaagcgcacctttgaccaaaatgaggagctagggctcaatgacatgaagacagagggctatgaggcaggcctggctccgcaacggtagcagtgggtggctcaagggccagcctccagcgctgctctttctgtaggttatttattagtattggatgaaggcgaaggctgggagtgtctttcccaccagcccttgcccatggtggggaggacatctggtctgagtcagagatctgtgcacactttctaaacagcttgtgatgcaagtgtgagcctattgtgttacttgaccttattttggaagttttgaattggcctaggaggaaacccagaaatgaaccaggggtatgtcatcacttttttcatatcaagtcctcaccctccttccacataatgctctatcctctaaggttggaactctgaagttggagaaggtggaataaagttacacctggagtttgttgttggttttgagtatataaaatactgactttgaacaggaaaggagtctcctgaggggagaccgagtccagcacaagtgaaggagttaccattgaaatgatgactttcaaacagcactggcctctgtattgaccctatccttgtttgatatcatgctgttagaattcagcctcctaaagaaaattttcccgtgtatctactgtaatttggggattgcagctggcatttaattcattccttcagcagatgcttgcttatctactttatgccaagcacaccacagaacagaggacaaaataaatctctttcatggaacttgaagtctagtggggaaaaatgacaataaacagatcaggaaaacagtacatcagatggtgattagtgtcatggaggaatgtaaagcagggaatggggctgggttgtgcaaggaaatggggagtagggaagatcttctgaacaagaaggtgataatttgacatttgggcaaagctgaggaggaggtcagggagtgagctgtgtgggtatctgggggaagagatttcctggcagagggaactgcaaatgctagagctgtgaggttagagccagtgggggtacctgatcagttagccctactctcagttagaaatgttgaaacacattcatccagagagaaaggaggctctctgcagttcttctgaaagttaaggaccagtgaacactctgctgcttgggccctggacttcccagccagtgttctttgcactgtagtctcctgcctctcataaacaaaaggtgactcctgtggtgcagactgcagggtatttgttcaataaagaccagttcattgattaa

SEQ ID NO: 204851 - DNA, 508 bp, Homo sapiens
  Payload ID: 20407
  Gene Name: ZPR1 zinc finger
  ENST ID: ENST00000431973
  CDS Start-End: 1-229
gttccggcccatcagcgccgaggacgaggagcagcagcccaccgagatcgagtcgctatgcatgaactgttactgcaatagaaataatagtgagctccttttcctgcgagcactgtggctggaacaacacggagatccagtcggcaggcaggatccaggaccagggagtgcgctacactttgtctgtcagggctctggaggacatgaacagagaagtggtgaagactgactctgctgccacaaggattcctgagctagattttgaaattcctgcctttagccagaaaggagctctgaccactgttgaaggattgatcacccgtgctatctctggcctggagcaggaccagcctgcacgaagggcaaacaaagatgctacagctgaaagaattgatgagttcattgtcaaactgaaggagctaaagcaagtagcctcccctttcactctgatcattgatgatccctcagggaacagttttgtggaaaacccacatgctcctcagaaaga

SEQ ID NO: 204852 - DNA, 2364 bp, Homo sapiens
  Payload ID: 20407
  Gene Name: ZPR1 zinc finger
  ENST ID: ENST00000429220
  CDS Start-End: 1-1159
cggggctgtggaaccagggcccccgggggctgccgtcgccccgtcgcccgccccggccccgccgcctgcccctgatcacctgttccggcccatcagcgccgaggacgaggagcagcagcccaccgagatcgagtcgctatgcatgaactgttactgcaatgacatgaacagagaagtggtgaagactgactctgctgccacaaggattcctgagctagattttgaaattcctgcctttagccagaaaggagctctgaccactgttgaaggattgatcacccgtgctatctctggcctggagcaggaccagcctgcacgaagggcaaacaaagatgctacagctgaaagaattgatgagttcattgtcaaactgaaggagctaaagcaagtagcctcccctttcactctgatcattgatgatccctcagggaacagttttgtggaaaacccacatgctcctcagaaagatgatgccctggtgatcacacactacaaccggacccgacagcaggaagagatgctggggcttcaagtgctccagttcagcacaaactgcccagaatgcaatgcccccgctcagaccaacatgaagctagtacaaatccctcactttaaggaggttatcatcatggctaccaactgcgagaactgtgggcatcggaccaatgaggtgaaatctggaggagcagtagaacccttgggcaccaggatcaccctccacatcacagatgcctcagatatgaccagagacctcctcaagtctgagacttgcagtgtggaaatcccagagctagaatttgaactgggaatggcagtcctcgggggcaagttcaccacactggaagggctgctgaaagacatccgggaactggtgaccaaaaatcctttcacactgggcgacagttccaatcctggacagacggagagactacaggagtttagccagaagatggaccagatcatcgaaggtaacatgaaggcccactttattatggatgatccagcaggaaacagttacttgcagaatgtgtatgcgcctgaagatgatcctgagatgaaggtggagcgttacaagcgcacctttgaccaaaatgaggagctagggctcaatgacatgaagacagagggctatgaggcaggcctggctccgcaacggtagcagtgggtggctcaagggccagcctccagcgctgctctttctgtaggttatttattagtattggatgaaggcgaaggctgggagtgtctttcccaccagcccttgcccatggtggggaggacatctggtctgagtcagagatctgtgcacactttctaaacagcttgtgatgcaagtgtgagcctattgtgttacttgaccttattttggaagttttgaattggcctaggaggaaacccagaaatgaaccaggggtatgtcatcacttttttcatatcaagtcctcaccctccttccacataatgctctatcctctaaggttggaactctgaagttggagaaggtggaataaagttacacctggagtttgttgttggttttgagtatataaaatactgactttgaacaggaaaggagtctcctgaggggagaccgagtccagcacaagtgaaggagttaccattgaaatgatgactttcaaacagcactggcctctgtattgaccctatccttgtttgatatcatgctgttagaattcagcctcctaaagaaaattttcccgtgtatctactgtaatttggggattgcagctggcatttaattcattccttcagcagatgcttgcttatctactttatgccaagcacaccacagaacagaggacaaaataaatctctttcatggaacttgaagtctagtggggaaaaatgacaataaacagatcaggaaaacagtacatcagatggtgattagtgtcatggaggaatgtaaagcagggaatggggctgggttgtgcaaggaaatggggagtagggaagatcttctgaacaagaaggtgataatttgacatttgggcaaagctgaggaggaggtcagggagtgagctgtgtgggtatctgggggaagagatttcctggcagagggaactgcaaatgctagagctgtgaggttagagccagtgggggtacctgatcagttagccctactctcagttagaaatgttgaaacacattcatccagagagaaaggaggctctctgcagttcttctgaaagttaaggaccagtgaacactctgctgcttgggccctggacttcccagccagtgttctttgcactgtagtctcctgcctctcataaacaaaaggtgactcctgtggtgcagactgcagggtatttgttcaataaagaccagttcattgattaa

SEQ ID NO: 204853 - DNA, 603 bp, Homo sapiens
  Payload ID: 20407
  Gene Name: ZPR1 zinc finger
  ENST ID: ENST00000425791
  CDS Start-End: 50-199
cgagagcggcggaagtaggaagccgaggtctgaattgcgcgtggtggccatggcggccagcggggctgtggaaccagggcccccgggggctgccgtcgccccgtcgcccgccccggccccgccgcctgcccctgatcacctgttccggcccatcagcgccgaggacgaggagcagcagcccaccgagatcgaggcatgacgcgcctcctgctcaccaagattcccttcttcagagaaataatagtgagctccttttcctgcgagcactgtggctggaacaacacggagatccagtcggcaggcaggatccaggaccagggagtgcgctacactttgtctgtcagggctctggaggacatgaacagagaagtggtgaagactgactctgctgccacaaggattcctgagctagattttgaaattcctgcctttagccagaaaggagctctgaccactgttgaaggattgatcacccgtgctatctctggcctggagcaggaccagcctgcacgaagggcaaacaaagatgctacagctgaaagaattgatgagttcattgtcaaactgaaggagctaaagcaagtagcctcccctttcactctg

SEQ ID NO: 204854 - DNA, 691 bp, Homo sapiens
  Payload ID: 20407
  Gene Name: ZPR1 zinc finger
  ENST ID: ENST00000449430
  CDS Start-End: 1-309
attgtcaaactgaaggagctaaagcaagtagcctcccctttcactctgatcattgatgatccctcagggaacagttttgtggaaaacccacatgctcctcagaaagatgatgccctggtgatcacacactacaaccggacccgacagcaggaagagatgctggggcttcaagaagaagcaccagcagagaagccagaagaggaagatctcagaaatgaagtgctccagttcagcacaaactgcccagaatgcaatgcccccgctcagaccaacatgaagctaatggtggtcttgttcgcctggaagtagatttccttaactccgttttccagaaatccctcactttaaggaggttatcatcatggctaccaactgcgagaactgtgggcatcggaccaatgaggtgaaatctggaggagcagtagaacccttgggcaccaggatcaccctccacatcacagatgcctcagatatgaccagagacctcctcaagtctgagacttgcagtgtggaaatcccagagctagaatttgaactgggaatggcagtcctcgggggcaagttcaccacactggaagggctgctgaaagacatccgggaactggtgaccaaaaatcctttcacactgggcgacagttccaatcctggacagacggagagactacaggagtttagccagaagatggaccag

SEQ ID NO: 204855 - DNA, 1456 bp, Homo sapiens
  Payload ID: 20408
  Gene Name: ZW10 interacting kinetochore protein
  ENST ID: ENST00000318387
  CDS Start-End: 10-483
ctgactcagatggaggaagcccagaggaaacggacacaactccgggaagcctttgagcagctccaggccaagaaacaaatggccatggagaaacgcagagcagtccagaaccagtggcagctacaacaggagaagcatctgcagcatctggcggaggtttctgcagaggtgagggagcgtaagacagggactcagcaggagcttgacagggtgtttcagaaacttggaaacctgaagcagcaggcagaacaggagcgggacaagctgcagaggtatcagaccttcctccagcttctgtataccctgcagggtaagctgttgttccctgaggctgaggctgaggcagagaatcttccagatgataaaccccagcagccgactcgaccccaggagcagagtacaggagacaccatggggagagaccctggtgtgtccttcaaggctgttggtctacaacctgctggagatgtaaatttgccatgacttcctggaggacagcagcatggagaaagatcctagaaaaggtcagacccaactcaggccttggtgtccctggactgcaagtgtggaaggagggaaagcctggtttacctctctctgcatctgagctctgctacccatggagcagatggatggtgggaacaggaaagagcttatgttacacctcattcccatgcttagcccacccagagctaacccctgtcttcttccccaggcctctgacttccctcacctcccaaccatcattacaggaaagactgtgaactcctgagttcagcttgatttctgactacatcccagcaagctctggcatctgtggattaaaatccctggatctctctcagttgtgtatttgttcatcttcatatgctggcaggaacaactattaatacagatactcagaagccaataacatgacaggagctgggactggtttgaacacagggtgtgcagatggggagggggtactggccttgggcctcctatgatgcagacatggtgaatttaattcaaggaggaggagaatgttttaggcaggtggttatatgtgggaagataattttattcatggatccaaatgtttgttgagtcctttctttgtgctaaggttcttgcggtgaaccagaattataacagtgagctcatctgactgttttaggatgtacagcctagtgttaacattcttggtatctttttgtgccttatctaaaacatttctcgatcactggtttcagatgttcatttattatattcttttcaaagattcagagattggcttttgtcatccactattgtatgttttgtttcattgacctctagtgataccttgatctttcccactttctgttttcggattggagaagatgtaccttttttgtcaactcttacttttatcagatgatcaactcacgtatttggatctttatttgttttctcaaataaatatttaaggtta

SEQ ID NO: 204856 - DNA, 807 bp, Homo sapiens
  Payload ID: 20408
  Gene Name: ZW10 interacting kinetochore protein
  Uniprot ID: O95229
  ENST ID: ENST00000361148
  CDS Start-End: 31-723
ggaaggcagctgaactcggcgcctggaaagatggaggcagcggagacagaggcggaagctgcagccctagaggtcctggctgaggtggcaggcatcttggaacctgtaggcctgcaggaggaggcagaactgccagccaagatcctggttgagtttgtggtggactctcagaagaaagacaagctgctctgcagccagcttcaggtagcggatttcctgcagaacatcctggctcaggaggacactgctaagggtctcgaccccttggcttctgaagacacgagccgacagaaggcaattgcagctaaggaacaatggaaagagctgaaggccacctacagggagcacgtagaggccatcaaaattggcctcaccaaggccctgactcagatggaggaagcccagaggaaacggacacaactccgggaagcctttgagcagctccaggccaagaaacaaatggccatggagaaacgcagagcagtccagaaccagtggcagctacaacaggagaagcatctgcagcatctggcggaggtttctgcagagggtaagctgttgttccctgaggctgaggctgaggcagagaatcttccagatgataaaccccagcagccgactcgaccccaggagcagagtacaggagacaccatggggagagaccctggtgtgtccttcaaggctgttggtctacaacctgctggagatgtaaatttgccatgacttcctggaggacagcagcatggagaaagatcctagaaaaggcctctgacttccctcacctcccaaccatcattacaggaaaga

SEQ ID NO: 204857 - DNA, 1872 bp, Homo sapiens
  Payload ID: 20408
  Gene Name: ZW10 interacting kinetochore protein
  Uniprot ID: O95229
  ENST ID: ENST00000373944
  CDS Start-End: 40-873
gggattgtgggaaggcagctgaactcggcgcctggaaagatggaggcagcggagacagaggcggaagctgcagccctagaggtcctggctgaggtggcaggcatcttggaacctgtaggcctgcaggaggaggcagaactgccagccaagatcctggttgagtttgtggtggactctcagaagaaagacaagctgctctgcagccagcttcaggtagcggatttcctgcagaacatcctggctcaggaggacactgctaagggtctcgaccccttggcttctgaagacacgagccgacagaaggcaattgcagctaaggaacaatggaaagagctgaaggccacctacagggagcacgtagaggccatcaaaattggcctcaccaaggccctgactcagatggaggaagcccagaggaaacggacacaactccgggaagcctttgagcagctccaggccaagaaacaaatggccatggagaaacgcagagcagtccagaaccagtggcagctacaacaggagaagcatctgcagcatctggcggaggtttctgcagaggtgagggagcgtaagacagggactcagcaggagcttgacagggtgtttcagaaacttggaaacctgaagcagcaggcagaacaggagcgggacaagctgcagaggtatcagaccttcctccagcttctgtataccctgcagggtaagctgttgttccctgaggctgaggctgaggcagagaatcttccagatgataaaccccagcagccgactcgaccccaggagcagagtacaggagacaccatggggagagaccctggtgtgtccttcaaggctgttggtctacaacctgctggagatgtaaatttgccatgacttcctggaggacagcagcatggagaaagatcctagaaaaggcctctgacttccctcacctcccaaccatcattacaggaaagactgtgaactcctgagttcagcttgatttctgactacatcccagcaagctctggcatctgtggattaaaatccctggatctctctcagttgtgtatttgttcatcttcatatgctggcaggaacaactattaatacagatactcagaagccaataacatgacaggagctgggactggtttgaacacagggtgtgcagatggggagggggtactggccttgggcctcctatgatgcagacatggtgaatttaattcaaggaggaggagaatgttttaggcaggtggttatatgtgggaagataattttattcatggatccaaatgtttgttgagtcctttctttgtgctaaggttcttgcggtgaaccagaattataacagtgagctcatctgactgttttaggatgtacagcctagtgttaacattcttggtatctttttgtgccttatctaaaacatttctcgatcactggtttcagatgttcatttattatattcttttcaaagattcagagattggcttttgtcatccactattgtatgttttgtttcattgacctctagtgataccttgatctttcccactttctgttttcggattggagaagatgtaccttttttgtcaactcttacttttatcagatgatcaactcacgtatttggatctttatttgttttctcaaataaatatttaaggttatacatttcttctgacttcctttattttcacaatcattcaattcatagcatttcctatattctgttataattatttcattgattcataaatttctttgaaaaataatttggtcttctattgattgtgagaagataatctaagtttaatttggtcagagaatatcatctgtttaataaactttgaaatttggtgagtgaattatcttttttactgataa

SEQ ID NO: 204858 - DNA, 1851 bp, Homo sapiens
  Payload ID: 20408
  Gene Name: ZW10 interacting kinetochore protein
  Uniprot ID: O95229
  ENST ID: ENST00000395405
  CDS Start-End: 38-871
gattgtgggaaggcagctgaactcggcgcctggaaagatggaggcagcggagacagaggcggaagctgcagccctagaggtcctggctgaggtggcaggcatcttggaacctgtaggcctgcaggaggaggcagaactgccagccaagatcctggttgagtttgtggtggactctcagaagaaagacaagctgctctgcagccagcttcaggtagcggatttcctgcagaacatcctggctcaggaggacactgctaagggtctcgaccccttggcttctgaagacacgagccgacagaaggcaattgcagctaaggaacaatggaaagagctgaaggccacctacagggagcacgtagaggccatcaaaattggcctcaccaaggccctgactcagatggaggaagcccagaggaaacggacacaactccgggaagcctttgagcagctccaggccaagaaacaaatggccatggagaaacgcagagcagtccagaaccagtggcagctacaacaggagaagcatctgcagcatctggcggaggtttctgcagaggtgagggagcgtaagacagggactcagcaggagcttgacagggtgtttcagaaacttggaaacctgaagcagcaggcagaacaggagcgggacaagctgcagaggtatcagaccttcctccagcttctgtataccctgcagggtaagctgttgttccctgaggctgaggctgaggcagagaatcttccagatgataaaccccagcagccgactcgaccccaggagcagagtacaggagacaccatggggagagaccctggtgtgtccttcaaggctgttggtctacaacctgctggagatgtaaatttgccatgacttcctggaggacagcagcatggagaaagatcctagaaaaggtcagacccaactcaggccttggtgtccctggactgcaagtgtggaaggagggaaagcctggtttacctctctctgcatctgagctctgctacccatggagcagatggatggtgggaacaggaaagagcttatgttacacctcattcccatgcttagcccacccagagctaacccctgtcttcttccccaggcctctgacttccctcacctcccaaccatcattacaggaaagactgtgaactcctgagttcagcttgatttctgactacatcccagcaagctctggcatctgtggattaaaatccctggatctctctcagttgtgtatttgttcatcttcatatgctggcaggaacaactattaatacagatactcagaagccaataacatgacaggagctgggactggtttgaacacagggtgtgcagatggggagggggtactggccttgggcctcctatgatgcagacatggtgaatttaattcaaggaggaggagaatgttttaggcaggtggttatatgtgggaagataattttattcatggatccaaatgtttgttgagtcctttctttgtgctaaggttcttgcggtgaaccagaattataacagtgagctcatctgactgttttaggatgtacagcctagtgttaacattcttggtatctttttgtgccttatctaaaacatttctcgatcactggtttcagatgttcatttattatattcttttcaaagattcagagattggcttttgtcatccactattgtatgttttgtttcattgacctctagtgataccttgatctttcccactttctgttttcggattggagaagatgtaccttttttgtcaactcttacttttatcagatgatcaactcacgtatttggatctttatttgttttctcaaataaatatttaaggttatacattt

SEQ ID NO: 204859 - DNA, 1621 bp, Homo sapiens
  Payload ID: 20408
  Gene Name: ZW10 interacting kinetochore protein
  ENST ID: ENST00000489649
  CDS Start-End: 30-176
gaaggcagctgaactcggcgcctggaaagatggaggcagcggagacagaggcggaagctgcagccctagaggtcctggctgaggtggcaggcatcttggaacctgtaggcctgcaggaggaggcagaactgccagccaagatcctggttgagtttgtggtggtatgtacaagatgagagcgagcctttcagaagccagggtctggtcctggctcctcttactgagatacagggcagcactggcagagagcagacttaaggaaacctgtaaggaggtaaggatgttccctgtctctgccctccctctgagcaggactctcagaagaaagacaagctgctctgcagccagcttcaggtagcggatttcctgcagaacatcctggctcaggaggacactgctaagggtctcgaccccttggcttctgaagacacgagccgacagaaggcaattgcagctaaggaacaatggaaagagctgaaggccacctacagggagcacgtagaggccatcaaaattggcctcaccaaggccctgactcagatggaggaagcccagaggaaacggacacaactccgggaagcctttgagcagctccaggccaagaaacaaatggccatggagaaacgcagagcagtccagaaccagtggcagctacaacaggagaagcatctgcagcatctggcggaggtttctgcagagggtaagctgttgttccctgaggctgaggctgaggcagagaatcttccagatgataaaccccagcagccgactcgaccccaggagcagagtacaggagacaccatggggagagaccctggtgtgtccttcaaggctgttggtctacaacctgctggagatgtaaatttgccatgacttcctggaggacagcagcatggagaaagatcctagaaaaggcctctgacttccctcacctcccaaccatcattacaggaaagactgtgaactcctgagttcagcttgatttctgactacatcccagcaagctctggcatctgtggattaaaatccctggatctctctcagttgtgtatttgttcatcttcatatgctggcaggaacaactattaatacagatactcagaagccaataacatgacaggagctgggactggtttgaacacagggtgtgcagatggggagggggtactggccttgggcctcctatgatgcagacatggtgaatttaattcaaggaggaggagaatgttttaggcaggtggttatatgtgggaagataattttattcatggatccaaatgtttgttgagtcctttctttgtgctaaggttcttgcggtgaaccagaattataacagtgagctcatctgactgttttaggatgtacagcctagtgttaacattcttggtatctttttgtgccttatctaaaacatttctcgatcactggtttcagatgttcatttattatattcttttcaaagattcagagattggcttttgtcatccactattgtatgttttgtttcattgacctctagtgataccttgatctttcccactttctgttttcggattggagaagatgtaccttttttgtcaactcttacttttatcagatgatcaactcacgtatttggatc

SEQ ID NO: 204860 - DNA, 2992 bp, Homo sapiens
  Payload ID: 20409
  Gene Name: zw10 kinetochore protein
  Uniprot ID: O43264
  ENST ID: ENST00000200135
  CDS Start-End: 146-2485
agtgcgcccctcgccttccgggcggcggtctgaggcccgcgagactccgtttcccggcaggcctcgcgtcaagacggccggcgggacgggagctgcggcgctggctacgagagtgacccagtcagcgttggttcccgtcttggccatggcctcgttcgtgacagaagttttggcacactccgggaggctggaaaaggaggatctggggacccggatcagccgcctgacccggcgggtggaggagatcaagggtgaggtgtgcaatatgattagcaagaagtacagtgaattcctgcctagcatgcagagcgcgcagggcctgattacccaggtggataagctatctgaagacattgacctgctgaaatccaggatagagagtgaggtccgccgggatcttcacgtatcaaccggtgaatttacagacttaaagcagcagttggaaagagactcagttgtcctaagtttgcttaaacagttgcaggagttttccactgctattgaagaatataattgtgcattaacagagaagaagtatgtcactggtgctcagcgtctggaagaggcacagaaatgcttgaagttattaaaatccagaaaatgctttgatttaaaaatattgaaatctctcagcatggagctcacaatacagaaacagaacatactttatcaccttggagaagagtggcagaagctgattgtatggaagttcccaccatcaaaagataccagcagtttggaatcttacctacaaactgaacttcatttatacactgaacaatcgcacaaagaggagaagacccctatgccacccatcagttctgtcctcttggcattttctgttcttggagaactacacagcaagcttaaatcatttggtcagatgctgctgaagtatatccttaggccgctggcatcttgcccatcccttcatgctgtgatagaaagccagcctaacatagttattattcgttttgaatctataatgactaacttggaatatccatcaccatctgaagtttttacaaagatcagactggtactagaagtgctccagaaacagcttctagatttgccacttgacactgacctggaaaatgaaaaaacatctactgtcccattggctgagatgcttggagacatgatctgggaggacttgtctgagtgcctcatcaaaaactgtttggtttattcgattccaacaaatagcagcaaattacagcaatatgaagagatcatacagtccactgaagaatttgaaaatgccctaaaggaaatgagatttttaaaaggagatactacagatttgctgaaatacgctcgtaacatcaattctcattttgcaaacaaaaagtgccaggatgtgattgtggcagccagaaatctaatgacctcagaaattcataacactgtgaagattattcctgattctaagataaatgtgccagagttacccactcctgatgaggataacaaactggaagtacagaaagtatccaatactcagtaccacgaagtgatgaatttagagcctgaaaatacattggaccaacattccttttccttgcccacatgccgtatcagtgagtctgtgaagaaattaatggaactcgcctatcagactttactagaggcaacaaccagtagtgatcaatgtgctgttcaacttttctactcagtgaggaatatcttccatttgttccatgatgttgtaccaacatatcacaaggagaaccttcaaaaacttccccagttggctgctattcatcacaacaactgtatgtacattgctcaccacttgctgaccctcgggcatcagttcagattgcgtcttgcccccattctttgtgatggcactgctacttttgtggatcttgtacctggcttcaggagacttgggacagaatgctttttggcccaaatgcgggcacagaaaggtgaacttctggaaagattatcaagtgctaggaacttttcaaatatggacgatgaagagaattattctgcagcaagtaaagcagtccggcaggtactgcaccaactaaagagacttggaattgtgtggcaggatgtcctgccagtgaatatatattgcaaggctatggggactttactcaatacagcaatttctgaggtcattggcaaaattactgccctagaggacatatctactgaagatggtgataggttatattccttatgcaaaacagtgatggatgaaggaccccaagtatttgcacctttatctgaagaaagcaagaacaagaaatatcaagaagaggttccagtctatgtgccaaaatggatgccattcaaggaattgatgatgatgctacaagccagcttgcaagaaattggggatcggtgggcagatggaaaaggacccctggcagctgcgttctcttccagtgaagtaaaagctttaattcgtgccttgtttcagaacacagaaagaagagcagctgcccttgctaaaattaaatagctccatcttcttaagaaagctatgtcttgaatatgtggattcttcccttggcataattactcccttaaagacttctttgaatcgcccattggttttggtgaaccagtacatcttggaagtttgactttacagaagaacgtcttacctcctggcctgtacgaggctttgtttaagaactgtttattaagataaattgtcaagtaaagcacctcaattcattgactttctagccatcttcctttgattagctaacaaactgtcaggcagcattatttcatgctgcttccagagccctctgggagctatatacattgtaaatgcaggccctagctttggaacgaggaattgggagattccaggagtcagggtagagaatttctgagcaaatcggagatattttaggggtgtggaggaggggaagggaggaatgggccaccatatttggccttacaggaattaaggagacttcctgtaatatttctttccaataaatattgctttttacaa

SEQ ID NO: 204861 - DNA, 892 bp, Homo sapiens
  Payload ID: 20409
  Gene Name: zw10 kinetochore protein
  ENST ID: ENST00000538209
  CDS Start-End: 70-477
gccggcgggacgggagctgcggcgctggctacgagagtgacccagtcagcgttggttcccgtcttggccatggcctcgttcgtgacagaagttttggcacactccgggaggctggaaaaggaggatctggggacccggatcagccgcctgacccggcgggtggaggagatcaagggtgaggtgtgcaatatgattagcaagaagtacagtgaattcctgcctagcatgcagagcgcgcagggcctgattacccaggtggataagctatctgaagacattgacctgctgaaatccaggatagagagtgagataccagcagtttggaatcttacctacaaactgaacttcatttatacactgaacaatcgcacaaagaggagaagacccctatgccacccatcagttctgtcctcttggcattttctgttcttggagaactacacagcaagcttaaatcatttggtcagatgctgctgaagtatatccttaggccgctggcatcttgcccatcccttcatgctgtgatagaaagccagcctaacatagttattattcgttttgaatctataatgactaacttggaatatccatcaccatctgaagtttttacaaagatcagactggtactagaagtgctccagaaacagcttctagatttgccacttgacactgacctggaaaatgaaaaaacatctactgtcccattggctgagatgcttggagacatgatctgggaggacttgtctgagtgcctcatcaaaaactgtttggtttattcgattccaacaaatagcagcaaattacagcaatatgaagagatcatacagtccactgaagaatttgaaaatgccctaaaggaaatgagatttttaaaaggagatactacagattt

SEQ ID NO: 204862 - DNA, 2735 bp, Homo sapiens
  Payload ID: 20409
  Gene Name: zw10 kinetochore protein
  Uniprot ID: O43264
  ENST ID: ENST00000535142
  CDS Start-End: 26-2044
gtcagcgttggttcccgtcttggccatggcctcgttcgtgacagaagttttggcacactccgggaggctggaaaaggaggatctggggacccggatcagccgcctgacccggcgggtggaggagatcaagggtgaggtgtgcaatatgattagcaagaagtacagtgaattcctgcctagcatgcagagcgcgcagggcctgattacccaggtggataagctatctgaagacattgacctgctgaaatccaggatagagagtgaggtccgccgggatcttcacgtatcaaccggtgaatttacagacttaaagcagcagttggaaagagactcagttgtcctaagtttgcttaaacagttgcaggagttttccactgctattgaagaatataattgtgcattaacagagaagaagtatgtcactggtgctcagcgtctggaagaggcacagaaatgcttgaagttattaaaatccagaaaatgctttgatttaaaaatattgaaatctctcagcatggagctcacaatacagaaacagaacatactttatcaccttggagaagagtggcagaagctgattgtatggaagttcccaccatcaaaagataccagcagtttggaatcttacctacaaactgaacttcatttatacactgaacaatcgcacaaagaggagaagacccctatgccacccatcagttctgtcctcttggcattttctgttcttggagaactacacagcaagcttaaatcatttggtcagatgctgctgaagtatatccttaggccgctggcatcttgcccatcccttcatgctgtgatagaaagccagcctaacatagttattattcgttttgaatctataatgactaacttggaatatccatcaccatctgaagtttttacaaagatcagactggtactagaagtgctccagaaacagcttctagatttgccacttgacactgacctggaaaatgaaaaaacatctactgtcccattggctgagatgcttggagacatgatctgggaggacttgtctgagtgcctcatcaaaaactgtttggtttattcgattccaacaaatagcagcaaattacagcaatatgaagagatcatacagtccactgaagaatttgaaaatgccctaaaggaaatgagatttttaaaaggagatactacagatttgctgaaatacgctcgtaacatcaattctcattttgcaaacaaaaagtgccaggatgtgattgtggcagccagaaatctaatgacctcagaaattcataacactgtgaagattattcctgattctaagataaatgtgccagagttacccactcctgatgaggataacaaactggaagtacagaaagtatccaatactcagtaccacgaagtgatgaatttagagcctgaaaatacattggaccaacattccttttccttgcccacatgccgtatcagtgagtctgtgaagaaattaatggaactcgcctatcagactttactagaggcaacaaccagtagtgatcaatgtgctgttcaacttttctactcagtgaggaatatcttccatttgttccatgatgttgtaccaacatatcacaaggagaaccttcaaaaacttccccagttggctgctattcatcacaacaactgtatgtacattgctcaccacttgctgaccctcgggcatcagttcagattgcgtcttgcccccattctttgtgatggcactgctacttttgtggatcttgtacctggcttcaggagacttgggacagaatgctttttggcccaaatgcgggcacagaaaggtgaacttctggaaagattatcaagtgctaggaacttttcaaatatggacgatgaagagaattattctgcagcaagtaaagcagtccggcaggtactgcaccaactaaagagacttggaattgtgtggcaggatgtcctgccagtgaatatatattgcaaggctatggggactttactcaatacagcaatttctgaggtcattggcaaaattactgccctagagtgatggatgaaggaccccaagtatttgcacctttatctgaagaaagcaagaacaagaaatatcaagaagaggttccagtctatgtgccaaaatggatgccattcaaggaattgatgatgatgctacaagccagcttgcaagaaattggggatcggtgggcagatggaaaaggacccctggcagctgcgttctcttccagtgaagtaaaagctttaattcgtgccttgtttcagaacacagaaagaagagcagctgcccttgctaaaattaaatagctccatcttcttaagaaagctatgtcttgaatatgtggattcttcccttggcataattactcccttaaagacttctttgaatcgcccattggttttggtgaaccagtacatcttggaagtttgactttacagaagaacgtcttacctcctggcctgtacgaggctttgtttaagaactgtttattaagataaattgtcaagtaaagcacctcaattcattgactttctagccatcttcctttgattagctaacaaactgtcaggcagcattatttcatgctgcttccagagccctctgggagctatatacattgtaaatgcaggccctagctttggaacgaggaattgggagattccaggagtcagggtagagaatttctgagcaaatcggagatattttaggggtgtggaggagggga

SEQ ID NO: 204863 - DNA, 3960 bp, Homo sapiens
  Payload ID: 20410
  Gene Name: zwilch kinetochore protein
  Uniprot ID: Q9H900
  ENST ID: ENST00000307897
  CDS Start-End: 381-2156
taaaaacgagagtgttatttctttatttgtgggaaattacggtatctattttcttccaaacgtaataataattcttagaaaatagggactcctttttgcggaataatccatagggggcgaggccaactctcgcgagtcgaggtatcttctccccaaccactgctcttattttaattattgcagacggaagttgaagactattgacatagtaaatagctctgggtggcttgaaacgaaagtttaactttgcggacaaacaggacttattgtagggggtggtcaaaatagtcccggcggggcggggccatgacccctgacgtcgccggtccggcgcgcagttcagtttggcggttccggtaccgctctcacattggggcgggatgtgggagcggctgaactgcgcagcagaggacttttattctcgtctccttcagaaatttaatgaagaaaagaaaggaatccgtaaagacccatttctctatgaggctgatgtccaagtgcagttgatcagcaaaggccaaccaaaccctttgaaaaatattctaaatgaaaatgacatagtattcatagtggaaaaagtgcctttagaaaaggaagaaacaagtcatattgaagaacttcaatctgaagaaactgccatatctgatttctctactggcgaaaatgttggaccacttgctttaccagttgggaaggcaaggcagttaattggactttacaccatggctcacaatcctaatatgacccatttgaagattaatctgccagttactgcccttcctcccctttgggtaagatgtgacagttcagatcctgaaggtacttgttggctaggagctgagcttatcacaacaaacaacagcattacaggaattgtcttatatgtggtcagttgtaaagctgataaaaattattctgtaaatcttgaaaacctaaaaaatttacacaagaaaagacatcacttgtctactgtaacatccaaaggctttgcccagtatgagctctttaagtcctctgccttggatgatacaatcacagcatcacaaactgcgatcgctttggatatttcctggagtcctgtggatgagattcttcaaatccctccactctcttcaactgcaactctgaatattaaagtggaatcaggagagcccagaggtcctttgaatcatctctacagagaactgaaatttcttcttgttttggctgatggtttgaggactggtgtcactgaatggctcgagcccctggaagcaaaatctgctgttgaacttgttcaggaatttctgaatgacttaaataagctggatggatttggtgattctacaaaaaaagacactgaggttgagaccttgaagcatgacactgctgcagtcgatcgttccgtcaagcgtcttttcaaagttcggagtgatcttgattttgctgagcaactgtggtgcaaaatgagcagtagtgtgatttcataccaagacttggtgaagtgtttcacattgatcatccagagtctacaacgtggtgatatacagccatggctccatagtggaagtaacagtttactaagtaagctcattcatcagtcttatcatggaaccatggacacagtttctctcagtgggactattccagttcaaatgcttttggaaattggtttggacaaactaaagaaagattatatcagttttttcataggtcaggaacttgcatctttgaatcatttggaatacttcattgctccatcagtagatatacaagaacaggtttatcgtgtccaaaaactccaccatattctagaaatattagtcagttgcatgcctttcattaaatctcaacatgaactcctcttttctttaacacagatctgcataaagtattacaaacaaaatcctcttgatgagcaacacatttttcagctgccagtcagaccaactgctgtaaagaacttatatcaaagtgagaagccacagaaatggagagtggaaatatatagtggtcaaaagaagattaagacagtttggcaactgagtgacagctcacccatagaccatctgaattttcacaaacctgatttttcggaattaacactaaacggtagcctggaagaaaggatattctttactaacatggttacctgcagccaggtgcatttcaagtgaagtgtgctgatgaagtcctctataagcacaagccaaaaagagaaagagaaaaaaaggtaattattgtagaacctgaaaacagcaatgtatggaaaccctcaaagcagaaaagggaggaagatcctgaagattctcttatgaagctccaaaattgataatcctgtctcagctctgcctcctcaggaggagcattagtagaacagcagtgatgaggacacagagggagcagacagtgggtaccacgatctccgtaaccatttgcatgtgacttagcaagggctctgaaatgacaaagagaacgagcaccacaaatgagaacaggatcattttagtaaatacagctttatcccaaaagctttaactgtattgggaaaacttaaaaaatagcatcctcaaattttctgattcttatttgccatgaaatagaacttagtaaattaaatgttatttgaaaatgttataagagctttgtaaatatttcagaaaatatgggataaatgcctgaatttggttcttctacaggtgctataataaagtccatctctcaatacttatactttctaaattcatctcagaatattagcagccatattccacagttcctataatttttactgggggggatttgtgataggaaagtccttgggaaacatttccaatctttcaaaatattattgtgtatcttaagaagtataggaacttgtatgttgaaatgttgtatggtagttcttgtatagttaaataataatctttttaagagttaatgataagcatatgttatgtgcattattaataaaatagtggccacttaggtaatacccacttttatcttgtgtgctgggtactctggttactgagataaataaggcactggacatcctcacgtggagttcacaggctcatcagtgaattctgtaccacatttcaaccttgtttattttagtttaatggaatatacattcttagtattgcctgattatttaaatttgttgagggggattgcatgttgctttattggcctgtaaaaatagctagtttggtaagatttggtctcgcaccttccatctttgctaccacattaaagatgagcttgttaaaaaggaaagcatatttctctgattgcccttatggagaaataaagataaaattcaaagaaacaaataatatgtgttggcatttcttgatgcatagttgcatctttgttattcgacatctctgatccttttagaccccattacataggaaatgatgtcttctatgaagacagggaccttgttttgttcctggctatatctcatgacttaaacattccctggcaaatagtgagtgcttaataattgcttgccgaatgaacaaatataagatctcaagtattcttttttccttcatcccagttggtatagtggttggcttttcctctccttgcccaagcccactataacaaaaatagtaggtatataaatttataggtatgattctgaaagaataaaacttgaatggataaaatggataaaatgtttatctttcatggtagattaaatgctttaaaatgcttataaatagaaatttgacattgcttcaaagaaacctgattttaatcataagtagttttggaagattgacttcaagtagagccacattttgagattttgaaaatgatatgtataattatttagtttaattattaaaggaaaacattgaaatatactgactcacctgcagcaagcatctgattgttgatagagcaagtttccaaagctttgaggtaccaactttccacctaataaaaacccacttgataagt

SEQ ID NO: 204864 - DNA, 3256 bp, Homo sapiens
  Payload ID: 20410
  Gene Name: zwilch kinetochore protein
  Uniprot ID: Q9H900
  ENST ID: ENST00000446801
  CDS Start-End: 660-2093
actgctcttattttaattattgcagacggaagttgaagactattgacatagtaaatagctctgggtggcttgaaacgaaagtttaactttgcggacaaacaggacttattgtagggggtggtcaaaatagtcccggcggggcggggccatgacccctgacgtcgccggtccggcgcgcagttcagtttggcggttccggtaccgctctcacattggggcgggatgtgggagcggctgaactgcgcagcagaggacttttattctcgtctccttcagtgtcctgcagagataaagtgatgactgactcctgagtgtgaataacgggagagataatgtagttctgtttttcacatgtggttctgcgtttcaggaaatttaatgaagaaaagaaaggaatccgtaaagacccatttctctatgaggctgatgtccaagtgcagttgatcagcaaaggccaaccaaaccctttgaaaaatattctaaatgaaaatgacatagtattcatagtggaaaaagtgcctttagaaaaggaagaaacaagtcatattgaagaacttcaatctgaagaaactgccatatctgatttctctactggcgaaaatgttggaccacttgctttaccagttgggaaggcaaggcagttaattggactttacaccatggctcacaatcctaatatgacccatttgaagattaatctgccagttactgcccttcctcccctttgggtaagatgtgacagttcagatcctgaaggtacttgttggctaggagctgagcttatcacaacaaacaacagcattacaggaattgtcttatatgtggtcagttgtaaagctgataaaaattattctgtaaatcttgaaaacctaaaaaatttacacaagaaaagacatcacttgtctactgtaacatccaaaggctttgcccagtatgagctctttaagtcctctgccttggatgatacaatcacagcatcacaaactgcgatcgctttggatatttcctggagtcctgtggatgagattcttcaaatccctccactctcttcaactgcaactctgaatattaaagtggaatcaggagagcccagaggtcctttgaatcatctctacagagaactgaaatttcttcttgttttggctgatggtttgaggactggtgtcactgaatggctcgagcccctggaagcaaaatctgctgttgaacttgttcaggaatttctgaatgacttaaataagctggatggatttggtgattctacaaaaaaagacactgaggttgagaccttgaagcatgacactgctgcagtcgatcgttccgtcaagcgtcttttcaaagttcggagtgatcttgattttgctgagcaactgtggtgcaaaatgagcagtagtgtgatttcataccaagacttggtgaagtgtttcacattgatcatccagagtctacaacgtggtgatatacagccatggctccatagtggaagtaacagtttactaagtaagctcattcatcagtcttatcatggaaccatggacacagtttctctcagtgggactattccagttcaaatgcttttggaaattggtttggacaaactaaagaaagattatatcagttttttcataggtcaggaacttgcatctttgaatcatttggaatacttcattgctccatcagtagatatacaagaacaggtttatcgtgtccaaaaactccaccatattctagaaatattagtcagttgcatgcctttcattaaatctcaacatgaactcctcttttctttaacacagatctgcataaagtattacaaacaaaatcctcttgatgagcaacacatttttcagctgccagtcagaccaactgctgtaaagaacttatatcaaagtgagaagccacagaaatggagagtggaaatatatagtggtcaaaagaagattaagacagtttggcaactgagtgacagctcacccatagaccatctgaattttcacaaacctgatttttcggaattaacactaaacggtagcctggaagaaaggatattctttactaacatggttacctgcagccaggtgcatttcaagtgaagtgtgctgatgaagtcctctataagcacaagccaaaaagagaaagagaaaaaaaggtaattattgtagaacctgaaaacagcaatgtatggaaaccctcaaagcagaaaagggaggaagatcctgaagattctcttatgaagctccaaaattgataatcctgtctcagctctgcctcctcaggaggagcattagtagaacagcagtgatgaggacacagagggagcagacagtgggtaccacgatctccgtaaccatttgcatgtgacttagcaagggctctgaaatgacaaagagaacgagcaccacaaatgagaacaggatcattttagtaaatacagctttatcccaaaagctttaactgtattgggaaaacttaaaaaatagcatcctcaaattttctgattcttatttgccatgaaatagaacttagtaaattaaatgttatttgaaaatgttataagagctttgtaaatatttcagaaaatatgggataaatgcctgaatttggttcttctacaggtgctataataaagtccatctctcaatacttatactttctaaattcatctcagaatattagcagccatattccacagttcctataatttttactgggggggatttgtgataggaaagtccttgggaaacatttccaatctttcaaaatattattgtgtatcttaagaagtataggaacttgtatgttgaaatgttgtatggtagttcttgtatagttaaataataatctttttaagagttaatgataagcatatgttatgtgcattattaataaaatagtggccacttaggtaatacccacttttatcttgtgtgctgggtactctggttactgagataaataaggcactggacatcctcacgtggagttcacaggctcatcagtgaattctgtaccacatttcaaccttgtttattttagtttaatggaatatacattcttagtattgcctgattatttaaatttgttgagggggattgcatgttgctttattggcctgtaaaaatagctagtttggtaagatttggtctcgcaccttccatctttgctaccacattaaagatgagcttgttaaaaaggaaagcatatttctctgattgcccttatggagaaataaagataaaattcaaagaaacaaata

SEQ ID NO: 204865 - DNA, 2206 bp, Homo sapiens
  Payload ID: 20410
  Gene Name: zwilch kinetochore protein
  Uniprot ID: Q9H900
  ENST ID: ENST00000535141
  CDS Start-End: 671-2104
taaaaacgagagtgttatttctttatttgtgggaaattacggtatctattttcttccaaacgtaataataattcttagaaaatagggactcctttttgcggaataatccatagggggcgaggccaactctcgcgagtcgaggtatcttctccccaaccactgctcttattttaattattgcagacggaagttgaagactattgacatagtaaatagctctgggtggcttgaaacgaaagtttaactttgcggacaaacaggacttattgtagggggtggtcaaaatagtcccggcggggcggggccatgacccctgacgtcgccggtccggcgcgcagttcagtttggcggttccggtaccgctctcacattggggcgggatgtgggagcggctgaactgcgcagcagaggacttttattctcgtctccttcagctgatgtccaagtgcagttgatcagcaaaggccaaccaaaccctttgaaaaatattctaaatgaaaatgacatagtattcatagtggaaaaagtgcctttagaaaaggaagaaacaagtcatattgaagaacttcaatctgaagaaactgccatatctgatttctctactggcgaaaatgttggaccacttgctttaccagttgggaaggcaaggcagttaattggactttacaccatggctcacaatcctaatatgacccatttgaagattaatctgccagttactgcccttcctcccctttgggtaagatgtgacagttcagatcctgaaggtacttgttggctaggagctgagcttatcacaacaaacaacagcattacaggaattgtcttatatgtggtcagttgtaaagctgataaaaattattctgtaaatcttgaaaacctaaaaaatttacacaagaaaagacatcacttgtctactgtaacatccaaaggctttgcccagtatgagctctttaagtcctctgccttggatgatacaatcacagcatcacaaactgcgatcgctttggatatttcctggagtcctgtggatgagattcttcaaatccctccactctcttcaactgcaactctgaatattaaagtggaatcaggagagcccagaggtcctttgaatcatctctacagagaactgaaatttcttcttgttttggctgatggtttgaggactggtgtcactgaatggctcgagcccctggaagcaaaatctgctgttgaacttgttcaggaatttctgaatgacttaaataagctggatggatttggtgattctacaaaaaaagacactgaggttgagaccttgaagcatgacactgctgcagtcgatcgttccgtcaagcgtcttttcaaagttcggagtgatcttgattttgctgagcaactgtggtgcaaaatgagcagtagtgtgatttcataccaagacttggtgaagtgtttcacattgatcatccagagtctacaacgtggtgatatacagccatggctccatagtggaagtaacagtttactaagtaagctcattcatcagtcttatcatggaaccatggacacagtttctctcagtgggactattccagttcaaatgcttttggaaattggtttggacaaactaaagaaagattatatcagttttttcataggtcaggaacttgcatctttgaatcatttggaatacttcattgctccatcagtagatatacaagaacaggtttatcgtgtccaaaaactccaccatattctagaaatattagtcagttgcatgcctttcattaaatctcaacatgaactcctcttttctttaacacagatctgcataaagtattacaaacaaaatcctcttgatgagcaacacatttttcagctgccagtcagaccaactgctgtaaagaacttatatcaaagtgagaagccacagaaatggagagtggaaatatatagtggtcaaaagaagattaagacagtttggcaactgagtgacagctcacccatagaccatctgaattttcacaaacctgatttttcggaattaacactaaacggtagcctggaagaaaggatattctttactaacatggttacctgcagccaggtgcatttcaagtgaagtgtgctgatgaagtcctctataagcacaagccaaaaagagaaagagaaaaaaaggtaattattgtagaacctgaaaacagcaatgtatggaaaccctcaa

SEQ ID NO: 204866 - DNA, 1845 bp, Homo sapiens
  Payload ID: 20410
  Gene Name: zwilch kinetochore protein
  Uniprot ID: Q9H900
  ENST ID: ENST00000565627
  CDS Start-End: 386-1819
agttcagtttggcggttccggtaccgctctcacattggggcgggatgtgggagcggctgaactgcgcagcagaggacttttattctcgtctccttcagtgtcctgcagagataaagtgatgactgactcctgagtgtgaataacgggagagataatgtagttctgtttttcacatgtggttctgcgtttcaggaaatttaatgaagaaaagaaaggaatccgtaaagacccatttctctatgagcctttagaaaaggaagaaacaagtcatattgaagaacttcaatctgaagaaactgccatatctgatttctctactggcgaaaatgttggaccacttgctttaccagttgggaaggcaaggcagttaattggactttacaccatggctcacaatcctaatatgacccatttgaagattaatctgccagttactgcccttcctcccctttgggtaagatgtgacagttcagatcctgaaggtacttgttggctaggagctgagcttatcacaacaaacaacagcattacaggaattgtcttatatgtggtcagttgtaaagctgataaaaattattctgtaaatcttgaaaacctaaaaaatttacacaagaaaagacatcacttgtctactgtaacatccaaaggctttgcccagtatgagctctttaagtcctctgccttggatgatacaatcacagcatcacaaactgcgatcgctttggatatttcctggagtcctgtggatgagattcttcaaatccctccactctcttcaactgcaactctgaatattaaagtggaatcaggagagcccagaggtcctttgaatcatctctacagagaactgaaatttcttcttgttttggctgatggtttgaggactggtgtcactgaatggctcgagcccctggaagcaaaatctgctgttgaacttgttcaggaatttctgaatgacttaaataagctggatggatttggtgattctacaaaaaaagacactgaggttgagaccttgaagcatgacactgctgcagtcgatcgttccgtcaagcgtcttttcaaagttcggagtgatcttgattttgctgagcaactgtggtgcaaaatgagcagtagtgtgatttcataccaagacttggtgaagtgtttcacattgatcatccagagtctacaacgtggtgatatacagccatggctccatagtggaagtaacagtttactaagtaagctcattcatcagtcttatcatggaaccatggacacagtttctctcagtgggactattccagttcaaatgcttttggaaattggtttggacaaactaaagaaagattatatcagttttttcataggtcaggaacttgcatctttgaatcatttggaatacttcattgctccatcagtagatatacaagaacaggtttatcgtgtccaaaaactccaccatattctagaaatattagtcagttgcatgcctttcattaaatctcaacatgaactcctcttttctttaacacagatctgcataaagtattacaaacaaaatcctcttgatgagcaacacatttttcagctgccagtcagaccaactgctgtaaagaacttatatcaaagtgagaagccacagaaatggagagtggaaatatatagtggtcaaaagaagattaagacagtttggcaactgagtgacagctcacccatagaccatctgaattttcacaaacctgatttttcggaattaacactaaacggtagcctggaagaaaggatattctttactaacatggttacctgcagccaggtgcatttcaagtgaagtgtgctgatgaagtcctctataag

SEQ ID NO: 204867 - DNA, 355 bp, Homo sapiens
  Payload ID: 20410
  Gene Name: zwilch kinetochore protein
  ENST ID: ENST00000569489
  CDS Start-End: 1-147
acagtttggcaactgagtgacagctcacccatagaccatctgaattttcacaaacctgatttttcggaattaacactaaacggtagcctggaagaaaggatattctttactaacatggttacctgcagccaggtgcatttcaagtgaagtgtgctgatgaagtcctctataaggtatttatgttcacattttagtctctttgtcaaatactttgtaataagtaccttacgtttagttctttctacattatcaatgtcgatttgctacattaggaatagggattattagtaatcacataaaaggcttaccagttgttattgagcagtgcaactctttaattttctttctacctttt

SEQ ID NO: 204868 - DNA, 373 bp, Homo sapiens
  Payload ID: 20410
  Gene Name: zwilch kinetochore protein
  ENST ID: ENST00000567816
  CDS Start-End: 1-297
atctgcataaagtattacaaacaaaatcctcttgatgagcaacacatttttcagctgccagtcagaccaactgctgtaaagaacttatatcaaagtgagaagccacagaaatggagagtggaaatatatagtggtcaaaagaagattaagacagtttggcaactgagtgacagctcacccatagaccatctgaattttcacaaacctgatttttcggaattaacactaaacggtagcctggaagaaaggatattctttactaacatggttacctgcagccaggtgcatttcaagtgaagtgtgctgatgaagtcctctataaggctggagtgcagtggcgctatctcggctcactgcaagctccgcctcccag

SEQ ID NO: 204869 - DNA, 582 bp, Homo sapiens
  Payload ID: 20410
  Gene Name: zwilch kinetochore protein
  ENST ID: ENST00000564179
  CDS Start-End: 330-582
agtttggcggttccggtaccgctctcacattggggcgggatgtgggagcggctgaactgcgcagcagaggacttttattctcgtctccttcagctgatgtccaagtgcagttgatcagcaaaggccaaccaaaccctttgaaaaatattctaaatgaaaatgacatagtattcatagtggaaaaagtgcctttagaaaaggaagaaacaagtcatattgaagaacttcaatctgaagaaactgccatatctgatttctctactggcgaaaatgttggaccacttgctttaccagttgggaaggcaaggcagttaattggactttacaccatggctcacaatcctaatatgacccatttgaagattaatctgccagttactgcccttcctcccctttgggtaagatgtgacagttcagatcctgaaggtacttgttggctaggagctgagcttatcacaacaaacaacagcattacaggaattgtcttatatgtggtcagttgtaaagctgataaaaattattctgtaaatcttgaaaacctaaaaaatttacacaagaaaagacatcacttgtctactgtaa

SEQ ID NO: 204870 - DNA, 3181 bp, Homo sapiens
  Payload ID: 20410
  Gene Name: zwilch kinetochore protein
  Uniprot ID: Q9H900
  ENST ID: ENST00000613446
  CDS Start-End: 598-2031
aactctcgcgagtcgaggtatcttctccccaaccactgctcttattttaattattgcagacggaagttgaagactattgacatagtaaatagctctgggtggcttgaaacgaaagtttaactttgcggacaaacaggacttattgtagggggtggtcaaaatagtcccggcggggcggggccatgacccctgacgtcgccggtccggcgcgcagttcagtttggcggttccggtaccgctctcacattggggcgggatgtgggagcggctgaactgcgcagcagaggacttttattctcgtctccttcagtgtcctgcagagataaagtgatgactgactcctgagtgtgaataacgggagagataatgtagttctgtttttcacatgtggttctgcgtttcaggaaatttaatgaagaaaagaaaggaatccgtaaagacccatttctctatgagcctttagaaaaggaagaaacaagtcatattgaagaacttcaatctgaagaaactgccatatctgatttctctactggcgaaaatgttggaccacttgctttaccagttgggaaggcaaggcagttaattggactttacaccatggctcacaatcctaatatgacccatttgaagattaatctgccagttactgcccttcctcccctttgggtaagatgtgacagttcagatcctgaaggtacttgttggctaggagctgagcttatcacaacaaacaacagcattacaggaattgtcttatatgtggtcagttgtaaagctgataaaaattattctgtaaatcttgaaaacctaaaaaatttacacaagaaaagacatcacttgtctactgtaacatccaaaggctttgcccagtatgagctctttaagtcctctgccttggatgatacaatcacagcatcacaaactgcgatcgctttggatatttcctggagtcctgtggatgagattcttcaaatccctccactctcttcaactgcaactctgaatattaaagtggaatcaggagagcccagaggtcctttgaatcatctctacagagaactgaaatttcttcttgttttggctgatggtttgaggactggtgtcactgaatggctcgagcccctggaagcaaaatctgctgttgaacttgttcaggaatttctgaatgacttaaataagctggatggatttggtgattctacaaaaaaagacactgaggttgagaccttgaagcatgacactgctgcagtcgatcgttccgtcaagcgtcttttcaaagttcggagtgatcttgattttgctgagcaactgtggtgcaaaatgagcagtagtgtgatttcataccaagacttggtgaagtgtttcacattgatcatccagagtctacaacgtggtgatatacagccatggctccatagtggaagtaacagtttactaagtaagctcattcatcagtcttatcatggaaccatggacacagtttctctcagtgggactattccagttcaaatgcttttggaaattggtttggacaaactaaagaaagattatatcagttttttcataggtcaggaacttgcatctttgaatcatttggaatacttcattgctccatcagtagatatacaagaacaggtttatcgtgtccaaaaactccaccatattctagaaatattagtcagttgcatgcctttcattaaatctcaacatgaactcctcttttctttaacacagatctgcataaagtattacaaacaaaatcctcttgatgagcaacacatttttcagctgccagtcagaccaactgctgtaaagaacttatatcaaagtgagaagccacagaaatggagagtggaaatatatagtggtcaaaagaagattaagacagtttggcaactgagtgacagctcacccatagaccatctgaattttcacaaacctgatttttcggaattaacactaaacggtagcctggaagaaaggatattctttactaacatggttacctgcagccaggtgcatttcaagtgaagtgtgctgatgaagtcctctataagcacaagccaaaaagagaaagagaaaaaaaggtaattattgtagaacctgaaaacagcaatgtatggaaaccctcaaagcagaaaagggaggaagatcctgaagattctcttatgaagctccaaaattgataatcctgtctcagctctgcctcctcaggaggagcattagtagaacagcagtgatgaggacacagagggagcagacagtgggtaccacgatctccgtaaccatttgcatgtgacttagcaagggctctgaaatgacaaagagaacgagcaccacaaatgagaacaggatcattttagtaaatacagctttatcccaaaagctttaactgtattgggaaaacttaaaaaatagcatcctcaaattttctgattcttatttgccatgaaatagaacttagtaaattaaatgttatttgaaaatgttataagagctttgtaaatatttcagaaaatatgggataaatgcctgaatttggttcttctacaggtgctataataaagtccatctctcaatacttatactttctaaattcatctcagaatattagcagccatattccacagttcctataatttttactgggggggatttgtgataggaaagtccttgggaaacatttccaatctttcaaaatattattgtgtatcttaagaagtataggaacttgtatgttgaaatgttgtatggtagttcttgtatagttaaataataatctttttaagagttaatgataagcatatgttatgtgcattattaataaaatagtggccacttaggtaatacccacttttatcttgtgtgctgggtactctggttactgagataaataaggcactggacatcctcacgtggagttcacaggctcatcagtgaattctgtaccacatttcaaccttgtttattttagtttaatggaatatacattcttagtattgcctgattatttaaatttgttgagggggattgcatgttgctttattggcctgtaaaaatagctagtttggtaagatttggtctcgcaccttccatctttgctaccacattaaagatgagcttgttaaaaaggaaagcatatttctctgattgcccttatggagaaataaagataaaattc

SEQ ID NO: 204871 - DNA, 2579 bp, Homo sapiens
  Payload ID: 20411
  Gene Name: ZXD family zinc finger C
  Uniprot ID: Q2QGD7
  ENST ID: ENST00000336332
  CDS Start-End: 1-2133
atggacctcccggcgctgctccccgccccgactgcgcgcggagggcaacatggcggcggccccggcccgctccgccgagccccagcgccgctcggcgcgagccccgcgcgccgccgcctgctactggtgcggggccctgaagatggcgggcccggggcgcggcccggggaggcctccgggccaagcccgccgcccgccgaggacgacagcgacggcgactctttcttggtgctgctggaagtgccgcacggcggcgctgccgccgaggctgccggatcacaggaggccgagcctggctcccgtgtcaacctggcgagccgccccgagcagggccccagcggcccggccgccccccccggccctggcgtagccccggcgggcgccgtcaccatcagcagccaggacctgctggtgcgtctcgaccgcggcgtcctcgcgctgtctgcgccgcccggccccgcaaccgcgggcgccgccgctccccgccgcgcgccccaggcctccggccccagcacgcccggctaccgctgccccgagccgcagtgcgcgctggccttcgccaagaagcaccagctcaaggtgcacctgctcacgcacggcggcggtcagggccggcggcccttcaagtgcccactggagggctgtggttgggccttcacaacgtcctacaagctcaagcggcacctgcagtcgcacgacaagctgcggcccttcggctgtccagtgggcggctgtggcaagaagttcactacggtctataacctcaaggcgcacatgaagggccacgagcaggagagcctgttcaagtgcgaggtgtgcgccgagcgcttccccacgcacgccaagctcagctcccaccagcgcagccacttcgagcccgagcgcccttacaagtgtgactttcccggctgtgagaagacatttatcacagtgagtgccctgttttcccataaccgagcccacttcagggaacaagagctcttttcctgctcctttcctgggtgcagcaagcagtatgataaagcctgtcggctgaaaattcacctgcggagccatacaggtgaaagaccatttatttgtgactctgacagctgtggctggaccttcaccagcatgtccaaacttctaaggcacagaaggaaacatgacgatgaccggaggtttacctgccctgtcgagggctgtgggaaatcattcaccagagcagagcatctgaaaggccacagcataacccacctaggcacaaagccgttcgagtgtcctgtggaaggatgttgcgcgaggttctccgctcgtagcagtctgtacattcactctaagaaacacgtgcaggatgtgggtgctccgaaaagccgttgcccagtttctacctgcaacagactcttcacctccaagcacagcatgaaggcgcacatggtcagacagcacagccggcgccaagatctcttacctcagctagaagctccgagttctcttactcccagcagtgaactcagcagcccaggccaaagtgagctcactaacatggatcttgctgcactcttctctgacacacctgccaatgctagtggttctgcaggtgggtcggatgaggctctgaactccggaatcctgactattgacgtcacttctgtgagctcctctctgggagggaacctccctgctaataatagctccctagggccgatggaacccctggtcctggtggcccacagtgatattcccccaagcctggacagccctctggttctcgggacagcagccacggttctgcagcagggcagcttcagtgtggatgacgtgcagactgtgagtgcaggagcattaggctgtctggtggctctgcccatgaagaacttgagtgacgacccactggctttgacctccaatagtaacttagcagcacatatcaccacaccgacctcttcgagcaccccccgagaaaatgccagtgtcccggaactgctggctccaatcaaggtggagccggactcgccttctcgcccaggagcagttgggcagcaggaaggaagccatgggctgccccagtccacgttgcccagtccagcagagcagcacggtgcccaggacacagagctcagtgcaggcactggcaacttctatttggtatgaagcactctattcagtcaccaccatataggtcacttctctcatactcggtcttgaggatattctggattaatcctttctatgcagacgtttctggtttacaaaaggacgcagccctggactacaagtctggaactgacaagttcttatgaccttgacaaatcaccttaacccatctgagccttaaattctcatttatttcctgcataaggagatttggctaaatgctttctgaggtcctttggagtcctgtggctccatggtaatgtgctcctttccttgaagattgggggttttgtaatgttgagatactttgcctctatgcttgtcagctcatgaccagtcctagaagaggagtcgagacataagccaccttcagaggttcaatggaaactttaaaaccataccaaactcttttttaaaattagaattaacaagaaaaaaaaaaa

SEQ ID NO: 204872 - DNA, 3405 bp, Homo sapiens
  Payload ID: 20411
  Gene Name: ZXD family zinc finger C
  Uniprot ID: Q2QGD7
  ENST ID: ENST00000389709
  CDS Start-End: 55-2631
gggcgcgggcagctctgcgtccgaagctgctccgacgccgtcgctgggaccaagatggacctcccggcgctgctccccgccccgactgcgcgcggagggcaacatggcggcggccccggcccgctccgccgagccccagcgccgctcggcgcgagccccgcgcgccgccgcctgctactggtgcggggccctgaagatggcgggcccggggcgcggcccggggaggcctccgggccaagcccgccgcccgccgaggacgacagcgacggcgactctttcttggtgctgctggaagtgccgcacggcggcgctgccgccgaggctgccggatcacaggaggccgagcctggctcccgtgtcaacctggcgagccgccccgagcagggccccagcggcccggccgccccccccggccctggcgtagccccggcgggcgccgtcaccatcagcagccaggacctgctggtgcgtctcgaccgcggcgtcctcgcgctgtctgcgccgcccggccccgcaaccgcgggcgccgccgctccccgccgcgcgccccaggcctccggccccagcacgcccggctaccgctgccccgagccgcagtgcgcgctggccttcgccaagaagcaccagctcaaggtgcacctgctcacgcacggcggcggtcagggccggcggcccttcaagtgcccactggagggctgtggttgggccttcacaacgtcctacaagctcaagcggcacctgcagtcgcacgacaagctgcggcccttcggctgtccagtgggcggctgtggcaagaagttcactacggtctataacctcaaggcgcacatgaagggccacgagcaggagagcctgttcaagtgcgaggtgtgcgccgagcgcttccccacgcacgccaagctcagctcccaccagcgcagccacttcgagcccgagcgcccttacaagtgtgactttcccggctgtgagaagacatttatcacagtgagtgccctgttttcccataaccgagcccacttcagggaacaagagctcttttcctgctcctttcctgggtgcagcaagcagtatgataaagcctgtcggctgaaaattcacctgcggagccatacaggtgaaagaccatttatttgtgactctgacagctgtggctggaccttcaccagcatgtccaaacttctaaggcacagaaggaaacatgacgatgaccggaggtttacctgccctgtcgagggctgtgggaaatcattcaccagagcagagcatctgaaaggccacagcataacccacctaggcacaaagccgttcgagtgtcctgtggaaggatgttgcgcgaggttctccgctcgtagcagtctgtacattcactctaagaaacacgtgcaggatgtgggtgctccgaaaagccgttgcccagtttctacctgcaacagactcttcacctccaagcacagcatgaaggcgcacatggtcagacagcacagccggcgccaagatctcttacctcagctagaagctccgagttctcttactcccagcagtgaactcagcagcccaggccaaagtgagctcactaacatggatcttgctgcactcttctctgacacacctgccaatgctagtggttctgcaggtgggtcggatgaggctctgaactccggaatcctgactattgacgtcacttctgtgagctcctctctgggagggaacctccctgctaataatagctccctagggccgatggaacccctggtcctggtggcccacagtgatattcccccaagcctggacagccctctggttctcgggacagcagccacggttctgcagcagggcagcttcagtgtggatgacgtgcagactgtgagtgcaggagcattaggctgtctggtggctctgcccatgaagaacttgagtgacgacccactggctttgacctccaatagtaacttagcagcacatatcaccacaccgacctcttcgagcaccccccgagaaaatgccagtgtcccggaactgctggctccaatcaaggtggagccggactcgccttctcgcccaggagcagttgggcagcaggaaggaagccatgggctgccccagtccacgttgcccagtccagcagagcagcacggtgcccaggacacagagctcagtgcaggcactggcaacttctatttggaaagtgggggctcagcaagaactgattaccgagccattcaactagccaaggaaaaaaagcagagaggagcggggagcaatgcaggagcctcacagtctactcagagaaaaataaaagaaggcaaaatgagtcctccccatttccatgcaagccagaacagttggttgtgtgggagcctcgtggtgcccagcggaggacggccaggaccagctccagcagctggggtgcagtgcggggcgcagggcgtccaggtccagctggtgcaggatgacccctccggcgaaggtgtcctgccctcggcccgcggcccagccaccttcctccccttcctcactgtggacctgcccgtctacgtcctccaggaggtgctcccctcatctggaggccctgctggaccggaggccacccagttcccaggaagcactatcaacctgcaggatctgcagtgacggcagcctcggcctgggcaggcccaaggccacggtctaggacacaccttccctgagactcatgacatgagcctggggagacctcatttggtttccgttcagaagaccagcgtagcccttttgagacttttgggtacatttatcaaaaatgttttccttttgttttaccaggaatgagttcgggctatactctttgaaactgcctttgtgagcaaagtgctttggcaaggcaagggtctccctcagcagggctaggtgcactacagcctctttccccgtgtcccgttggatctgagctgtgtagcacttgttgcattacaaagaaaaagacttctgcaggaaatagggtagagaacaggctgtctagtcagatgcagcttgatctgtggcaaaaccaagtgtggtctttcagcttcagtgtgttagcatcccagcacctgggatggggtttgtgggcaagttgattttgccacactgtagggcccaggtggtcccattgccaccgtgaagccaaattctagcccaagtctggtagagcagtcgggcagctagttttcgggggaggatgatgtggtgggacagaggacctcagtggcctattacggagccctcttcccagactaaattcatagccgagagctcggggggatggtagagttaaaatttaaaataattttctaaattctgtatttggatattagtgtttaagtggtaatttggcaacagtttataaagtgatgttctgaataccataaattatgtgtaggactgtga

SEQ ID NO: 204873 - DNA, 2635 bp, Homo sapiens
  Payload ID: 20411
  Gene Name: ZXD family zinc finger C
  ENST ID: ENST00000515545
  CDS Start-End: 1-1255
cgagcgcccttacaagtgtgactttcccggctgtgagaagacatttatcacagtgagtgccctgttttcccataaccgagcccacttcagggaacaagagctcttttcctgctcctttcctgggtgcagcaagcagtatgataaagcctgtcggctgaaaattcacctgcggagccatacaggtgaaagaccatttatttgtgactctgacagctgtggctggaccttcaccagcatgtccaaacttctaaggcacagaaggaaacatgacgatgaccggaggtttacctgccctgtcgagggctgtgggaaatcattcaccagagcagagcatctgaaaggccacagcataacccacctaggcacaaagccgttcgagtgtcctgtggaaggatgttgcgcgaggttctccgctcgtagcagtctgtacattcactctaagaaacacgtgcaggatgtgggtgctccgaaaagccgttgcccagtttctacctgcaacagactcttcacctccaagcacagcatgaaggcgcacatggtcagacagcacagccggcgccaagatctcttacctcagctagaagctccgagttctcttactcccagcagtgaactcagcagcccaggccaaagtgagctcactaacatggatcttgctgcactcttctctgacacacctgccaatgctagtggttctgcaggtgggtcggatgaggctctgaactccggaatcctgactattgacgtcacttctgtgagctcctctctgggagggaacctccctgctaataatagctccctagggccgatggaacccctggtcctggtggcccacagtgatattcccccaagcctggacagccctctggttctcgggacagcagccacggttctgcagcagggcagcttcagtgtggatgacgtgcagactgtgagtgcaggagcattaggctgtctggtggctctgcccatgaagaacttgagtgacgacccactggctttgacctccaatagtaacttagcagcacatatcaccacaccgacctcttcgagcaccccccgagaaaatgccagtgtcccggaactgctggctccaatcaaggtggagccggactcgccttctcgcccaggagcagttgggcagcaggaaggaagccatgggctgccccagtccacgttgcccagtccagcagagcagcacggtgcccaggacacagagctcagtgcaggcactggcaacttctatttggtatgaagcactctattcagtcaccaccatataggtcacttctctcatactcggtcttgaggatattctggattaatcctttctatgcagacgtttctggtttacaaaaggacgcagccctggactacaagtctggaactgacaagttcttatgaccttgacaaatcaccttaacccatctgagccttaaattctcatttatttcctgcataaggagatttggctaaatgctttctgaggtcctttggagtcctgtggctccatggagcctcacagtctactcagagaaaaataaaagaaggcaaaatgagtcctccccatttccatgcaagccagaacagttggttgtgtgggagcctcgtggtgcccagcggaggacggccaggaccagctccagcagctggggtgcagtgcggggcgcagggcgtccaggtccagctggtgcaggatgacccctccggcgaaggtgtcctgccctcggcccgcggcccagccaccttcctccccttcctcactgtggacctgcccgtctacgtcctccaggaggtgctcccctcatctggaggccctgctggaccggaggccacccagttcccaggaagcactatcaacctgcaggatctgcagtgacggcagcctcggcctgggcaggcccaaggccacggtctaggacacaccttccctgagactcatgacatgagcctggggagacctcatttggtttccgttcagaagaccagcgtagcccttttgagacttttgggtacatttatcaaaaatgttttccttttgttttaccaggaatgagttcgggctatactctttgaaactgcctttgtgagcaaagtgctttggcaaggcaagggtctccctcagcagggctaggtgcactacagcctctttccccgtgtcccgttggatctgagctgtgtagcacttgttgcattacaaagaaaaagacttctgcaggaaatagggtagagaacaggctgtctagtcagatgcagcttgatctgtggcaaaaccaagtgtggtctttcagcttcagtgtgttagcatcccagcacctgggatggggtttgtgggcaagttgattttgccacactgtagggcccaggtggtcccattgccaccgtgaagccaaattctagcccaagtctggtagagcagtcgggcagctagttttcgggggaggatgatgtggtgggacagaggacctcagtggcctattacggagccctcttcccagactaaattcatagccgagagctcggggggatggtagagttaaaatttaaaataattttctaaattctgtatttggatattagtgtttaagtggtaatttggcaacagtttataaagtgatgttctgaataccataaa

SEQ ID NO: 204874 - DNA, 4469 bp, Homo sapiens
  Payload ID: 20412
  Gene Name: zyg-11 family member A, cell cycle regulator
  Uniprot ID: Q6WRX3
  ENST ID: ENST00000371528
  CDS Start-End: 149-2428
aaaagctcgccggcagggcgcggcgctagctccgtgtgcctcgcaggcgtggtgggcgcgtcctggcagccgcccgcttggttctcgcgggatccgggctccggctcgacgccggctctctttttgacgccccgccgccggggttgccatggttcatttcttgcacccgggccacacgccccggaacatcgtccctcctgacgctcagaaggatgccctgggctgctgcgtggtacaggaagaggcatctccctacactttggtcaacatctgcctgaatgtcctgattgctaacctggagaaattgtgttctgaaagacctgatggaacactgtgccttccggagcattggagtttccctcaggaagtagccgagcgatttctcagggtgatgacttggcaaggcaagctgactgacagaacagccagcattttccgaggcaaccaaatgaaactgaagctggtcaatatccaaaaagctaaaatctctacagctgcattcataaaagccttctgccgtcataagctcattgaactgaatgctactgcagtgcacgctgacctcccagttccagacatcataagtggactctgcagcaataggtggatccagcaaaacctccagtgtctcctgttagactcgacaagcatccctcaaaattcaagattactgttctttagtcagctcactggtcttcgcattttaagtgtttttaatgtttgttttcatactgaagacctggctaatgtttctcagttaccaagactggaaagcttagatatctctaatactctagtcactgatatttctgcactgcttacctgtaaggatcgattgaagtctctcacaatgcactatctgaaatgcctggccatgaccaaatcacaaattcttgcagtcattagagaacttaaatgtctgcttcaccttgatatttctgatcacaggcaactcaaatcagacctagcttttcatttgctacagcagaaggatatcctgcccaatgttgtgtcattggatatttctgggggcaattgcatcactgatgaagctgtagaactgtttatacgactgcggcctgccatgcaatttgtgggactattggccacggatgctggctcttctgacttctttactacaaagcaaggcttgagggttgctggaggagccagtatgagtcagatttcagaagcactgagccgatacaggaacagatcatgttttgtgaaggaagccctccacaggctgttcacagagacattttcaatggaggtaaccatgcctgctattttaaagcttgtggctataggaatgaggaatcacccattggatttgcgagtgcagttcacagccagtgcttgcgctctcaacctaacacgccagggcctggccaaggggatgcctgttcgcctgttgtcagaggtcacctgtctacttttcaaggctctgaaaaatttcccccattaccagcagttacagaagaattgtcttctctccttaaccaattccaggattcttgtggatgttccatttgacaggtttgatgctgccaagtttgtcatgagatggctctgtaagcatgaaaaccccaagatgcaaacaatggcagtgagtgtcacctctattctggctctgcagctctcacctgagcaaacggcacagcttgaagagcttttcatggcagttaaggaacttctagcaatagtaaaacaaaagactactgagaatttagatgatgtcaccttcttgtttactttgaaagcactttggaatcttacagatgggtctccagctgcctgcaagcacttcattgaaaatcaaggattgcaaatcttcatccaagtcttggagaccttttcagagtcagcaatacaaagcaaagtacttggtcttttgaacaacatagcagaagtcagagagctctcttccaagctggtgaccgaagatgtgctgaagcatatcaacagtttactctgtagcagggaaatggaagtcagctattttgctgcaggtatcatagcccacctgacatctgacagacagctttggatatcccgtgacttccagaggcgtactcttctccaagatctgcatgcaaccatacagaattggccaagttcaagttgtaagatgacagcattggtgacctatagatctttcaagacatttttcccgctccttggcaacttctctcaaccagaggttcagctctgggcactatgggctatgtatcatgtctgcagtaaaaatcccagcaaatactgcaaaatgttagttgaagaagaaggattgcagcttttgtgtgatatccaggagcacagtgaggcaacccccaaagcacagcagattgcagcctccattctggatgacttcagaatgcatttcatgaattatcagaggcccactctgtgtcaaatgcccttctgaacctaaggaatttcagaggtgtgtgctcttcctcaatgtcaggtgttctgccctggcagtaattgcacatcagttgtcattggagtttgtgagttggctgtctcattggcctttgattgttgattttatatatgttacaaaaggttggatttgtatgatagctgtaatcccaagtcaagttggactcattctgcagcctttcagcagcaattttgaagactcaaaccgtggactctgggaaggcctgggagcttgtgttggaacagctatgcaagttacttttctctagccttggacaattttttccctttgggagcttgtcatgggagtgggacctgttcactagaagagaaaggaaacctacagggagactttgatatttatattaaatttcctttgttgttatcgtcatgtgaagctatgagaaaagcttgggaagcatatgcttcaaaatgtagtgtttagaaggcagaacccctgttggagagcggggaaaagaatttatttatttatttatttatctatggctgggtatggtggctcacgcctgtaatcccagcactttgggaggccaaggcaggtggattgtctgaactcaggagttcgagatcagccttgccaacgtggtaaaactccgtctctaccaaaaaatacaaaaattagctgagcgtggtggtgtgcacctttactcctagctacttggaggctgaggtgggaggaccacttgagcccaggaggcagaggttgcagtgagctgagattgcaccactgcactccagcctggatgacagagtgagacctcatctcaaatgaatagaggggtggagaaaagagaaatatatttttttacctttttttttttttttttttttgtgacggaatctcgctctgtcgcccaggctggagtgcagtggcacaatctcggctcactgcaacctctgcctcccaggttccagcaattctcctgcctcagcctcctgagtagctgggactacaggcacatgccgccacgcccggctaatttttgtattttttagtagagacagggtttcaccatattggtcaggctggtctcgacctcctgacctcgtgatccacccgtctcggcctcccaaagtgctgggattacaggtgtgagtcactgcacctggcctttttacaattttgggtgtctatctttggcatgtttcctgttatgtgagcatgacatgctgtgtatgtgagtgagcttgtagggcgtggtgggacttaggcatttgcagacagtgtttagatgaaagattacatgtaatgataaatctgaatccctccattttatttgggtggaaccatgaccaaaaatggtaggaagacgaaaggccagaaagagactttgccagagagttcacggagttttcttaccccgcatgctgactaaagaaaacatgggcttttctgaaaccagcttcaactacagtataaactatatcagaagcttacttgataagccttgcggagctgctctgaggaatagtgtgaattccttccttgccttattgttgactgttaatgaacatgttttgtcatttatctgtttaagtttttcagaaaataaaagtaaatttctgttagcacattttaggattagatttttgtgcttttggctggcttggttcagattcttaactagagtaccatgtactgtctttggaaatcaaatgaggaagaagctcattctcttactctaaaccatgttccaaactattaccagagtccaaccagataagcagaatttgtaaccttacttccttccatagtccttaaactgtactgtattttttcacactcttgcatgattccaaaaggatatcttcctgacctgggttctagtacctcagagcattgttatcagatgctagcttattctaatgtgaggatgtgttaggggaactagtgtgttaagtccaattctgtacaagacatcctttcaagttctgtgtcattcacaacaatcctcacgggtaggtgagttttattttcctcacttaacagatgagaaaaa

SEQ ID NO: 204875 - DNA, 3942 bp, Homo sapiens
  Payload ID: 20412
  Gene Name: zyg-11 family member A, cell cycle regulator
  Uniprot ID: Q6WRX3
  ENST ID: ENST00000371532
  CDS Start-End: 648-1901
gggaatatcctctcaagccctgaggtgcagggctgggaaggagtgggtgagcggctgggtcgtggcaggttggtctggggaggctggggaggctggggaggcgggaggagaacggttggccccggcagcggcgtgtcggagggcggatggggctaggaggccgcccggggggtggggtctgcggcgggccggcccccgcgtgcgcgtcgcctcgccgggcatttcaaaagctcgccggcagggcgcggcgctagctccgtgtgcctcgcaggcgtggtgggcgcgtcctggcagccgcccgcttggttctcgcgggatccgggctccggctcgacgccggctctctttttgacgccccgccgccggggttgccatggttcatttcttgcacccgggccacacgccccggaacatcgtccctcctgacgctcagaaggatgccctgggctgctgcgtggtacaggaagaggcatctccctacactttggtcaacatctgcctgaatgtcctgattgctaacctggagaaattgtgttctgaaagacctgatggaacactgtgccttccggagcattggagtttccctcaggaagtagccgagcgatttctcagggtgatgacttggcaaggttgctggaggagccagtatgagtcagatttcagaagcactgagccgatacaggaacagatcatgttttgtgaaggaagccctccacaggctgttcacagagacattttcaatggaggtaaccatgcctgctattttaaagcttgtggctataggaatgaggaatcacccattggatttgcgagtgcagttcacagccagtgcttgcgctctcaacctaacacgccagggcctggccaaggggatgcctgttcgcctgttgtcagaggtcacctgtctacttttcaaggctctgaaaaatttcccccattaccagcagttacagaagaattgtcttctctccttaaccaattccaggattcttgtggatgttccatttgacaggtttgatgctgccaagtttgtcatgagatggctctgtaagcatgaaaaccccaagatgcaaacaatggcagtgagtgtcacctctattctggctctgcagctctcacctgagcaaacggcacagcttgaagagcttttcatggcagttaaggaacttctagcaatagtaaaacaaaagactactgagaatttagatgatgtcaccttcttgtttactttgaaagcactttggaatcttacagatgggtctccagctgcctgcaagcacttcattgaaaatcaaggattgcaaatcttcatccaagtcttggagaccttttcagagtcagcaatacaaagcaaagtacttggtcttttgaacaacatagcagaagtcagagagctctcttccaagctggtgaccgaagatgtgctgaagcatatcaacagtttactctgtagcagggaaatggaagtcagctattttgctgcaggtatcatagcccacctgacatctgacagacagctttggatatcccgtgacttccagaggcgtactcttctccaagatctgcatgcaaccatacagaattggccaagttcaagttgtaagatgacagcattggtgacctatagatctttcaagacatttttcccgctccttggcaacttctctcaaccagaggttcagctctgggcactatgggctatgtatcatgtctgcagtaaaaatcccagcaaatactgcaaaatgttagttgaagaagaaggattgcagcttttgtgtgatatccaggagcacagtgaggcaacccccaaagcacagcagattgcagcctccattctggatgacttcagaatgcatttcatgaattatcagaggcccactctgtgtcaaatgcccttctgaacctaaggaatttcagaggtgtgtgctcttcctcaatgtcaggtgttctgccctggcagtaattgcacatcagttgtcattggagtttgtgagttggctgtctcattggcctttgattgttgattttatatatgttacaaaaggttggatttgtatgatagctgtaatcccaagtcaagttggactcattctgcagcctttcagcagcaattttgaagactcaaaccgtggactctgggaaggcctgggagcttgtgttggaacagctatgcaagttacttttctctagccttggacaattttttccctttgggagcttgtcatgggagtgggacctgttcactagaagagaaaggaaacctacagggagactttgatatttatattaaatttcctttgttgttatcgtcatgtgaagctatgagaaaagcttgggaagcatatgcttcaaaatgtagtgtttagaaggcagaacccctgttggagagcggggaaaagaatttatttatttatttatttatctatggctgggtatggtggctcacgcctgtaatcccagcactttgggaggccaaggcaggtggattgtctgaactcaggagttcgagatcagccttgccaacgtggtaaaactccgtctctaccaaaaaatacaaaaattagctgagcgtggtggtgtgcacctttactcctagctacttggaggctgaggtgggaggaccacttgagcccaggaggcagaggttgcagtgagctgagattgcaccactgcactccagcctggatgacagagtgagacctcatctcaaatgaatagaggggtggagaaaagagaaatatatttttttacctttttttttttttttttttttgtgacggaatctcgctctgtcgcccaggctggagtgcagtggcacaatctcggctcactgcaacctctgcctcccaggttccagcaattctcctgcctcagcctcctgagtagctgggactacaggcacatgccgccacgcccggctaatttttgtattttttagtagagacagggtttcaccatattggtcaggctggtctcgacctcctgacctcgtgatccacccgtctcggcctcccaaagtgctgggattacaggtgtgagtcactgcacctggcctttttacaattttgggtgtctatctttggcatgtttcctgttatgtgagcatgacatgctgtgtatgtgagtgagcttgtagggcgtggtgggacttaggcatttgcagacagtgtttagatgaaagattacatgtaatgataaatctgaatccctccattttatttgggtggaaccatgaccaaaaatggtaggaagacgaaaggccagaaagagactttgccagagagttcacggagttttcttaccccgcatgctgactaaagaaaacatgggcttttctgaaaccagcttcaactacagtataaactatatcagaagcttacttgataagccttgcggagctgctctgaggaatagtgtgaattccttccttgccttattgttgactgttaatgaacatgttttgtcatttatctgtttaagtttttcagaaaataaaagtaaatttctgttagcacattttaggattagatttttgtgcttttggctggcttggttcagattcttaactagagtaccatgtactgtctttggaaatcaaatgaggaagaagctcattctcttactctaaaccatgttccaaactattaccagagtccaaccagataagcagaatttgtaaccttacttccttccatagtccttaaactgtactgtattttttcacactcttgcatgattccaaaaggatatcttcctgacctgggttctagtacctcagagcattgttatcagatgctagcttattctaatgtgaggatgtgttaggggaactagtgtgttaagtccaattctgtacaagacatcctttcaagttctgtgtcattcacaacaatcctcacgggtaggtgagttttattttcctcacttaacagatgagaaaaa

SEQ ID NO: 204876 - DNA, 3682 bp, Homo sapiens
  Payload ID: 20412
  Gene Name: zyg-11 family member A, cell cycle regulator
  Uniprot ID: Q6WRX3
  ENST ID: ENST00000612017
  CDS Start-End: 648-1901
gggaatatcctctcaagccctgaggtgcagggctgggaaggagtgggtgagcggctgggtcgtggcaggttggtctggggaggctggggaggctggggaggcgggaggagaacggttggccccggcagcggcgtgtcggagggcggatggggctaggaggccgcccggggggtggggtctgcggcgggccggcccccgcgtgcgcgtcgcctcgccgggcatttcaaaagctcgccggcagggcgcggcgctagctccgtgtgcctcgcaggcgtggtgggcgcgtcctggcagccgcccgcttggttctcgcgggatccgggctccggctcgacgccggctctctttttgacgccccgccgccggggttgccatggttcatttcttgcacccgggccacacgccccggaacatcgtccctcctgacgctcagaaggatgccctgggctgctgcgtggtacaggaagaggcatctccctacactttggtcaacatctgcctgaatgtcctgattgctaacctggagaaattgtgttctgaaagacctgatggaacactgtgccttccggagcattggagtttccctcaggaagtagccgagcgatttctcagggtgatgacttggcaaggttgctggaggagccagtatgagtcagatttcagaagcactgagccgatacaggaacagatcatgttttgtgaaggaagccctccacaggctgttcacagagacattttcaatggaggtaaccatgcctgctattttaaagcttgtggctataggaatgaggaatcacccattggatttgcgagtgcagttcacagccagtgcttgcgctctcaacctaacacgccagggcctggccaaggggatgcctgttcgcctgttgtcagaggtcacctgtctacttttcaaggctctgaaaaatttcccccattaccagcagttacagaagaattgtcttctctccttaaccaattccaggattcttgtggatgttccatttgacaggtttgatgctgccaagtttgtcatgagatggctctgtaagcatgaaaaccccaagatgcaaacaatggcagtgagtgtcacctctattctggctctgcagctctcacctgagcaaacggcacagcttgaagagcttttcatggcagttaaggaacttctagcaatagtaaaacaaaagactactgagaatttagatgatgtcaccttcttgtttactttgaaagcactttggaatcttacagatgggtctccagctgcctgcaagcacttcattgaaaatcaaggattgcaaatcttcatccaagtcttggagaccttttcagagtcagcaatacaaagcaaagtacttggtcttttgaacaacatagcagaagtcagagagctctcttccaagctggtgaccgaagatgtgctgaagcatatcaacagtttactctgtagcagggaaatggaagtcagctattttgctgcaggtatcatagcccacctgacatctgacagacagctttggatatcccgtgacttccagaggcgtactcttctccaagatctgcatgcaaccatacagaattggccaagttcaagttgtaagatgacagcattggtgacctatagatctttcaagacatttttcccgctccttggcaacttctctcaaccagaggttcagctctgggcactatgggctatgtatcatgtctgcagtaaaaatcccagcaaatactgcaaaatgttagttgaagaagaaggattgcagcttttgtgtgatatccaggagcacagtgaggcaacccccaaagcacagcagattgcagcctccattctggatgacttcagaatgcatttcatgaattatcagaggcccactctgtgtcaaatgcccttctgaacctaaggaatttcagaggtgtgtgctcttcctcaatgtcaggtgttctgccctggcagtaattgcacatcagttgtcattggagtttgtgagttggctgtctcattggcctttgattgttgattttatatatgttacaaaaggttggatttgtatgatagctgtaatcccaagtcaagttggactcattctgcagcctttcagcagcaattttgaagactcaaaccgtggactctgggaaggcctgggagcttgtgttggaacagctatgcaagttacttttctctagccttggacaattttttccctttgggagcttgtcatgggagtgggacctgttcactagaagagaaaggaaacctacagggagactttgatatttatattaaatttcctttgttgttatcgtcatgtgaagctatgagaaaagcttgggaagcatatgcttcaaaatgtagtgtttagaaggcagaacccctgttggagagcggggaaaagaatttatttatttatttatttatctatggctgggtatggtggctcacgcctgtaatcccagcactttgggaggccaaggcaggtggattgtctgaactcaggagttcgagatcagccttgccaacgtggtaaaactccgtctctaccaaaaaatacaaaaattagctgagcgtggtggtgtgcacctttactcctagctacttggaggctgaggtgggaggaccacttgagcccaggaggcagaggttgcagtgagctgagattgcaccactgcactccagcctggatgacagagtgagacctcatctcaaatgaatagaggggtggagaaaagactcgtgatccacccgtctcggcctcccaaagtgctgggattacaggtgtgagtcactgcacctggcctttttacaattttgggtgtctatctttggcatgtttcctgttatgtgagcatgacatgctgtgtatgtgagtgagcttgtagggcgtggtgggacttaggcatttgcagacagtgtttagatgaaagattacatgtaatgataaatctgaatccctccattttatttgggtggaaccatgaccaaaaatggtaggaagacgaaaggccagaaagagactttgccagagagttcacggagttttcttaccccgcatgctgactaaagaaaacatgggcttttctgaaaccagcttcaactacagtataaactatatcagaagcttacttgataagccttgcggagctgctctgaggaatagtgtgaattccttccttgccttattgttgactgttaatgaacatgttttgtcatttatctgtttaagtttttcagaaaataaaagtaaatttctgttagcacattttaggattagatttttgtgcttttggctggcttggttcagattcttaactagagtaccatgtactgtctttggaaatcaaatgaggaagaagctcattctcttactctaaaccatgttccaaactattaccagagtccaaccagataagcagaatttgtaaccttacttccttccatagtccttaaactgtactgtattttttcacactcttgcatgattccaaaaggatatcttcctgacctgggttctagtacctcagagcattgttatcagatgctagcttattctaatgtgaggatgtgttaggggaactagtgtgttaagtccaattctgtacaagacatcctttcaagttctgtgtcattcacaacaatcctcacgggtaggtgagttttattttcctcacttaacagatg

SEQ ID NO: 204877 - DNA, 8093 bp, Homo sapiens
  Payload ID: 20413
  Gene Name: zyg-11 family member B, cell cycle regulator
  Uniprot ID: Q9C0D3
  ENST ID: ENST00000294353
  CDS Start-End: 146-2380
tacgctcctagcttgagggaaagaggccgaggcctgggccaagcccggagccgccgctcgccggagcctcctggagcctccgcgccggctcagcctgggggcgggctccggtccggcccgccgccgcacccaggacggaggctgcatgcccgaggaccaggccggcgcagccatggaggaggcgtctccctattccttacttgatatctgcttgaatttcttgactactcaccttgagaagttctgttcagccagacaagatggaacattgtgtctgcaggaacctggagtattcccacaggaggtggctgatcgactgcttcggaccatggcttttcatggtctattgaatgatggaactgtgggtatttttaggggcaaccagatgcgcttaaagcgagcctgcattcgcaaagcaaagatctctgctgttgctttccggaaagctttctgccaccacaagttagtggaacttgatgccacaggtgtgaatgctgatatcacgattacagacattatcagtgggcttggcagtaacaaatggatccagcagaatctccagtgcctggtgctgaattcattaactctctccctcgaggatccttacgagcgctgcttcagccggctttctggccttcgagctttaagcatcacgaatgttctcttttacaatgaagacctggctgaagttgcctcattgccaagattagagagcttggatatttctaacacctcaatcacagacatcactgctctactggcctgcaaagaccgactcaagtctctaaccatgcaccacttgaaatgtttaaaaatgacaactacccagatactggatgtagttcgggaactcaaacatctgaatcatcttgatatctcagatgataaacagtttacatcagacatagctcttcgcttactagaacaaaaagacatcctacctaaccttgtttctctggatgtttctgggagaaagcacgtgacagataaagccgttgaagcctttatacaacaacgtccaagcatgcaatttgtaggtttgctggctactgatgctggttactctgaattcctcacaggcgaaggacatttgaaggtgtctggggaagccaatgaaactcagattgcagaagcactgaagcgttacagtgaacgggcattctttgttcgggaagctctatttcatctttttagtctgactcatgtgatggaaaaaacaaagccagaaattttaaagcttgtggttactgggatgagaaaccaccctatgaatttgccagtgcaactggctgcaagcgcctgtgtatttaacttaaccaagcaggatcttgctgcagggatgcctgtccgactcctggctgatgtgacccatttgctgctcaaagccatggaacattttcccaatcaccagcagttacagaagaattgcctcctttcactttgcagtgaccggatccttcaagatgttccatttaacaggtttgaagcagccaagcttgtcatgcagtggctttgcaaccatgaggatcaaaacatgcaaaggatggcagttgctatcatttctatcctggctgccaagctttctacagaacaaactgcacagcttggtactgagctcttcattgtcaggcaacttcttcaaatagtgaagcagaaaaccaatcaaaattcagtggacactacattgaaatttactttgagtgcactttggaacctcacagatgaatctccaaccacttgtagacactttattgaaaaccaagggttagaactcttcatgagggttctagagtctttcccaactgagtcatccattcagcagaaagttctaggacttttgaacaatatagctgaagtacaagaattacattctgaattaatgtggaaagattttatagaccacatcagtagtctcctacacagtgtggaagtggaagtcagttactttgcagctggaattattgcccatttaatatccagaggtgaacaagcttggacattgagtcgtagccagaggaattctctgctggatgatttgcattcagctattttgaaatggccaactccagagtgtgagatggtagcatacaggtcctttaatccatttttcccattacttggctgtttcacaacaccaggagttcagctatgggcagtttgggccatgcaacatgtctgcagcaagaatccttcaaggtattgcagcatgctgattgaagaaggaggattgcagcatttatacaacatcaaagatcatgaacatactgatccccatgtccaacagattgctgtggccattctggatagcttagaaaaacacattgtgcgccatgggaggccacctccctgtaaaaaacagccccaagccagactaaattgatagccataagtattggatagttgaatcacaggaatcctttttgtgattggtccatttggaatatcttaccctccctgatgttttgggggtttctatgacaagagtcataaaatcagtttgggattgataatgtgtagtactgcccatgtgaacagtctctaatttgtcttgtgattttaaacttatgagtcaagaagggtctcttcctttatcattgccttttaggaaattttccacatctttcagtgtttgaacttacttgtgcttgagattctacagttttatggtaaagtttgcacgaacccttaggccagacttttctgatctcagagtcccttccaatcaatttgcagcttcacataagctgttgacctgatttctgacactgcttcagttgtaaattttatactgcttctgtataaaatgcctttcttctctatctgtgtatattttataagatgtccttcttagtgtgaaagaagggaaatgtggatcatcttgtggaagctaatcactggcaggagcctggatggctggcggaaagatatatgagaaagaaaaattatgaaggtagaacagagtgtaggaactgggaattggtttcatggtataggttttaaaatgagacaggctacccttcgggagtccacctctcttgaggcggtgagcagaagcttgtcctccatatttatacctagaagtgtggactgctggttcctgcacagactgccggttattcactaggaatatttccccaagcaccacagtataaaatactacagcactctgtgttaaagactaactgtctacatctccatatgttgtagtgttgtgaaaatgtgattttaaaaaattatcgccagttaaaactggctattcttttcctctatttcaaagtcatttttgttcagtggaatagagacagcaacatggtgttaacctctcaattaaaatacaattgacaccagtaaattttgccataaaaagttaaaatctcttgttcaaaatatgtgtatcttcttaatgtgttcatgttagagaaagtgtccccatctcactgccaaaaatgaaagaaaataattaaactctttaaatgattaaatgtaatgattctactcgcagtgcataacagcacatatttttgacagattattttttaggcaattacctttccttaaggtatctgatacagtatagtaaagaatcacttatatcagtaatagcacttgagagatagcaagtcaccaagaaacttaattttcatttaaaattttattttgtgaataaggtcaatctacaatcccagataactacattttttttcatagatggccagtgttttcaacagagatttaaaatggaatattaaaattatagtgattattcagaagcattttaatttagaaaggagctggtttgttagttcactgatgacattttttgacaaacattttataccattatcacaataatcagacttgaattttttttggagttccttcatgtgaatgaaaactgagttaaaagaaagtaggcatttaggtctggatgcagtggctcatgcttgtaatcccagcactttgggaagctgaagcaggaggattgcttgagcccagaagttcaagactagcctgggcaacatagtgagactcggtctctaccaaaaaaaaaaattttttttttttaaattagctgggtgtggtggcacctgggaaacagagcgagacgctgactcaaataaatatctaaatagatatttagaatcactgaaaaccatattaaatgctgggttaatgctgacttaattggcttaaggaatttttataggcgtaagataaattttcacagactaagtttatttcagacaaaatagagaattcttttaaaagttttttttttttttttcctttttcgaatgttaatgtctaagacaaagttcagaaaacgagatggcctgtggtagtttggaaattgctagatatgttgaccgtttccaggtcttttatctagtgtagttaagggaaagcctatttaagaagtttggcttcaagtttctgttttataagacaaaagtgcatatttctttacaggctaatgctaggtttttgtctttacaaattattttcagaaatggctaaaagtgtacagaaaacagtaaatcccttctttactcagaataacttcttaatagttgaagcatccaaaatatgtaaaagcaagggtgggcgtagtggctcttgcctgtaatcccagcattctgggaggccgaggcgggcagatcacttgagatcaggagttcgagaccaccctggccaacgtggtgaaaccccgtctctactaaaaatacaaaaactagctgggcatggtggcttttttgcacgcctatagtcccagctactcgggaggctgaggcacgagaatcacttgaacccaggaagtggaggttgcagtgagctaagatcgtgccactgcactccagcctggacaacggagtgagactctggggaaaaaaaaaattaaacttcctactttttttctttttgtagagacagagtttcactctgtcgcccaagctggagtgcagtggcacaatcatacctcactgcagcctcttgggcttatgtgatcttaccccctcagcctctggagtagctggaactacaggctaaatttcctactttgtaaacatcagtagtggccagatacttctgagtcttaaaagcataataggccgggcgcggtggctcacgcctgtaatcccagcactttgggaggccgaggtgggtggatcacaaggtcaggagttcaagaccagcctggcccaaatggtgaaaccctgtctctactaaatatacaaaaattagctgggtgtggtggcgggcacctgtaatcccagctactcaggaggctgaggcaggagaatcgcttgaacctgggaggtggaggttgtggtgagccaatatcatgccactgcactccagcctgggtgacagagtaagactccgtctcaaaaaaaaaaaaagcataataatttattacatcccaaatatataaaaatttgagtgcctttgcagttgggatggttcctaaaattgcgtatagaattaaggcacagaattgtgtgtaaggtcctgaatctggctaaaatacagtggatgtatgtattggaattatgaggcataagtagccagtatctatagttagaatctacaaggcctcctttttgcacctgtagactagaatataactgttattggtgcctttgagtgttatctctcagtggctagaggtgctgtttcaagcacaatttagactagggttgaaccactcattgttcaaatcattggtgggctccaatgtaaaatatcactacatcagtccacaagcaacattaaggaaatctaaaggaaatggaatttgactttttagagtataatgatgttctagggcataatgaggaaaatttttaaaaaatagattataatgatacatattggtatcattaagacaacagatttgagcaaatacaattaaggtgtcttattttttgcatcaagtaattattgctgtggtctttctactccacaaaataattttttctttttgcagttgaaaattaactgcattattaactaattaataaaataaatcaagtggtataagggattagtttaccctcaagccgatgactccatggctactgatattagttagtttaggatttttaaaaagcatatcagacccccagtttcaggaattgagtataaatattgcttcttgtcaccctgggacagtaatgccttatagtggcactagtcaccttaagtagattacacatggttgaggtgaataaagctgcatgggaatttgctttcgtgatatatttcatttgcaaacttctacataatcaagttttatgtttaaaaccatcggttctatatatctagctttaggaagttgcccttacaggtgggaccttttgtgttaatctgttttctccccagtcatcttatttggctatgttaaaaaaaaaaaaaaaaaaaaagcgagagagagagatggtgtctcactgtgttgcccaggctggtctcgaactcctggcctcaagtgactttcccacctcagcttcccaaagtgctggaatcacaggcatgagccacagtgcctggtcttagctgtgtttttaattatgccatgcatcaacataacaccgggccatcttcctatcccttcctatcccatatgtttaatgaaaacatattttatgtgctaaattaggttaatttaccagagatttagcttagtgtttttaaactatagaacaatacccctatagaacaatgtacagctgcacccaaggttaaaaagaggtagcagggaaaacaaacttaaactctttgtatatggtgaaacccatccctctcctgccctctaatggtatgtttacattatttcgttattatacaatgtagtggtataaacagtattattaaactgaaggcataagttaaaggaagtatgttactttgagctgatgtaggctcttccacttttatctgtattttacttatttggggactttgtattgctagggcttcagaatactaactttgacacagctcccagagaggtttgcaaacttttggtttccctctcaaatccatggtagtagtttcaaatgagtttgtggataatggatgtttagtccttatcatttgctgtgttttgacagtttttaatttgcagtattcactcacgaactgttttattttaggaataatgcaaaaccaaccttcgtccggtgatgagaatagccgtatgataagagaatttgctcatcgtgctttaaatgattaactgttttaccttatttagtatttcatagactttgcatgatatggtacactcctaattatgcattctttggtttccaaatcttaatctaagatactttgttaactgactggtagcctaagaaagagacttttcttcctgtttttctctctccccattttttggggtaagttttgcaaagatcagtgctgcttctcatgactctaaagtaaagctcttttggatagcacagcctaactttacagctagacagaatggccattaagaatatttccaaaatccaagtttatcaaaattattttgtgggaaatcatcaatctattttattaatgttatgtgtttaattttggacttattttgggaaaaactgttcaaattgggtccttttaagcttattttaagcagcctagaaggaagaagctacttagctaatgaaagctgagacactttattaaaagcaggatcttaagagcattgtttttccttaaaaactttatactctcagataatctgcaacaacaaaaattaagaaatccctgacttttgtagaattcccactgtcaaattctcactgacttatgagtgtgagagaagttatcttttgtttgaattctgatagaacagtttaactcctttctaaggatataaaaaattcattggaaagtgtgtatatttcaaagactctcaattatctggactgaaggcactgttctcactatggccagatgaatgggagtattctgtacatgaatcatgctgtattttaaatcaggacatcacttaagtattaatgttgtgtgtacagatttttgttttgggattttttttgcctaaataaatgttataaattttatgtaaa

SEQ ID NO: 204878 - DNA, 2294 bp, Homo sapiens
  Payload ID: 20413
  Gene Name: zyg-11 family member B, cell cycle regulator
  ENST ID: ENST00000545132
  CDS Start-End: 188-1888
ggttcgggctgcggctgcggctgcggctgcggctgctactgctacgctcctagcttgagggaaagaggccgaggcctgggccaagcccggagccgccgctcgccggagcctcctggagcctccgcgccggctcagcctgggggcgggctccggtccggcccgccgccgcacccaggacggaggctgcatgcccgaggaccaggccggcgcagccatggaggaggcgtctccctattccttacttgatatctgcttgaatttcttgactactcaccttgagaagttctgttcagccagacaagatggaacattgtgtctgcaggaacctggagtattcccacaggaggtggctgatcgactgcttcggaccatggcttttcatggtctattgaatgatggaactgtgggtatttttaggggcaaccagatgcgcttaaagcgagcctgcattcgcaaagcaaagatctctgctgttgctttccggaaagctttctgccaccacaagttagtggaacttgatgccacaggtgtgaatgctgatatcacgattacagacattatcagtgggcttggcagtaacaaatggatccagcagaatctccagtgcctggtgctgaattcattaactctctccctcgaggatccttacgagcgctgcttcagccggctttctggccttcgagctttaagcatcacgaatgttctcttttacaatgaagacctggctgaagttgcctcattgccaagattagagagcttggatatttctaacacctcaatcacagacatcactgctctactggcctgcaaagaccgactcaagtctctaaccatgcaccacttgaaatgtttaaaaatgacaactacccagatactggatgtagttcgggaactcaaacatctgaatcatcttgatatctcagatgataaacagtttacatcagacatagctcttcgcttactagaacaaaaagacatcctacctaaccttgtttctctggatgtttctgggagaaagcacgtgacagataaagccgttgaagcctttatacaacaacgtccaagcatgcaatttgtaggtttgctggctactgatgctggttactctgaattcctcacaggcgaaggacatttgaaggtgtctggggaagccaatgaaactcagattgcagaagcactgaagcgttacagtgaacgggcattctttgttcgggaagctctatttcatctttttagtctgactcatgtgatggaaaaaacaaagccagaaattttaaagcttgtggttactgggatgagaaaccaccctatgaatttgccagtgcaactggctgcaagcgcctgtgtatttaacttaaccaagcaggatcttgctgcagggatgcctgtccgactcctggctgatgtgacccatttgctgctcaaagccatggaacattttcccaatcaccagcagttacagaagaattgcctcctttcactttgcagtgaccggatccttcaagatgttccatttaacaggtttgaagcagccaagcttgtcatgcagtggctttgcaaccatgaggatcaaaacatgcaaaggatggcagttgctatcatttctatcctggctgccaagctttctacagaacaaactgcacagcttggtactgagctcttcattgtcaggcaacttcttcaaatagtgaagcagaaaaccaatcaaaattcagtggacactacattgaaatttactttgagtgcactttggaacctcacagatgaatctccaaccacttgtagacactttattgaaaaccaagggttagaactcttcatgagggttctagagtctttcccaactgagtcatccattcagcagaaagttctaggacttttgggttaatatgattatttgatacagaagttggctcaggtcatctgaaacggaaagaacaatatagctgaagtacaagaattacattctgaattaatgtggaaagattttatagaccacatcagtagtctcctacacagtgtggaagtggaagtcagttactttgcagctggaattattgcccatttaatatccagaggtgaacaagcttggacattgagtcgtagccagaggaattctctgctggatgatttgcattcagctattttgaaatggccaactccagagtgtgagatggtagcatacaggtcctttaatccatttttcccattacttggctgtttcacaacaccaggagttcagctatgggcagtttgggccatgcaacatgtctgcagcaagaatcgtatgtacc

SEQ ID NO: 204879 - DNA, 4259 bp, Homo sapiens
  Payload ID: 20414
  Gene Name: zyg-11 related, cell cycle regulator
  Uniprot ID: Q7Z7L7
  ENST ID: ENST00000291900
  CDS Start-End: 408-2708
ggctccgagccgtaggagccggatcgggggaggggccgggcccaggagcctcagccccgccggcagccctaagggcaaggtaaccgccacggggtccccgtcgcgaccccctccctcccggagctcccgtccccgggatcccaagctccgccccgccgacccccgtctcccctggaccccggctctagcctgacgagatccccaacctcctgaggtgctctggccccggattctcccgggctgcattctctgctcctcctcgcctgcgaagcatcacgtccgcttcccgacgctgagggcagccccgtccagggcagtggctctgccaatgatcctgtgagtattcaggaatcactgttgcccctggggatccttgtcctggagtggcccacctgcttgcccccagcatggcgtccgacactcccgagtcgctgatggccctctgtactgacttctgcttgcgcaacctggatggcaccctgggctacctgctggacaaggagaccctgcggctacatccggacatcttcttgcccagcgagatctgtgaccggctcgtcaatgagtatgtggagctggtgaacgctgcctgtaacttcgagccacacgagagcttcttcagcctcttttcggacccccgcagcacccgcctcacgcggatccacctccgtgaggacctggtgcaggaccaggacctggaggccatccgcaagcaggacctggtggagctgtacctgactaactgcgagaagctgtccgccaagagcctgcagacactgaggagcttcagccacaccctggtgtccttgagcctcttcggctgtacaaacattttctatgaggaggagaacccagggggctgtgaagatgagtacctcgtcaaccccacctgccaggtgctggttaaggatttcaccttcgagggcttcagccgcctccgcttcctcaacttgggccgcatgattgattgggtccctgtggagtccctgctgcggccgcttaactccctggctgccttggacctctcaggcattcagacgagcgacgccgccttcctcacccagtggaaagacagcctggtgtccctcgtcctctacaacatggacctgtccgacgaccacatccgggtcatcgtgcagctgcacaagctgcgacacctggacatctcccgagaccgcctctccagctactacaagttcaagctgactcgggaggtgctgagcctctttgtgcagaagctggggaacctaatgtccctggacatctctggccacatgatcctagagaactgcagcatctccaagatggaagaggaagcggggcagaccagcattgagccttccaagagcagcatcatacctttccgggctctgaagaggccgctgcagttcctcgggctctttgagaactctctgtgccgcctcacgcacattccagcctacaaagtaagtggtgacaaaaacgaagagcaggtgctgaatgccatcgaggcctacacggagcaccggcctgagatcacctcgcgggccatcaacttgctttttgacatcgcccgcatcgagcgttgcaaccagctgctgcgggccctgaagctggtcatcacggccctcaagtgccacaaatatgacaggaacattcaagtgacaggcagcgccgctctcttctacctaacaaattccgagtaccgctcagagcagagtgtgaagctgcgccggcaggttatccaggtggtgctgaatggcatggaatcctaccaggaggtgacggtgcagcggaactgctgcctgacgctctgcaacttcagcatccccgaggagctggaattccagtaccgccgggtcaacgagctcctgctcagcatcctcaaccccacgcggcaggacgagtctatccagcggatcgccgtgcacctgtgcaatgccctggtctgccaggtagacaacgaccacaaggaggccgtgggcaagatgggctttgtcgtgaccatgctgaagctgattcagaagaagctgctggacaagacatgtgaccaggtcatggagttctcctggagtgccctgtggaacatcacagatgaaactcctgacaactgcgagatgttcctcaatttcaacggcatgaagctcttcctggactgcctgaaggaattcccagagaagcaggaactgcataggaatatgctaggacttttggggaatgtggcagaagtgaaggagctgaggcctcaactaatgacttcccagttcatcagcgtcttcagcaacctgttggagagcaaggccgatgggatcgaggtttcctacaatgcctgcggcgtcctctcccacatcatgtttgatggacccgaggcctggggcgtctgtgagccccagcgtgaggaggtggaggaacgcatgtgggctgccatccagagctgggacataaactctcggagaaacatcaattacaggtcatttgaaccaattctccgcctccttccccagggaatctctcctgtcagccagcactgggcaacctgggccctgtataacctcgtgtctgtctacccggacaagtactgccctctgctgatcaaagaaggggggatgccccttctgagggacataattaagatggcgaccgcacggcaggagaccaaggaaatggcccgcaaggtgattgagcactgcagtaactttaaagaggagaacatggacacgtctagatagaggcctccgtccccatggccgccaccgctctggaccacaggcggggaggaagcatgctcaagcagcccagcgggcgggccccttccgagggagcctcccacggagtgaagagacatgggggacttttgcacaaccgacgcttttccttaatgttagtgagatatatatatattatatatatatattttttttttggttaggaagtgtgaagttttgtgtgtatgatttctgtgcaaaaacaaaagcaacactcctgagtccttgcagcttccttggccattctcaaacccactcagccttcatcgctgacacacacactcctaccccaaccagactaaatgcctataacgctgtgagtgtccagtccttgtccaggaaactcagatcccggcctggcttcctttcatgagaggagcaggccttggacagcgtatcgagcatcctgacccactgcccctgcctgagaacgccatctcggctcccgggcacagctgatggggtttggggattagaacttaccccactgggtctcccaaaagccttggtgctcccggctgtgggccatctggggcaggaaagtgagccattcctaggctgaggtccaggcagccctgcccctgaagaccctctaggagcagggcacccagtggccctgctgctgtccagccaggcctgcctgaggccacgctgctatggaggctgcctcctagtctcccaccaggtcccaggctgtggaaagccccagcccagggatggtcagaactcaggggcagattccactgccccttctgccaaacacatccagaacctgccctcagccctggaagctagcatcttctggggccaggggcttgcttcctcgctccatagccctcaactgcccaggcgctcccaccagcagaactgagcctgcctcctcctcccagcctgccccgctgcccagaggaccccacgcctctcagaggcagaggtcccatgacagcctttgacccacaacggccacacagccgcctccagaccagcactcggactgccctgcagtggccgcttgggcctccctggcggtcccgccctgccctaggctttaccttggaagcctgagaggcgccggctctcttgctcctccatcgatggacactgcattgcttctcatcggacacttgtggagcgcaggggcctggggagcagcgctaaccctggaggcagcctttgggtgatggctttttcttcccttttcctcccgcgggcctgttttcaggtgttcctagcatttctgcctccaggcaggacggcaggggtgagcagctttgggagagacacctggcctttttctcctggagcctctccctcccggccctgggaagtgggcgcagccctgtgttcccccagcttggcagatgggctgcatgcggcgctcccttccttcccacgctcagcggccccggccagaccctggcagacttcacacctcattgctttaccccctggggcctggggaaatgtctgtactttgggaagtcacagaaatacatttttgtgcaaaatggaaaa

SEQ ID NO: 204880 - DNA, 460 bp, Homo sapiens
  Payload ID: 20414
  Gene Name: zyg-11 related, cell cycle regulator
  ENST ID: ENST00000427848
  CDS Start-End: 158-460
aggtcgccgcccaatttcccatttggaagctcggttgcctggtggcgcatgccctagatggaggcagtggctctgccaatgatcctgtgagtattcaggaatcactgttgcccctggggatccttgtcctggagtggcccacctgcttgcccccagcatggcgtccgacactcccgagtcgctgatggccctctgtactgacttctgcttgcgcaacctggatggcaccctgggctacctgctggacaaggagaccctgcggctacatccggacatcttcttgcccagcgagatctgtgaccggctcgtcaatgagtatgtggagctggtgaacgctgcctgtaacttcgagccacacgagagcttcttcagcctcttttcggacccccgcagcacccgcctcacgcggatccacctccgtgaggacctggtgcaggaccaggacctggaggccatccgc

SEQ ID NO: 204881 - DNA, 715 bp, Homo sapiens
  Payload ID: 20414
  Gene Name: zyg-11 related, cell cycle regulator
  ENST ID: ENST00000414921
  CDS Start-End: 222-715
aagtgacgcgccccgggtttgttgacagcggaggcggcggcggctgcaggctccgagccgtaggagccggatcgggggaggggccgggcccaggagcctcagccccgccggcagccctaagggcaaggcagtggctctgccaatgatcctgtgagtattcaggaatcactgttgcccctggggatccttgtcctggagtggcccacctgcttgcccccagcatggcgtccgacactcccgagtcgctgatggccctctgtactgacttctgcttgcgcaacctggatggcaccctgggctacctgctggacaaggagaccctgcggctacatccggacatcttcttgcccagcgagatctgtgaccggctcgtcaatgagtatgtggagctggtgaacgctgcctgtaacttcgagccacacgagagcttcttcagcctcttttcggacccccgcagcacccgcctcacgcggatccacctccgtgaggacctggtgcaggaccaggacctggaggccatccgcaagcaggacctggtggagctgtacctgactaactgcgagaagctgtccgccaagagcctgcagacactgaggagcttcagccacaccctggtgtccttgagcctcttcggctgtacaaacattttctatgaggaggagaacccagggggctgtgaagatgagtacctcgtcaaccccacctgccaggtgct

SEQ ID NO: 204882 - DNA, 1460 bp, Homo sapiens
  Payload ID: 20415
  Gene Name: zygote arrest 1
  Uniprot ID: Q86SH2
  ENST ID: ENST00000327939
  CDS Start-End: 41-1315
gcctatttagggtgcggcggcgggcgggagcagtgcgcccatggcggccctgggggacgaggtgctggacggttacgtgttcccggcgtgccccccctgctcgtaccggtacccataccccgcggccaccaagggcaagggcgcggcgggcggcagctggcagcagcgcggcaggggctgccttcccgcctcctccccctgctcggcgggcgcggcctcgttgtccttcccgggctgcgggcggctgacggccgccgagtacttcgacagctaccagcgggagcggctcatggctctcctggcgcaggtggggccgggtctcgggccgcgcgcccgcagggccggcagctgcgacgtggcggtgcaggtgagcccgcgcatcgacgccgcggtacagtgctcgctggggaggcgcacgctgcagcgccgggcccgcgaccccgagtccccggccggccccggggccgagggcaccacgggtggcggctctttctcccagcagccatcccgtcgaggcctggagcagggcagcccccagaacggcgccccgcggcccatgcgcttcccgcgcaccgtcgccgtgtactcgcccctggccttgcgccgtctcaccgccttcctggaggggcccgggcccgcggcgggcgagcagaggtccggggcgtcggacggagagagggggccgccgcccgcgcggcttcaaggcccagaggagggggaggtgtggacgaagaaggcgccccggcggccgcagtccgacgacgacggcgaggcccaggccgcagtccgagcgagctgggagcagccggccgacggtcccgagctgccgccgcgagaggcccaggagggcgaggcggctccgcggtcggcgctaaggagcccggggcaacctccgtcggcggggagggcccgagacggcggcgacggacgggaggcggccgtcgcgggagaggggccgtcgccacggagcccggagctgggcaaggagcggctgcgcttccagttcttagagcagaaatatggctattaccactgcaaggactgcaacatccgctgggagagtgcttatgtgtggtgtgtacagggaactaacaaggtttacttcaaacagttttgcagaacttgtcagaagtcttataacccttaccgagtggaggatatcacctgtcaaagttgtaaacaaacgagatgttcctgcccagtaaaacttcgccacgtggaccctaaacggccccaccgtcaagatttgtgcggtagatgcaaaggcaaacgcctgtcctgtgacagcactttcagcttcaaatacatcatttaggtgaaagtcagtgttgctgtgcatgcgctgatggagtagacgagtgagcttttccgtgcctctcctccacctctcccttctcaaaatacttcatgaaaggcagtgtattctgaaaaagccttcaaataaaggtattgcaacacga

SEQ ID NO: 204883 - DNA, 1103 bp, Homo sapiens
  Payload ID: 20416
  Gene Name: zygote arrest 1-like
  Uniprot ID: A6NP61
  ENST ID: ENST00000345108
  CDS Start-End: 30-995
ttagactgcgcctgagcacctgagagcggatggagcgctttgtccgtgttccctatggcttgtaccagggttatgggagcacagtgcctttgggccagcctggactctcagggcacaaacagcccgactggaggcaaaatatgggtcctcccacttttctggccaggccagggctgctggtgcccgcgaacgcccctgactactgcattgacccttacaagagggcgcagcttaaggccattctctcccagatgaaccccagcctgagcccgcggctgtgcaagcccaacaccaaggaggtgggcgtgcaggtgagcccgcgggtggacaaggctgtgcagtgctctctggggcctcgcaccctcagcagctgctccccctgggacggcagagacccccaggagcccctgccagcctgtggggtcacttcgcccgccaccggccgcaggggcttgatccgcctgcggagagatggggacgaagcggagagcaaggcgctcccgggccctgcggaggccagccagccgcagccaccatcacggaggtcaggagctgacaggcaggaggagcccgggcagctggaggaatcgggggagaaagacgccccgtgccctcaggagacgaagagcaagcaggtgcctggagacgccgcctccgagccgctccggaggcccaacttccagtttttggaaccaaaatatggctatttccactgtaaagattgtaagaccaggtgggagagtgcttacgtgtggtgcatttctggaacgaacaaggtttatttcaaacaactctgttgtaaatgccaaaagagttttaacccttatcgagtagaagcaatccaatgtcagacctgctcaaagtctcattgttcctgtcctcaaaagaagagacacattgatctaaggaggcctcatcgacaggaactgtgtggtcgctgcaaagacaagagattctcctgtggcaatatttacagctttaaatatgtgatgtgacttgtacagtgtgacttgtaatggacccctgagctcttcttgtaacttactgtgctgtcttccttttttgcaacttggctctgacctggcatcggaaaatggctaggc

SEQ ID NO: 204884 - DNA, 1564 bp, Homo sapiens
  Payload ID: 20416
  Gene Name: zygote arrest 1-like
  Uniprot ID: A6NP61
  ENST ID: ENST00000533490
  CDS Start-End: 420-1385
agtatctgaccgaataaagcgggagctggagattcggatcacctgtcttcctcgcaggctgaactggaagacctgacttcatctccgaattcgttggttctgtaacatgcctaatacaaggctgaatagggtttgttgtaagacctacaaaaccttcaaatggattcagtgagagttgctcccatgggggccttgctgcttccagaaggtgcttgagcagtaaacagaagcaaccttggattaggaaaaggggtaataagcagcagctcccattagaatctgaaataaatggagaagccaggaatgaatctgaaccaacctgatgaagagaaagaaggggcggatgaaggaggaaggcaaaataaggacccaaacaaactggctaggatattagactgcgcctgagcacctgagagcggatggagcgctttgtccgtgttccctatggcttgtaccagggttatgggagcacagtgcctttgggccagcctggactctcagggcacaaacagcccgactggaggcaaaatatgggtcctcccacttttctggccaggccagggctgctggtgcccgcgaacgcccctgactactgcattgacccttacaagagggcgcagcttaaggccattctctcccagatgaaccccagcctgagcccgcggctgtgcaagcccaacaccaaggaggtgggcgtgcaggtgagcccgcgggtggacaaggctgtgcagtgctctctggggcctcgcaccctcagcagctgctccccctgggacggcagagacccccaggagcccctgccagcctgtggggtcacttcgcccgccaccggccgcaggggcttgatccgcctgcggagagatggggacgaagcggagagcaaggcgctcccgggccctgcggaggccagccagccgcagccaccatcacggaggtcaggagctgacaggcaggaggagcccgggcagctggaggaatcgggggagaaagacgccccgtgccctcaggagacgaagagcaagcaggtgcctggagacgccgcctccgagccgctccggaggcccaacttccagtttttggaaccaaaatatggctatttccactgtaaagattgtaagaccaggtgggagagtgcttacgtgtggtgcatttctggaacgaacaaggtttatttcaaacaactctgttgtaaatgccaaaagagttttaacccttatcgagtagaagcaatccaatgtcagacctgctcaaagtctcattgttcctgtcctcaaaagaagagacacattgatctaaggaggcctcatcgacaggaactgtgtggtcgctgcaaagacaagagattctcctgtggcaatatttacagctttaaatatgtgatgtgacttgtacagtgtgacttgtaatggacccctgagctcttcttgtaacttactgtgctgtcttccttttttgcaacttggctctgacctggcatcggaaaatggctaggcttttgtactttttgtagattgtgtaacaattgtacaatgtgaatagaataaaataaatgcatgtgaactag

SEQ ID NO: 204885 - DNA, 3132 bp, Homo sapiens
  Payload ID: 20417
  Gene Name: zymogen granule protein 16
  Uniprot ID: O60844
  ENST ID: ENST00000400752
  CDS Start-End: 75-578
agggcttggacctggtataaaacatctggaagtttccagggggctgctttgcatctgaaactgtcagccccagaatgttgacagtcgctctcctagcccttctctgtgcctcagcctctggcaatgccattcaggccaggtcttcctcctatagtggagagtatggaggtggtggtggaaagcgattctctcattctggcaaccagttggacggccccatcaccgccctccgggtccgagtcaacacatactacatcgtaggtcttcaggtgcgctatggcaaggtgtggagcgactatgtgggtggtcgcaacggagacctggaggagatctttctgcaccctggggaatcagtgatccaggtttctgggaagtacaagtggtacctgaagaagctggtatttgtgacagacaagggccgctatctgtcttttgggaaagacagtggcacaagtttcaatgccgtccccttgcaccccaacaccgtgctccgcttcatcagtggccggtctggttctctcatcgatgccattggcctgcactgggatgtttaccccagtagctgcagcagatgctgagcctcctctccttggcaggggcactgtgatgaggagtaagaactcccttatcactaacccccatccaaatggctcaataaaaaaaatatggttaaggctagtctgtgtgggggcatctgtggctgggatatctgcctcctgacttagccggggacgtgcaaatctcacttctggctggctttggacatctgtctggaagatgggaagatgagggagaggtatgtaagaatcctgggctttgtgctataatttatcaagaggagatgagattctggcttgcatcaacgctcttcaaggacagctccttggaacattgatccaaactggagtcatgggtctgagggcaaggcctagttgtggcttacaccaaaaccccagatgtcccactctccagctctcctcacccctggtcctccccttgagaaagtggtgaactcacttgctgtgtgtgggtggccaggaccattagcctttgttctttcccagaacccacctgactcctgaaacttagctgaagtctgtgcccgaggaccctgccctgttaccaggcccagttcctcctcacctctacccatgagccccggtgtcctgctaagccctctcagatctgggattcctccttcctcaggaagccaccaccttctcagcagtggaaaccctgcccacactatgctcttaggctttagccatcagaaggttacagtggactgcgggaggctgacactaggctgaactcattaaggaatgaatgggaggtgagaagacacaggcagcaagaatcgagtgtttcaagaagtttggctgtggtttgccagaaataggcaagtcagttttcgggggtgtaaggaaaaagggttttgtgtctttttaaaatcctagacaggagagtcacaagcatgttcacatgataaagaggaagaaagagaaagaggctggagattctgaaaagagatcactggtgaggtctcaaaagagatagaagaggatggttatgtagttggggaaagaaattttaagaagggaagaaaattaaaatgagtgaaggtatacgttagttttgtaaaagttatcaatatctggctgggcacagtgctcacacctgtaatcccagcactttgggaggccaaggcaggcagatcatttgaggtcaggagttggagacaagcctccaacatggtaaaaccctgtctctactaaaaatacaaaaattagccaggtgtggtggcagtcacctgtaatcccagctacttgggaggctgaggcatgagaatcacttgaatgctggaggcagaggttacaatgagttgagacagcacaactgcaccccagcctggatgacagagtgagactccatctaaaaaaaaaaggaatgttatcagtatcaaaatggagtaacatatgtcacatcctaacaaaatggaaccaacctgacacctaaattaagcattgcacctgataacaccatggaggactgggtggagaatcagcagacaatggcagggagaggcagtctgtggaccaagttcaggtgaaaggatcacccatcatgttgggcatcagatcaggcaggttcacacactacctgaggaagctggtctttgtgacagacaagagctgctctgcctcttgggaaacacaggcaccagttttagtgccatcttcttgcacccaaatgctgtcctttaactcatcagttacagtgctggatccctcatcactgccaatacggggctagcaatatgtctgccccagtgaatgcagccgccacggagccccagcctcctctatggcaggggccctgtggtggggaatgaggacttctctatcattaacctccatgcagttggctcaagaaaaggatatggtagttgggcaagggggctcacacctgtaatcccagcacacttgtaatcccaggagggtcgcttgagcccaggagtttaaggccagcccgggcaacatagcaacctgtttgtaggcaaaatgaggagttgaagttccccgtaggatcttctagggctcaaccagccttcatgtgcagtgggactggcaagaaatctgtcatccctgttaccactttgaaggtctcagtgtgtatgcaggtcctgaaaagttcaagtcccacctgaaacgcaacacagcatcatgctctgattcatcagtgattccctaatcaatgccattggcttgcattgggactatctatcccagcctatccagtgacttcagcagctgcagagccccagcctcttctttggcaggggcactgtggtgaggaggaaggattcccttatcacaaatctccatccaattggttctataaacagatatggtggcccaactgttgcgggaagtcagggaccccgaacggagggactggctggagccacagctgaggaacataaattgtgaagatttcatggacatttaccagttcccaaaattaatacttttatactttcttatgcctgtctttactgcaatcactaaacataaattgtgaagatttcatgaacatttatcagttcccaaataatactcttataatttctta

SEQ ID NO: 204886 - DNA, 831 bp, Homo sapiens
  Payload ID: 20418
  Gene Name: zymogen granule protein 16B
  Uniprot ID: Q96DA0
  ENST ID: ENST00000382280
  CDS Start-End: 80-706
ccctgggccttcccccaggaagagccccacggccagctccttcctgttcccctggcggcccctcgcttcttccttctggatgggggcccagggggcccaggagagtataaaggcgatgtggagggtgcccggcacaaccagacgcccagtcacaggcgagagccctgggatgcaccggccagaggccatgctgctgctgctcacgcttgccctcctggggggccccacctgggcagggaagatgtatggccctggaggaggcaagtatttcagcaccactgaagactacgaccatgaaatcacagggctgcgggtgtctgtaggtcttctcctggtgaaaagtgtccaggtgaaacttggagactcctgggacgtgaaactgggagccttaggtgggaatacccaggaagtcaccctgcagccaggcgaatacatcacaaaagtctttgtcgccttccaagctttcctccggggtatggtcatgtacaccagcaaggaccgctatttctattttgggaagcttgatggccagatctcctctgcctaccccagccaagaggggcaggtgctggtgggcatctatggccagtatcaactccttggcatcaagagcattggctttgaatggaattatccactagaggagccgaccactgagccaccagttaatctcacatactcagcaaactcacccgtgggtcgctagggtggggtatggggccatccgagctgaggccatctgggtggtggtggctgatggtactggagtaactgagtcgggacgctgaatctgaatccaccaataaataaaggttctgcagaatcagtgca

SEQ ID NO: 204887 - DNA, 582 bp, Homo sapiens
  Payload ID: 20418
  Gene Name: zymogen granule protein 16B
  ENST ID: ENST00000571723
  CDS Start-End: 1-209
ccagacgcccagtcacaggcgagagccctgggatgcaccggccagaggccatgctgctgctgctcacgcttgccctcctggggggccccacctgggcagggaagatgtatggccctggaggaggcaagtatttcagcaccactgaagactacgaccatgaaatcacagggctgcgggtgtctgtaggtcttctcctggtgaaaaggtgagtagggctatggtcatgggcccagcgccatgtcccctcccatcccacagtttcaggaactcagggcagggggtaagcacccgtggccacttttgccacacatgcctggctactgtcgatgcttcctggctcccgctgatgcttcctggctggagcggagacggtcagaccgtcctccctaccttctcccttcaacccaagctcaactcaaccaaaaatggcccctctgtccccatgcctgataggaaagtcaggggaaagtctgtccgattactgtcaaagaagacaggaggtaagggtcagagtggaccactgactgaatatgagtcgcagaagtgttagaggcagaagtccagggccatttccttaatatc

SEQ ID NO: 204888 - DNA, 1468 bp, Homo sapiens
  Payload ID: 20418
  Gene Name: zymogen granule protein 16B
  ENST ID: ENST00000570670
  CDS Start-End: 1-286
ggcccagggggcccaggagagtataaaggcgatgtggagggtgcccggcacaaccagacgcccagtcacaggcgagagccctgggatgcaccggccagaggccatgctgctgctgctcacgcttgccctcctggggggccccacctgggcagggaagatgtatggccctggaggaggcaagtatttcagcaccactgaagactacgaccatgaaatcacagggctgcgggtgtctgtaggtcttctcctggtgaaaagatttctggaaggagttatttatgagtgaagagctggagaatccattcgcaaactgatgcatgaaagtgattagcaagagaaagttgtgagacaaaacagagaagctgagaggccagaaacctctacccaggacgctgagctcctggcggatccgatgagtccctccaggacaccgtccaccctgggatgaaggcagaggagttggaaggaggcgaggccgtcacgggacaacaggaccctatgaaggtgggcccacagcaaaaggagagatgattctagagcatccagtcttctagggcagcaaaacaacctaaattttctaagaggccacccagctgagggtgcccccggggagggctgaggcgtcagggtgacggctccactgcccactcacctgcgacctcaaagcccctctcctccttggggtgctcctgacagccacctccagggcaggcgagtggcgctgggacaaaggctggcccgactgcgccccacccaagcagacggtccttcccccagacctggcgccaaactggagtgaaagcccgaccaccgtgtctcacagggaaactgacaccagatgcgaacttccaaatggatccctccctgcaagtgtggagctggcgctaccaggcactgctctggccatgcgtctaagacacaggcagagggcgctgcccaccacgctggcgacggcctcaaagcccctgttcatgcctgggacagcgcccaaggaccttgctcatgcctgggacaggccccagggcccccactggctgcagtcagcagcgggcagggtggtgggggaaggtatggacactccgtgggccggagctgggagaacaaggcctattattggacacctggtggccatggcaaccacacaaggatgcctgagactgaaaatctgtgggcttcaaggagctccagctcttgcactggctgagtcacagtgactatataactcttactcccacttttgggacactttttgagagggacagggatcctatctaactacacgggacagacatcgcccaagaccgtcctgagcaagcctggacgctgtgaccctaacgatgaaggtgtcccgcagacaatgtccggggcaggcaccatgctctcccaacctaccacagccagatgtttttgtaaagaacaataaaaatgaattactagaaaagcaaagacataaaatacacataaaaaa

SEQ ID NO: 204889 - DNA, 716 bp, Homo sapiens
  Payload ID: 20418
  Gene Name: zymogen granule protein 16B
  ENST ID: ENST00000572863
  CDS Start-End: 57-593
acactggcccttgctttggagtcaggaggcctctcttcttcccacagagccctgggatgcaccggccagaggccatgctgctgctgctcacgcttgccctcctggggggccccacctgggcagggaagatgtatggccctggaggaggcaagtatttcagcaccactgaagactacgaccatgaaatcacagggctgcgggtgtctgtaggtcttctcctggtgaaaagtgtccaggtgaaacttggagactcctgggacgtgaaactgggagccttaggtgggaatacccaggaagtcaccctgcagccaggcgaatacatcacaaaagtctttgtcgccttccaagctttcctccggggtatggtcatgtacaccagcaaggaccgctatttctattttgggaagcttgatggccagatctcctctgcctaccccagccaagaggggcaggtgctggtgggcatctatggccagtatcaactccttggcatcaagagcattggctttgaatggaattatccactagaggagccgaccactgagccaccagttaatctcacatactcagcaaactcacccgtgggtcgctagggtggggtatggggccatccgagctgaggccatctgggtggtggtggctgatggtactggagtaactgagtcgggacgctgaatctgaatccaccaataaataaaggttctgcagaatcagtg

SEQ ID NO: 204890 - DNA, 1468 bp, Homo sapiens; identical to SEQ ID NO: 204888
  Payload ID: 20418
  Gene Name: Zymogen granule protein 16B
  ENST ID: ENST00000635502
  CDS Start-End: 1-286

SEQ ID NO: 204891 - DNA, 831 bp, Homo sapiens; identical to SEQ ID NO: 204886
  Payload ID: 20418
  Gene Name: Zymogen granule protein 16B
  ENST ID: ENST00000634500
  CDS Start-End: 80-706

SEQ ID NO: 204892 - DNA, 716 bp, Homo sapiens; identical to SEQ ID NO: 204889
  Payload ID: 20418
  Gene Name: Zymogen granule protein 16B
  ENST ID: ENST00000634906
  CDS Start-End: 57-593

SEQ ID NO: 204893 - DNA, 582 bp, Homo sapiens; identical to SEQ ID NO: 204887
  Payload ID: 20418
  Gene Name: Zymogen granule protein 16B
  ENST ID: ENST00000634234
  CDS Start-End: 1-209

SEQ ID NO: 204894 - DNA, 2493 bp, Homo sapiens
  Payload ID: 20419
  Gene Name: zyxin
  Uniprot ID: Q15942
  ENST ID: ENST00000322764
  CDS Start-End: 346-2064
ctgagccgggctggggcggcgggggcggcagtgagtggggtgggggcgagcggacctcggcggagcctccggcctgaggcaggatcagggccccttcctgggggagtttcctgcctggtccgcccttccccgctctccccgccccctctccgggccgctccttgtatggtctgggcgccgctctctccccgccccctctcttctccctccctcctccttccgtgtgtccctccccgcccggctggaggctgctccggaccgggacgcagagtctgcggacccggcgccgaggcggccacccgagacgcggcgcgcacgctccggcctgcgcagcccggcccggccatggcggccccccgcccgtctcccgcgatctccgtttcggtctcggctccggctttttacgccccgcagaagaagttcggccctgtggtggccccaaagcccaaagtgaatcccttccggcccggggacagcgagcctcccccggcacccggggcccagcgcgcacagatgggccgggtgggcgagattcccccgccgcccccggaagactttcccctgcctccacctccccttgctggggatggcgacgatgcagagggtgctctgggaggtgccttcccgccgccccctcccccgatcgaggaatcatttccccctgcgcctctggaggaggagatcttcccttccccgccgcctcctccggaggaggagggagggcctgaggcccccataccgcccccaccacagcccagggagaaggtgagcagtattgatttggagatcgactctctgtcctcactgctggatgacatgaccaagaatgatcctttcaaagcccgggtgtcatctggatatgtgcccccaccagtggccactccattcagttccaagtccagtaccaagcctgcagccgggggcacagcacccctgcctccttggaagtccccttccagctcccagcctctgccccaggttccggctccggctcagagccagacacagttccatgttcagccccagccccagcccaagcctcaggtccaactccatgtccagtcccagacccagcctgtgtctttggctaacacccagccccgagggcccccagcctcatctccggctccagcccctaagttttctccagtgactcctaagtttactcctgtggcttccaagttcagtcctggagccccaggtggatctgggtcacaaccaaatcaaaaattggggcaccccgaagctctttctgctggcacaggctcccctcaacctcccagcttcacctatgcccagcagagggagaagccccgagtgcaggagaagcagcaccccgtgcccccaccggctcagaaccaaaaccaggtgcgctcccctggggccccagggcccctgactctgaaggaggtggaggagctggagcagctgacccagcagctaatgcaggacatggagcatcctcagaggcagaatgtggctgtcaacgaactctgcggccgatgccatcaacccctggcccgggcgcagccagccgtccgcgctctagggcagctgttccacatcgcctgcttcacctgccaccagtgtgcgcagcagctccagggccagcagttctacagtctggagggggcgccgtactgcgagggctgttacactgacaccctggagaagtgtaacacctgcggggagcccatcactgaccgcatgctgagggccacgggcaaggcctatcacccgcactgcttcacctgtgtggtctgcgcccgccccctggagggcacctccttcatcgtggaccaggccaaccggccccactgtgtccccgactaccacaagcagtacgccccgaggtgctccgtctgctctgagcccatcatgcctgagcctggccgagatgagactgtgcgagtggtcgccctggacaagaacttccacatgaagtgttacaagtgtgaggactgcgggaagcccctgtcgattgaggcagatgacaatggctgcttccccctggacggtcacgtgctctgtcggaagtgccacactgctagagcccagacctgagtgaggacaggccctcttcagaccgcagtccatgccccattgtggaccacccacactgagaccacctgcccccacctcagttattgttttgatgtctagcccctcccatttccaacccctccctagcatcccaggtgccctgacccaggacccaacatggtctagggatgcaggatccccgccctggggtctggtcctcgcccatcctgcagggattgcccaccgtcttccagacaccccacctgaggggggcaccaggtttagtgctgctgctttcactgctgcacccgcgccctcggccggccccccgagcagcctttgtactctgcttgcggagggctgggagaccctccaggacattcccaccctcccccatgctgccaagttgtagctatagctacaaataaaaaaaaaccttgttttccagaa

SEQ ID NO: 204895 - DNA, 2050 bp, Homo sapiens
  Payload ID: 20419
  Gene Name: zyxin
  ENST ID: ENST00000354434
  CDS Start-End: 1-1623
gcggccccccgcccgtctcccgcgatctccgtttcggtctcggctccggctttttacgccccgcagaagaagttcggccctgtggtggccccaaagcccaaagtgaatcccttccggcccggggacagcgagcctcccccggcacccggggcccagcgcgcacagatgggccgggtgggcgagattcccccgccgcccccggaagactttcccctgcctccacctccccttgctggggatggcgacgatgcagagggtgctctgggaggtgccttcccgccgccccctcccccgatcgaggaatcatttccccctgcgcctctggaggaggagatcttcccttccccgccgcctcctccggaggaggagggagggcctgaggcccccataccgcccccaccacaggtgtcatctggatatgtgcccccaccagtggccactccattcagttccaagtccagtaccaagcctgcagccgggggcacagcacccctgcctccttggaagtccccttccagctcccagcctctgccccaggttccggctccggctcagagccagacacagttccatgttcagccccagccccagcccaagcctcaggtccaactccatgtccagtcccagacccagcctgtgtctttggctaacacccagccccgagggcccccagcctcatctccggctccagcccctaagttttctccagtgactcctaagtttactcctgtggcttccaagttcagtcctggagccccaggtggatctgggtcacaaccaaatcaaaaattggggcaccccgaagctctttctgctggcacaggctcccctcaacctcccagcttcacctatgcccagcagagggagaagccccgagtgcaggagaagcagcaccccgtgcccccaccggctcagaaccaaaaccaggtgcgctcccctggggccccagggcccctgactctgaaggaggtggaggagctggagcagctgacccagcagctaatgcaggacatggagcatcctcagaggcagaatgtggctgtcaacgaactctgcggccgatgccatcaacccctggcccgggcgcagccagccgtccgcgctctagggcagctgttccacatcgcctgcttcacctgccaccagtgtgcgcagcagctccagggccagcagttctacagtctggagggggcgccgtactgcgagggctgttacactgacaccctggagaagtgtaacacctgcggggagcccatcactgaccgcatgctgagggccacgggcaaggcctatcacccgcactgcttcacctgtgtggtctgcgcccgccccctggagggcacctccttcatcgtggaccaggccaaccggccccactgtgtccccgactaccacaagcagtacgccccgaggtgctccgtctgctctgagcccatcatgcctgagcctggccgagatgagactgtgcgagtggtcgccctggacaagaacttccacatgaagtgttacaagtgtgaggactgcgggaagcccctgtcgattgaggcagatgacaatggctgcttccccctggacggtcacgtgctctgtcggaagtgccacactgctagagcccagacctgagtgaggacaggccctcttcagaccgcagtccatgccccattgtggaccacccacactgagaccacctgcccccacctcagttattgttttgatgtctagcccctcccatttccaacccctccctagcatcccaggtgccctgacccaggacccaacatggtctagggatgcaggatccccgccctggggtctggtcctcgcccatcctgcagggattgcccaccgtcttccagacaccccacctgaggggggcaccaggtttagtgctgctgctttcactgctgcacccgcgccctcggccggccccccgagcagcctttgtactctgcttgcggagggctgggagaccctccaggacattcccaccctcccccatgctgccaagttgtagctatagctacaaataaaaaaaaaccttgttttccag

SEQ ID NO: 204896 - DNA, 2123 bp, Homo sapiens
  Payload ID: 20419
  Gene Name: zyxin
  Uniprot ID: Q15942
  ENST ID: ENST00000392910
  CDS Start-End: 449-1696
agatgttcttacctcatcgtggagctcgtggctgggagccagggctcctgggaccgttccaagtcccccgcctgggagtgggagtcgggaatgtggggcacgaatcttcccctccgggtccgttttccgaagtgtaacgggagctgcaccactcctcggcagtgcgcccggcctttcctgacctgactttcccctgcctccacctccccttgctggggatggcgacgatgcagagggtgctctgggaggtgccttcccgccgccccctcccccgatcgaggaatcatttccccctgcgcctctggaggaggagatcttcccttccccgccgcctcctccggaggaggagggagggcctgaggcccccataccgcccccaccacagcccagggagaaggtgagcagtattgatttggagatcgactctctgtcctcactgctggatgacatgaccaagaatgatcctttcaaagcccgggtgtcatctggatatgtgcccccaccagtggccactccattcagttccaagtccagtaccaagcctgcagccgggggcacagcacccctgcctccttggaagtccccttccagctcccagcctctgccccaggttccggctccggctcagagccagacacagttccatgttcagccccagccccagcccaagcctcaggtccaactccatgtccagtcccagacccagcctgtgtctttggctaacacccagccccgagggcccccagcctcatctccggctccagcccctaagttttctccagtgactcctaagtttactcctgtggcttccaagttcagtcctggagccccaggtggatctgggtcacaaccaaatcaaaaattggggcaccccgaagctctttctgctggcacaggctcccctcaacctcccagcttcacctatgcccagcagagggagaagccccgagtgcaggagaagcagcaccccgtgcccccaccggctcagaaccaaaaccaggtgcgctcccctggggccccagggcccctgactctgaaggaggtggaggagctggagcagctgacccagcagctaatgcaggacatggagcatcctcagaggcagaatgtggctgtcaacgaactctgcggccgatgccatcaacccctggcccgggcgcagccagccgtccgcgctctagggcagctgttccacatcgcctgcttcacctgccaccagtgtgcgcagcagctccagggccagcagttctacagtctggagggggcgccgtactgcgagggctgttacactgacaccctggagaagtgtaacacctgcggggagcccatcactgaccgcatgctgagggccacgggcaaggcctatcacccgcactgcttcacctgtgtggtctgcgcccgccccctggagggcacctccttcatcgtggaccaggccaaccggccccactgtgtccccgactaccacaagcagtacgccccgaggtgctccgtctgctctgagcccatcatgcctgagcctggccgagatgagactgtgcgagtggtcgccctggacaagaacttccacatgaagtgttacaagtgtgaggactgcgggaagcccctgtcgattgaggcagatgacaatggctgcttccccctggacggtcacgtgctctgtcggaagtgccacactgctagagcccagacctgagtgaggacaggccctcttcagaccgcagtccatgccccattgtggaccacccacactgagaccacctgcccccacctcagttattgttttgatgtctagcccctcccatttccaacccctccctagcatcccaggtgccctgacccaggacccaacatggtctagggatgcaggatccccgccctggggtctggtcctcgcccatcctgcagggattgcccaccgtcttccagacaccccacctgaggggggcaccaggtttagtgctgctgctttcactgctgcacccgcgccctcggccggccccccgagcagcctttgtactctgcttgcggagggctgggagaccctccaggacattcccaccctcccccatgctgccaagttgtagctatagctacaaataaaaaaaaaccttgttttccag

SEQ ID NO: 204897 - DNA, 703 bp, Homo sapiens
  Payload ID: 20419
  Gene Name: zyxin
  ENST ID: ENST00000457235
  CDS Start-End: 212-703
cggcgccgaggcggccacccgagacgcggcgcgcacgctccggcctgcggtgaggcgcggggagcggcagggcggccccacggggagggggcgcggggcgccgggagggggcgagtgggggtcaccaaggggagctgggaccgcctggggctcctgagcccggctccgcgctgcgtaacccggcgacccaccccagcagcccggcccggccatggcggccccccgcccgtctcccgcgatctccgtttcggtctcggctccggctttttacgccccgcagaagaagttcggccctgtggtggccccaaagcccaaagtgaatcccttccggcccggggacagcgagcctcccccggcacccggggcccagcgcgcacagatgggccgggtgggcgagattcccccgccgcccccggaagactttcccctgcctccacctccccttgctggggatggcgacgatgcagagggtgctctgggaggtgccttcccgccgccccctcccccgatcgaggaatcatttccccctgcgcctctggaggaggagatcttcccttccccgccgcctcctccggaggaggagggagggcctgaggcccccataccgcccccaccacagcccagggagaaggtgagcagtattgatttggagatcgactctctgtcctcactgctggatgacatgaccaagaatgatcctttc

SEQ ID NO: 204898 - DNA, 926 bp, Homo sapiens
  Payload ID: 20419
  Gene Name: zyxin
  ENST ID: ENST00000446634
  CDS Start-End: 413-926
tccaactccatgtccagtcccagacccagcctgtgtctttggctaacacccagccccgagggcccccagcctcatctccggctccagcccctaagttttctccagtgactcctaagtttactcctgtggcttccaagttcagtcctggagccccaggtggatctgggtcacaaccaaatcaaaaattggggcaccccgaagctctttctgctggcacaggctcccctcaacctcccagcttcacctatgcccagcagagggagaagccccgagtgcaggagaagcagcaccccgtgcccccaccggctcagaaccaaaaccagttcaggaaataagatcgtccaatttctggtgacgaagatgaccctgatggtcatctagtccaagcatccagagtccactgatagtgttgatgtctacctacactcggacacagcataggaagaaatgccaagggccagtgagctttgcagaatcctgggctgctcagcagcaggcaggccgggtgcgctcccctggggccccagggcccctgactctgaaggaggtggaggagctggagcagctgacccagcagctaatgcaggacatggagcatcctcagaggcagaatgtggctgtcaacgaactctgcggccgatgccatcaacccctggcccgggcgcagccagccgtccgcgctctagggcagctgttccacatcgcctgcttcacctgccaccagtgtgcgcagcagctccagggccagcagttctacagtctggagggggcgccgtactgcgagggctgttacactgacaccctggagaagtgtaacacctgcggggagcccatcactgaccgcatgctgagggccacgggcaaggcctatcacccgcactgcttcacctgtgtggtctgcgcccgccccctggagggcacctcct

SEQ ID NO: 204899 - DNA, 632 bp, Homo sapiens
  Payload ID: 20419
  Gene Name: zyxin
  ENST ID: ENST00000436448
  CDS Start-End: 1-530
agtccagtaccaagcctgcagccgggggcacagcacccctgcctccttggaagtccccttccagctcccagcctctgccccaggttccggctccggctcagagccagacacagttccatgttcagccccagccccagcccaagcctcaggtccaactccatgtccagtcccagacccagcctgtgtctttggctaacacccagccccgagggcccccagcctcatctccggctccagcccctaagttttctccagtgactcctaagtttactcctgtggcttccaagttcagtcctggagccccaggtggatctgggtcacaaccaaatcaaaaattggggcaccccgaagctctttctgctggcacaggctcccctcaacctcccagcttcacctatgcccagcagagggagaagccccgagtgcaggagaagcagcaccccgtgcccccaccggctcagaaccaaaaccaggggctgctcagcagcaggcaggccgggtgcgctcccctggggccccagggcccctgactctgaaggaggtggaggagctggagcagctgacccagcagctaatgcaggacatggagcatcctcagaggcagaatgtggctgtcaacgaactctgcggcc

SEQ ID NO: 204900 - DNA, 533 bp, Homo sapiens
  Payload ID: 20419
  Gene Name: zyxin
  ENST ID: ENST00000449630
  CDS Start-End: 1-533
ccttccgtgtgtccctccccgcccggctggaggctgctccggaccgggacgcagagtctgcggacccggcgccgaggcggccacccgagacgcggcgcgcacgctccggcctgcgactttcccctgcctccacctccccttgctggggatggcgacgatgcagagggtgctctgggaggtgccttcccgccgccccctcccccgatcgaggaatcatttccccctgcgcctctggaggaggagatcttcccttccccgccgcctcctccggaggaggagggagggcctgaggcccccataccgcccccaccacagcccagggagaaggtgagcagtattgatttggagatcgactctctgtcctcactgctggatgacatgaccaagaatgatcctttcaaagcccgggtgtcatctggatatgtgcccccaccagtggccactccattcagttccaagtccagtaccaagcctgcagccgggggcacagcacccctgcctccttggaagtccccttccagctcccagcctct

SEQ ID NO: 204901 - protein, 247 aa, Artificial Sequence
  Description of Artificial Sequence: Synthetic scFv sequence
MAQVQLVQSGAEVKEPGSSVKVSCKASGGTFSSYAIYWVRQAPGQGLEWMGWINPDSGDTNSAQQFQGRVTMTRDTSISTAYMELSRLRSDDTAMYYCARPPRGDGPDYWGQGTLVTVSSGGGGGSEIVLTQSPGTLSLSPGERATLSCRASQSVSSSYLAWYQQKPGQAPRLLIYGASSRATGIPDRFSGSGSGTDFTLTISRLEPEDFAVYYCQQYGSSPRTFGQGTKVDIKRGLGGLVDYKDDD

SEQ ID NO: 204902 - protein, 249 aa, Artificial Sequence
  Description of Artificial Sequence: Synthetic scFv sequence
MAQVQLVQSGAEVKEPGSSVKVSCKASGGTFSSYAIYWVRQAPGQGLEWMGWINPDSGDTNSAQQFQGRVTMTRDTSISTAYMELSRLRSDDTAMYYCARPPRGDGPDYWGQGTLVTVSSGGGGGSEIVLTQSPGTLSLSPGERATLSCRASQSVSSSYLAWYQQKPGQAPRLLIYGASSRATGIPDRFSGSGSGTDFTLTISRLEPEDFAVYYCQQYGSSPRTFGQGTKVDIKRGLGGLVDYKDDDDK

SEQ ID NO: 204903 - protein, 261 aa, Artificial Sequence [sequence omitted]

SEQ ID NO: 204904 - protein, 258 aa, Artificial Sequence
  Description of Artificial Sequence: Synthetic scFv sequence
DIQMTQSPSSLSASVGDRVTITCRASQGIRNYLAWYQQKPGKAPKLLIYAASTLQSGVPSRFSGSGSGTDFTLTISSLQPEDVATYYCQRYNRAPYTFGQGTKVEIKRGSTSGSGKPGSGEGSTKGEVQLVESGGGLVQPGRSLRLSCAASGFTFDDYAMHWVRQAPGKGLEWVSAITWNSGHIDYADSVEGRFTISRDNAKNSLYLQMNSLRAEDTAVYYCAKVSYLSTASSLDYWGQGTLVTVSSGGGGSGGGGSC

SEQ ID NO: 204905 - protein, 242 aa, Artificial Sequence
  Description of Artificial Sequence: Synthetic scFv sequence
ALQLQQSGAELVRPGASVTLSCKASGYTFTDYEMHWVKQTPVHGLEWIGAIDPETGGTAYNQKFEGKAILTADKSSSTAYMELRSLTSEDSPVYYCARRRYYGSSSFDYWGQGTTLTVSSGGGGSGGGGSGGGGSDVQMIQTPSSLSASLGDRVTISCRASQDIGNYLNWYQQKPDGTVKLLIYYTSRLHSGVPSRFSGSGSGTEYSLTISNLEQEDIATYFCQQGSALPPTFGGGTKLEIN

SEQ ID NO: 204906 - protein, 246 aa, Artificial Sequence
  Description of Artificial Sequence: Synthetic scFv sequence
DVKLQESGPGLVAPSQSLSITCTVSGFSLTSYAVSWVRQPPGKGLEWLGIIWSGGATNYNSALKSRLSISKDNSKSQVFLKMNGLQTDDTARYYCAREHYYGSSAMDYWGQGASITVSSGGGGSGGGGSGGGGSGIVMTQSPLSLPVSLGDQASISCRSSQSIVHSYGNTYLFWYLQKPGQSPKLLIYRVSNRFSGVPDRFSGSGSGTNFTLKISRVEAEDMGVYYCFQGTHVPYTFGGGTKLEIK

SEQ ID NO: 204907 - protein, 245 aa, Artificial Sequence
  Description of Artificial Sequence: Synthetic scFv sequence
DVQLQESGPVLVKTGASVKMSCTASGYTFTDHFMDWVKQSHGKSLEWIGSLNPYSGGTSYNQKFKGKATLTVDKSSSTAYMELNSLTSVDSAVYYCARHNWGAYFDYWGQGTTLTVSSGGGGSGGGGSGGGGSDIVMTQAAPSVPVTPGESVSISCRSSKSLLHSNGNTYLYWFLQRPGQSPQRLIYYMSNLASGVPDRFSGRGSGTDFTLRISRVEAEDVGVYYCMQGLEDPYTFGGGTKLEIK

SEQ ID NO: 204908 - protein, 246 aa, Artificial Sequence
  Description of Artificial Sequence: Synthetic scFv sequence
QVQLQQSGAELVKPGASVKISCKASGYAFSSYWMNWVKQRPGKGLEWIGQIYPGDGDTTYNGKFKGKATLTADKSSSTVYMQLNSLTSEDSAVYFCVRYYYGSSGYFDYWGQGTTLTVSSGGGGSGGGGSGGGGSDVQMIQTPDSLAVSLGQRATISCRASESVDNYGISFMHWYQQKPGQSPKLLIYRASNLESGIPARFSGSGSRTDFTLTINPVETDDVATYYCQQNNKDPPTFGGGTKLEIK

SEQ ID NO: 204909 - protein, 248 aa, Artificial Sequence
  Description of Artificial Sequence: Synthetic scFv sequence
QVQLQQSGAEVKKPGSSVKVSCKASGFSLTSYAISWVRQAPGQGLEWMGGIIWSGGATNYAQKFQGRVTITADESTSTAYMELSSLRSEDTAVYYCAREHYYGSSAMDYWWGQGTMVTVSSGGGGSGGGGSGGGGSEIVLTQSPATLSLSPGERATLSCRASQSIVHSYGNTYAWYQQKPGQAPRLLIYRVSRATGIPARFSGSGSGTDFTLTISSLEPEDFAVYYCFQGTHVPYTFFGQGTKLEIKR

SEQ ID NO: 204910 - protein, 247 aa, Artificial Sequence
  Description of Artificial Sequence: Synthetic scFv sequence
QVQLQQSGAEVKKPGSSVKVSCKASGYAFSSYISWVRQAPGQGLEWMGGQIYPGDGDTNYAQKFQGRVTITADESTSTAYMELSSLRSEDTAVYYCVRYYYGSSGYFDYWWGQGTMVTVSSGGGGSGGGGSGGGGSEIVLTQSPATLSLSPGERATLSCRASESVDNYGISFAWYQQKPGQAPRLLIYRASRATGIPARFSGSGSGTDFTLTISSLEPEDFAVYYCQQNNKDPPTFFGQGTKLEIKR

SEQ ID NO: 204911 - protein, 246 aa, Artificial Sequence
  Description of Artificial Sequence: Synthetic scFv sequence
QVQLQQSGAEVKKPGSSVKVSCKASGYTFTDHFISWVRQAPGQGLEWMGGLNPYSGGTNYAQKFQGRVTITADESTSTAYMELSSLRSEDTAVYYCARHNWGAYFDYWWGQGTMVTVSSGGGGSGGGGSGGGGSEIVLTQSPATLSLSPGERATLSCRASKSLLHSNGNTYAWYQQKPGQAPRLLIYYMSRATGIPARFSGSGSGTDFTLTISSLEPEDFAVYYCMQGLEDPYTFFGQGTKLEIKR

SEQ ID NO: 204912 - protein, 243 aa, Artificial Sequence
  Description of Artificial Sequence: Synthetic scFv sequence
QVQLQQSGAEVKKPGSSVKVSCKASGYTFTDYEISWVRQAPGQGLEWMGGIDPETGGTNYAQKFQGRVTITADESTSTAYMELSSLRSEDTAVYYCARRRYYGSSSFDYWWGQGTMVTVSSGGGGSGGGGSGGGGSEIVLTQSPATLSLSPGERATLSCRASQDIGNYAWYQQKPGQAPRLLIYYTSRATGIPARFSGSGSGTDFTLTISSLEPEDFAVYYCQQGSALPPTFFGQGTKLEIKR

SEQ ID NO: 204913 - protein, 242 aa, Artificial Sequence
  Description of Artificial Sequence: Synthetic scFv sequence
QVQLQQSGAEVKKPGSSVKVSCKASGYTFTDYEISWVRQAPGQGLEWMGGIDPETGGTNYAQKFQGRVTITADESTSTAYMELSSLRSEDTAVYYCARRYYGSSSFDYWWGQGTMVTVSSGGGGSGGGGSGGGGSEIVLTQSPATLSLSPGERATLSCRASQDIGNYAWYQQKPGQAPRLLIYYTSRATGIPARFSGSGSGTDFTLTISSLEPEDFAVYYCQQGSALPPTFFGQGTKLEIKR

SEQ ID NO: 204914 - protein, 477 aa, Artificial Sequence
  Description of Artificial Sequence: Synthetic scFv sequence
QVQLQQSGAELARPGASVKMSCKASGYTFTRYTMHWVKQRPGQGLEWIGYINPSRGYTNYNQKFKDKATLTTDKSSSTAYMQLSSLTSEDSAVYYCARYYDDHYCLDYWGQGTTLTVSSGGGGSGGGGSGGGGSQIVLTQSPAIMSASPGEKVTMTCSASSSVSYMNWYQQKSGTSPKRWIYDTSKLASGVPAHFRGSGSGTSYSLTISGMEAEDAATYYCQQWSSNPFTFGSGTKLEINRGAAAEPKSCDKTHTCPPCPAPELLGGPSVFLFPPKPKDTLMISRTPEVTCVVVDVSHEDPEVKFNWYVDGVEVHNAKTKPREEQYNSTYRVVSVLTVLHQDWLNGKEYKCKVSNKALPAPIEKTISKAKGQPREPQVYTLPPSRDELTKNQVSLTCLVKGFYPSDIAVEWESNGQPENNYKTTPPVLDSDGSFFLYSKLTVDKSRWQQGNVFSCSVMHEALHNHYTQKSLSLSPGK

SEQ ID NO: 204915 - protein, 241 aa, Artificial Sequence
  Description of Artificial Sequence: Synthetic scFv sequence
QVQLQQSGAELVKPGASVKLSCKTSGYTFTNYDINWVRQRPGQGLEWIGWIFPGDDSTQYNEKFKGKATLTTDTSSSTAYMQLSRLTSEDSAVYFCARQTTGTWFAYWGQGTLVTVSAGGGGSGGGGSGGGGSDIVMTQSPATLSVTPGDRVTLSCRASQSISDYLYWYQQKSHESPRLLIKYASQSISGIPSRFSGSGSGSDFTLSINSVEPEDVGVYYCQNGHSFPLTFGAGTKLELKR

SEQ ID NO: 204916 - protein, 241 aa, Artificial Sequence
  Description of Artificial Sequence: Synthetic scFv sequence
QVQLVQSGAEVVKPGASCKLSCKTSGYTFTNYDINWVRQRPGQGLEWIGWIFPGDGSTQYNEKFKGKATLTTDTSTSTAYMELSSLRSEDTAVYFCARQTTATWFAYWGQGTLVTVSSGGGGSGGGGSGGVGSEIVMTQSPATLSVSPGERVTLSCRASQSIGDYLYWYQQKSHESPRLLIKYASQSISGIPARFSGSGSGSEFTLTINSVEPEDVGVYYCQNGHSFPLTFGQGTKLELKR

SEQ ID NO: 204917 - protein, 200 aa, Artificial Sequence
  Description of Artificial Sequence: Synthetic scFv sequence
QVQLVQSGAEVVKPGASVKLSCKASGYTFTNYDINWVRQRPEQGLEWIGWIFPGDGSTQYNEKFKGKATLTTDTSTSTAYMELSSLRSEDTAVYFCARQTTATWFAYWGQGTLVTVSSGGGGSGGGGSGGGGSEIVMTQSPATLSVSPGERVSLSCRASQSISDYLHWYQQKSHESPRLLIKYASQSISGIPARFSGSGS

SEQ ID NO: 204918 - protein, 241 aa, Artificial Sequence
  Description of Artificial Sequence: Synthetic scFv sequence
QVQLVQSGAEVVKPGASVKLSCKASGYTFTNYDINWVRQRPEQGLEWIGWIFPGDGSTQYNEKFKGKATLTTDTSTSTAYMELSSLRSEDTAVYFCARQTTATWFAYWGQGTLVTVSSGGGGSGGGGSGGGGSEIVMTQSPATLSVSPGERVSLSCRASQSISDYLHWYQQKSHESPRLLIKYASQSISGIPARFSGSGSGSEFTLTINSVEPEDVGVYYCQNGHSFPLTFGQGTKLELKR

SEQ ID NO: 204919 - protein, 241 aa, Artificial Sequence
  Description of Artificial Sequence: Synthetic scFv sequence
QVQLVQSGAEVVKPGASVKLSCKTSGYTFTNYDINWVRQRPGQGLEWIGWIFPGDDSTQYNEKFKGKATLTTDTSTSTAYMELSSLRPEDTAVYFCARQTTGTWFAYWGQGTLVTVSSGGGGSGGGGSGGGGSEIVMTQSPATLSVSPGERVTLSCRASQSISDYLYWYQQKSHESPRLLIKYASQSIPGIPARFSGSGSGSEFTLTINSVEPEDVGVYYCQNGHSFPLTFGQGTKLELKR

SEQ ID NO: 204920 - protein, 241 aa, Artificial Sequence
  Description of Artificial Sequence: Synthetic scFv sequence
QVQLVQSGAEVVKPGASVKLSCKTSGYTFTNYDINWVRQRPGQGLEWIGWIFPGDDSTQYNEKFKGKATLTTDTSTSTAYMELSSLRSEDTAVYFCARQTTGTWFAYWGQGTLVTVSSGGGGSGGGGSGGGGSEIVMTQSPATLSVSPGERVTLSCRASQSISDYLYWYQQKSHESPRLLIKYASQSISGIPARFSGSGSGSEFTLTINSVEPEDVGVYYCQNGHSFPLTFGQGTKLELKR

SEQ ID NO: 204921 - protein, 200 aa, Artificial Sequence
  Description of Artificial Sequence: Synthetic scFv sequence
QVQLVQSGAEVVKPGASVKLSCKTSGYTFTNYDINWVRQRPGQGLEWIGWIFPGDGSTQYNEKFKGKATLTTDTSTSTAYLELSSLGSEDTAVYFCARQTTGTWFAYWGQGTLVTVSSGGGGSGGGGSGGGGSEIVMTQSPATLSVSPGERVTLSCRASQSISDYLYWYQQKSHESPRLLIKYASQSISGIPARFSGSGS

SEQ ID NO: 204922 - protein, 241 aa, Artificial Sequence
  Description of Artificial Sequence: Synthetic scFv sequence
QVQLVQSGAEVVKPGASVKLSCKTSGYTFTNYDINWVRQRPGQGLEWIGWIFPGDGSTQYNEKFKGKATLTTDTSTSTAYLELSSLGSEDTAVYFCARQTTGTWFAYWGQGTLVTVSSGGGGSGGGGSGGGGSEIVMTQSPATLSVSPGERVTLSCRASQSISDYLYWYQQKSHESPRLLIKYASQSISGIPARFSGSGSGSEFTLTINSVEPEDVGVYYCQNGHSFPLTFGQGTKLELKR

SEQ ID NO: 204923 - protein, 200 aa, Artificial Sequence
  Description of Artificial Sequence: Synthetic scFv sequence
QVQLVQSGAEVVKPGASVKLSCKTSGYTFTNYDINWVRQRPGQGLEWIGWIFPGDGSTQYNEKFKGKATLTTDTSTSTAYMELSSLGSEDTAVYFCARQTTATWFAYWGQGTLVTVSSGGGGSGGGGSGGGGSEIVMTQSPATLSVSPGERVTLSCRASQSISDYLYWYQQKSHESPRLLIKYASQSISGIPARFSGSGS

SEQ ID NO: 204924 - protein, 241 aa, Artificial Sequence
  Description of Artificial Sequence: Synthetic scFv sequence
QVQLVQSGAEVVKPGASVKLSCKTSGYTFTNYDINWVRQRPGQGLEWIGWIFPGDGSTQYNEKFKGKATLTTDTSTSTAYMELSSLGSEDTAVYFCTRQTTATWFAYWGQGTLVTVSSGGGGSGGGGSSGGGSEIVMTQSPATLSVSPGERVTLSCRASQSIGDYLYWYQQKSHESPRLLIKYASQSISGIPARFSGSGSGSEFTLTINSVEPEDVGVYYCQNGHSFPLTFGQGTKLELKR

SEQ ID NO: 204925 - protein, 200 aa, Artificial Sequence
  Description of Artificial Sequence: Synthetic scFv sequence
QVQLVQSGAEVVKPGASVKLSCKTSGYTFTNYDINWVRQRPGQGLEWIGWIFPGDGSTQYNEKFKGKATLTTDTSTSTAYMELSSLRSEDTAVYFCARQTTATWFAYWGQGTLVTVSSGGGGSGGGGSGGGGSEIVMTQSPATLSVSPGERVTLSCRASQSISDYLYWYQQKSHESPRLLIKYASQSISGIPARFSGSGS

SEQ ID NO: 204926 - protein, 241 aa, Artificial Sequence
  Description of Artificial Sequence: Synthetic scFv sequence
QVQLVQSGAEVVKPGASVKLSCKTSGYTFTNYDINWVRQRPGQGLEWIGWIFPGDGSTQYNEKFKGKATLTTDTSTSTAYMELSSLRSEDTAVYFCARQTTATWFAYWGQGTLVTVSSGGGGSGGGGSGGGGSEIVMTQSPATLSVSPGERVTLSCRASQSISDYLYWYQQKSHESPRLLIKYASQSISGIPARFSGSGSGSEFTLTINSVEPEDVGVYYCQNGHSFPLTFGQGTKLELKR

SEQ ID NO: 204927 - protein, 200 aa, Artificial Sequence
  Description of Artificial Sequence: Synthetic scFv sequence
QVQLVQSGAEVVKPGASVKLSCKTSGYTFTNYDINWVRQRPGQGLEWIGWIFPGDGSTQYNEKFKGKATLTTDTSTSTAYMELSSLSSEDTAVYFCARQTTATWFAYWGQGTLVTVSSGGGGSGGGGSGGGGSEIVMTQSPATLSVSPGERVTLSCRASQEISDYLYWYQQKSHESPRLLIKYASQSISGIPARFSGSGS

SEQ ID NO: 204928 - protein, 200 aa, Artificial Sequence
  Description of Artificial Sequence: Synthetic scFv sequence
QVQLVQSGAEVVKPGASVKLSCKTSGYTFTNYDINWVRQRPGQGLEWVGWIFPGDGSTQYNEKFKGKATLTTDTSTSTAYMELSSLRSEDTAVYFCARQTTSTWFAYWGQGTLVTVSSGGGGSGGGGSGGGGSEIVMTQSPATLSVSPGERVTLSCRASQEISDYLYWYQQKSHESPRLLIKYASQSISGIPARFSGSGS

SEQ ID NO: 204929 - protein, 241 aa, Artificial Sequence
  Description of Artificial Sequence: Synthetic scFv sequence
QVQLVQSGAEVVKPGASVKLSCKTSGYTFTNYDINWVRQRPGQGLEWVGWIFPGDGSTQYNEKFKGKATLTTDTSTSTAYMELSSLRSEDTAVYFCARQTTSTWFAYWGQGTLVTVSSGGGGSGGGGSGGGGSEIVMTQSPATLSVSPGERVTLSCRASQPISDYLYWYQQKSHESPRLLIKYASQSISGIPARFSGSGSGSEFTLTINSVEPEDVGVYYCQNGYSFPLTFGQGTKLELKR

SEQ ID NO: 204930 - protein, 241 aa, Artificial Sequence
  Description of Artificial Sequence: Synthetic scFv sequence
QVQLVQSGAEVVKPGASVKVSCKASGYTFTNYDINWVRQRPEQGLEWIGWIFPGDGSTQYNEKFKGRVTMTTDTSTSTVYMELSSLRSEDTAVYFCARQTTATWFAYWGQGTLVTVSSGGGGSGGGGSGGGGSEIVMTQSPATLSVSPGERVTLSCRASQSISDYLHWYQQKSHQAPRLLIKYASQSISGIPARFSGSGSGSEFTLTISSLQPEDFGVYYCQNGHSFPLTFGQGTKLELKR

SEQ ID NO: 204931 - protein, 241 aa, Artificial Sequence
  Description of Artificial Sequence: Synthetic scFv sequence
QVQLVQSGAEVVKPGASVKVSCKTSGYTFTNYDINWVRQRPGQGLEWIGWIFPGDDSTQYNEKFKGRVTMTTDTSTSTVYMELSSLRSEDTAVYFCARQTTGTWFAYWGQGTLVTVSSGGGGSGGGGSGGGGSEIVMTQSPATLSVSPGERVTLSCRASQSISDYLYWYQQKSHQAPRLLIKYASQSISGIPARFSGSGSGSEFTLTISSLQPEDFGVYYCQNGHSFPLTFGQGTKLELKR

SEQ ID NO: 204932 - protein, 200 aa, Artificial Sequence
  Description of Artificial Sequence: Synthetic scFv sequence
  MOD_RES (3)..(3): Any amino acid
QVXLVQSGAEVVKPGASVKLSCKASGYTFTNYDINWARQRPGQGLEWIGWIFPGDGSTQYNEKFKGKATLTTDTSTGTAYMELSSLRSEDTAVYFCARQTTATWFAYWGQGTVVTVSSGGGGSGGGGSGGGGNEIVMTQSPATLSVSPGERVTLSCRASQSISDYVYWYQQKPHESPRLLIKYASQSISGIPARFSGSGS

SEQ ID NO: 204933 - protein, 200 aa, Artificial Sequence
  Description of Artificial Sequence: Synthetic scFv sequence
  MOD_RES (3)..(3): Any amino acid
QVXLVQSGAEVVKPGASVKLSCKTSGYTFTNYDINWVRQRPGQGLEWIGWIFPGDGSTQYNEKFKGKATLTTDTSTSTAYLELSSLGSEDTAVYFCARQTTGTWFAYWGQGTLVTVSSGGGGSGGGGSGGGGSEIVMTQSPATLSVSPGERVTLSCRASQSISDYLYWYQQKSHESPRLLIKYASQSISGIPARFSGSGS

SEQ ID NO: 204934 - protein, 200 aa, Artificial Sequence
  Description of Artificial Sequence: Synthetic scFv sequence
  MOD_RES (3)..(3): Any amino acid
QVXLVQSGAEVVKPGASVKLSCKTSGYTFTNYDINWVRQRPGQGLEWIGWIFPGDGSTQYNEKFKGKATLTTDTSTSTAYMELSSLGSEDTAVYFCTRQTTATWFAYWGQGTLVTVSSGGGGSGGGGSSGGGSEIVMTQSPATLSVSPGERVTLSCRASQSIGDYLYWYQQKSHESPRLLIKYASQSISGIPARFSGSGS

SEQ ID NO: 204935 - protein, 200 aa, Artificial Sequence
  Description of Artificial Sequence: Synthetic scFv sequence
  MOD_RES (3)..(3): Any amino acid
QVXLVQSGAEVVKPGASVKLSCKTSGYTFTNYDINWVRQRPGQGLEWIGWIFPGDGSTQYNEKFKGKATLTTDTSTSTAYMELSSLRSEDTAVYFCARQTTATWFAYWGQGTLVTVSSGGGGSGGGGSGGVGSEIVMTQSPATLSVSPGERVTLSCRASQSIGDYLYWYQQKSHESPRLLIKYASQSISGIPARFSGSGS

SEQ ID NO: 204936 - protein, 200 aa, Artificial Sequence
  Description of Artificial Sequence: Synthetic scFv sequence
  MOD_RES (3)..(3): Any amino acid
  MOD_RES (5)..(5): Any amino acid
QVXLXQSGAEVVKPGASVKLSCKTSGYTFTNYDINWVRQRPGQGLEWIGWIFPGDGSTQYNEKFKGKATLTTDTSTSTAYLELSSLGSEDTAVYFCARQTTGTWFAYWGQGTLVTVSSGGGGSGGGGSGGGGSEIVMTQSPATLSVSPGERVTLSCRASQSISDYLYWYQQKSHESPRLLIKYASQSISGIPARFSGSGS

SEQ ID NO: 204937 - protein, 200 aa, Artificial Sequence
  Description of Artificial Sequence: Synthetic scFv sequence
  MOD_RES (3)..(3): Any amino acid
  MOD_RES (5)..(5): Any amino acid
QVXLXQSGAEVVKPGASVKLSCKTSGYTFTNYDINWVRQRPGQGLEWIGWIFPGDGSTQYNEKFKGKATLTTDTSTSTAYMELSSLRSEDTAVYFCARQTTATWFAYWGQGTLVTVSSGGGGSGGGGSGGGGSEIVMTQSPATLSVSPGERVTLSCRASQSISDYLYWYQQKSHESPRLLIKYASQSISGIPARFSGSGS

SEQ ID NO: 204938 - protein, 200 aa, Artificial Sequence
  Description of Artificial Sequence: Synthetic scFv sequence
  MOD_RES (3)..(4): Any amino acid
  MOD_RES (18)..(18): Any amino acid
QVXXVQSGAEVVKPGASXKLSCKTSGYTFTNYDINWVRQRPGQGLEWIGWIFPGDGSTQYNEKFKGKATLTTDTSTSTAYMELSSLRSEDTAVYFCARQTTATWFAYWGQGTLVTVSSGGGGSGGGGSGGVGSEIVMTQSPATLSVSPGERVTLSCRASQSIGDYLYWYQQKSHESPRLLIKYASQSISGIPARFSGSGS

SEQ ID NO: 204939 - protein, 200 aa, Artificial Sequence
  Description of Artificial Sequence: Synthetic scFv sequence
  MOD_RES (3)..(5): Any amino acid
QVXXXQSGAEVVKPGASVKLSCKTSGYTFTNYDINWVRQRPGQGLEWIGWIFPGDDSTQYNEKFKGKATLTTDTSTSTAYMELSSLRSEDTAVYFCARQTTGTWFAYWGQGTLVTVSSGGGGSGGGGSGGGGSEIVMTQSPATLSVSPGERVTLSCRASQSISDYLYWYQQKSHESPRLLIKYASQSIPGIPARFSGSGS

SEQ ID NO: 204940 - protein, 200 aa, Artificial Sequence
  Description of Artificial Sequence: Synthetic scFv sequence
  MOD_RES (3)..(5): Any amino acid
  MOD_RES (170)..(171): Any amino acid
QVXXXQSGAEVVKPGASVKLSCKTSGYTFTNYDINWVRQRPGQGLEWIGWIFPGDGSTQYNEKFKGKATLTTDTSTSTAYLELSSLGSEDTAVYFCARQTTGTWFAYWGQGTLVTVSSGGGGSGGGGSGGGGSEIVMTQSPATLSVSPGERVTLSCRASQSISDYLYWYXXKSHESPRLLIKYASQSISGIPARFSGSGS

SEQ ID NO: 204941 - protein, 200 aa, Artificial Sequence
  Description of Artificial Sequence: Synthetic scFv sequence
  MOD_RES (2)..(5): Any amino acid
QXXXXQSGAEVVKPGASVKLSCKTSGYTFTNYDINWVRQRPGQGLEWIGWIFPGDGSTQYNEKFKGKATLTTDTSTSTAYMELSSLRSEDTAVYFCARQTTATWFAYWGQGTLVTVSSGGGGSGGGGSGGVGSEIVMTQSPATLSVSPGERVTLSCRASQSIGDYLYWYQQKSHESPRLLIKYASQSISGIPARFSGSGS

SEQ ID NO: 204942 - protein, 200 aa, Artificial Sequence
  Description of Artificial Sequence: Synthetic scFv sequence
  MOD_RES (2)..(6): Any amino acid
  MOD_RES (17)..(19): Any amino acid
QXXXXXSGAEVVKPGAXXXLSCKTSGYTFTNYDINWVRQRPGQGLEWIGWIFPGDGSTQYNEKFKGKATLTTDTSTSTAYLELSSLGSEDTAVYFCARQTTGTWFAYWGQGTLVTVSSGGGGSGGGGSGGGGSEIVMTQSPATLSVSPGERVTLSCRASQSISDYLYWYQQKSHESPRLLIKYASQSISGIPARFSGSGS

SEQ ID NO: 204943 - protein, 253 aa, Artificial Sequence
  Description of Artificial Sequence: Synthetic scFv sequence
DIVMTQTPATLSVSPGKRATLSCRASQSVSSNYLAWYQQKPGQAPRLLIYGASRRATGIPDRFSGSGSGTDFTLTISSLQAEDVAVYYCQQYGSSPRTFGQGTKLEIKGGSSRSSSSGGGGSGGGGQVTLKESGAEVKNPGSSVKVSCKASGGTFSSYAISWLRQAPGQGLEWMGWINPNSGGSDYAQRFQGRVTMTRDTSINTVYMELSRLRSDDTAVYYCARVEKRGYYYGMDVWGQGTMVTVSSFEGSEQ

SEQ ID NO: 204944 - protein, 255 aa, Artificial Sequence
  Description of Artificial Sequence: Synthetic scFv sequence
QPGLTQPPSASGTPGQRVTISCSGSSSNIGSNYVYWYQQFPGTAPKLLIYRNNQRPSGVPDRFSGSKSGTSASLAISGLRSEDEADYYCAAWDDSLSVWVFGGGTKVTVLGGSSRSSSSGGSGSGGGGQVTLKESGAEVKNPGSSVKVSCKASGGTFSSYAISWLRQAPGQGLEWMGWINPNSGGSDYAQRFQGRVTMTRDTSINTVYMELSRLRSDDTAVYYCARVEKRGYYYGMDVWGQGTMVTVSSFEGSEQ

SEQ ID NO: 204945 - protein, 263 aa, Artificial Sequence
  Description of Artificial Sequence: Synthetic scFv sequence
QPVLTQSHSVSESPGKTVTITCTGSGGNIATQYVQWYQQRPGSGPTTVIYDDDQRPSGVPDRFTGSIDSSSNSASLTISGLKTEDEADYYCQSYDSTNHGVFGGGAKVTVLGGSSRSSSSGGGGSGGGGQVQLQQWGPGLVKPSETLSLTCTVSGGSISSSSYYWGWIRQPPGKGLEWIGSIYYSGSTYYNPSLKSRVTISVDTSKNQFSLKLSSVTAADTAVYYCARLSKGYSSSWAYSYYGPDAWGQGTMVTVSSFEGSEQ

SEQ ID NO: 204946 - protein, 263 aa, Artificial Sequence
  Description of Artificial Sequence: Synthetic scFv sequence
QPVLTQSHTVTITCTGYVQWYQQRSVSESPGKSGGNIATQPGSGPTTVIYDDDQRPSGVPDRFTGSIDSSSNSASLTISGLKTEDEADYYCQSYDSTNHGVFGGGAKVTVLGGSSRSSSSGGGGSGGGGQVQLQQWGPGLVKPSETLSLTCTVSGGSISSSSYYWGWIRQPPGKGLEWIGSIYYSGSTYYNPSLKSRVTISVDTSKNQFSLKLSSVTAADTAVYYCARLSKGYSSSWAYSYYGPDAWGQGTMVTVSSFEGSEQ

SEQ ID NO: 204947 - protein, 254 aa, Artificial Sequence
  Description of Artificial Sequence: Synthetic scFv sequence
RPVLTQPPSAAGTPGQRVTISCSGSSSNIGSNYVYWYQQLPGMAPKLLIYTNNQRPSGVPGRFSGSKSGTSASLAISGLRSEDEADYYCAAWDDSLNGWVFGGGTELTVLGGSSRSSSSGGGGSGGGGQVQLQESGPGLVKPSETLSLTCNVSGRSVSSGFYWSWIRQRPGKGLEWVGSIYRSGLTYYNPSLKSRVTISVDTSKNQFSLKLSSVTAADTAVYYCARATPWYYYGMDVWGQGTTVTVSSFEGSEQ

SEQ ID NO: 204948 - protein, 249 aa, Artificial Sequence
  Description of Artificial Sequence: Synthetic scFv sequence
DIQMTQSPSSLSASVGDRVTITCSASQDISNYLNWYQQKPGKAPKLLIYYTSNLHSGVPSRFSGSGSGTDFTLTISSLQPEDFATYYCQQYRKLPWTFGQGTKLEIKRGGGGSGGGGSGGGGSGGGGSQVQLVQSGAEVKKPGSSVKVSCKASGGTFSNYWMHWVRQAPGQGLEWMGATYRGHSDTYYNQKFKGRVTITADKSTSTAYMELSSLRSEDTAVYYCARGAIYNGYDVLDNWGQGTLVTVSS

SEQ ID NO: 204949 - protein, 246 aa, Artificial Sequence
  Description of Artificial Sequence: Synthetic scFv sequence
DIVLTQSPASLAMSLGKRATISCRASESVSVIGAHLIHWYQQKPGQPPKLLIYLASNLETGVPARFSGSGSGTDFTLTIDPVEEDDVAIYSCLQSRIFPRTFGGGTKLEIKGSTSGSGKPGSGEGSTKGQIQLVQSGPELKKPGETVKISCKASGYTFTDYSINWVKRAPGKGLKWMGWINTETREPAYAYDFRGRFAFSLETSASTAYLQINNLKYEDTATYFCALDYSYAMDYWGQGTSVTVSS

SEQ ID NO: 204950 - DNA, 738 bp, Artificial Sequence
  Description of Artificial Sequence: Synthetic scFv sequence
gacatcgtgctgacacagagccctgcatccctggcaatgtccctgggcaagagggcaaccatctcttgcagggcctctgagagcgtgtccgtgatcggcgcccacctgatccactggtaccagcagaagccaggacagccacctaagctgctgatctatctggcctccaacctggagacaggagtgcctgcacggttctctggcagcggctccggcaccgactttacactgaccatcgatccagtggaggaggacgatgtggccatctactcttgcctgcagagcagaatcttccccaggacatttggcggcggcaccaagctggagatcaagggctctacaagcggctccggcaagcctggctccggagagggctctaccaagggacagatccagctggtgcagtccggacccgagctgaagaagcctggcgagacagtgaagatcagctgtaaggcctccggctacacattcaccgattattctatcaactgggtgaagagggcaccaggcaagggcctgaagtggatgggctggatcaatacagagacacgggagcccgcctacgcctatgacttcagaggcaggttcgcctttagcctggagacatctgccagcaccgcctacctgcagatcaacaatctgaagtacgaggatacagccacctatttttgcgccctggactacagctatgccatggattattggggccagggcacatccgtgaccgtgagctcc

SEQ ID NO: 204951 - protein, 238 aa, Artificial Sequence
  Description of Artificial Sequence: Synthetic scFv sequence
EVQLLETGGGLVQPGGSLRLSCAVSGFALSNHGMSWVRRAPGKGLEWVSGIVYSGSTYYAASVKGRFTISRDNSRNTLYLQMNSLRPEDTAIYYCSAHGGESDVWGQGTTVTVSSASGGGGSGGRASGGGGSEIVLTQSPATLSVSPGESATLSCRASQSVSSNLAWYQQKPGQAPRLLIYGASTRASGIPDRFSGSGSGTDFTLTISSLQAEDVAVYYCQQYGSSLTFGGGTKVEIK

SEQ ID NO: 204952 - protein, 240 aa, Artificial Sequence
  Description of Artificial Sequence: Synthetic scFv sequence
EVQLVESGGGLVKPGGSLRLSCAASGFTFSDYYMSWIRQAPGKGLEWVSYISSSGSTIYYADSVKGRFTISRDNAKNSLYLQMNSLRAEDTAVYYCARDLRGAFDIWGQGTMVTVSSGGGGSGGGGSGGGGSSYVLTQSPSVSAAPGYTATISCGGNNIGTKSVHWYQQKPGQAPLLVIRDDSVRPSKIPGRFSGSNSGNMATLTISGVQAGDEADFYCQVWDSDSEHVVFGGGTKLTVL

SEQ ID NO: 204953 - protein, 241 aa, Artificial Sequence
  Description of Artificial Sequence: Synthetic scFv sequence
EVQLVESGGGLVQPGGSLRLSCAASGFTFSSYAMSWVRQAPGKGLEWVSAISGSGGSTYYADSVKGRFTISRDNSKNTLYLQMNSLRAEDTAVYYCAKVVRDGMDVWGQGTTVTVSSGGGGSGGGGSGGGGSEIVLTQSPATLSLSPGERATLSCRASQSVSSSYLAWYQQKPGQAPRLLIYGASSRATGIPDRFSGNGSGTDFTLTISRLEPEDFAVYYCQQYGSPPRFTFGPGTKVDIK

SEQ ID NO: 204954 - protein, 106 aa, Artificial Sequence
  Description of Artificial Sequence: Synthetic scFv sequence
EVQLVESGGGLVQPGGSLRLSCAVSGFALSNHGMSWVRRAPGKGLEWVSGIVYSGSTYYAASVKGRFTISRDNSRNTLYLQMNSLRPEDTAIYYCSAHGGESDVWG

SEQ ID NO: 204955 - protein, 239 aa, Artificial Sequence
  Description of Artificial Sequence: Synthetic scFv sequence
EVQLVESGGGLVQPGGSLRLSCAVSGFALSNHGMSWVRRAPGKGLEWVSGIVYSGSTYYAASVKGRFTISRDNSRNTLYLQMNSLRPEDTAIYYCSAHGGESDVWGQGTTVTVSSASGGGGSGGRASGGGGSDIQLTQSPSSLSASVGDRVTITCRASQSISSYLNWYQQKPGKAPKLLIYAASSLQSGVPSRFSGSGSGTDFTLTISSLQPEDFATYYCQQSYSTPYTFGQGTKVEIK

SEQ ID NO: 204956 - protein, 241 aa, Artificial Sequence
  Description of Artificial Sequence: Synthetic scFv sequence
EVQLVESGGGLVQPGGSLRLSCAVSGFALSNHGMSWVRRAPGKGLEWVSGIVYSGSTYYAASVKGRFTISRDNSRNTLYLQMNSLRPEDTAIYYCSAHGGESDVWGQGTTVTVSSASGGGGSGGRASGGGGSEIVLTQSPGTLSLSPGERATLSCRASQSIGSSSLAWYQQKPGQAPRLLMYGASSRASGIPDRFSGSGSGTDFTLTISRLEPEDFAVYYCQQYAGSPPFTFGQGTKVEIK

SEQ ID NO: 204957 - protein, 238 aa, Artificial Sequence
  Description of Artificial Sequence: Synthetic scFv sequence
EVQLVESGGGLVQPGGSLRLSCAVSGFALSNHGMSWVRRAPGKGLEWVSGIVYSGSTYYAASVKRFTISRDNSRNTLYLQMNSLRPEDTAIYYCSAHGGESDVWGQGTTVTVSSASGGGGSGGRASGGGGSDIQLTQSPSSLSASVGDRVTITCRASQSISSYLNWYQQKPGKAPKLLIYAASSLQSGVPSRFSGSGSGTDFTLTISSLQPEDFATYYCQQSYSTPYTFGQGTKVEIK

SEQ ID NO: 204958 - protein, 248 aa, Artificial Sequence
  Description of Artificial Sequence: Synthetic scFv sequence
EVQLVETGGGLVQPGGSLRLSCAASGFTFSSYAMSWVRQAPGKGLEWVSAISGSGGSTYYADSVKGRFTISRDNSKNTLYLQMNTLKAEDTAVYYCARATYKRELRYYYGMDVWGQGTTVTVSSGGGGSGGGGSGGGGSEIVLTQSPSTLSLSPGESATLSCRASQSVSTTFLAWYQQKPGQAPRLLIYGSSNRATGIPDRFSGSGSGTDFTLTIRRLEFEDFAVYYCQQYHSSPSWTFGQGTKVEIK

SEQ ID NO: 204959 - protein, 248 aa, Artificial Sequence
  Description of Artificial Sequence: Synthetic scFv sequence
EVQLVETGGGLVQPGGSLRLSCAASGFTFSSYAMSWVRQAPGKGLEWVSAISGSGGSTYYADSVKGRFTMSRENDKNSVFLQMNSLRVEDTGVYYCARANYKRELRYYYGMDVWGQGTMVTVSSGGGGSGGGGSGGGGSEIVMTQSPGTLSLSPGESATLSCRASQRVASNYLAWYQHKPGQAPSLLISGASSRATGVPDRFSGSGSGTDFTLAISRLEPEDSAVYYCQHYDSSPSWTFGQGTKVEIK

SEQ ID NO: 204960 - protein, 241 aa, Artificial Sequence
  Description of Artificial Sequence: Synthetic scFv sequence
EVQLVETGGGLVQPGGSLRLSCAASGITFSRYPMSWVRQAPGKGLEWVSGISDSGVSTYYADSAKGRFTISRDNSKNTLFLQMSSLRDEDTAVYYCVTRAGSEASDIWGQGTMVTVSSGGGGSGGGGSGGGGSEIVLTQSPATLSLSPGERATLSCRASQSVSNSLAWYQQKPGQAPRLLIYDASSRATGIPDRFSGSGSGTDFTLTISRLEPEDFAIYYCQQFGTSSGLTFGGGTKLEIK

SEQ ID NO: 204961 - protein, 239 aa, Artificial Sequence
  Description of Artificial Sequence: Synthetic scFv sequence
EVQLVETGGGLVQPGGSLRLSCAVSGFALSNHGMSWVRRAPGKGLEWVSGIVYSGSTYYAASVKGRFTISRDNSRNTLYLQMNSLRPEDTAIYYCSAHGGESDVWGQGTTVTVSSASGGGGSGGRASGGGGSEIVMTQSPATLSVSPGERATLSCRASQSVSSKLAWYQQKPGQAPRLLMYGASIRATGIPDRFSGSGSGTEFTLTISSLEPEDFAVYYCQQYGSSSWTFGQGTKVEIK

SEQ ID NO: 204962 - protein, 240 aa, Artificial Sequence
  Description of Artificial Sequence: Synthetic scFv sequence
EVQLVETGGGLVQPGGSLRLSCAVSGFALSNHGMSWVRRAPGKGLEWVSGIVYSGSTYYAASVKGRFTISRDNSRNTLYLQMNSLRPEDTAIYYCSAHGGESDVWGQGTTVTVSSASGGGGSGGRASGGGGSETTLTQSPATLSVSPGERATLSCRASQSVGSNLAWYQQKPGQGPRLLIYGASTRATGIPARFSGSGSGTEFTLTISSLQPEDFAVYYCQQYNDWLPVTFGQGTKVEIK

SEQ ID NO: 204963 - protein, 238 aa, Artificial Sequence
  Description of Artificial Sequence: Synthetic scFv sequence
EVQLVETGGGLVQPGRSLRLSCAASGFTFDDYAMHWVRQAPGKGLEWVSGISWNSGSIGYADSVGRFTISRDNAKNSLYLQMNSLRDEDTAVYYCARVGKAVPDVWGQGTTVTVSSGGGGSGGGGSGGGGSDIVMTQTPSSLSASVGDRVTITCRASQSISSYLNWYQQKPGKAPKLLIYAASSLQSGVPSRFSGSGSGTDFTLTISSLQPEDFATYYCQQSYSTPYSFGQGTRLEIK

SEQ ID NO: 204964 - protein, 239 aa, Artificial Sequence
  Description of Artificial Sequence: Synthetic scFv sequence
EVQLVETGGGLVQPGRSLRLSCAASGFTFDDYAMHWVRQAPGKGLEWVSGISWNSGSIGYADSVKGRFTISRDNAKNSLYLQMNSLRDEDTAVYYCARVGKAVPDVWGQGTTVTVSSGGGGSGGGGSGGGGSDIVMTQTPSSLSASVGDRVTITCRASQSISSYLNWYQQKPGKAPKLLIYAASSLQSGVPSRFSGSGSGTDFTLTISSLQPEDFATYYCQQSYSTPYSFGQGTRLEIK

SEQ ID NO: 204965 - protein, 241 aa, Artificial Sequence
  Description of Artificial Sequence: Synthetic scFv sequence
EVQLVETGGGVVQPGGSLRLSCAVSGFALSNHGMSWVRRAPGKGLEWVSGIVYSGSTYYAASVKGRFTISRDNSRNTLYLQMNSLRPEDTAIYYCSAHGGESDVWGQGTTVTVSSASGGGGSGGRASGGGGSEIVLTQSPGTLSLSPGERATLSCRASQSVGSTNLAWYQQKPGQAPRLLIYDASNRATGIPDRFSGGGSGTDFTLTISRLEPEDFAVYYCQQYGSSPPWTFGQGTKVEIK

SEQ ID NO: 204966 - protein, 239 aa, Artificial Sequence
  Description of Artificial Sequence: Synthetic scFv sequence
QVQLVESGGGLVKPGGSLRLSCAASGFTFSDYYMSWIRQAPGKGLEWVSYISSSGSTIYYADSVKGRFTISRDNAKNSLYLQMNSLRAEDTAVYYCARESGDGMDVWGQGTTVTVSSASGGGGSGGRASGGGGSDIQMTQSPSSLSASVGDRVTITCRASQSISSYLNWYQQKPGKAPKLLIYAASSLQSGVPSRFSGSGSGTDFTLTISSLQPEDFATYYCQQSYTLAFGQGTKVDIK

SEQ ID NO: 204967 - protein, 248 aa, Artificial Sequence
  Description of Artificial Sequence: Synthetic scFv sequence
QVQLVESGGGLVQPGGSLRLSCAASGFTFSSYAMSWVRQAPGKGLEWVSAISGSGGSTYYADSVKGRFTISRDNAKNSLYLQMNSLRAEDTAIYYCARATYKRELRYYYGMDVWGQGTMVTVSSGGGGSGGGGSGGGGSEIVMTQSPGTVSLSPGERATLSCRASQSVSSSFLAWYQQKPGQAPRLLIYGASSRATGIPDRFSGSGSGTDFTLTISRLEFEDSAVYYCQQYHSSPSWTFGQGTRLEIK

SEQ ID NO: 204968 - protein, 251 aa, Artificial Sequence
  Description of Artificial Sequence: Synthetic scFv sequence
QVQLVESGGGLVQPGGSLRLSCAASGFTFSSYAMSWVRQAPGKGLEWVSAISGSGGSTYYADSVKGRFTISRDNSKNTLYLQMNSLRAEDTAVYYCAKVGYDSSGYYRDYYGMDVWGQGTTVTVSSGGGGSGGGGSGGGGSEIVLTQSPGTLSLSPGERATLSCRASQSVSSSYLAWYQQKPGQAPRLLIYGTSSRATGISDRFSGSGSGTDFTLTISRLEPEDFAVYYCQHYGNSPPKFTFGPGTKLEIK

SEQ ID NO: 204969 - protein, 250 aa, Artificial Sequence
  Description of Artificial Sequence: Synthetic scFv sequence
QVQLVESGGGLVQPGGSLRLSCAASGFTFSSYAMSWVRQAPGKGLEWVSAISGSGGSTYYADSVKGRFTISRDNSKNTLYLQMNSLRAEDTAVYYCAKVGYDSSGYYRDYYGMDVWGQGTTVTVSSGGGGSGGGGSGGGGSEIVLTQSPGTLSLSPGERATLSCRASQSVSSSYLAWYQQKPGQAPRLLIYTSSRATGISDRFSGSGSGTDFTLTISRLEPEDFAVYYCQHYGNSPPKFTFGPGTKLEIK

SEQ ID NO: 204970 - protein, 239 aa, Artificial Sequence
  Description of Artificial Sequence: Synthetic scFv sequence
QVQLVESGGGLVQPGGSLRLSCAVSGFALSNHGMSWVRRAPGKGLEWVSGIVYSGSTYYAASVKGRFTISRDNSRNTLYLQMNSLRPEDTAIYYCSAHGGESDVWGQGTTVTVSSASGGGGSGGRASGGGGSDIRLTQSPSPLSASVGDRVTITCQASEDINKFLNWYHQTPGKAPKLLIYDASTLQTGVPSRFSGSGSGTDFTLTINSLQPEDIGTYYCQQYESLPLTFGGGTKVEIK

SEQ ID NO: 204971 - protein, 247 aa, Artificial Sequence
  Description of Artificial Sequence: Synthetic scFv sequence
QVQLVQSGAEVKKPGASVKVSCKASGYTFSNYGITWVRQAPGQGLEWMGWISAYNGNTNYAQKFQGRVTMTRNTSISTAYMELSSLRSEDTAVYYCARGPYYYYMDVWGKGTMVTVSSASGGGGSGGRASGGGGSEIVMTQSPLSLPVTPGEPASISCRSSQSLLYSNGYNYVDWYLQKPGQSPQLLIYLGSNRASGVPDRFSGSGSGTDFKLQISRVEAEDVGIYYCMQGRQFPYSFGQGTKVEIK

SEQ ID NO: 204972 - protein, 241 aa, Artificial Sequence
  Description of Artificial Sequence: Synthetic scFv sequence
QVQLVQSGAEVKKPGASVKVSCKPSGYTVTSHYIHWVRRAPGQGLEWMGMINPSGGVTAYSQTLQGRVTMTSDTSSSTVYMELSSLRSEDTAMYYCAREGSGSGWYFDFWGRGTLVTVSSGGGGSGGGGSGGGGSSYVLTQPPSVSVSPGQTASITCSGDGLSKKYVSWYQQKAGQSPVVLISRDKERPSGIPDRFSGSNSADTATLTISGTQAMDEADYYCQAWDDTTVVFGGGTKLTVL

SEQ ID NO: 204973 - protein, 249 aa, Artificial Sequence
  Description of Artificial Sequence: Synthetic scFv sequence
QVQLVQSGAEVKKPGSSVKVSCKASGGTFSNYWMHWVRQAPGQGLEWMGATYRGHSDTYYNQKFKGRVTITADKSTSTAYMELSSLRSEDTAVYYCARGAIYNGYDVLDNWGQGTLVTVSSGGGGSGGGGSGGGGSGGGGSDIQMTQSPSSLSASVGDRVTITCSASQDISNYLNWYQQKPGKAPKLLIYYTSNLHSGVPSRFSGSGSGTDFTLTISSLQPEDFATYYCQQYRKLPWTFGQGTKLEIKR

SEQ ID NO: 204974 - protein, 248 aa, Artificial Sequence
  Description of Artificial Sequence: Synthetic scFv sequence
QVQLVQSGAEVRKTGASVKVSCKASGYIFDNFGINWVRQAPGQGLEWMGWINPKNNNTNYAQKFQGRVTITADESTNTAYMEVSSLRSEDTAVYYCARGPYYYQSYMDVWGQGTMVTVSSASGGGGSGGRASGGGGSDIVMTQTPLSLPVTPGEPASISCRSSQSLLHSNGYNYLNWYLQKPGQSPQLLIYGSKRASGVPDRFSGSGSGTDFTLHITRVGAEDVGVYYCMQALQTPYTFGQGTKLEIK

SEQ ID NO: 204975 - protein, 244 aa, Artificial Sequence
  Description of Artificial Sequence: Synthetic scFv sequence
VNLRESGPALVKPTQTLTLTCTFSGFSLRTSGMCVSWIRQPPGKALEWLARIDWDEDKFYSTSLKTRLTISKDTSDNQVVLRMTNMDPADTATYYCARSGAGGTSATAFDIWGPGTMVTVSSGGGGSGGGGSGGGGSDIQMTQSPSSLSASVGDRVTITCRASQDIYNNLAWFQLKPGSAPRSLMYAANKSQSGVPSRFSGSASGTDFTLTISSLQPEDFATYYCQHYYRFPYSFGQGTKLEIK

SEQ ID NO: 204976 - DNA, 747 bp, Artificial Sequence
  Description of Artificial Sequence: Synthetic scFv sequence
caagtccaactcgtccagtccggcgcagaagtcagaaaaaccggtgctagcgtgaaagtgtcctgcaaggcctccggctacattttcgataacttcggaatcaactgggtcagacaggccccgggccaggggctggaatggatgggatggatcaaccccaagaacaacaacaccaactacgcacagaagttccagggccgcgtgactatcaccgccgatgaatcgaccaataccgcctacatggaggtgtcctccctgcggtcggaggacactgccgtgtattactgcgcgaggggcccatactactaccaaagctacatggacgtctggggacagggaaccatggtgaccgtgtcatccgcctccggtggtggaggctccggggggcgggcttcaggaggcggaggaagcgatattgtgatgacccagactccgcttagcctgcccgtgactcctggagaaccggcctccatttcctgccggtcctcgcaatcactcctgcattccaacggttacaactacctgaattggtacctccagaagcctggccagtcgccccagttgctgatctatctgggctcgaagcgcgcctccggggtgcctgaccggtttagcggatctgggagcggcacggacttcactctccacatcacccgcgtgggagcggaggacgtgggagtgtactactgtatgcaggcgctgcagactccgtacacattcggacagggcaccaagctggagatcaag

SEQ ID NO: 204977 - DNA, 738 bp, Artificial Sequence
  Description of Artificial Sequence: Synthetic scFv sequence
caagtgcaacttcaagaatcaggcggaggactcgtgcagcccggaggatcattgcggctctcgtgcgccgcctcgggcttcaccttctcgagcgacgccatgacctgggtccgccaggccccggggaaggggctggaatgggtgtctgtgatttccggctccgggggaactacgtactacgccgattccgtgaaaggtcgcttcactatctcccgggacaacagcaagaacaccctttatctgcaaatgaattccctccgcgccgaggacaccgccgtgtactactgcgccaagctggactcctcgggctactactatgcccggggtccgagatactggggacagggaaccctcgtgaccgtgtcctccgcgtccggcggaggagggtcgggagggcgggcctccggcggcggcggttcggacatccagctgacccagtccccatcctcactgagcgcaagcgtgggcgacagagtcaccattacatgcagggcgtcccagagcatcagctcctacctgaactggtaccaacagaagcctggaaaggctcctaagctgttgatctacggggcttcgaccctggcatccggggtgcccgcgaggtttagcggaagcggtagcggcactcacttcactctgaccattaacagcctccagtccgaggattcagccacttactactgtcagcagtcctacaagcgggccagcttcggacagggcactaaggtcgagatcaag

SEQ ID NO: 204978 - DNA, 741 bp, Artificial Sequence
  Description of Artificial Sequence: Synthetic scFv sequence
caagtccaactggtccagagcggtgcagaagtgaagaagcccggagcgagcgtgaaagtgtcctgcaaggcttccgggtacaccttctccaactacggcatcacttgggtgcgccaggccccgggacagggcctggaatggatggggtggatttccgcgtacaacggcaatacgaactacgctcagaagttccagggtagagtgaccatgactaggaacacctccatttccaccgcctacatggaactgtcctccctgcggagcgaggacaccgccgtgtactattgcgcccggggaccatactactactacatggatgtctgggggaaggggactatggtcaccgtgtcatccgcctcgggaggcggcggatcaggaggacgcgcctctggtggtggaggatcggagatcgtgatgacccagagccctctctccttgcccgtgactcctggggagcccgcatccatttcatgccggagctcccagtcacttctctactccaacggctataactacgtggattggtacctccaaaagccgggccagagcccgcagctgctgatctacctgggctcgaacagggccagcggagtgcctgaccggttctccgggtcgggaagcgggaccgacttcaagctgcaaatctcgagagtggaggccgaggacgtgggaatctactactgtatgcagggccgccagtttccgtactcgttcggacagggcaccaaagtggaaatcaag

SEQ ID NO: 204979 - protein, 246 aa, Artificial Sequence
  Description of Artificial Sequence: Synthetic scFv sequence
QVQLVQSGAEVKKPGASVKVSCKASGYTFSNYGITWVRQAPGQGLEWMGWISAYNGNTNYAQKFQGRVTMTRNTSISTAYMELSSLRSEDTAVYYCARGPYYYYMDVWGKGTMVTVSSASGGGGSGGRASGGGGSEIVMTQSPLSLPVTPGEPASISCRSSQSLLYSNGYNYVDWYLQKPGQSPQLLIYLGSNRASGVPDRFSGSGSGTDFKLQISRVEAEDVGIYYCMQGRQFPYSFGQGTKVEI

SEQ ID NO: 204980 - DNA, 738 bp, Artificial Sequence
  Description of Artificial Sequence: Synthetic scFv sequence
caagtgcaactcgtggaatctggtggaggactcgtgcaacccggaagatcgcttagactgtcgtgtgccgccagcgggttcactttctcgaactacgcgatgtcctgggtccgccaggcacccggaaagggactcggttgggtgtccggcatttcccggtccggcgaaaatacctactacgccgactccgtgaagggccgcttcaccatctcaagggacaacagcaaaaacaccctgtacttgcaaatgaactccctgcgggatgaagatacagccgtgtactattgcgcccggtcgcctgcccattactacggcggaatggacgtctggggacagggaaccactgtgactgtcagcagcgcgtcgggtggcggcggctcagggggtcgggcctccggggggggagggtccgacatcgtgctgacccagtccccgggaaccctgagcctgagcccgggagagcgcgcgaccctgtcatgccgggcatcccagagcattagctcctcctttctcgcctggtatcagcagaagcccggacaggccccgaggctgctgatctacggcgctagcagaagggctaccggaatcccagaccggttctccggctccggttccgggaccgatttcacccttactatctcgcgcctggaacctgaggactccgccgtctactactgccagcagtaccactcatccccgtcgtggacgttcggacagggcaccaagctggagattaag

SEQ ID NO: 204981 - DNA, 714 bp, Artificial Sequence
  Description of Artificial Sequence: Synthetic scFv sequence
gaagtgcaattgctcgaaactggaggaggtctggtgcaacctggaggatcacttcgcctgtcctgcgccgtgtcgggctttgccctgtccaaccatggaatgagctgggtccgccgcgcgccggggaagggcctcgaatgggtgtccggcatcgtctactccggctccacctactacgccgcgtccgtgaagggccggttcacgatttcacgggacaactcgcggaacaccctgtacctccaaatgaattcccttcggccggaggatactgccatctactactgctccgcccacggtggcgaatccgacgtctggggccagggaaccaccgtgaccgtgtccagcgcgtccgggggaggaggaagcgggggtagagcatcgggtggaggcggatcagagatcgtgctgacccagtcccccgccaccttgagcgtgtcaccaggagagtccgccaccctgtcatgccgcgccagccagtccgtgtcctccaacctggcttggtaccagcagaagccggggcaggcccctagactcctgatctatggggcgtcgacccgggcatctggaattcccgataggttcagcggatcgggctcgggcactgacttcactctgaccatctcctcgctgcaagccgaggacgtggctgtgtactactgtcagcagtacggaagctccctgactttcggtggcgggaccaaagtcgagattaag

SEQ ID NO: 204982 - DNA, 732 bp, Artificial Sequence
  Description of Artificial Sequence: Synthetic scFv sequence
caagtgcaactcgtcgaatccggtggaggtctggtccaacctggtagaagcctgagactgtcgtgtgcggccagcggattcacctttgatgactatgctatgcactgggtgcggcaggccccaggaaagggcctggaatgggtgtcgggaattagctggaactccgggtccattggctacgccgactccgtgaagggccgcttcaccatctcccgcgacaacgcaaagaactccctgtacttgcaaatgaactcgctcagggctgaggataccgcgctgtactactgctccgtgcattccttcctggcctactggggacagggaactctggtcaccgtgtcgagcgcctccggcggcgggggctcgggtggacgggcctcgggcggaggggggtccgacatcgtgatgacccagaccccgctgagcttgcccgtgactcccggagagcctgcatccatctcctgccggtcatcccagtcccttctccactccaacggatacaactacctcgactggtacctccagaagccgggacagagccctcagcttctgatctacctggggtcaaatagagcctcaggagtgccggatcggttcagcggatctggttcgggaactgatttcactctgaagatttcccgcgtggaagccgaggacgtgggcgtctactactgtatgcaggcgctgcagaccccctataccttcggccaagggacgaaagtggagatcaag

SEQ ID NO: 204983 - DNA, 717 bp, Artificial Sequence
  Description of Artificial Sequence: Synthetic scFv sequence
gaagtgcaattggtggaaactggaggaggacttgtgcaacctggaggatcattgagactgagctgcgcagtgtcgggattcgccctgagcaaccatggaatgtcctgggtcagaagggcccctggaaaaggcctcgaatgggtgtcagggatcgtgtactccggttccacttactacgccgcctccgtgaaggggcgcttcactatctcacgggataactcccgcaataccctgtacctccaaatgaacagcctgcggccggaggataccgccatctactactgttccgcccacggtggagagtctgacgtctggggccagggaactaccgtgaccgtgtcctccgcgtccggcggtggagggagcggcggccgcgccagcggcggcggaggctccgagatcgtgatgacccagagccccgctactctgtcggtgtcgcccggagaaagggcgaccctgtcctgccgggcgtcgcagtccgtgagcagcaagctggcttggtaccagcagaagccgggccaggcaccacgcctgcttatgtacggtgcctccattcgggccaccggaatcccggaccggttctcggggtcggggtccggtaccgagttcacactgaccatttcctcgctcgagcccgaggactttgccgtctattactgccagcagtacggctcctcctcatggacgttcggccaggggaccaaggtcgaaatcaag

SEQ ID NO: 204984 - DNA, 723 bp, Artificial Sequence
  Description of Artificial Sequence: Synthetic scFv sequence
gaagtgcaattggtggagactggaggaggagtggtgcaacctggaggaagcctgagactgtcatgcgcggtgtcgggcttcgccctctccaaccacggaatgtcctgggtccgccgggcccctgggaaaggacttgaatgggtgtccggcatcgtgtactcgggttccacctactacgcggcctcagtgaagggccggtttactattagccgcgacaactccagaaacacactgtacctccaaatgaactcgctgcggccggaagataccgctatctactactgctccgcccatgggggagagtcggacgtctggggacagggcaccactgtcactgtgtccagcgcttccggcggtggtggaagcgggggacgggcctcaggaggcggtggcagcgagattgtgctgacccagtcccccgggaccctgagcctgtccccgggagaaagggccaccctctcctgtcgggcatcccagtccgtggggtctactaaccttgcatggtaccagcagaagcccggccaggcccctcgcctgctgatctacgacgcgtccaatagagccaccggcatcccggatcgcttcagcggaggcggatcgggcaccgacttcaccctcaccatttcaaggctggaaccggaggacttcgccgtgtactactgccagcagtatggttcgtccccaccctggacgttcggccaggggactaaggtcgagatcaag

SEQ ID NO: 204985 - DNA, 717 bp, Artificial Sequence
  Description of Artificial Sequence: Synthetic scFv sequence
caagtgcaactcgtggaatctggtggaggactcgtgaaacctggaggatcattgagactgtcatgcgcggcctcgggattcacgttctccgattactacatgagctggattcgccaggctccggggaagggactggaatgggtgtcctacatttcctcatccggctccaccatctactacgcggactccgtgaaggggagattcaccattagccgcgataacgccaagaacagcctgtaccttcagatgaactccctgcgggctgaagatactgccgtctactactgcgcaagggagagcggagatgggatggacgtctggggacagggtaccactgtgaccgtgtcgtcggcctccggcggagggggttcgggtggaagggccagcggcggcggaggcagcgacatccagatgacccagtccccctcatcgctgtccgcctccgtgggcgaccgcgtcaccatcacatgccgggcctcacagtcgatctcctcctacctcaattggtatcagcagaagcccggaaaggcccctaagcttctgatctacgcagcgtcctccctgcaatccggggtcccatctcggttctccggctcgggcagcggtaccgacttcactctgaccatctcgagcctgcagccggaggacttcgccacttactactgtcagcaaagctacaccctcgcgtttggccagggcaccaaagtggacatcaag

SEQ ID NO: 204986 - DNA, 738 bp, Artificial Sequence
  Description of Artificial Sequence: Synthetic scFv sequence
caagtgcaactggtgcaaagcggaggaggattggtcaaacccggaggaagcctgagactgtcatgcgcggcctctggattcaccttctccgattactacatgtcatggatcagacaggccccggggaagggcctcgaatgggtgtcctacatctcgtcctccgggaacaccatctactacgccgacagcgtgaagggccgctttaccatttcccgcgacaacgcaaagaactcgctgtaccttcagatgaattccctgcgggctgaagataccgcggtgtactattgcgcccggtccactatggtccgggaggactactggggacagggcacactcgtgaccgtgtccagcgcgagcgggggtggaggcagcggtggacgcgcctccggcggcggcggttcagacatcgtgctgactcagtcgcccctgtcgctgccggtcaccctgggccaaccggcctcaattagctgcaagtcctcggagagcctggtgcacaactcaggaaagacttacctgaactggttccatcagcggcctggacagtccccacggaggctcatctatgaagtgtccaacagggattcgggggtgcccgaccgcttcactggctccgggtccggcaccgacttcaccttgaaaatctccagagtggaagccgaggacgtgggcgtgtactactgtatgcagggtacccactggcctggaacctttggacaaggaactaagctcgagattaag

SEQ ID NO: 204987 - DNA, 729 bp, Artificial Sequence
  Description of Artificial Sequence: Synthetic scFv sequence
gaagtgcaattgttggaatctggaggaggacttgtgcagcctggaggatcactgagactttcgtgtgcggtgtcaggcttcgccctgagcaaccacggcatgagctgggtgcggagagccccggggaagggtctggaatgggtgtccgggatcgtctactccggttcaacttactacgccgcaagcgtgaagggtcgcttcaccatttcccgcgataactcccggaacaccctgtacctccaaatgaactccctgcggcccgaggacaccgccatctactactgttccgcgcatggaggagagtccgatgtctggggacagggcactaccgtgaccgtgtcgagcgcctcggggggaggaggctccggcggtcgcgcctccggggggggtggcagcgacattgtgatgacgcagactccactctcgctgtccgtgaccccgggacagcccgcgtccatctcgtgcaagagctcccagagcctgctgaggaacgacggaaagactcctctgtattggtacctccagaaggctggacagcccccgcaactgctcatctacgaagtgtcaaatcgcttctccggggtgccggatcggttttccggctcgggatcgggcaccgacttcaccctgaaaatctccagggtcgaggccgaggacgtgggagcctactactgcatgcaaaacatccagttcccttccttcggcggcggcacaaagctggagattaag

SEQ ID NO: 204988 - DNA, 717 bp, Artificial Sequence
  Description of Artificial Sequence: Synthetic scFv sequence
caagtgcaactcgtggaatctggtggaggactcgtgcaacccggtggaagccttaggctgtcgtgcgccgtcagcgggtttgctctgagcaaccatggaatgtcctgggtccgccgggcaccgggaaaagggctggaatgggtgtccggcatcgtgtacagcgggtcaacctattacgccgcgtccgtgaagggcagattcactatctcaagagacaacagccggaacaccctgtacttgcaaatgaattccctgcgccccgaggacaccgccatctactactgctccgcccacggaggagagtcggacgtgtggggccagggaacgactgtgactgtgtccagcgcatcaggagggggtggttcgggcggccgggcctcggggggaggaggttccgacattcggctgacccagtccccgtccccactgtcggcctccgtcggcgaccgcgtgaccatcacttgtcaggcgtccgaggacattaacaagttcctgaactggtaccaccagacccctggaaaggcccccaagctgctgatctacgatgcctcgacccttcaaactggagtgcctagccggttctccgggtccggctccggcactgatttcactctgaccatcaactcattgcagccggaagatatcgggacctactattgccagcagtacgaatccctcccgctcacattcggcgggggaaccaaggtcgagattaag

SEQ ID NO: 204989 - DNA, 720 bp, Artificial Sequence
  Description of Artificial Sequence: Synthetic scFv sequence
gaagtgcaattggtggaaactggaggaggacttgtgcaacctggaggatcattgcggctctcatgcgctgtctccggcttcgccctgtcaaatcacgggatgtcgtgggtcagacgggccccgggaaagggtctggaatgggtgtcggggattgtgtacagcggctccacctactacgccgcttcggtcaagggccgcttcactatttcacgggacaacagccgcaacaccctctatctgcaaatgaactctctccgcccggaggataccgccatctactactgctccgcacacggcggcgaatccgacgtgtggggacagggaaccactgtcaccgtgtcgtccgcatccggtggcggaggatcgggtggccgggcctccgggggcggcggcagcgagactaccctgacccagtcccctgccactctgtccgtgagcccgggagagagagccacccttagctgccgggccagccagagcgtgggctccaacctggcctggtaccagcagaagccaggacagggtcccaggctgctgatctacggagcctccactcgcgcgaccggcatccccgcgaggttctccgggtcgggttccgggaccgagttcaccctgaccatctcctccctccaaccggaggacttcgcggtgtactactgtcagcagtacaacgattggctgcccgtgacatttggacaggggacgaaggtggaaatcaaa

SEQ ID NO: 204990 - DNA, 723 bp, Artificial Sequence
  Description of Artificial Sequence: Synthetic scFv sequence
gaagtgcaattggtggaatctggtggaggacttgtgcaacctggaggatcactgagactgtcatgcgcggtgtccggttttgccctgagcaatcatgggatgtcgtgggtccggcgcgcccccggaaagggtctggaatgggtgtcgggtatcgtctactccgggagcacttactacgccgcgagcgtgaagggccgcttcaccatttcccgcgataactcccgcaacaccctgtacttgcaaatgaactcgctccggcctgaggacactgccatctactactgctccgcacacggaggagaatccgacgtgtggggccagggaactaccgtgaccgtcagcagcgcctccggcggcgggggctcaggcggacgggctagcggcggcggtggctccgagatcgtgctgacccagtcgcctggcactctctcgctgagccccggggaaagggcaaccctgtcctgtcgggccagccagtccattggatcatcctccctcgcctggtatcagcagaaaccgggacaggctccgcggctgcttatgtatggggccagctcaagagcctccggcattcccgaccggttctccgggtccggttccggcaccgatttcaccctgactatctcgaggctggagccagaggacttcgccgtgtactactgccagcagtacgcggggtccccgccgttcacgttcggacagggaaccaaggtcgagatcaag

SEQ ID NO: 204991 - DNA, 729 bp, Artificial Sequence
  Description of Artificial Sequence: Synthetic scFv sequence
caagtgcagcttcaggaaagcggaccgggcctggtcaagccatccgaaactctctccctgacttgcactgtgtctggcggttccatctcatcgtcgtactactactggggctggattaggcagccgcccggaaagggactggagtggatcggaagcatctactattccggctcggcgtactacaaccctagcctcaagtcgagagtgaccatctccgtggatacctccaagaaccagttttccctgcgcctgagctccgtgaccgccgctgacaccgccgtgtactactgtgctcggcattggcaggaatggcccgatgccttcgacatttggggccagggcactatggtcactgtgtcatccgggggtggaggcagcgggggaggagggtccggggggggaggttcagagacaaccttgacccagtcacccgcattcatgtccgccactccgggagacaaggtcatcatctcgtgcaaagcgtcccaggatatcgacgatgccatgaattggtaccagcagaagcctggcgaagcgccgctgttcattatccaatccgcaacctcgcccgtgcctggaatcccaccgcggttcagcggcagcggtttcggaaccgacttttccctgaccattaacaacattgagtccgaggacgccgcctactacttctgcctgcaacacgacaacttccctctcacgttcggccagggaaccaagctggaaatcaag

SEQ ID NO: 204992 - DNA, 735 bp, Artificial Sequence
  Description of Artificial Sequence: Synthetic scFv sequence
caagtcaatctgcgcgaatccggccccgccttggtcaagcctacccagaccctcactctgacctgtactttctccggcttctccctgcggacttccgggatgtgcgtgtcctggatcagacagcctccgggaaaggccctggagtggctcgctcgcattgactgggatgaggacaagttctactccacctcactcaagaccaggctgaccatcagcaaagatacctctgacaaccaagtggtgctccgcatgaccaacatggacccagccgacactgccacttactactgcgcgaggagcggagcgggcggaacctccgccaccgccttcgatatttggggcccgggtaccatggtcaccgtgtcaagcggaggaggggggtccgggggcggcggttccgggggaggcggatcggacattcagatgactcagtcaccatcgtccctgagcgctagcgtgggcgacagagtgacaatcacttgccgggcatcccaggacatctataacaaccttgcgtggttccagctgaagcctggttccgcaccgcggtcacttatgtacgccgccaacaagagccagtcgggagtgccgtcccggttttccggttcggcctcgggaactgacttcaccctgacgatctccagcctgcaacccgaggatttcgccacctactactgccagcactactaccgctttccctactcgttcggacagggaaccaagctggaaatcaag

SEQ ID NO: 204993 - protein, 245 aa, Artificial Sequence
  Description of Artificial Sequence: Synthetic scFv sequence
QVNLRESGPALVKPTQTLTLTCTFSGFSLRTSGMCVSWIRQPPGKALEWLARIDWDEDKFYSTSLKTRLTISKDTSDNQVVLRMTNMDPADTATYYCARSGAGGTSATAFDIWGPGTMVTVSSGGGGSGGGGSGGGGSDIQMTQSPSSLSASVGDRVTITCRASQDIYNNLAWFQLKPGSAPRSLMYAANKSQSGVPSRFSGSASGTDFTLTISSLQPEDFATYYCQHYYRFPYSFGQGTKLEIK

SEQ ID NO: 204994 - DNA, 738 bp, Artificial Sequence
  Description of Artificial Sequence: Synthetic scFv sequence
gaagtgcagcttgtcgaatccggggggggactggtcaagccgggcggatcactgagactgtcctgcgccgcgagcggcttcacgttctcctcctactccatgaactgggtccgccaagcccccgggaagggactggaatgggtgtcctctatctcctcgtcgtcgtcctacatctactacgccgactccgtgaagggaagattcaccatttcccgcgacaacgcaaagaactcactgtacttgcaaatgaactcactccgggccgaagatactgctgtgtactattgcgccaagactattgccgccgtctacgctttcgacatctggggccagggaaccaccgtgactgtgtcgtccggtggtggtggctcgggcggaggaggaagcggcggcggggggtccgagattgtgctgacccagtcgccactgagcctccctgtgacccccgaggaacccgccagcatcagctgccggtccagccagtccctgctccactccaacggatacaattacctcgattggtaccttcagaagcctggacaaagcccgcagctgctcatctacttgggatcaaaccgcgcgtcaggagtgcctgaccggttctccggctcgggcagcggtaccgatttcaccctgaaaatctccagggtggaggcagaggacgtgggagtgtattactgtatgcaggcgctgcagactccgtacacatttgggcagggcaccaagctggagatcaag

SEQ ID NO: 204995 - DNA, 720 bp, Artificial Sequence
  Description of Artificial Sequence: Synthetic scFv sequence
gaagtccagctcgtggagtccggcggaggccttgtgaagcctggaggttcgctgagactgtcctgcgccgcctccggcttcaccttctccgactactacatgtcctggatcagacaggccccgggaaagggcctggaatgggtgtcctacatctcgtcatcgggcagcactatctactacgcggactcagtgaaggggcggttcaccatttcccgggataacgcgaagaactcgctgtatctgcaaatgaactcactgagggccgaggacaccgccgtgtactactgcgcccgcgatctccgcggggcatttgacatctggggacagggaaccatggtcacagtgtccagcggagggggaggatcgggtggcggaggttccgggggtggaggctcctcctacgtgctgactcagagcccaagcgtcagcgctgcgcccggttacacggcaaccatctcctgtggcggaaacaacattgggaccaagtctgtgcactggtatcagcagaagccgggccaagctcccctgttggtgatccgcgatgactccgtgcggcctagcaaaattccgggacggttctccggctccaacagcggcaatatggccactctcaccatctcgggagtgcaggccggagatgaagccgacttctactgccaagtctgggactcagactccgagcatgtggtgttcgggggcggaaccaagctgactgtgctc

SEQ ID NO: 204996 - DNA, 723 bp, Artificial Sequence
  Description of Artificial Sequence: Synthetic scFv sequence
caagtgcagctggtgcagagcggggccgaagtcaagaagccgggagcctccgtgaaagtgtcctgcaagccttcgggatacaccgtgacctcccactacattcattgggtccgccgcgcccccggccaaggactcgagtggatgggcatgatcaaccctagcggcggagtgaccgcgtacagccagacgctgcagggacgcgtgactatgacctcggatacctcctcctccaccgtctatatggaactgtccagcctgcggtccgaggataccgccatgtactactgcgcccgggaaggatcaggctccgggtggtatttcgacttctggggaagaggcaccctcgtgactgtgtcatctgggggagggggttccggtggtggcggatcgggaggaggcggttcatcctacgtgctgacccagccaccctccgtgtccgtgagccccggccagactgcatcgattacatgtagcggcgacggcctctccaagaaatacgtgtcgtggtaccagcagaaggccggacagagcccggtggtgctgatctcaagagataaggagcggcctagcggaatcccggacaggttctcgggttccaactccgcggacactgctactctgaccatctcggggacccaggctatggacgaagccgattactactgccaagcctgggacgacactactgtcgtgtttggagggggcaccaagttgaccgtcctt

SEQ ID NO: 204997 - DNA, 735 bp, Artificial Sequence
  Description of Artificial Sequence: Synthetic scFv sequence
caagtgcagcttcaggagagcggcccgggactcgtgaagccgtcccagaccctgtccctgacttgcaccgtgtcgggaggaagcatctcgagcggaggctactattggtcgtggattcggcagcaccctggaaagggcctggaatggatcggctacatctactactccggctcgacctactacaacccatcgctgaagtccagagtgacaatctcagtggacacgtccaagaatcagttcagcctgaagctctcttccgtgactgcggccgacaccgccgtgtactactgcgcacgcgctggaattgccgcccggctgaggggtgccttcgacatttggggacagggcaccatggtcaccgtgtcctccggcggcggaggttccgggggtggaggctcaggaggaggggggtccgacatcgtcatgactcagtcgccctcaagcgtcagcgcgtccgtcggggacagagtgatcatcacctgtcgggcgtcccagggaattcgcaactggctggcctggtatcagcagaagcccggaaaggcccccaacctgttgatctacgccgcctcaaacctccaatccggggtgccgagccgcttcagcggctccggttcgggtgccgatttcactctgaccatctcctccctgcaacctgaagatgtggctacctactactgccaaaagtacaactccgcaccttttactttcggaccggggaccaaagtggacattaag

SEQ ID NO: 204998 - DNA, 759 bp, Artificial Sequence
  Description of Artificial Sequence: Synthetic scFv sequence
caagtgcagctggtccagtcgggcgccgaggtcaagaagcccgggagctctgtgaaagtgtcctgcaaggcctccgggggcacctttagctcctacgccatctcctgggtccgccaagcaccgggtcaaggcctggagtggatggggggaattatccctatcttcggcactgccaactacgcccagaagttccagggacgcgtgaccattaccgcggacgaatccacctccaccgcttatatggagctgtccagcttgcgctcggaagataccgccgtgtactactgcgcccggaggggtggataccagctgctgagatgggacgtgggcctcctgcggtcggcgttcgacatctggggccagggcactatggtcactgtgtccagcggaggaggcggatcgggaggcggcggatcagggggaggcggttccagctacgtgcttactcaacccccttcggtgtccgtggccccgggacagaccgccagaatcacttgcggaggaaacaacattgggtccaagagcgtgcattggtaccagcagaagccaggacaggcccctgtgctggtgctctacgggaagaacaatcggcccagcggagtgccggacaggttctcgggttcacgctccggtacaaccgcttcactgactatcaccggggcccaggcagaggatgaagcggactactactgttcctcccgggattcatccggcgaccacctccgggtgttcggaaccggaacgaaggtcaccgtgctg

SEQ ID NO: 204999 - DNA, 744 bp, Artificial Sequence
  Description of Artificial Sequence: Synthetic scFv sequence
gaagtgcagctccaacagtcaggaccggggctcgtgaagccatcccagaccctgtccctgacttgtgccatctcgggagatagcgtgtcatcgaactccgccgcctggaactggattcggcagagcccgtcccgcggactggagtggcttggaaggacctactaccggtccaagtggtactctttctacgcgatctcgctgaagtcccgcattatcattaaccctgatacctccaagaatcagttctccctccaactgaaatccgtcacccccgaggacacagcagtgtattactgcgcacggagcagccccgaaggactgttcctgtattggtttgacccctggggccaggggactcttgtgaccgtgtcgagcggcggagatgggtccggtggcggtggttcggggggcggcggatcatcatccgaactgacccaggacccggctgtgtccgtggcgctgggacaaaccatccgcattacgtgccagggagactccctgggcaactactacgccacttggtaccagcagaagccgggccaagcccctgtgttggtcatctacgggaccaacaacagaccttccggcatccccgaccggttcagcgcttcgtcctccggcaacactgccagcctgaccatcactggagcgcaggccgaagatgaggccgactactactgcaacagcagagactcctcgggtcatcacctcttgttcggaactggaaccaaggtcaccgtgctg

SEQ ID NO: 205000 - DNA, 744 bp, Artificial Sequence
  Description of Artificial Sequence: Synthetic scFv sequence
gaagtgcaactggtggaaaccggtggaggactcgtgcagcctggcggcagcctccggctgagctgcgccgcttcgggattcaccttttcctcctacgcgatgtcttgggtcagacaggcccccggaaaggggctggaatgggtgtcagccatctccggctccggcggatcaacgtactacgccgactccgtgaaaggccggttcaccatgtcgcgcgagaatgacaagaactccgtgttcctgcaaatgaactccctgagggtggaggacaccggagtgtactattgtgcgcgcgccaactacaagagagagctgcggtactactacggaatggacgtctggggacagggaactatggtgaccgtgtcatccggtggagggggaagcggcggtggaggcagcgggggcgggggttcagaaattgtcatgacccagtccccgggaactctttccctctcccccggggaatccgcgactttgtcctgccgggccagccagcgcgtggcctcgaactacctcgcatggtaccagcataagccaggccaagccccttccctgctgatttccggggctagcagccgcgccactggcgtgccggataggttctcgggaagcggctcgggtaccgatttcaccctggcaatctcgcggctggaaccggaggattcggccgtgtactactgccagcactatgactcatccccctcctggacattcggacagggcaccaaggtcgagatcaag

SEQ ID NO: 205001 - DNA, 738 bp, Artificial Sequence
  Description of Artificial Sequence: Synthetic scFv sequence
gaagtgcagctcgtggagtcaggaggcggcctggtccagccgggagggtcccttagactgtcatgcgccgcaagcggattcactttctcctcctatgccatgagctgggtccgccaagcccccggaaagggactggaatgggtgtccgccatctcggggtctggaggctcaacttactacgctgactccgtgaagggacggttcaccattagccgcgacaactccaagaacaccctctacctccaaatgaactccctgcgggccgaggataccgccgtctactactgcgccaaagtggaaggttcaggatcgctggactactggggacagggtactctcgtgaccgtgtcatcgggcggaggaggttccggcggtggcggctccggcggcggagggtcggagatcgtgatgacccagagccctggtactctgagcctttcgccgggagaaagggccaccctgtcctgccgcgcttcccaatccgtgtcctccgcgtacttggcgtggtaccagcagaagccgggacagccccctcggctgctgatcagcggggccagcacccgggcaaccggaatcccagacagattcgggggttccggcagcggcacagatttcaccctgactatttcgaggttggagcccgaggactttgcggtgtattactgtcagcactacgggtcgtcctttaatggctccagcctgttcacgttcggacaggggacccgcctggaaatcaag

SEQ ID NO: 205002 - DNA, 744 bp, Artificial Sequence
  Description of Artificial Sequence: Synthetic scFv sequence
gaggtgcagcttgtggaaaccggtggcggactggtgcagcccggaggaagcctcaggctgtcctgcgccgcgtccggcttcaccttctcctcgtacgccatgtcctgggtccgccaggcccccggaaagggcctggaatgggtgtccgccatctctggaagcggaggttccacgtactacgcggacagcgtcaagggaaggttcacaatctcccgcgataattcgaagaacactctgtaccttcaaatgaacaccctgaaggccgaggacactgctgtgtactactgcgcacgggccacctacaagagagagctccggtactactacggaatggacgtctggggccagggaactactgtgaccgtgtcctcgggagggggtggctccggggggggcggctccggcggaggcggttccgagattgtgctgacccagtcaccttcaactctgtcgctgtccccgggagagagcgctactctgagctgccgggccagccagtccgtgtccaccaccttcctcgcctggtatcagcagaagccggggcaggcaccacggctcttgatctacgggtcaagcaacagagcgaccggaattcctgaccgcttctcggggagcggttcaggcaccgacttcaccctgactatccggcgcctggaacccgaagatttcgccgtgtattactgtcaacagtaccactcctcgccgtcctggacctttggccaaggaaccaaagtggaaatcaag

SEQ ID NO: 205003 - DNA, 717 bp, Artificial Sequence
  Description of Artificial Sequence: Synthetic scFv sequence
gaagtgcagctcgtggaaactggaggtggactcgtgcagcctggacggtcgctgcggctgagctgcgctgcatccggcttcaccttcgacgattatgccatgcactgggtcagacaggcgccagggaagggacttgagtgggtgtccggtatcagctggaatagcggctcaatcggatacgcggactccgtgaagggaaggttcaccatttcccgcgacaacgccaagaactccctgtacttgcaaatgaacagcctccgggatgaggacactgccgtgtactactgcgcccgcgtcggaaaagctgtgcccgacgtctggggccagggaaccactgtgaccgtgtccagcggcgggggtggatcgggcggtggagggtccggtggagggggctcagatattgtgatgacccagaccccctcgtccctgtccgcctcggtcggcgaccgcgtgactatcacatgtagagcctcgcagagcatctccagctacctgaactggtatcagcagaagccggggaaggccccgaagctcctgatctacgcggcatcatcactgcaatcgggagtgccgagccggttttccgggtccggctccggcaccgacttcacgctgaccatttcttccctgcaacccgaggacttcgccacttactactgccagcagtcctactccaccccttactccttcggccaaggaaccaggctggaaatcaag

SEQ ID NO: 205004 - DNA, 732 bp, Artificial Sequence
  Description of Artificial Sequence: Synthetic scFv sequence
gaagtgcagctgctcgaaaccggtggagggctggtgcagccagggggctccctgaggctttcatgcgccgctagcggattctccttctcctcttacgccatgtcgtgggtccgccaagcccctggaaaaggcctggaatgggtgtccgcgatttccgggagcggaggttcgacctattacgccgactccgtgaagggccgctttaccatctcccgggataactccaagaacactctgtacctccaaatgaactcgctgagagccgaggacaccgccgtgtattactgcgcgaaggcgctggtcggcgcgactggggcattcgacatctggggacagggaactcttgtgaccgtgtcgagcggaggcggcggctccggcggaggagggagcgggggcggtggttccgaaatcgtgttgactcagtccccgggaaccctgagcttgtcacccggggagcgggccactctctcctgtcgcgcctcccaatcgctctcatccaatttcctggcctggtaccagcagaagcccggacaggccccgggcctgctcatctacggcgcttcaaactgggcaacgggaacccctgatcggttcagcggaagcggatcgggtactgactttaccctgaccatcaccagactggaaccggaggacttcgccgtgtactactgccagtactacggcacctcccccatgtacacattcggacagggtaccaaggtcgagattaag

SEQ ID NO: 205005 - DNA, 723 bp, Artificial Sequence
  Description of Artificial Sequence: Synthetic scFv sequence
gaagtgcaactggtggaaaccggtggcggcctggtgcagcctggaggatcattgaggctgtcatgcgcggccagcggtattaccttctcccggtaccccatgtcctgggtcagacaggccccggggaaagggcttgaatgggtgtccgggatctcggactccggtgtcagcacttactacgccgactccgccaagggacgcttcaccatttcccgggacaactcgaagaacaccctgttcctccaaatgagctccctccgggacgaggatactgcagtgtactactgcgtgacccgcgccgggtccgaggcgtctgacatttggggacagggcactatggtcaccgtgtcgtccggcggagggggctcgggaggcggtggcagcggaggaggagggtccgagatcgtgctgacccaatccccggccaccctctcgctgagccctggagaaagggcaaccttgtcctgtcgcgcgagccagtccgtgagcaactccctggcctggtaccagcagaagcccggacaggctccgagacttctgatctacgacgcttcgagccgggccactggaatccccgaccgcttttcggggtccggctcaggaaccgatttcaccctgacaatctcacggctggagccagaggatttcgccatctattactgccagcagttcggtacttcctccggcctgactttcggaggcggcacgaagctcgaaatcaag

SEQ ID NO: 205006 - DNA, 739 bp, Artificial Sequence
  Description of Artificial Sequence: Synthetic scFv sequence
gaagtccaactggtggagtccgggggagggctcgtgcagcccggaggcagccttcggctgtcgtgcgccgcctccgggttcacgttctcatcctacgcgatgtcgtgggtcagacaggcaccaggaaagggactggaatgggtgtccgccattagcggctccggcggtagcacctactatgccgactcagtgaagggaaggttcactatctcccgcgacaacagcaagaacaccctgtacctccaaatgaactctctgcgggccgaggataccgcggtgtactattgcgccaagatgggttggtccagcggatacttgggagccttcgacatttggggacagggcactactgtgaccgtgtcctccgggggtggcggatcgggaggcggcggctcgggtggagggggttccgaaatcgtgttgacccagtcaccgggaaccctctcgctgtccccgggagaacgggctacactgtcatgtagagcgtcccagtccgtggcttcctcgttcctggcctggtaccagcagaagccgggacaggcaccccgcctgctcatctacggagccagcggccgggcgaccggcatccctgaccgcttctccggttccggctcgggcaccgactttactctgaccattagcaggcttgagcccgaggattttgccgtgtactactgccaacactacggggggagccctcgcctgaccttcggaggcggaactaaggtcgatatcaaaa

SEQ ID NO: 205007 - DNA, 744 bp, Artificial Sequence
  Description of Artificial Sequence: Synthetic scFv sequence
caagtgcagctcgtggaatcgggtggcggactggtgcagccggggggctcacttagactgtcctgcgcggccagcggattcactttctcctcctacgccatgtcctgggtcagacaggcccctggaaagggcctggaatgggtgtccgcaatcagcggcagcggcggctcgacctattacgcggattcagtgaagggcagattcaccatttcccgggacaacgccaagaactccttgtaccttcaaatgaactccctccgcgcggaagataccgcaatctactactgcgctcgggccacttacaagagggaactgcgctactactacgggatggacgtctggggccagggaaccatggtcaccgtgtccagcggaggaggaggatcgggaggaggcggtagcgggggtggagggtcggagatcgtgatgacccagtcccccggcactgtgtcgctgtcccccggcgaacgggccaccctgtcatgtcgggccagccagtcagtgtcgtcaagcttcctcgcctggtaccagcagaaaccgggacaagctccccgcctgctgatctacggagccagcagccgggccaccggtattcctgaccggttctccggttcggggtccgggaccgactttactctgactatctctcgcctcgagccagaggactccgccgtgtattactgccagcagtaccactcctccccgtcctggacgttcggacagggcacaaggctggagattaag

SEQ ID NO: 205008 - DNA, 738 bp, Artificial Sequence
  Description of Artificial Sequence: Synthetic scFv sequence
gaagtgcagctcgtggagagcgggggaggattggtgcagcccggaaggtccctgcggctctcctgcactgcgtctggcttcaccttcgacgactacgcgatgcactgggtcagacagcgcccgggaaagggcctggaatgggtcgcctcaatcaactggaagggaaactccctggcctatggcgacagcgtgaagggccgcttcgccatttcgcgcgacaacgccaagaacaccgtgtttctgcaaatgaattccctgcggaccgaggataccgctgtgtactactgcgccagccaccagggcgtggcatactataactacgccatggacgtgtggggaagagggacgctcgtcaccgtgtcctccgggggcggtggatcgggtggaggaggaagcggtggcgggggcagcgaaatcgtgctgactcagagcccgggaactctttcactgtccccgggagaacgggccactctctcgtgccgggccacccagtccatcggctcctccttccttgcctggtaccagcagaggccaggacaggcgccccgcctgctgatctacggtgcttcccaacgcgccactggcattcctgaccggttcagcggcagagggtcgggaaccgatttcacactgaccatttcccgggtggagcccgaagattcggcagtctactactgtcagcattacgagtcctccccttcatggaccttcggtcaagggaccaaagtggagatcaag

SEQ ID NO: 205009 - DNA, 733 bp, Artificial Sequence
  Description of Artificial Sequence: Synthetic scFv sequence
gaagtgcagctgcttgagagcggtggaggtctggtgcagcccgggggatcactgcgcctgtcctgtgccgcgtccggtttcactttctcctcgtacgccatgtcgtgggtcagacaggcaccgggaaagggactggaatgggtgtcagccatttcgggttcggggggcagcacctactacgctgactccgtgaagggccggttcaccatttcccgcgacaactccaagaacaccttgtacctccaaatgaactccctgcgggccgaagataccgccgtgtattactgcgtgctgtggttcggagagggattcgacccgtggggacaaggaacactcgtgactgtgtcatccggcggaggcggcagcggtggcggcggttccggcggcggcggatctgacatcgtgttgacccagtcccctctgagcctgccggtcactcctggcgaaccagccagcatctcctgccggtcgagccagtccctcctgcactccaatgggtacaactacctcgattggtatctgcaaaagccgggccagagcccccagctgctgatctaccttgggtcaaaccgcgcttccggggtgcctgatagattctccgggtccgggagcggaaccgactttaccctgaaaatctcgagggtggaggccgaggacgtcggagtgtactactgcatgcaggcgctccagactcccctgaccttcggaggaggaacgaaggtcgacatcaaga

SEQ ID NO: 205010 - DNA, 726 bp, Artificial Sequence
  Description of Artificial Sequence: Synthetic scFv sequence
gaagtgcagctgctggagtccggcggtggattggtgcaaccggggggatcgctcagactgtcctgtgcggcgtcaggcttcaccttctcgagctacgccatgtcatgggtcagacaggcccctggaaagggtctggaatgggtgtccgccatttccgggagcgggggatctacatactacgccgatagcgtgaagggccgcttcaccatttcccgggacaactccaagaacactctctatctgcaaatgaactccctccgcgctgaggacactgccgtgtactactgcgccaaaatccctcagaccggcaccttcgactactggggacaggggactctggtcaccgtcagcagcggtggcggaggttcggggggaggaggaagcggcggcggagggtccgagattgtgctgacccagtcacccggcactttgtccctgtcgcctggagaaagggccaccctttcctgccgggcatcccaatccgtgtcctcctcgtacctggcctggtaccagcagaggcccggacaggccccacggcttctgatctacggagcaagcagccgcgcgaccggtatcccggaccggttttcgggctcgggctcaggaactgacttcaccctcaccatctcccgcctggaacccgaagatttcgctgtgtattactgccagcactacggcagctccccgtcctggacgttcggccagggaactcggctggagatcaag

SEQ ID NO: 205011 - DNA, 723 bp, Artificial Sequence
  Description of Artificial Sequence: Synthetic scFv sequence
gaggtgcagttggtcgaaagcgggggcgggcttgtgcagcctggcggatcactgcggctgtcctgcgcggcatcaggcttcacgttttcttcctacgccatgtcctgggtgcgccaggcccctggaaagggactggaatgggtgtccgcgatttcggggtccggcgggagcacctactacgccgattccgtgaagggccgcttcactatctcgcgggacaactccaagaacaccctctacctccaaatgaatagcctgcgggccgaggataccgccgtctactattgcgctaaggtcgtgcgcgacggaatggacgtgtggggacagggtaccaccgtgacagtgtcctcggggggaggcggtagcggcggaggaggaagcggtggtggaggttccgagattgtgctgactcaatcacccgcgaccctgagcctgtcccccggcgaaagggccactctgtcctgtcgggccagccaatcagtctcctcctcgtacctggcctggtaccagcagaagccaggacaggctccgagactccttatctatggcgcatcctcccgcgccaccggaatcccggataggttctcgggaaacggatcggggaccgacttcactctcaccatctcccggctggaaccggaggacttcgccgtgtactactgccagcagtacggcagcccgcctagattcactttcggccccggcaccaaagtggacatcaag

SEQ ID NO: 205012 - DNA, 753 bp, Artificial Sequence
  Description of Artificial Sequence: Synthetic scFv sequence
caagtgcagctcgtggagtcaggcggaggactggtgcagcccgggggctccctgagactttcctgcgcggcatcgggttttaccttctcctcctatgctatgtcctgggtgcgccaggccccgggaaagggactggaatgggtgtccgcaatcagcggtagcgggggctcaacatactacgccgactccgtcaagggtcgcttcactatttcccgggacaactccaagaataccctgtacctccaaatgaacagcctcagggccgaggatactgccgtgtactactgcgccaaagtcggatacgatagctccggttactaccgggactactacggaatggacgtgtggggacagggcaccaccgtgaccgtgtcaagcggcggaggcggttcaggagggggaggctccggcggtggagggtccgaaatcgtcctgactcagtcgcctggcactctgtcgttgtccccgggggagcgcgctaccctgtcgtgtcgggcgtcgcagtccgtgtcgagctcctacctcgcgtggtaccagcagaagcccggacaggcccctagacttctgatctacggcacttcttcacgcgccaccgggatcagcgacaggttcagcggctccggctccgggaccgacttcaccctgaccattagccggctggagcctgaagatttcgccgtgtattactgccaacactacggaaactcgccgccaaagttcacgttcggacccggaaccaagctggaaatcaag

SEQ ID NO: 205013 - protein, 112 aa, Artificial Sequence
  Description of Artificial Sequence: Synthetic scFv sequence
DIVLTQSPLSLPVTPGEPASISCRSSQSLLHSNGYNYLDWYLQKPGQSPQLLIYLGSNRASGVPDRFSGSGSGTDFTLKISRVEAEDVGVYYCMQALQTPLTFGGGTKVDIK

SEQ ID NO: 205014 - protein, 249 aa, Artificial Sequence
  Description of Artificial Sequence: Synthetic scFv sequence
QVQLVQSGAEVRKTGASVKVSCKASGYIFDNFGINWVRQAPGQGLEWMGWINPKNNNTNYAQKFQGRVTITADESTNTAYMEVSSLRSEDTAVYYCARGPYYYQSYMDVWGQGTMVTVSSASGGGGSGGRASGGGGSDIVMTQTPLSLPVTPGEPASISCRSSQSLLHSNGYNYLNWYLQKPGQSPQLLIYLGSKRASGVPDRFSGSGSGTDFTLHITRVGAEDVGVYYCMQALQTPYTFGQGTKLEIK

SEQ ID NO: 205015 - protein, 246 aa, Artificial Sequence
  Description of Artificial Sequence: Synthetic scFv sequence
QVQLQESGGGLVQPGGSLRLSCAASGFTFSSDAMTWVRQAPGKGLEWVSVISGSGGTTYYADSVKGRFTISRDNSKNTLYLQMNSLRAEDTAVYYCAKLDSSGYYYARGPRYWGQGTLVTVSSASGGGGSGGRASGGGGSDIQLTQSPSSLSASVGDRVTITCRASQSISSYLNWYQQKPGKAPKLLIYGASTLASGVPARFSGSGSGTHFTLTINSLQSEDSATYYCQQSYKRASFGQGTKVEIK

SEQ ID NO: 205016 - protein, 246 aa, Artificial Sequence
  Description of Artificial Sequence: Synthetic scFv sequence
QVQLVESGGGLVQPGRSLRLSCAASGFTFSNYAMSWVRQAPGKGLGWVSGISRSGENTYYADSVKGRFTISRDNSKNTLYLQMNSLRDEDTAVYYCARSPAHYYGGMDVWGQGTTVTVSSASGGGGSGGRASGGGGSDIVLTQSPGTLSLSPGERATLSCRASQSISSSFLAWYQQKPGQAPRLLIYGASRRATGIPDRFSGSGSGTDFTLTISRLEPEDSAVYYCQQYHSSPSWTFGQGTKLEIK

SEQ ID NO: 205017 - protein, 244 aa, Artificial Sequence
  Description of Artificial Sequence: Synthetic scFv sequence
QVQLVESGGGLVQPGRSLRLSCAASGFTFDDYAMHWVRQAPGKGLEWVSGISWNSGSIGYADSVKGRFTISRDNAKNSLYLQMNSLRAEDTALYYCSVHSFLAYWGQGTLVTVSSASGGGGSGGRASGGGGSDIVMTQTPLSLPVTPGEPASISCRSSQSLLHSNGYNYLDWYLQKPGQSPQLLIYLGSNRASGVPDRFSGSGSGTDFTLKISRVEAEDVGVYYCMQALQTPYTFGQGTKVEIK

SEQ ID NO: 205018 - DNA, 717 bp, Artificial Sequence
  Description of Artificial Sequence: Synthetic scFv sequence
gaagtgcaattggtggaatcagggggaggacttgtgcagcctggaggatcgctgagactgtcatgtgccgtgtccggctttgccctgtccaaccacgggatgtcctgggtccgccgcgcgcctggaaagggcctcgaatgggtgtcgggtattgtgtacagcggtagcacctactatgccgcatccgtgaaggggagattcaccatcagccgggacaactccaggaacactctgtacctccaaatgaattcgctgaggccagaggacactgccatctactactgctccgcgcatggcggagagtccgacgtctggggacaggggaccaccgtgaccgtgtctagcgcgtccggcggaggcggcagcgggggtcgggcatcagggggcggcggatcggacatccagctcacccagtccccgagctcgctgtccgcctccgtgggagatcgggtcaccatcacgtgccgcgccagccagtcgatttcctcctacctgaactggtaccaacagaagcccggaaaagccccgaagcttctcatctacgccgcctcgagcctgcagtcaggagtgccctcacggttctccggctccggttccggtactgatttcaccctgaccatttcctccctgcaaccggaggacttcgctacttactactgccagcagtcgtactccaccccctacactttcggacaaggcaccaaggtcgaaatcaag

SEQ ID NO: 205019 - protein, 246 aa, Artificial Sequence
  Description of Artificial Sequence: Synthetic scFv sequence
QVQLVQSGGGLVKPGGSLRLSCAASGFTFSDYYMSWIRQAPGKGLEWVSYISSSGNTIYYADSVKGRFTISRDNAKNSLYLQMNSLRAEDTAVYYCARSTMVREDYWGQGTLVTVSSASGGGGSGGRASGGGGSDIVLTQSPLSLPVTLGQPASISCKSSESLVHNSGKTYLNWFHQRPGQSPRRLIYEVSNRDSGVPDRFTGSGSGTDFTLKISRVEAEDVGVYYCMQGTHWPGTFGQGTKLEIK

SEQ ID NO: 205020 - protein, 243 aa, Artificial Sequence
  Description of Artificial Sequence: Synthetic scFv sequence
EVQLLESGGGLVQPGGSLRLSCAVSGFALSNHGMSWVRRAPGKGLEWVSGIVYSGSTYYAASVKGRFTISRDNSRNTLYLQMNSLRPEDTAIYYCSAHGGESDVWGQGTTVTVSSASGGGGSGGRASGGGGSDIVMTQTPLSLSVTPGQPASISCKSSQSLLRNDGKTPLYWYLQKAGQPPQLLIYEVSNRFSGVPDRFSGSGSGTDFTLKISRVEAEDVGAYYCMQNIQFPSFGGGTKLEIK

SEQ ID NO: 205021 - protein, 243 aa, Artificial Sequence
  Description of Artificial Sequence: Synthetic scFv sequence
QVQLQESGPGLVKPSETLSLTCTVSGGSISSSYYYWGWIRQPPGKGLEWIGSIYYSGSAYYNPSLKSRVTISVDTSKNQFSLRLSSVTAADTAVYYCARHWQEWPDAFDIWGQGTMVTVSSGGGGSGGGGSGGGGSETTLTQSPAFMSATPGDKVIISCKASQDIDDAMNWYQQKPGEAPLFIIQSATSPVPGIPPRFSGSGFGTDFSLTINNIESEDAAYYFCLQHDNFPLTFGQGTKLEIK

SEQ ID NO: 205022 - protein, 246 aa, Artificial Sequence
  Description of Artificial Sequence: Synthetic scFv sequence
EVQLVESGGGLVKPGGSLRLSCAASGFTFSSYSMNWVRQAPGKGLEWVSSISSSSSYIYYADSVKGRFTISRDNAKNSLYLQMNSLRAEDTAVYYCAKTIAAVYAFDIWGQGTTVTVSSGGGGSGGGGSGGGGSEIVLTQSPLSLPVTPEEPASISCRSSQSLLHSNGYNYLDWYLQKPGQSPQLLIYLGSNRASGVPDRFSGSGSGTDFTLKISRVEAEDVGVYYCMQALQTPYTFGQGTKLEIK

SEQ ID NO: 205023 - protein, 245 aa, Artificial Sequence
  Description of Artificial Sequence: Synthetic scFv sequence
QVQLQESGPGLVKPSQTLSLTCTVSGGSISSGGYYWSWIRQHPGKGLEWIGYIYYSGSTYYNPSLKSRVTISVDTSKNQFSLKLSSVTAADTAVYYCARAGIAARLRGAFDIWGQGTMVTVSSGGGGSGGGGSGGGGSDIVMTQSPSSVSASVGDRVIITCRASQGIRNWLAWYQQKPGKAPNLLIYAASNLQSGVPSRFSGSGSGADFTLTISSLQPEDVATYYCQKYNSAPFTFGPGTKVDIK

SEQ ID NO: 205024 - protein, 253 aa, Artificial Sequence
  Description of Artificial Sequence: Synthetic scFv sequence
QVQLVQSGAEVKKPGSSVKVSCKASGGTFSSYAISWVRQAPGQGLEWMGGIIPIFGTANYAQKFQGRVTITADESTSTAYMELSSLRSEDTAVYYCARRGGYQLLRWDVGLLRSAFDIWGQGTMVTVSSGGGGSGGGGSGGGGSSYVLTQPPSVSVAPGQTARITCGGNNIGSKSVHWYQQKPGQAPVLVLYGKNNRPSGVPDRFSGSRSGTTASLTITGAQAEDEADYYCSSRDSSGDHLRVFGTGTKVTVL

SEQ ID NO: 205025 - protein, 248 aa, Artificial Sequence
  Description of Artificial Sequence: Synthetic scFv sequence
EVQLQQSGPGLVKPSQTLSLTCAISGDSVSSNSAAWNWIRQSPSRGLEWLGRTYYRSKWYSFYAISLKSRIIINPDTSKNQFSLQLKSVTPEDTAVYYCARSSPEGLFLYWFDPWGQGTLVTVSSGGDGSGGGGSGGGGSSSELTQDPAVSVALGQTIRITCQGDSLGNYYATWYQQKPGQAPVLVIYGTNNRPSGIPDRFSASSSGNTASLTITGAQAEDEADYYCNSRDSSGHHLLFGTGTKVTVL

SEQ ID NO: 205026 - protein, 244 aa, Artificial Sequence
  Description of Artificial Sequence: Synthetic scFv sequence
QIQLVQSGPDLKKPGETVKLSCKASGYTFTNFGMNWVKQAPGKGFKWMAWINTYTGESYFADDFKGRFAFSVETSATTAYLQINNLKTEDTATYFCARGEIYYGYDGGFAYWGQGTLVTVSAGGGGSGGGGSGGGGSDVVMTQSHRFMSTSVGDRVSITCRASQDVNTAVSWYQQKPGQSPKLLIFSASYRYTGVPDRFTGSGSGADFTLTISSVQAEDLAVYYCQQHYSTPWTFGGGTKLDIK

SEQ ID NO: 205027 - protein, 249 aa, Artificial Sequence
  Description of Artificial Sequence: Synthetic scFv sequence
QIQLVQSGPELKKPGETVKISCKASGYTFTDYSINWVKRAPGKGLKWMGWINTETREPAYAYDFRGRFAFSLETSASTAYLQINNLKYEDTATYFCALDYSYAMDYWGQGTSVTVSSGGGGSGGGGSGGGGSQIQLVQSGPELKKPGETVKISCKASGYTFTDYSINWVKRAPGKGLKWMGWINTETREPAYAYDFRGRFAFSLETSASTAYLQINNLKYEDTATYFCALDYSYAMDYWGQGTSVTVSS

SEQ ID NO: 205028 - protein, 243 aa, Artificial Sequence
  Description of Artificial Sequence: Synthetic scFv sequence
QIQLVQSGPELKKPGETVKISCKASGYTFRHYSMNWVKQAPGKGLKWMGRINTESGVPIYADDFKGRFAFSVETSASTAYLVINNLKDEDTASYFCSNDYLYSLDFWGQGTALTVSSGGGGSGGGGSGGGGSDIVLTQSPPSLAMSLGKRATISCRASESVTILGSHLIYWYQQKPGQPPTLLIQLASNVQTGVPARFSGSGSRTDFTLTIDPVEEDDVAVYYCLQSRTIPRTFGGGTKLEIK

SEQ ID NO: 205029 - protein, 243 aa, Artificial Sequence
  Description of Artificial Sequence: Synthetic scFv sequence
QIQLVQSGPELKKPGETVKISCKASGYTFTHYSMNWVKQAPGKGLKWMGRINTETGEPLYADDFKGRFAFSLETSASTAYLVINNLKNEDTATFFCSNDYLYSCDYWGQGTTLTVSSGGGGSGGGGSGGGGSDIVLTQSPPSLAMSLGKRATISCRASESVTILGSHLIYWYQQKPGQPPTLLIQLASNVQTGVPARFSGSGSRTDFTLTIDPVEEDDVAVYYCLQSRTIPRTFGGGTKLEIK

SEQ ID NO: 205030 - protein, 246 aa, Artificial Sequence
  Description of Artificial Sequence: Synthetic scFv sequence
EVQLVESGGGLVQPGGSLRLSCAASGFTFSSYAMSWVRQAPGKGLEWVSAISGSGGSTYYADSVKGRFTISRDNSKNTLYLQMNSLRAEDTAVYYCAKVEGSGSLDYWGQGTLVTVSSGGGGSGGGGSGGGGSEIVMTQSPGTLSLSPGERATLSCRASQSVSSAYLAWYQQKPGQPPRLLISGASTRATGIPDRFGGSGSGTDFTLTISRLEPEDFAVYYCQHYGSSFNGSSLFTFGQGTRLEIK

SEQ ID NO: 205031 - protein, 248 aa, Artificial Sequence
  Description of Artificial Sequence: Synthetic scFv sequence
EVQLVETGGGLVQPGGSLRLSCAASGFTFSSYAMSWVRQAPGKGLEWVSAISGSGGSTYYADSVKGRFTISRDNSKNTLYLQMNTLKAEDTAVYYCARATYKRELRYYYGMDVWGQGTTVTVSSGGGGSGGGGSGGGGSEIVLTQSPSTLSLSPGESATLSCRASQSVSTTFLAWYQQKPGQAPRLLIYGSSNRATGIPDRFSGSGSGTDFTLTIRRLEPEDFAVYYCQQYHSSPSWTFGQGTKVEIK

SEQ ID NO: 205032 - protein, 244 aa, Artificial Sequence
  Description of Artificial Sequence: Synthetic scFv sequence
EVQLLETGGGLVQPGGSLRLSCAASGFSFSSYAMSWVRQAPGKGLEWVSAISGSGGSTYYADSVKGRFTISRDNSKNTLYLQMNSLRAEDTAVYYCAKALVGATGAFDIWGQGTLVTVSSGGGGSGGGGSGGGGSEIVLTQSPGTLSLSPGERATLSCRASQSLSSNFLAWYQQKPGQAPGLLIYGASNWATGTPDRFSGSGSGTDFTLTITRLEPEDFAVYYCQYYGTSPMYTFGQGTKVEIK

SEQ ID NO: 205033 - protein, 246 aa, Artificial Sequence
  Description of Artificial Sequence: Synthetic scFv sequence
EVQLVESGGGLVQPGGSLRLSCAASGFTFSSYAMSWVRQAPGKGLEWVSAISGSGGSTYYADSVKGRFTISRDNSKNTLYLQMNSLRAEDTAVYYCAKMGWSSGYLGAFDIWGQGTTVTVSSGGGGSGGGGSGGGGSEIVLTQSPGTLSLSPGERATLSCRASQSVASSFLAWYQQKPGQAPRLLIYGASGRATGIPDRFSGSGSGTDFTLTISRLEPEDFAVYYCQHYGGSPRLTFGGGTKVDIK

SEQ ID NO: 205034 - protein, 248 aa, Artificial Sequence
  Description of Artificial Sequence: Synthetic scFv sequence
QVQLVESGGGLVQPGGSLRLSCAASGFTFSSYAMSWVRQAPGKGLEWVSAISGSGGSTYYADSVKGRFTISRDNAKNSLYLQMNSLRAEDTAIYYCARATYKRELRYYYGMDVWGQGTMVTVSSGGGGSGGGGSGGGGSEIVMTQSPGTVSLSPGERATLSCRASQSVSSSFLAWYQQKPGQAPRLLIYGASSRATGIPDRFSGSGSGTDFTLTISRLEPEDSAVYYCQQYHSSPSWTFGQGTRLEIK

SEQ ID NO: 205035 - protein, 246 aa, Artificial Sequence
  Description of Artificial Sequence: Synthetic scFv sequence
EVQLVESGGGLVQPGRSLRLSCTASGFTFDDYAMHWVRQRPGKGLEWVASINWKGNSLAYGDSVKGRFAISRDNAKNTVFLQMNSLRTEDTAVYYCASHQGVAYYNYAMDVWGRGTLVTVSSGGGGSGGGGSGGGGSEIVLTQSPGTLSLSPGERATLSCRATQSIGSSFLAWYQQRPGQAPRLLIYGASQRATGIPDRFSGRGSGTDFTLTISRVEPEDSAVYYCQHYESSPSWTFGQGTKVEIK

SEQ ID NO: 205036 - protein, 244 aa, Artificial Sequence
  Description of Artificial Sequence: Synthetic scFv sequence
EVQLLESGGGLVQPGGSLRLSCAASGFTFSSYAMSWVRQAPGKGLEWVSAISGSGGSTYYADSVKGRFTISRDNSKNTLYLQMNSLRAEDTAVYYCVLWFGEGFDPWGQGTLVTVSSGGGGSGGGGSGGGGSDIVLTQSPLSLPVTPGEPASISCRSSQSLLHSNGYNYLDWYLQKPGQSPQLLIYLGSNRASGVPDRFSGSGSGTDFTLKISRVEAEDVGVYYCMQALQTPLTFGGGTKVDIK

SEQ ID NO: 205037 - protein, 242 aa, Artificial Sequence
  Description of Artificial Sequence: Synthetic scFv sequence
EVQLLESGGGLVQPGGSLRLSCAASGFTFSSYAMSWVRQAPGKGLEWVSAISGSGGSTYYADSVKGRFTISRDNSKNTLYLQMNSLRAEDTAVYYCAKIPQTGTFDYWGQGTLVTVSSGGGGSGGGGSGGGGSEIVLTQSPGTLSLSPGERATLSCRASQSVSSSYLAWYQQRPGQAPRLLIYGASSRATGIPDRFSGSGSGTDFTLTISRLEPEDFAVYYCQHYGSSPSWTFGQGTRLEIK

SEQ ID NO: 205038 - protein, 245 aa, Artificial Sequence
  Description of Artificial Sequence: Synthetic scFv sequence
DIELTQSPSSLAVSAGEKVTMSCKSSQSILYSSNQKNYLAWYQQKPGQSPKLLIYWASTRESGVPDRFTGSGSGTDFTLTISSVQAEDLAVYYCHQYLSSYTFGGGTKLEIKGGGGSGGGGSGGGGSQVQLQQSGPELVRPGASVRISCKASGYTFASYYIQWMKQRPGQGLEWIGWINPGNVNTKYNEKFKGKATLTADKSSTTAYMQLSSLTSEDSAVYFCARSTYYRPLDYWGQGTTVTVSS

SEQ ID NO: 205039 - protein, 235 aa, Artificial Sequence
  Description of Artificial Sequence: Synthetic scFv sequence
DIELTQSPSSLAVSAGEKVTMSCKSSQSILYSSNQKNYLAWYQQKPGQSPKLLIYWASTRESGVPDRFTGSGSGTDFTLTISSVQAEDLAVYYCHQYLSSYTFGGGTKLEIKGGGGSQVQLQQSGPELVRPGASVRISCKASGYTFASYYIQWMKQRPGQGLEWIGWINPGNVNTKYNEKFKGKATLTADKSSTTAYMQLSSLTSEDSAVYFCARSTYYRPLDYWGQGTTVTVSS

SEQ ID NO: 205040 - protein, 244 aa, Artificial Sequence
  Description of Artificial Sequence: Synthetic scFv sequence
DIVLTQSPASLAVSLGQRATISCRASESVDNYGNTFMHWYQQKPGQPPKLLIYRASNLESGIPARFSGSGSRTDFTLTINPVEADDVATYYCQQSNEDPPTFGAGTKLELKGGGGSGGGGSSGGGSQIQLVQSGPELKKPGETVKISCKASGYIFTNYGMNWVKQAPGKSFKWMGWINTYTGESTYSADFKGRFAFSLETSASTAYLHINDLKNEDTATYFCARSGGYDPMDYWGQGTSVTVSS

SEQ ID NO: 205041 - protein, 237 aa, Artificial Sequence
  Description of Artificial Sequence: Synthetic scFv sequence
DVQITQSPSYLAASPGETITINCRASKSISKDLAWYQEKPGKTNKLLIYSGSTLQSGIPSRFSGSGSGTDFTLTISSLEPEDFAMYYCQQHNKYPYTFGGGTKLEIKGGGGSGGGGSSGGGSQVQLQQPGAELVRPGASVKLSCKASGYTFTSYWMNWVKQRPDQGLEWIGRIDPYDSETHYNQKFKDKAILTVDKSSSTAYMQLSSLTSEDSAVYYCARGNWDDYWGQGTTLTVSS

SEQ ID NO: 205042 - protein, 263 aa, Artificial Sequence
  Description of Artificial Sequence: Synthetic scFv sequence
MALPVTALLLPLALLLHAARPDVQLTQSPSFLSASVGDRVTITCRASKSISKDLAWYQQKPGKAPKLLIYSGSTLQSGVPSRFSGSGSGTEFTLTISSLQPEDFATYYCQQHNKYPYTFGGGTKVEIKGGGGSGGGGSGGGGSGGGGSEVQLVESGGGLVQPGGSLRLSCAASGYTFTSYWMNWVRQAPGKGLVWVSRIDPYDSETHYNQKFKDRFTISVDKAKSTAYLQMNSLRAEDTAVYYCARGNWDDYWGQGTTVTVSS

SEQ ID NO: 205043 - protein, 263 aa, Artificial Sequence
  Description of Artificial Sequence: Synthetic scFv sequence
MALPVTALLLPLALLLHAARPDVQLTQSPSFLSASVGDRVTITCRASKSISKDLAWYQQKPGKAPKLLIYSGSTLQSGVPSRFSGSGSGTEFTLTISSLQPEDFATYYCQQHNKYPYTFGGGTKVEIKGGGGSGGGGSGGGGSGGGGSEVQLVQSGAEVKKPGESLRISCKGSGYTFTSYWMNWVRQMPGKGLEWMGRIDPYDSETHYNQKFKDHVTISVDKSISTAYLQWSSLKASDTAMYYCARGNWDDYWGQGTTVTVSS

SEQ ID NO: 205044 - protein, 263 aa, Artificial Sequence
  Description of Artificial Sequence: Synthetic scFv sequence
MALPVTALLLPLALLLHAARPDVQLTQSPSFLSASVGDRVTITCRASKSISKDLAWYQQKPGKAPKLLIYSGSTLQSGVPSRFSGSGSGTEFTLTISSLQPEDFATYYCQQHNKYPYTFGGGTKVEIKGGGGSGGGGSGGGGSGGGGSQVQLVQSGAEVKKPGASVKVSCKASGYTFTSYWMNWVRQAPGQGLEWMGRIDPYDSETHYNQKFKDRVTMTVDKSTSTAYMELSSLRSEDTAVYYCARGNWDDYWGQGTTVTVSS

SEQ ID NO: 205045 - protein, 263 aa, Artificial Sequence
  Description of Artificial Sequence: Synthetic scFv sequence
MALPVTALLLPLALLLHAARPDVQLTQSPSFLSASVGDRVTITCRASKSISKDLAWYQQKPGKAPKLLIYSGSTLQSGVPSRFSGSGSGTEFTLTISSLQPEDFATYYCQQHNKYPYTFGGGTKVEIKGGGGSGGGGSGGGGSGGGGSQVQLVQSGSELKKPGASVKVSCKASGYTFTSYWMNWVRQAPGQGLEWMGRIDPYDSETHYNQKFKDRFVFSVDKSVSTAYLQISSLKAEDTAVYYCARGNWDDYWGQGTTVTVSS

SEQ ID NO: 205046 - protein, 263 aa, Artificial Sequence
  Description of Artificial Sequence: Synthetic scFv sequence
MALPVTALLLPLALLLHAARPDVVMTQSPAFLSVTPGEKVTITCRASKSISKDLAWYQQKPDQAPKLLIYSGSTLQSGVPSRFSGSGSGTDFTFTISSLEAEDAATYYCQQHNKYPYTFGGGTKVEIKGGGGSGGGGSGGGGSGGGGSEVQLVESGGGLVQPGGSLRLSCAASGYTFTSYWMNWVRQAPGKGLVWVSRIDPYDSETHYNQKFKDRFTISVDKAKSTAYLQMNSLRAEDTAVYYCARGNWDDYWGQGTTVTVSS

SEQ ID NO: 205047 - protein, 263 aa, Artificial Sequence
  Description of Artificial Sequence: Synthetic scFv sequence
MALPVTALLLPLALLLHAARPDVVMTQSPAFLSVTPGEKVTITCRASKSISKDLAWYQQKPDQAPKLLIYSGSTLQSGVPSRFSGSGSGTDFTFTISSLEAEDAATYYCQQHNKYPYTFGGGTKVEIKGGGGSGGGGSGGGGSGGGGSEVQLVQSGAEVKKPGESLRISCKGSGYTFTSYWMNWVRQMPGKGLEWMGRIDPYDSETHYNQKFKDHVTISVDKSISTAYLQWSSLKASDTAMYYCARGNWDDYWGQGTTVTVSS

SEQ ID NO: 205048 - protein, 263 aa, Artificial Sequence
  Description of Artificial Sequence: Synthetic scFv sequence
MALPVTALLLPLALLLHAARPDVVMTQSPAFLSVTPGEKVTITCRASKSISKDLAWYQQKPDQAPKLLIYSGSTLQSGVPSRFSGSGSGTDFTFTISSLEAEDAATYYCQQHNKYPYTFGGGTKVEIKGGGGSGGGGSGGGGSGGGGSQVQLVQSGAEVKKPGASVKVSCKASGYTFTSYWMNWVRQAPGQGLEWMGRIDPYDSETHYNQKFKDRVTMTVDKSTSTAYMELSSLRSEDTAVYYCARGNWDDYWGQGTTVTVSS

SEQ ID NO: 205049 - protein, 263 aa, Artificial Sequence
  Description of Artificial Sequence: Synthetic scFv sequence
MALPVTALLLPLALLLHAARPDVVMTQSPAFLSVTPGEKVTITCRASKSISKDLAWYQQKPDQAPKLLIYSGSTLQSGVPSRFSGSGSGTDFTFTISSLEAEDAATYYCQQHNKYPYTFGGGTKVEIKGGGGSGGGGSGGGGSGGGGSQVQLVQSGSELKKPGASVKVSCKASGYTFTSYWMNWVRQAPGQGLEWMGRIDPYDSETHYNQKFKDRFVFSVDKSVSTAYLQISSLKAEDTAVYYCARGNWDDYWGQGTTVTVSS

SEQ ID NO: 205050 - protein, 263 aa, Artificial Sequence
  Description of Artificial Sequence: Synthetic scFv sequence
MALPVTALLLPLALLLHAARPDVVMTQSPDSLAVSLGERATINCRASKSISKDLAWYQQKPGQPPKLLIYSGSTLQSGVPDRFSGSGSGTDFTLTISSLQAEDVAVYYCQQHNKYPYTFGGGTKVEIKGGGGSGGGGSGGGGSGGGGSEVQLVESGGGLVQPGGSLRLSCAASGYTFTSYWMNWVRQAPGKGLVWVSRIDPYDSETHYNQKFKDRFTISVDKAKSTAYLQMNSLRAEDTAVYYCARGNWDDYWGQGTTVTVSS

SEQ ID NO: 205051 - protein, 263 aa, Artificial Sequence
  Description of Artificial Sequence: Synthetic scFv sequence
MALPVTALLLPLALLLHAARPDVVMTQSPDSLAVSLGERATINCRASKSISKDLAWYQQKPGQPPKLLIYSGSTLQSGVPDRFSGSGSGTDFTLTISSLQAEDVAVYYCQQHNKYPYTFGGGTKVEIKGGGGSGGGGSGGGGSGGGGSEVQLVQSGAEVKKPGESLRISCKGSGYTFTSYWMNWVRQMPGKGLEWMGRIDPYDSETHYNQKFKDHVTISVDKSISTAYLQWSSLKASDTAMYYCARGNWDDYWGQGTTVTVSS

SEQ ID NO: 205052 - protein, 263 aa, Artificial Sequence
  Description of Artificial Sequence: Synthetic scFv sequence
MALPVTALLLPLALLLHAARPDVVMTQSPDSLAVSLGERATINCRASKSISKDLAWYQQKPGQPPKLLIYSGSTLQSGVPDRFSGSGSGTDFTLTISSLQAEDVAVYYCQQHNKYPYTFGGGTKVEIKGGGGSGGGGSGGGGSGGGGSQVQLVQSGAEVKKPGASVKVSCKASGYTFTSYWMNWVRQAPGQGLEWMGRIDPYDSETHYNQKFKDRVTMTVDKSTSTAYMELSSLRSEDTAVYYCARGNWDDYWGQGTTVTVSS

SEQ ID NO: 205053 - protein, 263 aa, Artificial Sequence
  Description of Artificial Sequence: Synthetic scFv sequence
MALPVTALLLPLALLLHAARPDVVMTQSPDSLAVSLGERATINCRASKSISKDLAWYQQKPGQPPKLLIYSGSTLQSGVPDRFSGSGSGTDFTLTISSLQAEDVAVYYCQQHNKYPYTFGGGTKVEIKGGGGSGGGGSGGGGSGGGGSQVQLVQSGSELKKPGASVKVSCKASGYTFTSYWMNWVRQAPGQGLEWMGRIDPYDSETHYNQKFKDRFVFSVDKSVSTAYLQISSLKAEDTAVYYCARGNWDDYWGQGTTVTVSS

SEQ ID NO: 205054 - protein, 282 aa, Artificial Sequence
  Description of Artificial Sequence: Synthetic scFv sequence
MALPVTALLLPLALLLHAARPEVKLVESGGGLVQPGGSLSLSCAASGFTFTDYYMSWVRQPPGKALEWLALIRSKADGYTTEYSASVKGRFTLSRDDSQSILYLQMNALRPEDSATYYCARDAAYYSYYSPEGAMDYWGQGTSVTVSSGGGGSGGGGSGGGGSMADYKDIVMTQSHKFMSTSVGDRVNITCKASQNVDSAVAWYQQKPGQSPKALIYSASYRYSGVPDRFTGRGSGTDFTLTISSVQAEDLAVYYCQQYYSTPWTFGGGTKLEIKRSDPTSS

SEQ ID NO: 205055 - protein, 263 aa, Artificial Sequence
  Description of Artificial Sequence: Synthetic scFv sequence
MALPVTALLLPLALLLHAARPEVQLVESGGGLVQPGGSLRLSCAASGYTFTSYWMNWVRQAPGKGLVWVSRIDPYDSETHYNQKFKDRFTISVDKAKSTAYLQMNSLRAEDTAVYYCARGNWDDYWGQGTTVTVSSGGGGSGGGGSGGGGSGGGGSDVQLTQSPSFLSASVGDRVTITCRASKSISKDLAWYQQKPGKAPKLLIYSGSTLQSGVPSRFSGSGSGTEFTLTISSLQPEDFATYYCQQHNKYPYTFGGGTKVEIK

SEQ ID NO: 205056 - protein, 263 aa, Artificial Sequence
  Description of Artificial Sequence: Synthetic scFv sequence
MALPVTALLLPLALLLHAARPEVQLVESGGGLVQPGGSLRLSCAASGYTFTSYWMNWVRQAPGKGLVWVSRIDPYDSETHYNQKFKDRFTISVDKAKSTAYLQMNSLRAEDTAVYYCARGNWDDYWGQGTTVTVSSGGGGSGGGGSGGGGSGGGGSDVVMTQSPAFLSVTPGEKVTITCRASKSISKDLAWYQQKPDQAPKLLIYSGSTLQSGVPSRFSGSGSGTDFTFTISSLEAEDAATYYCQQHNKYPYTFGGGTKVEIK

SEQ ID NO: 205057 - protein, 263 aa, Artificial Sequence
  Description of Artificial Sequence: Synthetic scFv sequence
MALPVTALLLPLALLLHAARPEVQLVESGGGLVQPGGSLRLSCAASGYTFTSYWMNWVRQAPGKGLVWVSRIDPYDSETHYNQKFKDRFTISVDKAKSTAYLQMNSLRAEDTAVYYCARGNWDDYWGQGTTVTVSSGGGGSGGGGSGGGGSGGGGSDVVMTQSPDSLAVSLGERATINCRASKSISKDLAWYQQKPGQPPKLLIYSGSTLQSGVPDRFSGSGSGTDFTLTISSLQAEDVAVYYCQQHNKYPYTFGGGTKVEIK

SEQ ID NO: 205058 - protein, 263 aa, Artificial Sequence
  Description of Artificial Sequence: Synthetic scFv sequence
MALPVTALLLPLALLLHAARPEVQLVESGGGLVQPGGSLRLSCAASGYTFTSYWMNWVRQAPGKGLVWVSRIDPYDSETHYNQKFKDRFTISVDKAKSTAYLQMNSLRAEDTAVYYCARGNWDDYWGQGTTVTVSSGGGGSGGGGSGGGGSGGGGSEVVLTQSPATLSLSPGERATLSCRASKSISKDLAWYQQKPGQAPRLLIYSGSTLQSGIPARFSGSGSGTDFTLTISSLEPEDFAVYYCQQHNKYPYTFGGGTKVEIK

SEQ ID NO: 205059 - protein, 263 aa, Artificial Sequence
  Description of Artificial Sequence: Synthetic scFv sequence
MALPVTALLLPLALLLHAARPEVQLVQSGAEVKKPGESLRISCKGSGYTFTSYWMNWVRQMPGKGLEWMGRIDPYDSETHYNQKFKDHVTISVDKSISTAYLQWSSLKASDTAMYYCARGNWDDYWGQGTTVTVSSGGGGSGGGGSGGGGSGGGGSDVQLTQSPSFLSASVGDRVTITCRASKSISKDLAWYQQKPGKAPKLLIYSGSTLQSGVPSRFSGSGSGTEFTLTISSLQPEDFATYYCQQHNKYPYTFGGGTKVEIK

SEQ ID NO: 205060 - protein, 263 aa, Artificial Sequence
  Description of Artificial Sequence: Synthetic scFv sequence
MALPVTALLLPLALLLHAARPEVQLVQSGAEVKKPGESLRISCKGSGYTFTSYWMNWVRQMPGKGLEWMGRIDPYDSETHYNQKFKDHVTISVDKSISTAYLQWSSLKASDTAMYYCARGNWDDYWGQGTTVTVSSGGGGSGGGGSGGGGSGGGGSDVVMTQSPAFLSVTPGEKVTITCRASKSISKDLAWYQQKPDQAPKLLIYSGSTLQSGVPSRFSGSGSGTDFTFTISSLEAEDAATYYCQQHNKYPYTFGGGTKVEIK

SEQ ID NO: 205061 - protein, 263 aa, Artificial Sequence
  Description of Artificial Sequence: Synthetic scFv sequence
MALPVTALLLPLALLLHAARPEVQLVQSGAEVKKPGESLRISCKGSGYTFTSYWMNWVRQMPGKGLEWMGRIDPYDSETHYNQKFKDHVTISVDKSISTAYLQWSSLKASDTAMYYCARGNWDDYWGQGTTVTVSSGGGGSGGGGSGGGGSGGGGSDVVMTQSPDSLAVSLGERATINCRASKSISKDLAWYQQKPGQPPKLLIYSGSTLQSGVPDRFSGSGSGTDFTLTISSLQAEDVAVYYCQQHNKYPYTFGGGTKVEIK

SEQ ID NO: 205062 - protein, 263 aa, Artificial Sequence
  Description of Artificial Sequence: Synthetic scFv sequence
MALPVTALLLPLALLLHAARPEVQLVQSGAEVKKPGESLRISCKGSGYTFTSYWMNWVRQMPGKGLEWMGRIDPYDSETHYNQKFKDHVTISVDKSISTAYLQWSSLKASDTAMYYCARGNWDDYWGQGTTVTVSSGGGGSGGGGSGGGGSGGGGSEVVLTQSPATLSLSPGERATLSCRASKSISKDLAWYQQKPGQAPRLLIYSGSTLQSGIPARFSGSGSGTDFTLTISSLEPEDFAVYYCQQHNKYPYTFGGGTKVEIK

SEQ ID NO: 205063 - protein, 263 aa, Artificial Sequence
  Description of Artificial Sequence: Synthetic scFv sequence
MALPVTALLLPLALLLHAARPEVVLTQSPATLSLSPGERATLSCRASKSISKDLAWYQQKPGQAPRLLIYSGSTLQSGIPARFSGSGSGTDFTLTISSLEPEDFAVYYCQQHNKYPYTFGGGTKVEIKGGGGSGGGGSGGGGSGGGGSEVQLVESGGGLVQPGGSLRLSCAASGYTFTSYWMNWVRQAPGKGLVWVSRIDPYDSETHYNQKFKDRFTISVDKAKSTAYLQMNSLRAEDTAVYYCARGNWDDYWGQGTTVTVSS

SEQ ID NO: 205064 - protein, 263 aa, Artificial Sequence
  Description of Artificial Sequence: Synthetic scFv sequence
MALPVTALLLPLALLLHAARPEVVLTQSPATLSLSPGERATLSCRASKSISKDLAWYQQKPGQAPRLLIYSGSTLQSGIPARFSGSGSGTDFTLTISSLEPEDFAVYYCQQHNKYPYTFGGGTKVEIKGGGGSGGGGSGGGGSGGGGSEVQLVQSGAEVKKPGESLRISCKGSGYTFTSYWMNWVRQMPGKGLEWMGRIDPYDSETHYNQKFKDHVTISVDKSISTAYLQWSSLKASDTAMYYCARGNWDDYWGQGTTVTVSS

SEQ ID NO: 205065 - protein, 263 aa, Artificial Sequence
  Description of Artificial Sequence: Synthetic scFv sequence
MALPVTALLLPLALLLHAARPEVVLTQSPATLSLSPGERATLSCRASKSISKDLAWYQQKPGQAPRLLIYSGSTLQSGIPARFSGSGSGTDFTLTISSLEPEDFAVYYCQQHNKYPYTFGGGTKVEIKGGGGSGGGGSGGGGSGGGGSQVQLVQSGAEVKKPGASVKVSCKASGYTFTSYWMNWVRQAPGQGLEWMGRIDPYDSETHYNQKFKDRVTMTVDKSTSTAYMELSSLRSEDTAVYYCARGNWDDYWGQGTTVTVSS

SEQ ID NO: 205066 - protein, 263 aa, Artificial Sequence
  Description of Artificial Sequence: Synthetic scFv sequence
MALPVTALLLPLALLLHAARPEVVLTQSPATLSLSPGERATLSCRASKSISKDLAWYQQKPGQAPRLLIYSGSTLQSGIPARFSGSGSGTDFTLTISSLEPEDFAVYYCQQHNKYPYTFGGGTKVEIKGGGGSGGGGSGGGGSGGGGSQVQLVQSGSELKKPGASVKVSCKASGYTFTSYWMNWVRQAPGQGLEWMGRIDPYDSETHYNQKFKDRFVFSVDKSVSTAYLQISSLKAEDTAVYYCARGNWDDYWGQGTTVTVSS

SEQ ID NO: 205067 - protein, 263 aa, Artificial Sequence
  Description of Artificial Sequence: Synthetic scFv sequence
MALPVTALLLPLALLLHAARPQVQLVQSGAEVKKPGASVKVSCKASGYTFTSYWMNWVRQAPGQGLEWMGRIDPYDSETHYNQKFKDRVTMTVDKSTSTAYMELSSLRSEDTAVYYCARGNWDDYWGQGTTVTVSSGGGGSGGGGSGGGGSGGGGSDVQLTQSPSFLSASVGDRVTITCRASKSISKDLAWYQQKPGKAPKLLIYSGSTLQSGVPSRFSGSGSGTEFTLTISSLQPEDFATYYCQQHNKYPYTFGGGTKVEIK

SEQ ID NO: 205068 - protein, 263 aa, Artificial Sequence
  Description of Artificial Sequence: Synthetic scFv sequence
MALPVTALLLPLALLLHAARPQVQLVQSGAEVKKPGASVKVSCKASGYTFTSYWMNWVRQAPGQGLEWMGRIDPYDSETHYNQKFKDRVTMTVDKSTSTAYMELSSLRSEDTAVYYCARGNWDDYWGQGTTVTVSSGGGGSGGGGSGGGGSGGGGSDVVMTQSPAFLSVTPGEKVTITCRASKSISKDLAWYQQKPDQAPKLLIYSGSTLQSGVPSRFSGSGSGTDFTFTISSLEAEDAATYYCQQHNKYPYTFGGGTKVEIK

SEQ ID NO: 205069 - protein, 263 aa, Artificial Sequence
  Description of Artificial Sequence: Synthetic scFv sequence
MALPVTALLLPLALLLHAARPQVQLVQSGAEVKKPGASVKVSCKASGYTFTSYWMNWVRQAPGQGLEWMGRIDPYDSETHYNQKFKDRVTMTVDKSTSTAYMELSSLRSEDTAVYYCARGNWDDYWGQGTTVTVSSGGGGSGGGGSGGGGSGGGGSDVVMTQSPDSLAVSLGERATINCRASKSISKDLAWYQQKPGQPPKLLIYSGSTLQSGVPDRFSGSGSGTDFTLTISSLQAEDVAVYYCQQHNKYPYTFGGGTKVEIK

SEQ ID NO: 205070 - protein, 263 aa, Artificial Sequence
  Description of Artificial Sequence: Synthetic scFv sequence
MALPVTALLLPLALLLHAARPQVQLVQSGAEVKKPGASVKVSCKASGYTFTSYWMNWVRQAPGQGLEWMGRIDPYDSETHYNQKFKDRVTMTVDKSTSTAYMELSSLRSEDTAVYYCARGNWDDYWGQGTTVTVSSGGGGSGGGGSGGGGSGGGGSEVVLTQSPATLSLSPGERATLSCRASKSISKDLAWYQQKPGQAPRLLIYSGSTLQSGIPARFSGSGSGTDFTLTISSLEPEDFAVYYCQQHNKYPYTFGGGTKVEIK

SEQ ID NO: 205071 - protein, 263 aa, Artificial Sequence
  Description of Artificial Sequence: Synthetic scFv sequence
MALPVTALLLPLALLLHAARPQVQLVQSGSELKKPGASVKVSCKASGYTFTSYWMNWVRQAPGQGLEWMGRIDPYDSETHYNQKFKDRFVFSVDKSVSTAYLQISSLKAEDTAVYYCARGNWDDYWGQGTTVTVSSGGGGSGGGGSGGGGSGGGGSDVQLTQSPSFLSASVGDRVTITCRASKSISKDLAWYQQKPGKAPKLLIYSGSTLQSGVPSRFSGSGSGTEFTLTISSLQPEDFATYYCQQHNKYPYTFGGGTKVEIK

SEQ ID NO: 205072 - protein, 263 aa, Artificial Sequence
  Description of Artificial Sequence: Synthetic scFv sequence
MALPVTALLLPLALLLHAARPQVQLVQSGSELKKPGASVKVSCKASGYTFTSYWMNWVRQAPGQGLEWMGRIDPYDSETHYNQKFKDRFVFSVDKSVSTAYLQISSLKAEDTAVYYCARGNWDDYWGQGTTVTVSSGGGGSGGGGSGGGGSGGGGSDVVMTQSPAFLSVTPGEKVTITCRASKSISKDLAWYQQKPDQAPKLLIYSGSTLQSGVPSRFSGSGSGTDFTFTISSLEAEDAATYYCQQHNKYPYTFGGGTKVEIK

SEQ ID NO: 205073 - protein, 263 aa, Artificial Sequence
  Description of Artificial Sequence: Synthetic scFv sequence
MALPVTALLLPLALLLHAARPQVQLVQSGSELKKPGASVKVSCKASGYTFTSYWMNWVRQAPGQGLEWMGRIDPYDSETHYNQKFKDRFVFSVDKSVSTAYLQISSLKAEDTAVYYCARGNWDDYWGQGTTVTVSSGGGGSGGGGSGGGGSGGGGSDVVMTQSPDSLAVSLGERATINCRASKSISKDLAWYQQKPGQPPKLLIYSGSTLQSGVPDRFSGSGSGTDFTLTISSLQAEDVAVYYCQQHNKYPYTFGGGTKVEIK

SEQ ID NO: 205074 - protein, 263 aa, Artificial Sequence
  Description of Artificial Sequence: Synthetic scFv sequence
MALPVTALLLPLALLLHAARPQVQLVQSGSELKKPGASVKVSCKASGYTFTSYWMNWVRQAPGQGLEWMGRIDPYDSETHYNQKFKDRFVFSVDKSVSTAYLQISSLKAEDTAVYYCARGNWDDYWGQGTTVTVSSGGGGSGGGGSGGGGSGGGGSEVVLTQSPATLSLSPGERATLSCRASKSISKDLAWYQQKPGQAPRLLIYSGSTLQSGIPARFSGSGSGTDFTLTISSLEPEDFAVYYCQQHNKYPYTFGGGTKVEIK

SEQ ID NO: 205075 - protein, 245 aa, Artificial Sequence
  Description of Artificial Sequence: Synthetic scFv sequence
QVQLQQSGAEVKKSGASVKVSCKASGYTFTDYYMHWLRQAPGQGLEWMGWINPNSGDTNYAQKFQGRVTLTRDTSISTVYMELSRLRSDDTAVYYCARDMNILATVPFDIWGQGTMVTVSSASGGGGSGGRASGGGGSDIQMTQSPSSLSASVGDRVTITCRASQSISSYLNWYQQKPGKAPKLLIYAASSLQSGVPSRFSGSGSGTDFTLTISSLQPEDFATYYCQQGDSVPLTFGGGTKVEIK

SEQ ID NO: 205076 - protein, 243 aa, Artificial Sequence
  Description of Artificial Sequence: Synthetic scFv sequence
QVQLVQSGAEVKKPGASVKVSCKASGYIFTGYYIHWVRQAPGQGLEWMGWINPNSGGTNYAQKFQGRVTMTRDTSISTAYMELSGLRSDDPAVYYCARDMNILATVPFDIWGQGTLVTVSSGGGGSGGGGSGGGGSDIQLTQSPSSLSASVGDRVTITCRASQSISSYLNWYQQKPGKAPKLLIYAASSLQSGVPSRFSGSGSGTDFTLTVNSLQPEDFATYYCQQGDSVPLTFGGGTKVEIK

SEQ ID NO: 205077 - protein, 243 aa, Artificial Sequence
  Description of Artificial Sequence: Synthetic scFv sequence
QVQLVQSGAEVKKPGASVKVSCKASGYTFTGYYMHWVRQAPGQGLEWMGWINPNSGGTNYAQKFQGRVTLTRDTSISTVYMELSRLRSDDTAVYYCARDMNILATVPFDIWGQGTMVTVSSGGGGSGGGGSGGGGSDIQMTQSPSSLSASVGDRVTITCRASQSISSYLNWYQQKPGKAPKLLIYAASSLQSGVPSRFSGSGSGTDFTLTVNSLQPEDFATYYCQQGDSVPLTFGGGTRLEIK

SEQ ID NO: 205078 - protein, 243 aa, Artificial Sequence
  Description of Artificial Sequence: Synthetic scFv sequence
QVQLVQSGAEVKKPGASVKVSCKASGYTFTGYYMHWVRQAPGQGLEWMGWINPNSGGTNYAQKFQGRVTMTRDTSISTAYMELSRLRSDDTAVYYCARDMNILATVPFDIWGQGTMVTVSSGGGGSGGGGSGGGGSDIQMTQSPSSLSASVGDRVTITCRASQSISTYLNWYQQKPGKAPNLLIYAAFSLQSGVPSRFSGSGSGTDFTLTINSLQPEDFATYYCQQGDSVPLTFGGGTKLEIK

SEQ ID NO: 205079 - protein, 264 aa, Artificial Sequence
  Description of Artificial Sequence: Synthetic scFv sequence
MALPVTALLLPLALLLHAARPQVQLVQSGAEVKKPGASVKVSCKASGYTFTGYYMHWVRQAPGQGLEWMGWINPNSGGTNYAQKFQGRVTMTRDTSISTAYMELSRLRSDDTAVYYCARDMNILATVPFDIWGQGTMVTVSSGGGGSGGGGSGGGGSDIQMTQSPSSLSASVGDRVTITCRASQSISTYLNWYQQKPGKAPNLLIYAAFSLQSGVPSRFSGSGSGTDFTLTINSLQPEDFATYYCQQGDSVPLTFGGGTKLEIK

SEQ ID NO: 205080 - protein, 264 aa, Artificial Sequence
  Description of Artificial Sequence: Synthetic scFv sequence
MALPVTALLLPLALLLHAARPQVQLVQSGAEVKKPGASVKVSCKASGYTFTGYYMHWVRQAPGQGLEWMGWINPNSGGTNYAQKFQGRVTLTRDTSISTVYMELSRLRSDDTAVYYCARDMNILATVPFDIWGQGTMVTVSSGGGGSGGGGSGGGGSDIQMTQSPSSLSASVGDRVTITCRASQSISSYLNWYQQKPGKAPKLLIYAASSLQSGVPSRFSGSGSGTDFTLTVNSLQPEDFATYYCQQGDSVPLTFGGGTRLEIK

SEQ ID NO: 205081 - protein, 264 aa, Artificial Sequence
  Description of Artificial Sequence: Synthetic scFv sequence
MALPVTALLLPLALLLHAARPQVQLVQSGAEVKKPGASVKVSCKASGYIFTGYYIHWVRQAPGQGLEWMGWINPNSGGTNYAQKFQGRVTMTRDTSISTAYMELSGLRSDDPAVYYCARDMNILATVPFDIWGQGTLVTVSSGGGGSGGGGSGGGGSDIQLTQSPSSLSASVGDRVTITCRASQSISSYLNWYQQKPGKAPKLLIYAASSLQSGVPSRFSGSGSGTDFTLTVNSLQPEDFATYYCQQGDSVPLTFGGGTKVEIK

SEQ ID NO: 205082 - protein, 266 aa, Artificial Sequence
  Description of Artificial Sequence: Synthetic scFv sequence
MALPVTALLLPLALLLHAARPQVQLQQSGAEVKKSGASVKVSCKASGYTFTDYYMHWLRQAPGQGLEWMGWINPNSGDTNYAQKFQGRVTLTRDTSISTVYMELSRLRSDDTAVYYCARDMNILATVPFDIWGQGTMVTVSSASGGGGSGGRASGGGGSDIQMTQSPSSLSASVGDRVTITCRASQSISSYLNWYQQKPGKAPKLLIYAASSLQSGVPSRFSGSGSGTDFTLTISSLQPEDFATYYCQQGDSVPLTFGGGTKVEIK

SEQ ID NO: 205083 - protein, 249 aa, Artificial Sequence
  Description of Artificial Sequence: Synthetic scFv sequence
DIVLTQSPDSLAVSLGERATINCRASESVDNYGNTFMHWYQQKPGQPPKLLIYRASNLESGVPDRFSGSGSRTDIFITISSLQAEDVAVYYCQQSNEDPPTFGQGTKLEIKGGGGSGGGGSGGGGSGGGGSQIQLVQSGSELKKPGASVKVSCKASGYIFTNYGMNWVRQAPGQGLEWMGWINTYTGESTYSADFKGRFVFSLDTSVSTAYLQINALKAEDTAVYYCARSGGYDPMDYWGQGTTVTVSS

SEQ ID NO: 205084 - protein, 249 aa, Artificial Sequence
  Description of Artificial Sequence: Synthetic scFv sequence
DIVLTQSPDSLAVSLGERATINCRASESVDNYGNTFMHWYQQKPGQPPKLLIYRASNLESGVPDRFSGSGSRTDFTLTISSLQAEDVAVYYCQQSNEDPPTFGQGTKLEIKGGGGSGGGGSGGGGSGGGGSQIQLVQSGAEVKKPGASVKVSCKASGYIFTNYGMNWVRQAPGQRLEWMGWINTYTGESTYSADFKGRVTITLDTSASTAYMELSSLRSEDTAVYYCARSGGYDPMDYWGQGTTVTVSS

SEQ ID NO: 205085 - protein, 249 aa, Artificial Sequence
  Description of Artificial Sequence: Synthetic scFv sequence
EIVLTQSPATLSLSPGERATLSCRASESVDNYGNTFMHWYQQKPGQAPRLLIYRASNLESGIPARFSGSGSRTDFTLTISSLEPEDVAVYYCQQSNEDPPTFGQGTKLEIKGGGGSGGGGSGGGGSGGGGSQIQLVQSGSELKKPGASVKVSCKASGYIFTNYGMNWVRQAPGQGLEWMGWINTYTGESTYSADFKGRFVFSLDTSVSTAYLQINALKAEDTAVYYCARSGGYDPMDYWGQGTTVTVSS

SEQ ID NO: 205086 - protein, 249 aa, Artificial Sequence
  Description of Artificial Sequence: Synthetic scFv sequence
EIVLTQSPATLSLSPGERATLSCRASESVDNYGNTFMHWYQQKPGQAPRLLIYRASNLESGIPARFSGSGSRTDFTLTISSLEPEDVAVYYCQQSNEDPPTFGQGTKLEIKGGGGSGGGGSGGGGSGGGGSQIQLVQSGAEVKKPGASVKVSCKASGYIFTNYGMNWVRQAPGQRLEWMGWINTYTGESTYSADFKGRVTITLDTSASTAYMELSSLRSEDTAVYYCARSGGYDPMDYWGQGTTVTVSS

SEQ ID NO: 205087 - protein, 249 aa, Artificial Sequence
  Description of Artificial Sequence: Synthetic scFv sequence
QIQLVQSGSELKKPGASVKVSCKASGYIFTNYGMNWVRQAPGQGLEWMGWINTYTGESTYSADFKGRFVFSLDTSVSTAYLQINALKAEDTAVYYCARSGGYDPMDYWGQGTTVTVSSGGGGSGGGGSGGGGSGGGGSDIVLTQSPDSLAVSLGERATINCRASESVDNYGNTFMHWYQQKPGQPPKLLIYRASNLESGVPDRFSGSGSRTDFTLTISSLQAEDVAVYYCQQSNEDPPTFGQGTKLEIK

SEQ ID NO: 205088 - protein, 249 aa, Artificial Sequence
  Description of Artificial Sequence: Synthetic scFv sequence
QIQLVQSGSELKKPGASVKVSCKASGYIFTNYGMNWVRQAPGQGLEWMGWINTYTGESTYSADFKGRFVFSLDTSVSTAYLQINALKAEDTAVYYCARSGGYDPMDYWGQGTTVTVSSGGGGSGGGGSGGGGSGGGGSEIVLTQSPATLSLSPGERATLSCRASESVDNYGNTFMHWYQQKPGQAPRLLIYRASNLESGIPARFSGSGSRTDFTLTISSLEPEDVAVYYCQQSNEDPPTFGQGTKLEIK

SEQ ID NO: 205089 - protein, 249 aa, Artificial Sequence
  Description of Artificial Sequence: Synthetic scFv sequence
QIQLVQSGAEVKKPGASVKVSCKASGYIFTNYGMNWVRQAPGQRLEWMGWINTYTGESTYSADFKGRVTITLDTSASTAYMELSSLRSEDTAVYYCARSGGYDPMDYWGQGTTVTVSSGGGGSGGGGSGGGGSGGGGSDIVLTQSPDSLAVSLGERATINCRASESVDNYGNTFMHWYQQKPGQPPKLLIYRASNLESGVPDRFSGSGSRTDFTLTISSLQAEDVAVYYCQQSNEDPPTFGQGTKLEIK

SEQ ID NO: 205090 - protein, 249 aa, Artificial Sequence
  Description of Artificial Sequence: Synthetic scFv sequence
QIQLVQSGAEVKKPGASVKVSCKASGYIFTNYGMNWVRQAPGQRLEWMGWINTYTGESTYSADFKGRVTITLDTSASTAYMELSSLRSEDTAVYYCARSGGYDPMDYWGQGTTVTVSSGGGGSGGGGSGGGGSGGGGSEIVLTQSPATLSLSPGERATLSCRASESVDNYGNTFMHWYQQKPGQAPRLLIYRASNLESGIPARFSGSGSRTDFTLTISSLEPEDVAVYYCQQSNEDPPTFGQGTKLEIK

SEQ ID NO: 205091 - protein, 247 aa, Artificial Sequence
  Description of Artificial Sequence: Synthetic scFv sequence
DIQMTQSTSSLSASLGDRVTISCSASQGINNYLNWYQQKPDGTVELLIYYTSTLQSGVPSRFSGSGSGTDYSLTISNLEPEDIGTYYCQQYSKLPRTFGGGTKLEIKGSTSGSGKPGSSEGSTKGQVQLQQSGSELMMPGASVKISCKATGYTFSNYWIEWVKQRPGHGLEWIGEILPGTGRTIYNEKFKGKATFTADISSNTVQMQLSSLTSEDSAVYYCARRDYYGNFYYAMDYWGQGTSVTVSS

SEQ ID NO: 205092 - protein, 242 aa, Artificial Sequence
  Description of Artificial Sequence: Synthetic scFv sequence
DIQMTQTTSSLSASLGDRVTISCRASQDISKYLNWYQQKPDGTVKLLIYHTSRLHSGVPSRFSGSGSGTDYSLTISNLEQEDIATYFCQQGNTLPYTFGGGTKLEITGGGGSGGGGSGGGGSEVKLQESGPGLVAPSQSLSVTCTVSGVSLPDYGVSWIRQPPRKGLEWLGVIWGSETTYYNSALKSRLTIIKDNSKSQVFLKMNSLQTDDTAIYYCAKHYYYGGSYAMDYWGQGTSVTVSS

SEQ ID NO: 205093 - DNA, 726 bp, Artificial Sequence
  Description of Artificial Sequence: Synthetic scFv sequence
gacatccagatgacacagaccacaagctccctgtccgcctctctgggcgacagagtgaccatcagctgccgggcctcccaggatatctctaagtatctgaactggtaccagcagaagcccgatggcacagtgaagctgctgatctatcacaccagccgcctgcactccggagtgccttctaggttcagcggctccggctctggcacagactacagcctgaccatctccaacctggagcaggaggatatcgccacctatttctgccagcagggcaatacactgccttacacctttggcggcggcacaaagctggagatcaccggaggaggaggcagcggaggaggaggctccggcggcggcggctctgaggtgaagctgcaggagtccggaccaggcctggtggcacctagccagtccctgtctgtgacatgtaccgtgtccggcgtgtctctgccagactacggcgtgtcttggatcaggcagccacctaggaagggcctggagtggctgggcgtgatctggggcagcgagacaacatactataattctgccctgaagagcagactgacaatcatcaaggacaacagcaagtcccaggtgttcctgaagatgaatagcctgcagacagacgataccgccatctactattgcgccaagcactactattacggcggcagctatgccatggattactggggccagggcacatccgtgaccgtgtctagc

SEQ ID NO: 205094 - DNA, 726 bp, Artificial Sequence
  Description of Artificial Sequence: Synthetic scFv sequence
gacatccagatgacacagaccacaagctccctgagcgcctccctgggcgacagagtgaccatctcttgccgggccagccaggatatctccaagtatctgaactggtaccagcagaagcccgatggcacagtgaagctgctgatctatcacacctctcgcctgcacagcggcgtgccttccaggttctctggcagcggctccggcacagactactctctgaccatcagcaacctggagcaggaggatatcgccacctatttctgccagcagggcaatacactgccctacacctttggcggcggcacaaagctggagatcaccggcggcggcggctctggaggaggaggcagcggcggaggaggctccgaggtgaagctgcaggagtccggaccaggcctggtggcaccatctcagagcctgtccgtgacatgtaccgtgagcggcgtgtccctgcctgactacggcgtgagctggatcagacagccacctaggaagggcctggagtggctgggcgtgatctggggctccgagacaacatactataactccgccctgaagtctcggctgaccatcatcaaggacaactctaagagccaggtgttcctgaagatgaattccctgcagacagacgataccgccatctactattgcgccaagcactactattacggcggctcctatgccatggattactggggccagggcacatctgtgaccgtgtctagc

SEQ ID NO: 205095 - DNA, 726 bp, Artificial Sequence
  Description of Artificial Sequence: Synthetic scFv sequence
gacatccagatgacacagaccacaagctccctgagcgcctccctgggcgacagagtgaccatcagctgccgggcctcccaggatatctctaagtatctgaactggtaccagcagaagccagatggcacagtgaagctgctgatctatcacaccagccgcctgcactccggagtgccctctaggttctctggcagcggctccggcacagactacagcctgaccatctccaacctggagcaggaggatatcgccacctatttctgccagcagggcaatacactgccatacacctttggcggcggcacaaagctggagatcaccggaggaggaggcagcggaggaggaggctccggcggcggcggctctgaggtgaagctgcaggagtccggaccaggcctggtggcaccttctcagagcctgtccgtgacatgtaccgtgtctggcgtgagcctgcccgactacggcgtgtcttggatcagacagccacctaggaagggcctggagtggctgggcgtgatctggggcagcgagacaacatactataattctgccctgaagagcaggctgaccatcatcaaggacaactctaagagccaggtgttcctgaagatgaattccctgcagacagacgataccgccatctactattgcgccaagcactactattacggcggctcttatgccatggattactggggccagggcacaagcgtgaccgtgtctagc

SEQ ID NO: 205096 - DNA, 726 bp, Artificial Sequence
  Description of Artificial Sequence: Synthetic scFv sequence
gacatccagatgacacagaccacaagctccctgagcgcctccctgggcgacagagtgaccatctcttgccgggccagccaggatatctccaagtatctgaactggtaccagcagaagccagatggcacagtgaagctgctgatctatcacacctctcgcctgcacagcggagtgccctccaggttctctggcagcggctccggcacagactactctctgaccatcagcaacctggagcaggaggatatcgccacctatttctgccagcagggcaatacactgccctacacctttggcggcggcacaaagctggagatcaccggcggcggcggctctggaggaggaggcagcggcggaggaggctccgaggtgaagctgcaggagtccggaccaggcctggtggcaccatctcagagcctgtccgtgacatgtaccgtgagcggcgtgtccctgcctgactacggcgtgagctggatcagacagccacctaggaagggcctggagtggctgggcgtgatctggggctccgagacaacatactataattccgccctgaagtctcggctgacaatcatcaaggacaactctaagagccaggtgtttctgaagatgaatagcctgcagacagacgataccgccatctactattgcgccaagcactactattacggcggctcctatgccatggattactggggccagggcacatctgtgaccgtgtctagc

SEQ ID NO: 205097 - DNA, 726 bp, Artificial Sequence
  Description of Artificial Sequence: Synthetic scFv sequence
gacatccagatgacacagaccacaagctccctgagcgcctccctgggcgacagagtgaccatcagctgccgggcctcccaggatatctctaagtatctgaactggtaccagcagaagccagatggcacagtgaagctgctgatctatcacaccagccgcctgcactccggagtgccctctaggttctctggcagcggctccggcacagactacagcctgaccatctccaacctggagcaggaggatatcgccacctatttctgccagcagggcaatacactgccatacacctttggcggcggcacaaagctggagatcaccggaggaggaggcagcggaggaggaggctccggcggcggcggctctgaggtgaagctgcaggagtccggaccaggcctggtggcaccttctcagagcctgtccgtgacatgtaccgtgtctggcgtgagcctgcccgactacggcgtgtcttggatcagacagccacctaggaagggcctggagtggctgggcgtgatctggggcagcgagacaacatactataattctgccctgaagagcaggctgacaatcatcaaggacaactctaagagccaggtgtttctgaagatgaatagcctgcagacagacgataccgccatctactattgtgccaagcactactattacggcggcagctatgccatggattactggggccagggcacatccgtgaccgtgtctagc

SEQ ID NO: 205098 - DNA, 726 bp, Artificial Sequence
  Description of Artificial Sequence: Synthetic scFv sequence
gacatccagatgacacagactacatcctccctgtctgcctctctgggagacagagtcaccatcagttgcagggcaagtcaggacattagtaaatatttaaattggtatcagcagaaaccagatggaactgttaaactcctgatctaccatacatcaagattacactcaggagtcccatcaaggttcagtggcagtgggtctggaacagattattctctcaccattagcaacctggagcaagaagatattgccacttacttttgccaacagggtaatacgcttccgtacacgttcggaggggggaccaagctggagatcacaggtggcggtggctcgggcggtggtgggtcgggtggcggcggatctgaggtgaaactgcaggagtcaggacctggcctggtggcgccctcacagagcctgtccgtcacatgcactgtctcaggggtctcattacccgactatggtgtaagctggattcgccagcctccacgaaagggtctggagtggctgggagtaatatggggtagtgaaaccacatactataattcagctctcaaatccagactgaccatcatcaaggacaactccaagagccaagttttcttaaaaatgaacagtctgcaaactgatgacacagccatttactactgtgccaaacattattactacggtggtagctatgctatggactactggggccaaggaacctcagtcaccgtctcctca

SEQ ID NO: 205099 - DNA, 726 bp, Artificial Sequence
  Description of Artificial Sequence: Synthetic scFv sequence
gatatccagatgacacagaccacaagctccctgtccgcctctctgggcgacagagtgaccatcagctgccgggcctcccaggatatctctaagtatctgaactggtaccagcagaagcccgatggcacagtgaagctgctgatctatcacaccagccgcctgcactccggagtgccttctaggttcagcggctccggctctggcacagactacagcctgaccatctccaacctggagcaggaggatatcgccacctatttctgccagcagggcaatacactgccttacacctttggcggcggcacaaagctggagatcaccggaggaggaggcagcggaggaggaggctccggcggcggcggctctgaggtgaagctgcaggagtccggaccaggcctggtggcacctagccagtccctgtctgtgacatgtaccgtgtccggcgtgtctctgccagactacggcgtgtcttggatcaggcagccacctaggaagggcctggagtggctgggcgtgatctggggcagcgagacaacatactataattctgccctgaagagcagactgacaatcatcaaggacaacagcaagtcccaggtgttcctgaagatgaatagcctgcagacagacgataccgccatctactattgcgccaagcactactattacggcggcagctatgccatggattactggggccagggcacatccgtgaccgtgtctagc

SEQ ID NO: 205100 - protein, 247 aa, Artificial Sequence
  Description of Artificial Sequence: Synthetic scFv sequence
DIQMTQTTSSLSASLGDRVTISCRASQDISKYLNWYQQKPDGTVKLLIYHTSRLHSGVPSRFSGSGSGTDYSLTISNLEQEDIATYFCQQGNTLPYTFGGGTKLEITGGSGSGNWSHPQFEKGSGSGEVKLQESGPGLVAPSQSLSVTCTVSGVSLPDYGVSWIRQPPRKGLEWLGVIWGSETTYYNSALKSRLTIIKDNSKSQVFLKMNSLQTDDTAIYYCAKHYYYGGSYAMDYWGQGTSVTVSS

SEQ ID NO: 205101 - protein, 245 aa, Artificial Sequence
  Description of Artificial Sequence: Synthetic scFv sequence
DIQMTQTTSSLSASLGDRVTISCRASQDISKYLNWYQQKPDGTVKLLIYHTSRLHSGVPSRFSGSGSGTDYSLTISNLEQEDIATYFCQQGNTLPYTFGGGTKLEITGSTSGSGKPGSGEGSTKGEVKLQESGPGLVAPSQSLSVTCTVSGVSLPDYGVSWIRQPPRKGLEWLGVIWGSETTYYNSALKSRLTIIKDNSKSQVFLKMNSLQTDDTAIYYCAKHYYYGGSYAMDYWGQGTSVTVSS

SEQ ID NO: 205102 - protein, 439 aa, Artificial Sequence
  Description of Artificial Sequence: Synthetic scFv sequence
DIQMTQTTSSLSASLGDRVTISCRASQDISKYLNWYQQKPDGTVKLLIYHTSRLHSGVPSRFSGSGSGTDYSLTISNLEQEDIATYFCQQGNTLPYTFGGGTKLEITGSTSGSGKPGSGEGSTKGEVKLQESGPGLVAPSQSLSVTCTVSGVSLPDYGVSWIRQPPRKGLEWLGVIWGSETTYYNSALKSRLTIIKDNSKSQVFLKMNSLQTDDTAIYYCAKHYYYGGSYAMDYWGQGTSVTVSSESKYGPPCPPCPMFWVLVVVGGVLACYSLLVTVAFIIFWVKRGRKKLLYIFKQPFMRPVQTTQEEDGCSCRFEEEEGGCELRVKFSRSADAPAYQQGQNQLYNELNLGRREEYDVLDKRRGRDPEMGGKPRRKNPQEGLYNELQKDKMAEAYSEIGMKGERRRGKGHDGLYQGLSTATKDTYDALHMQALPPRL

SEQ ID NO: 205103 - protein, 250 aa, Artificial Sequence
  Description of Artificial Sequence: Synthetic scFv sequence
DIQMTQTTSSLSASLGDRVTISCRASQDISKYLNWYQQKPDGTVKLLIYHTSRLHSGVPSRFSGSGSGTDYSLTISNLEQEDIATYFCQQGNTLPYTFGGGTKLEITKAGGGGSGGGGSGGGGSGGGGSEVKLQESGPGLVAPSQSLSVTCTVSGVSLPDYGVSWIRQPPRKGLEWLGVIWGSETTYYNSALKSRLTIIKDNSKSQVFLKMNSLQTDDTAIYYCAKHYYYGGSYAMDYWGQGTSVTVSSD

SEQ ID NO: 205104 - protein, 438 aa, Artificial Sequence
  Description of Artificial Sequence: Synthetic scFv sequence
DIQMTQTTSSLSASLGDRVTISCRASQDISKYLNWYQQKPDGTVKLLIYHTSRLHSGVPSRFSGSGSGTDYSLTISNLEQEDIATYFCQQGNTLPYVKLQESGPGLVAPSQSLSVTCTVSGVSLPDYGVSWIRQPPRKGLEWLGVIWGSETTYYNSALKSRLTIIKDNSKSQVFLKMNSLQTDDTAIYYCAKHYYYGGSYAMDYWGQGTSVTVSSTTTPAPRPPTPAPTIASQPLSLRPEACRPAAGGAVHTRGLDFACDIYIWAPLAGTCGVLLLSLVITLYCKRGRKKLLYIFKQPFMRPVQTTQEEDGCSCRFPEEEEGGCELRVKFSRSADAPAYKQGQNQLYNELNLGRREEYDVLDKRRGRDPEMGGKPRRKNPQEGLYNELQKDKMAEAYSEIGMKGERRRGKGHDGLYQGLSTATKDTYDALHMQALPPR

SEQ ID NO: 205105 - protein, 247 aa, Artificial Sequence
  Description of Artificial Sequence: Synthetic scFv sequence
EIVMTQSPATLSLSPGERATLSCRASQDISKYLNWYQQKPGQAPRLLIYHTSRLHSGIPARFSGSGSGTDYTLTISSLQPEDFAVYFCQQGNTLPYTFGQGTKLEIKGGGGSGGGGSGGGGSGGGGSQVQLQESGPGLVKPSETLSLTCTVSGVSLPDYGVSWIRQPPGKGLEWIGVIWGSETTYYQSSLKSRVTISKDNSKNQVSLKLSSVTAADTAVYYCAKHYYYGGSYAMDYWGQGTLVTVSS

SEQ ID NO: 205106 - protein, 247 aa, Artificial Sequence
  Description of Artificial Sequence: Synthetic scFv sequence
EIVMTQSPATLSLSPGERATLSCRASQDISKYLNWYQQKPGQAPRLLIYHTSRLHSGIPARFSGSGSGTDYTLTISSLQPEDFAVYFCQQGNTLPYTFGQGTKLEIKGGGGSGGGGSGGGGSGGGGSQVQLQESGPGLVKPSETLSLTCTVSGVSLPDYGVSWIRQPPGKGLEWIGVIWGSETTYYSSSLKSRVTISKDNSKNQVSLKLSSVTAADTAVYYCAKHYYYGGSYAMDYWGQGTLVTVSS

SEQ ID NO: 205107 - protein, 251 aa, Artificial Sequence
  Description of Artificial Sequence: Synthetic scFv sequence
EVQLQQSGPELIKPGASVKMSCKASGYTFTSYVMHWVKQKPGQGLEWIGYINPYNDGTKYNEKFKGKATLTSDKSSSTAYMELSSLTSEDSAVYYCARGTYYYGSRVFDYWGQGTTLTVSSGGGGSGGGGSGGGGSDIVMTQAAPSIPVTPGESVSISCRSSKSLLNSNGNTYLYWFLQRPGQSPQLLIYRMSNLASGVPDRFSGSGSGTAFTLRISRVEAEDVGVYYCMQHLEYPFTFGAGTKLELKRAD

SEQ ID NO: 205108 - protein, 252 aa, Artificial Sequence
  Description of Artificial Sequence: Synthetic scFv sequence
EVQLQQSGPELIKPGASVKMSCKASGYTFTSYVMHWVKQKPGQGLEWIGYINPYNDGTKYNEKFKGKATLTSDKSSSTAYMELSSLTSEDSAVYYCARGTYYYGSRVFDYWGQGTTLTVSSGGGGSGGGGSGGGGSDIVMTQAAPSIPVTPGESVSISCRSSKSLLNSNGNTYLYWFLQRPGQSPQLLIYRMSNLASGVPDRFSGSGSGTAFTLRISRVEAEDVGVYYCMQHLEYPFTFGAGTKLELKRSDP

SEQ ID NO: 205109 - protein, 251 aa, Artificial Sequence
  Description of Artificial Sequence: Synthetic scFv sequence
EVQLVESGGGLVQPGRSLRLSCAASGFTFDDYAMHWVRLAPGKGLEWVSGISWNSGRIGYADSVKGRFTISRDNAKNSLFLQMNSLRAKDTAVYYCARDQGYHYYDSAEHAFDIWGQGTMVTVSSGGGGSGGGGSGGGGSQSVLTQPRSVSGSPGQSVTISCTGPISGVGDYTSVSWYQHYPGKTPKLIIYDVTQRPSGVPNRFSGSKSGNTASLTISGLQADDEADYYCCSYEAPTHTYVFGTGTKLTVL

SEQ ID NO: 205110 - protein, 251 aa, Artificial Sequence
  Description of Artificial Sequence: Synthetic scFv sequence
EVQLVESGGGLVQPGRSLRLSCAASGFTFDDYAMHWVRQAPGKGLEWVSGISWNSGRIGYADSVKGRFTISRDNAKNSLFLQMNSLRAEDTAVYYCARDQGYHYYDSAEHAFDIWGQGTMVTVSSGGGGSGGGGSGGGGSQAVLTQPRSVSGSPGQSVTISCTGISSGVDSHRYVSWYQHHPGKAPKLMIYDFSKRPSGVPDRFSGSKSGNTASLTISGLQAEDEADYYCCSYAAISPNYVFGTGTKLTVL

SEQ ID NO: 205111 - protein, 251 aa, Artificial Sequence
  Description of Artificial Sequence: Synthetic scFv sequence
EVQLVESGGGLVQPGRSLRLSCAASGFTFDDYAMHWVRQAPGKGLEWVSGISWNSGRIGYADSVKGRFTISRDNAKNSLFLQMNSLRAEDTAVYYCARDQGYHYYDSAEHAFDIWGQGTMVTVSSGGGGSGGGGSGGGGSQLVLTQPPSVSGSPGQSVTFSCTGASSDVGGYDHVSWYQHHPGKGPKLLIYDVSKRPSGVPDRFSGSKSGNTASLTISGLQAEDEADYYCCSFAGYYTYWLFGGGTKVTVL

SEQ ID NO: 205112 - protein, 250 aa, Artificial Sequence
  Description of Artificial Sequence: Synthetic scFv sequence
EVQLVESGGGLVQPGRSLRLSCAASGFTFDDYAMHWVRQAPGKGLEWVSGISWNSGRIGYADSVKGRFTISRDNAKNSLFLQMNSLRAEDTAVYYCARDQGYHYYDSAEHAFDIWGQGTMVTVSSGGGGSGGGGSGGGGSQSALTQPASVSGSPGQSITIFCTGTSSDVGGYNYVSWYQQLPGTAPKLLIYSNNQRPSGVPDRFSGSKSGTSASLAISGLRSEDEADYYCAAWDDSLSVVFGGGTKLTVL

SEQ ID NO: 205113 - protein, 251 aa, Artificial Sequence
  Description of Artificial Sequence: Synthetic scFv sequence
EVQLVESGGGLVQPGRSLRLSCAASGFTFDDYAMHWVRQAPGKGLEWVSGISWNSGRIGYADSVKGRFTISRDNAKNSLFLQMNSLRAEDTAVYYCARDQGYHYYDSAEHAFDIWGQGTMVTVSSGGGGSGGGGSGGGGSQSALTQPASVSGSPGQSITISCTGTSSDVGAYNFVSWYQQLPGTAPKFLIYDNNKRPPGIPDRFSGSKSGTSATLGITGLQTGDEADYYCATWDSGLSAVVFGGGTKLTVL

SEQ ID NO: 205114 - protein, 248 aa, Artificial Sequence
  Description of Artificial Sequence: Synthetic scFv sequence
EVQLVESGGGLVQPGRSLRLSCAASGFTFDDYAMHWVRQAPGKGLEWVSGISWNSGRIGYADSVKGRFTISRDNAKNSLFLQMNSLRAEDTAVYYCARDQGYHYYDSAEHAFDIWGQGTMVTVSSGGGGSGGGGSGGGGSSYELTQDPAVSVALGQTVRITCQGDSLRSYYASWYQQKPGQAPVLVIYDKNNRPSGIPDRFSGSSSGNTASLTITGAQAEDEADYYCNSRDSSGNNWVFGGGTKLTVL

SEQ ID NO: 205115 - protein, 236 aa, Artificial Sequence
  Description of Artificial Sequence: Synthetic scFv sequence
EVQLVESGGGLVQPGRSLRLSCAASGFTFDDYAMHWVRQAPGKGLEWVSGISWNSGRIGYADSVKGRFTISRDNAKNSLFLQMNSLRAEDTAVYYCARDQGYHYYDSAEHAFDIWGQGTMVTVSSQSVLTQPRSLSGSPGQSVTIACTGASTDVGGYNYVSWYQQHPGKAPKLMIYDVNKRPSGVPDRFSGSKSGNTAFLTISGLQAEDEADYYCCSYAGSYTFEVFGGGTKLTVL

SEQ ID NO: 205116 - protein, 252 aa, Artificial Sequence
  Description of Artificial Sequence: Synthetic scFv sequence
EVQLVESGGGLVQPGRSLRLSCAASGFTFDDYAMHWVRQAPGKGLEWVSGISWNSGRIGYADSVKGRFTISRDNAKNSLFLQMNSLRAEDTAVYYCARDQGYHYYDSAEHAFDIWGQGTVVTVSSGGGGSGGGGSGGGGSQSALTQPASVSGSPGQSITISCTGTSSDLGGYNYVSWYQHRPGKAPKLIIYDVTVRPSGVSDRFSGSKSGNTASLTISGLQAEDEADYYCGSYTSSSTLLWVFGGGTKLTVL

SEQ ID NO: 205117 - protein, 246 aa, Artificial Sequence
  Description of Artificial Sequence: Synthetic scFv sequence
EVQLVESGGGLVQPGRSLRLSCAASGFTFDDYAMHWVRQAPGKGLEWVSGISWNSGRIGYADSVKGRFTISRDNAKNSLFLQMNSLRAEDTAVYYCARDQGYHYYDSAEHAFDIWGQGTVVTVSSGGGGSGGGGSGGGGSQSALTQPRSVSGFPGQSVTISCTGTTSDDVSWYQQHPGKAPQLMLYDVSKRPSGVPHRFSGSRSGRAASLIISGLQTEDEADYFCCSYAGRYNSVLFGGGTKLTVL

SEQ ID NO: 205118 - protein, 246 aa, Artificial Sequence
  Description of Artificial Sequence: Synthetic scFv sequence
EVQLVESGGGLVQPGRSLRLSCAASGFTFDDYAMHWVRQAPGKGLEWVSGISWNSGRIGYADSVKGRFTISRDNAKNSLFLQMNSLRAEDTAVYYCARDQGYHYYDSAEHAFDIWGQGTVVTVSSGGGGSGGGGSGGGGSQSALTQPRSVSGFPGQSVTISCTGTTSDDVSWYQQHPGKAPQLMLYDVSKRPSGVPHRFSGSRSGRAASLIISGLQTEDEADYFCCSYAGRYNSVPFGGGTKLTVL

SEQ ID NO: 205119 - protein, 246 aa, Artificial Sequence
  Description of Artificial Sequence: Synthetic scFv sequence
EVQLVESGGGLVQPGRSLRLSCAASGFTFDDYAMHWVRQAPGKGLEWVSGISWNSGRIGYADSVKGRFTISRDNAKNSLFLQMNSLRAEDTAVYYCARDQGYHYYDSAEHAFDIWGQGTVVTVSSGGGGSGGGGSGGGGSQSALTQPRSVSGFPGQSVTISCTGTTSDDVSWYQQHPGKAPQLMLYDVSKRPSGVPHRFSGSRSGRAASLIISGLQTEDEADYFCSSYAGRYNSVLFGGGTKLTVL

SEQ ID NO: 205120 - protein, 249 aa, Artificial Sequence
  Description of Artificial Sequence: Synthetic scFv sequence
EVQLVESGGGLVQPGRSLRLSCAASGFTFDDYAMHWVRQAPGKGLEWVSGISWNSGRIGYADSVKGRFTISRDNAKNSLFLQMNSLRAEDTAVYYCARDQGYHYYDSAEHAFDIWGQGTVVTVSSGGGGSGGGGSGGGGSQSVLTQPPSVSAAPGQEVTISCSGSSSNIGNNYVSWYQQLPGTAPKLLIYDNDKRPSGIPDRFSGSKSGTSATLGITGLQTGDEADYYCGTWDGNLSAVFGGGTKVTVL

SEQ ID NO: 205121 - protein, 251 aa, Artificial Sequence
  Description of Artificial Sequence: Synthetic scFv sequence
EVQLVESGGGLVQPGRSLRLSCAASGFTFDDYAMHWVRQAPGKGLEWVSGISWNSGRIGYADSVKGRFTISRDNAKNSLFLQMNSLRAEDTAVYYCARDQGYHYYDSAEHAFDIWGQGTVVTVSSGGGGSGGGGSGGGGSQSVLTQPPSVSAAPGQKVTISCSGSSSNIGNNYVSWYQQLPGTAPKLLIYDNNKRPSGIPDRFSGSKSGTSATLGITGLQTGDEADYYCGTWDSSLNRDWVFGGGTKLTVL

SEQ ID NO: 205122 - protein, 250 aa, Artificial Sequence
  Description of Artificial Sequence: Synthetic scFv sequence
EVQLVESGGGLVQPGRSLRLSCAASGFTFDDYAMHWVRQAPGKGLEWVSGISWNSGRIGYADSVKGRFTISRDNAKNSLFLQMNSLRAEDTAVYYCARDQGYHYYDSAEHAFDIWGQGTVVTVSSGGGGSGGGGSGGGGSQSVLTQPPSVSAAPGQKVTISCSGSSSNIGNNYVSWYQQLPGTAPKLLIYDNNKRPSGIPDRFSGSKSGTSATLGITGLQTGDEGDYYCGTWDISLRFGVFGGGTKVTVL

SEQ ID NO: 205123 - protein, 249 aa, Artificial Sequence
  Description of Artificial Sequence: Synthetic scFv sequence
EVQLVQSGGGLVQPGRSLRLSCAASGFTFDDYAMHWVRQAPGKGLEWVSGISWNSGSIGYADSVKGRFTISRDNAKNSLYLQMNSLRAEDTAVYYCARDQGYHYYDSAEHAFDIWGQGTVVTVSSGGGGSGGGGSGGGGSAIRMTQSPSSLSASVGDRVTVTCQASQDISNYLNWYQQKPGRAPKLLIYDASNVKAGVPSRFSGGGSGTDFTLTISSLQPEDFATYYCQQSYSTPQAYTFGQGTKLDIK

SEQ ID NO: 205124 - protein, 247 aa, Artificial Sequence
  Description of Artificial Sequence: Synthetic scFv sequence
EVQLVQSGGGLVQPGRSLRLSCAASGFTFDDYAMHWVRQAPGKGLEWVSGISWNSGSIGYADSVKGRFTISRDNAKNSLYLQMNSLRAEDTAVYYCARDQGYHYYDSAEHAFDIWGQGTVVTVSSGGGGSGGGGSGGGGSDIQLTQSPSTLSASVGDRVTITCRASQSISRWLAWYQQKPGKAPKLLIYDASNLETGVPSRFSGSGSGTDFTFTISSLQPEDIATYYCQQYDNLPLTFGGGTKVEIK

SEQ ID NO: 205125 - protein, 249 aa, Artificial Sequence
  Description of Artificial Sequence: Synthetic scFv sequence
EVQLVQSGGGLVQPGRSLRLSCAASGFTFDDYAMHWVRQAPGKGLEWVSGISWNSGSIGYADSVKGRFTISRDNAKNSLYLQMNSLRAEDTAVYYCARDQGYHYYDSAEHAFDIWGQGTVVTVSSGGGGSGGGGSGGGGSEIVLTQSPATLSLSPGETATLSCRASQSINHYLAWYQQKPGQAPRLLIYDASNRATGIPARFSGSGSGTDFTLTISSLEPEDFATYYCQQSYSHPRMYTFGQGTKLDIK

SEQ ID NO: 205126 - protein, 270 aa, Artificial Sequence
  Description of Artificial Sequence: Synthetic scFv sequence
MALPVTALLLPLALLLHAARPEVKLQESGPGLVAPSQSLSVTCTVSGVSLPDYGVSWIRQPPRKGLEWLGVIWGSETTYYNSALKSRLTIIKDNSKSQVFLKMNSLQTDDTAIYYCAKHYYYGGSYAMDYWGQGTSVTVSSGGGGSGGGGSGGGGSDIQMTQTTSSLSASLGDRVTISCRASQDISKYLNWYQQKPDGTVKLLIYHTSRLHSGVPSRFSGSGSGTDYSLTISNLEQEDIATYFCQQGNTLPYTFGGGTKLEITRSDPTSS

SEQ ID NO: 205127 - protein, 267 aa, Artificial Sequence
  Description of Artificial Sequence: Synthetic scFv sequence
MALPVTALLLPLALLLHAARPEVQLQQSGPDLVKPGASVKISCKASGYSFTGYYMHWVKQSHGKSLEWIGRINPNNGVTLYNQKFKDKAILTVDKSSTTAYMELRSLTSEDSAVYYCARSTMITNYVMDYWGQVTSVTVSSGGGGSGGGGSGGGGSSIVMTQTPTFLLVSAGDRVTITCKASQSVSNDVAWYQQKPGQSPTLLISYTSSRYAGVPDRFIGSGYGTDFTFTISTLQAEDLAVYFCQQDYNSPPTFGGGTKLEIKRSDP

SEQ ID NO: 205128 - protein, 272 aa, Artificial Sequence
  Description of Artificial Sequence: Synthetic scFv sequence
MALPVTALLLPLALLLHAARPEVQLQQSGPELIKPGASVKMSCKASGYTFTSYVMHWVKQKPGQGLEWIGYINPYNDGTKYNEKFKGKATLTSDKSSSTAYMELSSLTSEDSAVYYCARGTYYYGSRVFDYWGQGTTLTVSSGGGGSGGGGSGGGGSDIVMTQAAPSIPVTPGESVSISCRSSKSLLNSNGNTYLYWFLQRPGQSPQLLIYRMSNLASGVPDRFSGSGSGTAFTLRISRVEAEDVGVYYCMQHLEYPFTFGAGTKLELKRSD

SEQ ID NO: 205129 - protein, 273 aa, Artificial Sequence
  Description of Artificial Sequence: Synthetic scFv sequence
MALPVTALLLPLALLLHAARPEVQLQQSGPELIKPGASVKMSCKASGYTFTSYVMHWVKQKPGQGLEWIGYINPYNDGTKYNEKFKGKATLTSDKSSSTAYMELSSLTSEDSAVYYCARGTYYYGSRVFDYWGQGTTLTVSSGGGGSGGGGSGGGGSDIVMTQAAPSIPVTPGESVSISCRSSKSLLNSNGNTYLYWFLQRPGQSPQLLIYRMSNLASGVPDRFSGSGSGTAFTLRISRVEAEDVGVYYCMQHLEYPFTFGAGTKLELKRSDP

SEQ ID NO: 205130 - protein, 277 aa, Artificial Sequence
  Description of Artificial Sequence: Synthetic scFv sequence
MAPAMESPTLLCVALLFFAPDGVLAEVQLQQSGPELIKPGASVKMSCKASGYTFTSYVMHWVKQKPGQGLEWIGYINPYNDGTKYNEKFKGKATLTSDKSSSTAYMELSSLTSEDSAVYYCARGTYYVGSRVFDYWGQGTTLTVSSGGGGSGGGGSGGGGSDIVMTQAAPSIPVTPGESVSISCRSSKSLLNSNGNTYLYWFLQRPGQSPQLLIYRMSNLASGVPDRFSGSGSGTAFTLRISRVEAEDVGVYVCMQHLEYPFTFGAGTKLELKRSDP

SEQ ID NO: 205131 - protein, 277 aa, Artificial Sequence
  Description of Artificial Sequence: Synthetic scFv sequence
MAPAMESPTLLCVALLFFAPDGVLAEVQLQQSGPELIKPGASVKMSCKASGYTFTSYVMHWVKQKPGQGLEWIGYINPYNDGTKYNEKFKGKATLTSDKSSSTAYMELSSLTSEDSAVYYCARGTYYYGSRVFDYWGQGTTLTVSSGGGGSGGGGSGGGGSDIVMTQAAPSIPVTPGESVSISCRSSKSLLNSNGNTYLYWFLQRPGQSPQLLIYRMSNLASGVPDRFSGSGSGTAFTLRISRVEAEDVGVYYCMQHLEYPFTFGAGTKLELKRSDP

SEQ ID NO: 205132 - protein, 495 aa, Artificial Sequence
  Description of Artificial Sequence: Synthetic scFv sequence
METDTLLLWVLLLWVPGSTGEVQLQQSGPELIKPGASVKMSCKASGYTFTSYVMHWVKQKPGQGLEWIGYINPYNDGTKYNEKFKGKATLTSDKSSSTAYMELSSLTSEDSAVYYCARGTYYYGSRVFDYWGQGTTLTVSSGGGGSGGGGSGGGGSDIVMTQAAPSIPVTPGESVSISCRSSKSLLNSNGNTYLYWFLQRPGQSPQLLIYRMSNLASGVPDRFSGSGSGTAFTLRISRVEAEDVGVYYCMQHLEYPFTFGAGTKLELKRSDPTTTPAPRPPTPAPTIASQPLSLRPEACRPAAGGAVHTRGLDFACDIYIWAPLAGTCGVLLLSLVITLYCKRGRKKLLYIFKQPFMRPVQTTQEEDGCSCRFPEEEEGGCELRVKFSRSADAPAYQQGQNQLYNELNLGRREEYDVLDKRRGRDPEMGGKPRRKNPQEGLYNELQKDKMAEAYSEIGMKGERRRGKGHDGLYQGLSTATKDTYDALHMQALPPR

SEQ ID NO: 205133 - protein, 252 aa, Artificial Sequence
  Description of Artificial Sequence: Synthetic scFv sequence
QITLKESGPTLVKPTQTLTLTCTFSGFSLSTSGVGVGWIRQPPGKALEWLALIYWDDDKRYSPSLKSRLTITKDTSKNQVVLTMTNMDPVDTATYYCAHIDYGSGSYSPRTSYYYYMSVWGKGTTVTVSSGGGGSGGGGSGGGGSAIQLTQSPSFLSASVGDRVTITCRASQGISSYLNWYQQRAGKAPELLIYAASNLQSGVPSRFSGSGSGTDFTLTITSVQPEDFATYFCQQGDAFPLTFGPGTKVTIR

SEQ ID NO: 205134 - protein, 249 aa, Artificial Sequence
  Description of Artificial Sequence: Synthetic scFv sequence
QMQLVQSGGGLVQPGRSLRLSCAASGFTFDDYAMHWVRQAPGKGLEWVSGISWNSGSIGYADSVKGRFTISRDNAKNSLYLQMNSLRAEDTAVYYCARDQGYHYYDSAEHAFDIWGQGTVVTVSSGGGGSGGGGSGGGGSAIRMTQSPSSLSASVGDRVTVTCQASQDISNYLNWYQQKPGRAPKLLIYDASNVKAGVPSRFSGGGSGTDFTLTISSLQPEDFATYYCQQSYSTPQAYTFGQGTKLEIK

SEQ ID NO: 205135 - protein, 248 aa, Artificial Sequence
  Description of Artificial Sequence: Synthetic scFv sequence
QMQLVQSGGGLVQPGRSLRLSCAASGFTFDDYAMHWVRQAPGKGLEWVSGISWNSGSIGYADSVKGRFTISRDNAKNSLYLQMNSLRAEDTAVYYCARDQGYHYYDSAEHAFDIWGQGTVVTVSSGGGGSGGGGSGGGGSAIRMTQSPSTLSASVGDRVTITCRASQSISHYLAWYQQKPGKAPKLLIFDASRLASGVPSRFSGSGSGTDFTLTISSLQPEDFATYYCQQSYGAPMFTFGPGTRVDLK

SEQ ID NO: 205136 - protein, 119 aa, Artificial Sequence
  Description of Artificial Sequence: Synthetic scFv sequence
QVQLLESGAELVRPGSSVKISCKASGYAFSSYWMNWVKQRPGQGLEWIGQIYPGDGDTNYNGKFKGQATLTADKSSSTAYMQLSGLTSEDSAVYSCARKTISSVVDFYFDYWGQGTTVT

SEQ ID NO: 205137 - protein, 464 aa, Artificial Sequence
  Description of Artificial Sequence: Synthetic scFv sequence
QVQLLESGAELVRPGSSVKISCKASGYAFSSYWMNWVKQRPGQGLEWIGQIYPGDGDTNYNGKFKGQATLTADKSSSTAYMQLSGLTSEDSAVYSCARKTISSVVDFYFDYWGQGTTVTGGGSGGGSGGGSGGGSELVLTQSPKFMSTSVGDRVSVTCKASQNVGTNVAWYQQKPGQSPKPLIYSATYRNSGVPDRFTGSGSGTDFTLTITNVQSKDLADYFCQYNRYPYTSFFFTKLEIKRRSKIEVMYPPPYLDNEKSNGTIIHVKGKHLCPSPLFPGPSKPFWVLVVVGGVLACYSLLVTVAFIIFWVRSKRSRLLHSDYMNMTPRRPGPTRKHYQPYAPPRDFAAYRSRVKFSRSADAPAYQQGQNQLYNELNLGRREEYDVLDKRRGRDPEMGGKPRRKNPQEGLYNELQKDKMAEAYSEIGMKGERRRGKGHDGLYQGLSTATKDTYDALHMQALPPR

SEQ ID NO: 205138 - protein, 242 aa, Artificial Sequence
  Description of Artificial Sequence: Synthetic scFv sequence
QVQLQESGPGLVKPSETLSLTCTVSGVSLPDYGVSWIRQPPGKGLEWIGVIWGSETTYYQSSLKSRVTISKDNSKNQVSLKLSSVTAADTAVYYCAKHYYYGGSYAMDYWGQGTLVTVSSGGGGSGGGGSGGGGSEIVMTQSPATLSLSPGERATLSCRASQDISKYLNWYQQKPGQAPRLLIYHTSRLHSGIPARFSGSGSGTDYTLTISSLQPEDFAVYFCQQGNTLPYTFGQGTKLEIK

SEQ ID NO: 205139 - protein, 247 aa, Artificial Sequence
  Description of Artificial Sequence: Synthetic scFv sequence
QVQLQESGPGLVKPSETLSLTCTVSGVSLPDYGVSWIRQPPGKGLEWIGVIWGSETTYYQSSLKSRVTISKDNSKNQVSLKLSSVTAADTAVYYCAKHYYYGGSYAMDYWGQGTLVTVSSGGGGSGGGGSGGGGSGGGGSEIVMTQSPATLSLSPGERATLSCRASQDISKYLNWYQQKPGQAPRLLIYHTSRLHSGIPARFSGSGSGTDYTLTISSLQPEDFAVYFCQQGNTLPYTFGQGTKLEIK

SEQ ID NO: 205140 - protein, 242 aa, Artificial Sequence
  Description of Artificial Sequence: Synthetic scFv sequence
QVQLQESGPGLVKPSETLSLTCTVSGVSLPDYGVSWIRQPPGKGLEWIGVIWGSETTYYSSSLKSRVTISKDNSKNQVSLKLSSVTAADTAVYYCAKHYYYGGSYAMDYWGQGTLVTVSSGGGGSGGGGSGGGGSEIVMTQSPATLSLSPGERATLSCRASQDISKYLNWYQQKPGQAPRLLIYHTSRLHSGIPARFSGSGSGTDYTLTISSLQPEDFAVYFCQQGNTLPYTFGQGTKLEIK

SEQ ID NO: 205141 - protein, 241 aa, Artificial Sequence
  Description of Artificial Sequence: Synthetic scFv sequence
QVQLQQSGPELVKPGASVKISCKASGYAFSSSWMNWVKQRPGKGLEWIGRIYPGDEDTNYSGKFKDKATLTADKSSTTAYMQLSSLTSEDSAVYFCARSLLYGDYLDYWGQGTTLTVSSGGGGSGGGGSGGGGSQIVLTQSPAIMSASPGEKVTMTCSASSSVSYMHWYQQKSGTSPKRWIYDTSKLASGVPDRFSGSGSGTSYFLTINNMEAEDAATYYCQQWNINPLTFGAGTKLELKR

SEQ ID NO: 205142 - protein, 251 aa, Artificial Sequence
  Description of Artificial Sequence: Synthetic scFv sequence
QVQLVESGGGLVQPGRSLRLSCAASGFTFDDYAMHWVRQAPGKGLEWVSGISWNSGRIGYADSVKGRFTISRDNAKNSLFLQMNSLRAEDTAVYYCARDQGYHYYDSAEHAFDIWGQGTMVTVSSGGGGSGGGGSGGGGSQAVLTQPRSVSGSPGQSVTISCTGISSGVDSHRYVSWYQHHPGKAPKLMIYDFSKRPSGVPDRFSGSKSGNTASLTISGLQAEDEADYYCSSYAAISPNYVFGTGTKLTVL

SEQ ID NO: 205143 - protein, 239 aa, Artificial Sequence
  Description of Artificial Sequence: Synthetic scFv sequence
QVQLVESGGGLVQPGRSLRLSCAASGFTFDDYAMHWVRQAPGKGLEWVSGISWNSGRIGYADSVKGRFTISRDNAKNSLFLQMNSLRAEDTAVYYCARDQGYHYYDSAEHAFDIWGQGTMVTVSSGGGGSGGGGSGGGGSSYVLTQPPSASGTPGQRVTISCSGSSSNIGSNTVNWYQQFPGTAPKLLIYSNNQRPSGVPDRFSGSKSGTSASLAISGLQSEDEAEYYCAAWDDSLNVV

SEQ ID NO: 205144 - protein, 250 aa, Artificial Sequence
  Description of Artificial Sequence: Synthetic scFv sequence
QVQLVESGGGLVQPGRSLRLSCAASGFTFDDYAMHWVRQAPGKGLEWVSGISWNSGRIGYADSVKGRFTISRDNAKNSLFLQMNSLRAEDTAVYYCARDQGYHYYDSAEHAFDIWGQGTVVTVSSGGGGSGGGGSGGGGSQSALTQPASVSGSPGHSITISCTGTRSDVGGFDYVSWYQHNPGKAPKLIIYDVTKRPSGVSNRFSGAKSGITASLTISGLQAEDEADYYCTSYRPGPTFVFGTGTKLDIK

SEQ ID NO: 205145 - protein, 250 aa, Artificial Sequence
  Description of Artificial Sequence: Synthetic scFv sequence
QVQLVESGGGLVQPGRSLRLSCAASGFTFDDYAMHWVRQAPGKGLEWVSGISWNSGRIGYADSVKGRFTISRDNAKNSLFLQMNSLRAEDTAVYYCARDQGYHYYDSAEHAFDIWGQGTVVTVSSGGGGSGGGGSGGGGSQSALTQPASVSGSPGHSITISCTGTRSDVGGFDYVSWYQHNPGKAPKLIIYDVTKRPSGVSNRFSGAKSGITASLTISGLQAEDEADYYCTSYRPGPTFVFGTGTKLTVL

SEQ ID NO: 205146 - protein, 252 aa, Artificial Sequence
  Description of Artificial Sequence: Synthetic scFv sequence
QVQLVESGGGLVQPGRSLRLSCAASGFTFDDYAMHWVRQAPGKGLEWVSGISWNSGRIGYADSVKGRFTISRDNAKNSLFLQMNSLRAEDTAVYYCARDQGYHYYDSAEHAFDIWGQGTVVTVSSGGGGSGGGGSGGGGSQSALTQPASVSGSPGQSITISCTGTSSDLGGYNYVSWYQHRPGKAPKLIIYDVTVRPSGVSDRFSGSKSGNTASLTISGLQAEDEADYYCGSYTSSSTLLWVFGGGTKLDIK

SEQ ID NO: 205147 - protein, 252 aa, Artificial Sequence
  Description of Artificial Sequence: Synthetic scFv sequence
QVQLVESGGGLVQPGRSLRLSCAASGFTFDDYAMHWVRQAPGKGLEWVSGISWNSGRIGYADSVKGRFTISRDNAKNSLFLQMNSLRAEDTAVYYCARDQGYHYYDSAEHAFDIWGQGTVVTVSSGGGGSGGGGSGGGGSQSALTQPASVSGSPGQSITISCTGTSSDLGGYNYVSWYQHRPGKAPKLIIYDVTVRPSGVSDRFSGSKSGNTASLTISGLQAEDEADYYCGSYTSSSTLLWVFGGGTKLTVL

SEQ ID NO: 205148 - protein, 252 aa, Artificial Sequence
  Description of Artificial Sequence: Synthetic scFv sequence
  MOD_RES (76)..(76): Any amino acid
  MOD_RES (201)..(201): Any amino acid
QVQLVESGGGLVQPGRSLRLSCAASGFTFDDYAMHWVRQAPGKGLEWVSGISWNSGRIGYADSVKGRFTISRDNAXNSLFLQMNSLRAEDTAVYYCARDQGYHYYDSAEHAFDIWGQGTVVTVSSGGGGSGGGGSGGGGSQSALTQPASVSGSPGQSITISCTETSSDLGGYNYVSWYQHRPGKAPKLIIYDVTVRPSGVXDRFSGSKSGNTASLTISGLQAEDEADYYCGSYTSSSTLLWVFGGGTKLTVL

SEQ ID NO: 205149 - protein, 249 aa, Artificial Sequence
  Description of Artificial Sequence: Synthetic scFv sequence
  MOD_RES (64)..(65): Any amino acid
  MOD_RES (68)..(69): Any amino acid
  MOD_RES (93)..(93): Any amino acid
  MOD_RES (98)..(98): Any amino acid
  MOD_RES (102)..(102): Any amino acid
  MOD_RES (104)..(104): Any amino acid
  MOD_RES (113)..(113): Any amino acid
  MOD_RES (145)..(146): Any amino acid
  MOD_RES (148)..(149): Any amino acid
  MOD_RES (233)..(233): Any amino acid
  MOD_RES (244)..(244): Any amino acid
QVQLVESGGGLVQPGRSLRLSCAASGFTFDDYAMHWVRQAPGKGLEWVSGISWNSGRIGYADSXXGRXXISRDNAKNSLFLQMNSLRAEDTAXYYCAXDQGXHXYDSAEHAFXIWGQGTVVTVSSGGGGSGGGGSGGGGSQSVLXXPXXASGSPGQSVTVSCTGTGRDIGAYDYVSWYQQHPGKAPKLLIYGVNKRPSGVPDRFSGSKSDNTASLTVSGLQVEDEADYYCSSXAGRKYVFGTGXKVTVL

SEQ ID NO: 205150 - protein, 249 aa, Artificial Sequence
  Description of Artificial Sequence: Synthetic scFv sequence
QVQLVQSGGGVVQPGRSLRLSCAASGFTFDDYAMHWVRQAPGKGLEWVSGISWNSGSIGYADSVKGRFTISRDNAKNSLYLQMNSLRAEDTAVYYCARDQGYHYYDSAEHAFDIWGQGTVVTVSSGGGGSGGGGSGGGGSEIVLTQSPATLSLSPGETATLSCRASQSINHYLAWYQQKPGQAPRLLIYDASNRATGIPARFSGSGSGTDFTLTISSLEPEDFATYYCQQSYSHPRMYTFGQGTKLEIK

SEQ ID NO: 205151 - protein, 263 aa, Artificial Sequence
  Description of Artificial Sequence: Synthetic scFv sequence
WSHPQFEKGGGGSGGGGSDIQMTQTTSSLSASLGDRVTISCRASQDISKYLNWYQQKPDGTVKLLIYHTSRLHSGVPSRFSGSGSGTDYSLTISNLEQEDIATYFCQQGNTLPYTFGGGTKLEITGSTSGSGKPGSGEGSTKGEVKLQESGPGLVAPSQSLSVTCTVSGVSLPDYGVSWIRQPPRKGLEWLGVIWGSETTYYNSALKSRLTIIKDNSKSQVFLKMNSLQTDDTAIYYCAKHYYYGGSYAMDYWGQGTSVTVSS

SEQ ID NO: 205152 - DNA, 882 bp, Artificial Sequence
  Description of Artificial Sequence: Synthetic scFv sequence
atgaaatacctattgcctacggcagccgctggattgttattactcgcagcaagcggcgcgcatgcctcctatgagctgacacagccaccctcggtgtcagtggccccaggaaagacggccacaattccctgtgggggaaacaacattgagagtaaaagtgtccactggtaccagcagcggccaggccaggcccctgtcttggtcatctatgatgataccgaccggccctcagggatccctgagcgattctctggctccaactctgggaacacggccaccctgaccatcagcggggtcgaagccggggatgaggccgactatttctgtcaggtgtgggatagtcatagtgatcatgaggtgttcggcggagggaccaagctcaccgtcctatccggagggtcgaccataacttcgtataatgtatactatacgaagttatcctcgagcggttccgaggtgcagctggtggagaccgggggaggcttggtacagcctggagggtccctgagactctcctgtgcagcctctggattcaccttcagtagttatgaaatgaactgggtccgccaggctccagggaaggggctggagtgggtttcatacattagtagtagtggcagtaccatatactacgcagactctgtgaagggccgattcaccatctccagagacaacgccaagaactcactgtatctgcaaatgaacagcctgagagctgaggacacggctgtttattactgtgcgagagagcatgagtgggaggcgggcgcttttgatatctggggccaagggacaatggtcaccgtctcttcagctagcggcaaaccaatcccaaacccactgctgggcctggatagtactcaccatcaccatcaccattga

SEQ ID NO: 205153 - protein, 293 aa, Artificial Sequence
  Description of Artificial Sequence: Synthetic scFv sequence
MKYLLPTAAAGLLLLAASGAHASYELTQPPSVSVAPGKTATIPCGGNNIESKSVHWYQQRPGQAPVLVIYDDTDRPSGIPERFSGSNSGNTATLTISGVEAGDEADYFCQVWDSHSDHEVFGGGTKLTVLSGGSTITSYNVYYTKLSSSGSEVQLVETGGGLVQPGGSLRLSCAASGFTFSSYEMNWVRQAPGKGLEWVSYISSSGSTIYYADSVKGRFTISRDNAKNSLYLQMNSLRAEDTAVYYCAREHEWEAGAFDIWGQGTMVTVSSASGKPIPNPLLGLDSTHHHHHH

SEQ ID NO: 205154 - protein, 275 aa, Artificial Sequence
  Description of Artificial Sequence: Synthetic scFv sequence
  MOD_RES (236)..(236): Any amino acid
  MOD_RES (245)..(245): Any amino acid
GAHASYELTQPPSVSVAPGKTATIPCGGNNIESKSVHWYQQRPGQAPVLVIYDDTDRPSGIPERFSGSNSGNTATLTISGVEAGDEADYFCQVWDSHSDHEVFGGGTKLTVLSGGSTITSYNVYYTKLSSSGSEVQLVETGGGLVQPGGSLRLSCAASGFTFSSYEMNWVRQAPGKGLEWVSYISSSGSTIYYADSVKGRFTISRDNAKNSLYLQMNSLRAEDTAVYYCAREHEWXAGAFDIWGXGTMVTVSSASGKPIPNPLLGLDSTHHHHHH

SEQ ID NO: 205155 - protein, 273 aa, Artificial Sequence
  Description of Artificial Sequence: Synthetic scFv sequence
GAHAQPVLTQPPSVSVAPGQTAKITCGGNNIGSKSVHWYQQKPGQAPVLVVYDDSDRPSGIPERFSGSNSGNAATLTISRVEAGDEADYYCQVWDSSSGLVFGTGTKVTVLSGGSTITSYNVYDTKLSSSGTEVQLLESGAEVKKPGESLKISCKGSGYSFTSYWIGWVRQMPGKGLEWMGIIYPGDSDTRYSPSSQGQVTISADKSISTAYLRWSGLKASDTAMYYCARVSSDSGAFDIWGQGTMVTVSSASGKPIPNPLLGLDSTHHHHHH

SEQ ID NO: 205156 - DNA, 822 bp, Artificial Sequence
  Description of Artificial Sequence: Synthetic scFv sequence
ggcgcgcatgcccagccagtgctgactcagcccccctcggtgtcagtggccccgggacagacggccaagatcacctgtgggggaaacaacattggaagtaaaagtgtgcactggtaccagcagaagccaggccaggcccctgtgctggtcgtctatgatgatagcgaccggccctcagggatccctgagcgattctctggctccaactctgggaacgcggccaccctgaccatcagcagggtcgaagccggggatgaggccgactattactgtcaggtgtgggatagtagtagtggccttgtcttcggaactgggaccaaggtcaccgtcctatccggagggtcgaccataacttcgtataatgtatacgatacgaagttatcctcgagcggtaccgaggtgcagttgttggagtctggagcagaggtgaaaaagccgggggagtctctgaagatctcctgtaagggttctggatacagctttaccagctactggatcggctgggtgcgccagatgcccgggaaaggcctggagtggatggggatcatctatcctggtgactctgataccagatacagcccgtcctcccaaggccaggtcaccatctcagccgacaagtccatcagcaccgcctacctgcggtggagcggcctgaaggcctcggacaccgccatgtattactgtgcgagagtatcgagtgactccggtgcttttgatatctggggccaagggacaatggtcaccgtctcttcagctagcggcaaaccaatcccaaacccactgctgggcctggatagtactcaccatcaccatcaccattag

SEQ ID NO: 205157 - DNA, 813 bp, Artificial Sequence
  Description of Artificial Sequence: Synthetic scFv sequence
atggccctccctgtcaccgccctgctgcttccgctggctcttctgctccacgccgctcggcccgaaattgtgatgacccagtcacccgccactcttagcctttcacccggtgagcgcgcaaccctgtcttgcagagcctcccaagacatctcaaaataccttaattggtatcaacagaagcccggacaggctcctcgccttctgatctaccacaccagccggctccattctggaatccctgccaggttcagcggtagcggatctgggaccgactacaccctcactatcagctcactgcagccagaggacttcgctgtctatttctgtcagcaagggaacaccctgccctacacctttggacagggcaccaagctcgagattaaaggtggaggtggcagcggaggaggtgggtccggcggtggaggaagccaggtccaactccaagaaagcggaccgggtcttgtgaagccatcagaaactctttcactgacttgtactgtgagcggagtgtctctccccgattacggggtgtcttggatcagacagccaccggggaagggtctggaatggattggagtgatttggggctctgagactacttactactcttcatccctcaagtcacgcgtcaccatctcaaaggacaactctaagaatcaggtgtcactgaaactgtcatctgtgaccgcagccgacaccgccgtgtactattgcgctaagcattactattatggcgggagctacgcaatggattactggggacagggtactctggtcaccgtgtccagccaccaccatcatcaccatcaccat

SEQ ID NO: 205158 - DNA, 813 bp, Artificial Sequence
  Description of Artificial Sequence: Synthetic scFv sequence
atggccctccctgtcaccgccctgctgcttccgctggctcttctgctccacgccgctcggcccgaaattgtgatgacccagtcacccgccactcttagcctttcacccggtgagcgcgcaaccctgtcttgcagagcctcccaagacatctcaaaataccttaattggtatcaacagaagcccggacaggctcctcgccttctgatctaccacaccagccggctccattctggaatccctgccaggttcagcggtagcggatctgggaccgactacaccctcactatcagctcactgcagccagaggacttcgctgtctatttctgtcagcaagggaacaccctgccctacacctttggacagggcaccaagctcgagattaaaggtggaggtggcagcggaggaggtgggtccggcggtggaggaagccaggtccaactccaagaaagcggaccgggtcttgtgaagccatcagaaactctttcactgacttgtactgtgagcggagtgtctctccccgattacggggtgtcttggatcagacagccaccggggaagggtctggaatggattggagtgatttggggctctgagactacttactaccaatcatccctcaagtcacgcgtcaccatctcaaaggacaactctaagaatcaggtgtcactgaaactgtcatctgtgaccgcagccgacaccgccgtgtactattgcgctaagcattactattatggcgggagctacgcaatggattactggggacagggtactctggtcaccgtgtccagccaccaccatcatcaccatcaccat

SEQ ID NO: 205159 - protein, 271 aa, Artificial Sequence
  Description of Artificial Sequence: Synthetic scFv sequence
MALPVTALLLPLALLLHAARPEIVMTQSPATLSLSPGERATLSCRASQDISKYLNWYQQKPGQAPRLLIYHTSRLHSGIPARFSGSGSGTDYTLTISSLQPEDFAVYFCQQGNTLPYTFGQGTKLEIKGGGGSGGGGSGGGGSQVQLQESGPGLVKPSETLSLTCTVSGVSLPDYGVSWIRQPPGKGLEWIGVIWGSETTYYQSSLKSRVTISKDNSKNQVSLKLSSVTAADTAVYYCAKHYYYGGSYAMDYWGQGTLVTVSSHHHHHHHH

SEQ ID NO: 205160 - DNA, 813 bp, Artificial Sequence
  Description of Artificial Sequence: Synthetic scFv sequence
atggctctgcccgtgaccgcactcctcctgccactggctctgctgcttcacgccgctcgcccacaagtccagcttcaagaatcagggcctggtctggtgaagccatctgagactctgtccctcacttgcaccgtgagcggagtgtccctcccagactacggagtgagctggattagacagcctcccggaaagggactggagtggatcggagtgatttggggtagcgaaaccacttactattcatcttccctgaagtcacgggtcaccatttcaaaggataactcaaagaatcaagtgagcctcaagctctcatcagtcaccgccgctgacaccgccgtgtattactgtgccaagcattactactatggagggtcctacgccatggactactggggccagggaactctggtcactgtgtcatctggtggaggaggtagcggaggaggcgggagcggtggaggtggctccgaaatcgtgatgacccagagccctgcaaccctgtccctttctcccggggaacgggctaccctttcttgtcgggcatcacaagatatctcaaaatacctcaattggtatcaacagaagccgggacaggcccctaggcttcttatctaccacacctctcgcctgcatagcgggattcccgcacgctttagcgggtctggaagcgggaccgactacactctgaccatctcatctctccagcccgaggacttcgccgtctacttctgccagcagggtaacaccctgccgtacaccttcggccagggcaccaagcttgagatcaaacatcaccaccatcatcaccatcac

SEQ ID NO: 205161 - protein, 271 aa, Artificial Sequence
  Description of Artificial Sequence: Synthetic scFv sequence
MALPVTALLLPLALLLHAARPQVQLQESGPGLVKPSETLSLTCTVSGVSLPDYGVSWIRQPPGKGLEWIGVIWGSETTYYSSSLKSRVTISKDNSKNQVSLKLSSVTAADTAVYYCAKHYYYGGSYAMDYWGQGTLVTVSSGGGGSGGGGSGGGGSEIVMTQSPATLSLSPGERATLSCRASQDISKYLNWYQQKPGQAPRLLIYHTSRLHSGIPARFSGSGSGTDYTLTISSLQPEDFAVYFCQQGNTLPYTFGQGTKLEIKHHHHHHHH

SEQ ID NO: 205162 - DNA, 813 bp, Artificial Sequence
  Description of Artificial Sequence: Synthetic scFv sequence
atggctctgcccgtgaccgcactcctcctgccactggctctgctgcttcacgccgctcgcccacaagtccagcttcaagaatcagggcctggtctggtgaagccatctgagactctgtccctcacttgcaccgtgagcggagtgtccctcccagactacggagtgagctggattagacagcctcccggaaagggactggagtggatcggagtgatttggggtagcgaaaccacttactatcaatcttccctgaagtcacgggtcaccatttcaaaggataactcaaagaatcaagtgagcctcaagctctcatcagtcaccgccgctgacaccgccgtgtattactgtgccaagcattactactatggagggtcctacgccatggactactggggccagggaactctggtcactgtgtcatctggtggaggaggtagcggaggaggcgggagcggtggaggtggctccgaaatcgtgatgacccagagccctgcaaccctgtccctttctcccggggaacgggctaccctttcttgtcgggcatcacaagatatctcaaaatacctcaattggtatcaacagaagccgggacaggcccctaggcttcttatctaccacacctctcgcctgcatagcgggattcccgcacgctttagcgggtctggaagcgggaccgactacactctgaccatctcatctctccagcccgaggacttcgccgtctacttctgccagcagggtaacaccctgccgtacaccttcggccagggcaccaagcttgagatcaaacatcaccaccatcatcaccatcac

SEQ ID NO: 205163 - protein, 271 aa, Artificial Sequence
  Description of Artificial Sequence: Synthetic scFv sequence
MALPVTALLLPLALLLHAARPQVQLQESGPGLVKPSETLSLTCTVSGVSLPDYGVSWIRQPPGKGLEWIGVIWGSETTYYQSSLKSRVTISKDNSKNQVSLKLSSVTAADTAVYYCAKHYYYGGSYAMDYWGQGTLVTVSSGGGGSGGGGSGGGGSEIVMTQSPATLSLSPGERATLSCRASQDISKYLNWYQQKPGQAPRLLIYHTSRLHSGIPARFSGSGSGTDYTLTISSLQPEDFAVYFCQQGNTLPYTFGQGTKLEIKHHHHHHHH

SEQ ID NO: 205164 - DNA, 828 bp, Artificial Sequence
  Description of Artificial Sequence: Synthetic scFv sequence
atggccctcccagtgaccgctctgctgctgcctctcgcacttcttctccatgccgctcggcctgagatcgtcatgacccaaagccccgctaccctgtccctgtcacccggcgagagggcaaccctttcatgcagggccagccaggacatttctaagtacctcaactggtatcagcagaagccagggcaggctcctcgcctgctgatctaccacaccagccgcctccacagcggtatccccgccagattttccgggagcgggtctggaaccgactacaccctcaccatctcttctctgcagcccgaggatttcgccgtctatttctgccagcaggggaatactctgccgtacaccttcggtcaaggtaccaagctggaaatcaagggaggcggaggatcaggcggtggcggaagcggaggaggtggctccggaggaggaggttcccaagtgcagcttcaagaatcaggacccggacttgtgaagccatcagaaaccctctccctgacttgtaccgtgtccggtgtgagcctccccgactacggagtctcttggattcgccagcctccggggaagggtcttgaatggattggggtgatttggggatcagagactacttactactcttcatcacttaagtcacgggtcaccatcagcaaagataatagcaagaaccaagtgtcacttaagctgtcatctgtgaccgccgctgacaccgccgtgtactattgtgccaaacattactattacggagggtcttatgctatggactactggggacaggggaccctggtgactgtctctagccatcaccatcaccaccatcatcac

SEQ ID NO: 205165 - protein, 276 aa, Artificial Sequence
  Description of Artificial Sequence: Synthetic scFv sequence
MALPVTALLLPLALLLHAARPEIVMTQSPATLSLSPGERATLSCRASQDISKYLNWYQQKPGQAPRLLIYHTSRLHSGIPARFSGSGSGTDYTLTISSLQPEDFAVYFCQQGNTLPYTFGQGTKLEIKGGGGSGGGGSGGGGSGGGGSQVQLQESGPGLVKPSETLSLTCTVSGVSLPDYGVSWIRQPPGKGLEWIGVIWGSETTYYSSSLKSRVTISKDNSKNQVSLKLSSVTAADTAVYYCAKHYYYGGSYAMDYWGQGTLVTVSSHHHHHHHH

SEQ ID NO: 205166 - protein, 248 aa, Artificial Sequence
  Description of Artificial Sequence: Synthetic scFv sequence
QVQLLESGAELVRPGSSVKISCKASGYAFSSYWMNWVKQRPGQGLEWIGQIYPGDGDTNYNGKFKGQATLTADKSSSTAYMQLSGLTSEDSAVYSCARKTISSVVDFYFDYWGQGTTVTGSTSGSGKPGSGEGSTKGELVLTQSPKFMSTSVGDRVSVTCKASQNVGTNVAWYQQKPGQSPKPLIYSATYRNSGVPDRFTGSGSGTDFTLTITNVQSKDLADYFYFCQYNRYPYTSGGGTKLEIKRRS

SEQ ID NO: 205167 - protein, 514 aa, Artificial Sequence
  Description of Artificial Sequence: Synthetic scFv sequence
EIVMTQSPATLSLSPGERATLSCRASQDISKYLNWYQQKPGQAPRLLIYHTSRLHSGIPARFSGSGSGTDYTLTISSLQPEDFAVYFCQQGNTLPYTFGQGTKLEIKGGGGSGGGGSGGGGSQVQLQESGPGLVKPSETLSLTCTVSGVSLPDYGVSWIRQPPGKGLEWIGVIWGSETTYYQSSLKSRVTISKDNSKNQVSLKLSSVTAADTAVYYCAKHYYYGGSYAMDYWGQGTLVTVSSGGGGSGGGGSGGGGSGGGGSEVQLQQSGPGLVKPSQTLSLTCAISGDSVSSNSAAWNWIRQSPSRGLEWLGRTYYRSKWYNDYAVSVKSRITINPDTSKNQFSLQLNSVTPEDTAVYYCARDLGWIAVAGTFDYWGQGTLVTVSSGGGGSGGGGSGGGGSQSALTQPASVSGSPGQSITISCTGTSSDVGGYNYVSWYQQHPGKAPKLMIYDVSKRPSGVSNRFSGSKSGNTASLTISGLQAEDEADYYCSSYTSSSLNHVFGTGTKVTVLT

SEQ ID NO: 205168 - protein, 514 aa, Artificial Sequence
  Description of Artificial Sequence: Synthetic scFv sequence
EVQLQQSGPGLVKPSQTLSLTCAISGDSVSSNSAAWNWIRQSPSRGLEWLGRTYYRSKWYNDYAVSVKSRITINPDTSKNQFSLQLNSVTPEDTAVYYCARDLGWIAVAGTFDYWGQGTLVTVSSGGGGSGGGGSGGGGSQSALTQPASVSGSPGQSITISCTGTSSDVGGYNYVSWYQQHPGKAPKLMIYDVSKRPSGVSNRFSGSKSGNTASLTISGLQAEDEADYYCSSYTSSSLNHVFGTGTKVTVLTGGGGSGGGGSGGGGSGGGGSEIVMTQSPATLSLSPGERATLSCRASQDISKYLNWYQQKPGQAPRLLIYHTSRLHSGIPARFSGSGSGTDYTLTISSLQPEDFAVYFCQQGNTLPYTFGQGTKLEIKGGGGSGGGGSGGGGSQVQLQESGPGLVKPSETLSLTCTVSGVSLPDYGVSWIRQPPGKGLEWIGVIWGSETTYYQSSLKSRVTISKDNSKNQVSLKLSSVTAADTAVYYCAKHYYYGGSYAMDYWGQGTLVTVSS

SEQ ID NO: 205169 - protein, 271 aa, Artificial Sequence
  Description of Artificial Sequence: Synthetic scFv sequence
MALPVTALLLPLALLLHAARPEIVMTQSPATLSLSPGERATLSCRASQDISKYLNWYQQKPGQAPRLLIYHTSRLHSGIPARFSGSGSGTDYTLTISSLQPEDFAVYFCQQGNTLPYTFGQGTKLEIKGGGGSGGGGSGGGGSQVQLQESGPGLVKPSETLSLTCTVSGVSLPDYGVSWIRQPPGKGLEWIGVIWGSETTYYSSSLKSRVTISKDNSKNQVSLKLSSVTAADTAVYYCAKHYYYGGSYAMDYWGQGTLVTVSSHHHHHHHH

SEQ ID NO: 205170 - protein, 242 aa, Artificial Sequence
  Description of Artificial Sequence: Synthetic scFv sequence
EIVMTQSPATLSLSPGERATLSCRASQDISKYLNWYQQKPGQAPRLLIYHTSRLHSGIPARFSGSGSGTDYTLTISSLQPEDFAVYFCQQGNTLPYTFGQGTKLEIKGGGGSGGGGSGGGGSQVQLQESGPGLVKPSETLSLTCTVSGVSLPDYGVSWIRQPPGKGLEWIGVIWGSETTYYSSSLKSRVTISKDNSKNQVSLKLSSVTAADTAVYYCAKHYYYGGSYAMDYWGQGTLVTVSS

SEQ ID NO: 205171 - protein, 247 aa, Artificial Sequence
  Description of Artificial Sequence: Synthetic scFv sequence
QVQLQESGPGLVKPSETLSLTCTVSGVSLPDYGVSWIRQPPGKGLEWIGVIWGSETTYYNSSLKSRVTISKDNSKNQVSLKLSSVTAADTAVYYCAKHYYYGGSYAMDYWGQGTLVTVSSGGGGSGGGGSGGGGSGGGGSEIVMTQSPATLSLSPGERATLSCRASQDISKYLNWYQQKPGQAPRLLIYHTSRLHSGIPARFSGSGSGTDYTLTISSLQPEDFAVYFCQQGNTLPYTFGQGTKLEIK

SEQ ID NO: 205172 - protein, 242 aa, Artificial Sequence
  Description of Artificial Sequence: Synthetic scFv sequence
EIVMTQSPATLSLSPGERATLSCRASQDISKYLNWYQQKPGQAPRLLIYHTSRLHSGIPARFSGSGSGTDYTLTISSLQPEDFAVYFCQQGNTLPYTFGQGTKLEIKGGGGSGGGGSGGGGSQVQLQESGPGLVKPSETLSLTCTVSGVSLPDYGVSWIRQPPGKGLEWIGVIWGSETTYYNSSLKSRVTISKDNSKNQVSLKLSSVTAADTAVYYCAKHYYYGGSYAMDYWGQGTLVTVSS

SEQ ID NO: 205173 - protein, 242 aa, Artificial Sequence
  Description of Artificial Sequence: Synthetic scFv sequence
QVQLQESGPGLVKPSETLSLTCTVSGVSLPDYGVSWIRQPPGKGLEWIGVIWGSETTYYNSSLKSRVTISKDNSKNQVSLKLSSVTAADTAVYYCAKHYYYGGSYAMDYWGQGTLVTVSSGGGGSGGGGSGGGGSEIVMTQSPATLSLSPGERATLSCRASQDISKYLNWYQQKPGQAPRLLIYHTSRLHSGIPARFSGSGSGTDYTLTISSLQPEDFAVYFCQQGNTLPYTFGQGTKLEIK

SEQ ID NO: 205174 - protein, 242 aa, Artificial Sequence
  Description of Artificial Sequence: Synthetic scFv sequence
EIVMTQSPATLSLSPGERATLSCRASQDISKYLNWYQQKPGQAPRLLIYHTSRLHSGIPARFSGSGSGTDYTLTISSLQPEDFAVYFCQQGNTLPYTFGQGTKLEIKGGGGSGGGGSGGGGSQVQLQESGPGLVKPSETLSLTCTVSGVSLPDYGVSWIRQPPGKGLEWIGVIWGSETTYYQSSLKSRVTISKDNSKNQVSLKLSSVTAADTAVYYCAKHYYYGGSYAMDYWGQGTLVTVSS

SEQ ID NO: 205175 - protein, 247 aa, Artificial Sequence
  Description of Artificial Sequence: Synthetic scFv sequence
QVQLQESGPGLVKPSETLSLTCTVSGVSLPDYGVSWIRQPPGKGLEWIGVIWGSETTYYSSSLKSRVTISKDNSKNQVSLKLSSVTAADTAVYYCAKHYYYGGSYAMDYWGQGTLVTVSSGGGGSGGGGSGGGGSGGGGSEIVMTQSPATLSLSPGERATLSCRASQDISKYLNWYQQKPGQAPRLLIYHTSRLHSGIPARFSGSGSGTDYTLTISSLQPEDFAVYFCQQGNTLPYTFGQGTKLEIK

SEQ ID NO: 205176 - protein, 247 aa, Artificial Sequence
  Description of Artificial Sequence: Synthetic scFv sequence
EIVMTQSPATLSLSPGERATLSCRASQDISKYLNWYQQKPGQAPRLLIYHTSRLHSGIPARFSGSGSGTDYTLTISSLQPEDFAVYFCQQGNTLPYTFGQGTKLEIKGGGGSGGGGSGGGGSGGGGSQVQLQESGPGLVKPSETLSLTCTVSGVSLPDYGVSWIRQPPGKGLEWIGVIWGSETTYYNSSLKSRVTISKDNSKNQVSLKLSSVTAADTAVYYCAKHYYYGGSYAMDYWGQGTLVTVSS

SEQ ID NO: 205177 - protein, 111 aa, Artificial Sequence
  Description of Artificial Sequence: Synthetic scFv sequence
ELVLTQSPKFMSTSVGDRVSVTCKASQNVGTNVAWYQQKPGQSPKPLIYSATYRNSGVPDRFTGSGSGTDFTLTITNVQSKDLADYFYFCQYNRYPYTSGGGTKLEIKRRS

SEQ ID NO: 205178 - protein, 251 aa, Artificial Sequence
  Description of Artificial Sequence: Synthetic scFv sequence
EVQLVQSGAEVKKPGESLKISCKGSGFTFRDYYMAWVRQMPGKGLEWMGSISYEGNPYYGDSVKGQVTISRDNSISTLYLQWSSLKASDTAMYYCARHDHNNVDWFAYWGQGTLVTVSSGGGGSGGGGSGGGGSGGGGSDIQMTQSPSSLSASVGDRVTITCKSSQSLLYSENKKNYLAWYQQKPGKVPKLLIFWASTRESGVPSRFSGSGSGTDFTLTISSLQPEDVATYYCQQYYNFPTFGQGTKLEIK

SEQ ID NO: 205179 - protein, 251 aa, Artificial Sequence
  Description of Artificial Sequence: Synthetic scFv sequence
EVQLVQSGAEVKKPGESLKISCKGSGFTFRDYYMAWVRQMPGKGLEWMGSISYEGNPYYGDSVKGQVTISRDNSISTLYLQWSSLKASDTAMYYCARHDHNNVDWFAYWGQGTLVTVSSGGGGSGGGGSGGGGSGGGGSEIVMTQSPATLSLSPGERATLSCKSSQSLLYSENKKNYLAWYQQKPGQAPRLLIFWASTRESGIPARFSGSGSGTDFTLTISSLQPEDLAVYYCQQYYNFPTFGQGTKLEIK

SEQ ID NO: 205180 - protein, 251 aa, Artificial Sequence
  Description of Artificial Sequence: Synthetic scFv sequence
QVQLVESGGGVVQPGRSLRLSCAASGFTFRDYYMAWVRQAPGKGLEWVASISYEGNPYYGDSVKGRFTISRDNAKSTLYLQMSSLRAEDTAVYYCARHDHNNVDWFAYWGQGTLVTVSSGGGGSGGGGSGGGGSGGGGSDIVMTQTPLSLSVTPGQPVSMSCKSSQSLLYSENKKNYLAWYLQKPGQSPQLLIFWASTRESGVPDRFSGSGSGTDFTLKISRVEAEDVGVYYCQQYYNFPTFGQGTKLEIK

SEQ ID NO: 205181 - protein, 251 aa, Artificial Sequence
  Description of Artificial Sequence: Synthetic scFv sequence
QVQLVQSGAEVKKPGASVKVSCKASGFTFRDYYMAWVRQAPGQGLEWMGSISYEGNPYYGDSVKGRVTMTRDNSTSTLYMELSSLRSEDTAVYYCARHDHNNVDWFAYWGQGTLVTVSSGGGGSGGGGSGGGGSGGGGSDIQMTQSPSSLSASVGDRVTITCKSSQSLLYSENKKNYLAWYQQKPGKVPKLLIFWASTRESGVPSRFSGSGSGTDFTLTISSLQPEDVATYYCQQYYNFPTFGQGTKLEIK

SEQ ID NO: 205182 - protein, 251 aa, Artificial Sequence
  Description of Artificial Sequence: Synthetic scFv sequence
QVQLVQSGAEVKKPGASVKVSCKASGFTFRDYYMAWVRQAPGQGLEWMGSISYEGNPYYGDSVKGRVTMTRDNSTSTLYMELSSLRSEDTAVYYCARHDHNNVDWFAYWGQGTLVTVSSGGGGSGGGGSGGGGSGGGGSEIVMTQSPATLSLSPGERATLSCKSSQSLLYSENKKNYLAWYQQKPGQAPRLLIFWASTRESGIPARFSGSGSGTDFTLTISSLQPEDLAVYYCQQYYNFPTFGQGTKLEIK

SEQ ID NO: 205183 - protein, 251 aa, Artificial Sequence
  Description of Artificial Sequence: Synthetic scFv sequence
QVQLVQSGAEVKKPGASVKVSCKASGFTFRDYYMAWVRQAPGQRLEWMGSISYEGNPYYGDSVKGRVTITRDNSASTLYMELSSLRSEDTAVYYCARHDHNNVDWFAYWGQGTLVTVSSGGGGSGGGGSGGGGSGGGGSDIQMTQSPSSLSASVGDRVTITCKSSQSLLYSENKKNYLAWYQQKPGKVPKLLIFWASTRESGVPSRFSGSGSGTDFTLTISSLQPEDVATYYCQQYYNFPTFGQGTKLEIK

SEQ ID NO: 205184 - protein, 247 aa, Artificial Sequence
  Description of Artificial Sequence: Synthetic scFv sequence
EVQLQQSGPGLVKPSLTLSLTCAISGDSVSSNSATWTWIRQSPSRGLEWLGRTYYRSTWYNDYAVSVKSRITINPDTSKNQFSLQLNSVTPEDTAVYYCAREGSGSYYAYWGQGTLVTVSSGGGGSGGGGSGGGGSQSALTQPASVSGSPGQSITISCTGTSSDVGGYNYVSWYQQHPGKAPKLMIYDVSNRPSGVSNRFSGSKSGNTASLTISGLQAEDEADYYCSSYTSSSTLYVFGTGTKVTVL

SEQ ID NO: 205185 - protein, 253 aa, Artificial Sequence
  Description of Artificial Sequence: Synthetic scFv sequence
EVQLQQSGPGLVKPSQTLPLTCAISGDSVLSNSDTWNWIRQSPSRGLEWLGRTYHRSTWYDDYASSVRGRVSINVDTSKNQYSLQLNAVTPEDTGVYYCARVRLQDGNSWSDAFDVWGQGTMVTVSSGGGGSGGGGSGGGGPQSALTQPASASGSPGQSVTISCTGTSSDVGGYNYVSWYQQHPGKAPKLMIYDVSNRPSGVSNRFSGSKSGNTASLTISGLQAEDEADYYCSSYTSSSTLYVFGTGTQLTVL

SEQ ID NO: 205186 - protein, 253 aa, Artificial Sequence
  Description of Artificial Sequence: Synthetic scFv sequence
EVQLQQSGPGLVKPSQTLSLTCAISGDSMLSNSDTWNWIRQSPSRGLEWLGRTYHRSTWYDDYASSVRGRVSINVDTSKNQYSLQLNAVTPEDTGVYYCARVRLQDGNSWSDAFDVWGQGTMVTVSSGGGGSGGGGSGGGGSQSALTQPASASGSPGQSVTISCTGTSSDVGGYNYVSWYQQHPGKAPKLMIYDVSNRPSGVSNRFSGSKSGNTASLTISGLQAEDEADYYCSSYTSSSTLYVFGTGTQLTVL

SEQ ID NO: 205187 - protein, 253 aa, Artificial Sequence
  Description of Artificial Sequence: Synthetic scFv sequence
EVQLQQSGPGLVKPSQTLSLTCAISGDSVLSNSDTWNWIRQSPSRGLEWLGRTYHRSTWYDDYASSVRGRVSINVDTSKNQYSLQLNAVTPEDTGAYYCARDRLQDGNSWSDAFDVWGQGTMVTVSSGGGGSGGGGSGGGGSQSALTQPASVSGSPGQSITISCTGTSSDVGGYNYVSWYQQHPGKAPKLMIYDVSNRPSGVSNRFSGSKSGNTASLTISGLQAEDEADYYCSSYTSSSTPYVFGTGTQLTVL

SEQ ID NO: 205188 - protein, 253 aa, Artificial Sequence
  Description of Artificial Sequence: Synthetic scFv sequence
EVQLQQSGPGLVKPSQTLSLTCAISGDSVLSNSDTWNWIRQSPSRGLEWLGRTYHRSTWYDDYASSVRGRVSINVDTSKNQYSLQLNAVTPEDTGVYYCARDRLQDGNSWSDAFDVWGQGTMVTVSSGGGGSGGGGSGGGGSQSALTQPASASGSPGQSVTISCTGTSSDVGGYNYVSWYQQHPGKAPKLMIYDVSNRPSGVSNRFSGSKSGNTASLTISGLQAEDEADYYCSSYTSSSTLYVFGTGTQLTVL

SEQ ID NO: 205189 - protein, 254 aa, Artificial Sequence
  Description of Artificial Sequence: Synthetic scFv sequence
EVQLQQSGPGLVKPSQTLSLTCAISGDSVLSNSDTWNWIRQSPSRGLEWLGRTYHRSTWYDDYASSVRGRVSINVDTSKNQYSLQLNAVTPEDTGVYYCARDRLQDGNSWSDAFDVWGQGTMVTVSSGGGGSGGGGSGGGGSQSALTQPASVSGSPGQSITISCTGSSSDIGGFNYVSWYQQHAGEAPKLMIYEVTNRPSGVSDRFSGSKSDNTASLTISGLQAEDEADYYCSSYASGSPLYVFGTGTKVTVLG

SEQ ID NO: 205190 - protein, 254 aa, Artificial Sequence
  Description of Artificial Sequence: Synthetic scFv sequence
EVQLQQSGPGLVKPSQTLSLTCAISGDSVLSNSDTWNWIRQSPSRGLEWLGRTYHRSTWYDDYASSVRGRVSINVDTSKNQYSLQLNAVTPEDTGVYYCARDRLQDGNSWSDAFDVWGQGTMVTVSSGGGGSGGGGSGGGGSQSALTQPASVSGSPGQSITISCTGTSSDVGGYNYVSWYQQHPGKAPKLMIYDVSNRPSGVSNRFSGSKSGNTASLTISGLQAEDEADYYCSSYTSSSTLVYVFGTGTKVTVL

SEQ ID NO: 205191 - protein, 254 aa, Artificial Sequence
  Description of Artificial Sequence: Synthetic scFv sequence
EVQLQQSGPGLVKPSQTLSLTCAISGDSVLSNSDTWNWIRQSPSRGLEWLGRTYHRSTWYDDYASSVRGRVSINVDTSKNQYSLQLNAVTPEDTGVYYCARDRLQDGNSWSDAFDVWGQGTMVTVSSGGGGSGGGGSGGGGSQSALTQPASVSGSPGQSITISCTGTSSDVGGYNYVSWYQQHPGKAPKLMIYDVSNRPSGVSNRFSGSKSGNTASLTISGLQAEDEADYYCSSYTSSSTLYVFGTGTKVTVLG

SEQ ID NO: 205192 - protein, 254 aa, Artificial Sequence
  Description of Artificial Sequence: Synthetic scFv sequence
EVQLQQSGPGLVKPSQTLSLTCAISGDSVLSNSDTWNWIRQSPSRGLEWLGRTYHRSTWYDDYASSVRGRVSINVDTSKNQYSLQLNAVTPEDTGVYYCARDRLQDGNSWSDAFDVWGQGTMVTVSSGGGGSGGGGSGGGGSQSALTQPASVSGSPGQSITISCTGTSSDVGGYNYVSWYQQHPGKAPKLMIYEVSNRPSGVSNRFSGSKSGNTASLTISGLQAEDEADYYCSSYTSSSTLYIFGTGTKVTVLG

SEQ ID NO: 205193 - protein, 254 aa, Artificial Sequence
  Description of Artificial Sequence: Synthetic scFv sequence
EVQLQQSGPGLVKPSQTLSLTCAISGDSVLSNSDTWNWIRQSPSRGLEWLGRTYHRSTWYDDYASSVRGRVSINVDTSKNQYSLQLNAVTPEDTGVYYCARDRLQDGNSWSDAFDVWGQGTMVTVSSGGGGSGGGGSGSGGSQSALTQPASVSGSPGQSITFSCTGTSSDIGGYNYVSWYQQHPGKAPKLMIYEVSNRPSGVSNRFSGTKSGNTASLTISGLQAEDEADYYCSSYTSSSTLYVFGTGTKLTVLG

SEQ ID NO: 205194 - protein, 251 aa, Artificial Sequence
  Description of Artificial Sequence: Synthetic scFv sequence
EVQLQQSGPGLVKPSQTLSLTCAISGDSVSNNNAAWNWIRQSPSRGLEWLGRTYHRSTWYNDYVGSVKSRITINPDTSKNQFSLQLNSVTPEDTAVYYCARETDYGDYGAFDIWGQGTTVTVSSGGGGSGGGGSGGGGSQSALTQPASVSGSPGQSITISCTGSRNDIGAYESVSWYQQHPGNAPKLIIHGVNNRPSGVFDRFSVSQSGNTASLTISGLQAEDEADYYCSSHTTTSTLYVFGTGTKVTVLG

SEQ ID NO: 205195 - protein, 251 aa, Artificial Sequence
  Description of Artificial Sequence: Synthetic scFv sequence
EVQLQQSGPGLVKPSQTLSLTCAISGDSVSSNSAAWNWIRQSPSRGLEWLGRTYYRSKWYNDYAVSVKSRITINPDTSKNQFSLQLNSVTPEDTAVYYCARDLGWIAVAGTFDYWGQGTLVTVSSGGGGSGGGGSGGGGSQSALTQPASVSGSPGQSITISCTGTSSDVGGYNYVSWYQQHPGKAPKLMIYDVSKRPSGVSNRFSGSKSGNTASLTISGLQAEDEADYYCSSYTSSSLNHVFGTGTKVTVL

SEQ ID NO: 205196 - protein, 249 aa, Artificial Sequence
  Description of Artificial Sequence: Synthetic scFv sequence
EVQLQQSGPGLVKPSQTLSLTCAISGDSVSSNSAAWNWIRQSPSRGLEWLGRTYYRSKWYNDYAVSVKSRITINPDTSKNQFSLQLNSVTPEDTAVYYCAREESSSGWYEGNWFDPWGQGTLVTVSSGGGGSGGGGSGGGGSSSELTQDPAVSVALGQTVRITCQGDSLRSYYASWYQQKPGQAPVLVIYGKNHRPSGIPDRFSGSSSGDTDSLTITGAQAEDEADYYCHSRDSSGNHLFGGGTKLTVL

SEQ ID NO: 205197 - protein, 254 aa, Artificial Sequence
  Description of Artificial Sequence: Synthetic scFv sequence
EVQLQQSGPGLVKPSQTLSLTCAISGDSVSSNSAAWNWIRQSPSRGLEWLGRTYYRSKWYSDYAVSVKSRITINPDTSKNQFSLQLNSVTPEDTAVYYCARDPYDFWSGYPDAFDIWGQGTMVTVSSGGGGSGGGGSGGGGSQSALTQPASVSGSPGQSITISCTGTSSDVGGYNYVSWYQQHPGKAPKVIISEVNNRPSGVSHRFSGSKSGNTASLTISGLQAEDEADYFCSSYTSGRTLYVFGTGSKVTVLG

SEQ ID NO: 205198 - protein, 247 aa, Artificial Sequence
  Description of Artificial Sequence: Synthetic scFv sequence
EVQLQQSGPGLVNPSQTLSITCAISGDSVSSNSAAWNWIRQSPSRGLEWLGRTFYRSKWYNDYAVSVKGRITISPDTSKNQFSLQLNSVTPEDTAVYYCAGGDYYYGLDVWGQGTTVTVSSGGGGSGGGGSGGGGSQSALTQPASVSGSPGQSITISCTGSSSDVGGYNSVSWYQQHPGKAPKLMIYEVINRPSGVSHRFSGSKSGNTASLTISGLQAEDEADYYCSSYTSSSTYVFGTGTKVTVLG

SEQ ID NO: 205199 - protein, 252 aa, Artificial Sequence
  Description of Artificial Sequence: Synthetic scFv sequence
EVQLVESGAEVKKPGASVKVSCKASGYTFTGYYMHWVRQAPGQGLEWMGWINPNSGGTNYAQKFQGRVTMTRDTSISTAYMELSRLRSDDTAVYYCAREPASSSWYGYYYYMDVWGKGTLVTVSSGGGGSGGGGSGGGGSGGGGSDIQMTQSPSSLSASVGDRVTITCRASQSINTYLNWYQQKPGKPPKLLIYAASNLQSGVPSRFSGSGSGTHFTLTISSLQPDDFATYYCQQSYSSLLTFGGGTKLEIK

SEQ ID NO: 205200 - protein, 243 aa, Artificial Sequence
  Description of Artificial Sequence: Synthetic scFv sequence
EVQLVESGAEVKKPGASVKVSCKASGYTFTSYYMHWVRQAPGQGLEWMGIINPSGGSTSYAQKFQGRVTMTRDTSTSTAYMELSSLRSEDTAVYYCAREAGVVAVDYWGQGTLVTVSSGGGGSGGGGSGGGGSQSALTQPASVSGSPGQSITISCTGTSSDVGGYNYVSWYQQHPGKAPKLMIYDVSNRPSGVSNRFSGSKSGNTASLTISGLQAEDEADYYCSSYTSSSTWVFGGGTKLTVL

SEQ ID NO: 205201 - protein, 247 aa, Artificial Sequence
  Description of Artificial Sequence: Synthetic scFv sequence
EVQLVESGAEVKKPGASVKVSCKASGYTFTSYYMHWVRQAPGQGLEWMGIINPSGGSTSYAQKFQGRVTMTRDTSTSTVYMELSSLRSEDTAVYYCARGPIGCSGGSCLDYWGQGTLVTVSSGGGGSGGGGSGGGGSQSALTQPAYVSGSPGQSITISCTGTNSDVGRYNYVSWYQQHPGKAPKLMIYEVSYRPSGVSNRFSGSKSGNTASLTISGLQAEDEADYYCSSYTTSSTLDFGTGTKVTVL

SEQ ID NO: 205202 - protein, 252 aa, Artificial Sequence
  Description of Artificial Sequence: Synthetic scFv sequence
EVQLVESGAEVKKPGESLKISCKGSGYSFTGSWIGWGRQMPGKGLEWMGIIYPGDSDTRYSPSFQGQVTISADKSISTAYLQWSSLKASDTAMYYCARGFLRGGDCCGALDIWGQGTMVTVSSGGGGSGGGGSGGGGSDIVMTQSPLSLPVTPGEPASISCRSSQSLLHSNGYNYLDWYLQKPGQSPQLLIYLGSNRASGVPDRFSGSGSGTDFTLKISRVEAEDVGVYYCMQALQTPPWTFGQGTKLEIKR

SEQ ID NO: 205203 - protein, 244 aa, Artificial Sequence
  Description of Artificial Sequence: Synthetic scFv sequence
EVQLVESGAEVKKPGSSVKVSCKASGGTFSSYAISWVRQAPGQGLEWMGGIIPIFGTANYAQKFQGRVTITADESTSTAYMELSSLRSEDTAVYYCARDHKVVRFGYWGQGTLVTVSSGGGGSGGGGSGGGGSHVILTQPPSASASLGASVKLTCTLSSGHSSYAIAWHQQQPEKGPRYLMKVNSDGSLSKGDGIPDRFSGSTSGAERYLTISSLQSEDEADYYCQTWGSGMAIFGGGTKLTVL

SEQ ID NO: 205204 - protein, 245 aa, Artificial Sequence
  Description of Artificial Sequence: Synthetic scFv sequence
EVQLVESGGGLVKPGGSLKLSCAASGFAFSIYDMSWVRQTPEKRLEWVAYISSGGGTYYPDTVKGRFTISRDNAKNTLYLQMSSLKSEDTAMYYCARHSGYGSSYGVLFAYWGQGTLVTVSAGGGGSGGGGSGGGGSDIQMTQTTSSLSASLGDRVTISCRASQDISNYLNWYQQKPDGTVKLLIYYTSILHSGVPSRFSGSGSGTDYSLTISNLEQEDFATYFCQQGNTLPWTFGGGTKLEIKA

SEQ ID NO: 205205 - protein, 245 aa, Artificial Sequence
  Description of Artificial Sequence: Synthetic scFv sequence
EVQLVESGGGLVKPGGSLKLSCAASGFAFSIYDMSWVRQTPEKRLEWVAYISSGGGTYYPDTVKGRFTISRDNAKNTLYLQMSSLKSEDTAMYYCARHSGYGTHWGVLFAYWGQGTLVTVSAGGGGSGGGGSGGGGSDIQMTQTTSSLSASLGDRVTISCRASQDISNYLNWYQQKPDGTVKLLIYYTSILHSGVPSRFSGSGSGTDYSLTISNLEQEDFATYFCQQGNTLPWTFGGGTKLEIKA

SEQ ID NO: 205206 - protein, 247 aa, Artificial Sequence
  Description of Artificial Sequence: Synthetic scFv sequence
EVQLVESGGGLVKPGGSLRLSCAASGFTFSDYYMSWIRQAPGKGLEWVSYISSSGSTIYYADSVKGRFTISRDNAKNSLYLQMNSLRAEDTAVYYCARDDFWSGSVDYWGQGTLVTVSSGGGGSGGGGSGGGGSGGGGSSYVLTQPPSVSVAPGKTATITCGGTNIGSKNVHWYQQKPGQAPVLAIYYDSDRPSGIPERFSGSNSGNTATLTISRVEAGDEADYFCQVWDSSSDHWVFGGGTKLTVL

SEQ ID NO: 205207 - protein, 241 aa, Artificial Sequence
  Description of Artificial Sequence: Synthetic scFv sequence
EVQLVESGGGLVKPGGSLRLSCVASGFTFSNAWMNWVRQAPGKGLEWVGRIKSKTDGGTADYAAPVKGRFTISRDDSKNTMYLQMNSLKTEDTGVYYCITGATDVWGQGTTVTVSSGGGGSGGGGSGGGGSSYVLTQPPSASGTPGQRVTISCSGSSSNIGSNYVYWYQQLPGTAPKLLIYRNNQRPSGVPDRFSGSKSGTSASLAISGLRSEDEADYYCAAWDDSLSGPVFGGGTKLTVL

SEQ ID NO: 205208 - protein, 247 aa, Artificial Sequence
  Description of Artificial Sequence: Synthetic scFv sequence
EVQLVESGGGLVQPGGSLRLSCAASGFTFSSYAMHWVRQAPGKGLEYVSAISSNGGSTYYANSVKDRFTISRDNSKNTLYLQMGSLRAEDMAVYYCARVHSSGYYHPGPNDYWGQGTLVTVSSGGGGSGGGGSGGGGSSSELTQDPAVSVALGQTVRITCQGDSLRTYYATWYQQKPGQAPVLVFYDENNRPSGIPDRFSGSSSGNTASLTITGTQAEDEADYYCSSRDSSGNPSCVFGGGTKLTVL

SEQ ID NO: 205209 - protein, 247 aa, Artificial Sequence
  Description of Artificial Sequence: Synthetic scFv sequence
EVQLVESGGGLVQPGGSLRLSCAASGFTFSSYAMSWVRQAPGKGLEWVSYISSSSSTIYYADSVKGRFTISRDNAKNSLYLQMNSLRAEDTAVYYCARDGPIRYFDHSKAFDIWGQGTMVTVSSGGGGSGGGGSGGGGSSSELTQDPAVSVALGQTVRITCQGDSLRSYYASWYQQKPGQAPVLVIYGKNNRPSGIPDRFSGSSSGNTASLTITGAQAEDEADYYRNSRDSSGNPYVFGTGTKVTVL

SEQ ID NO: 205210 - protein, 245 aa, Artificial Sequence
  Description of Artificial Sequence: Synthetic scFv sequence
EVQLVESGGGLVQPGRSLRLSCAASGFTFDDYAMHWVRQAPGKGLEWVSGISWNSGSIGYADSVKGRFTISRDNAKNSLYLQMNSLRAEDTALYYCAKDKGGGYYDFWSGSDYWGQGTLVTVSSGGGGSGGGGSGGGGSSSELTQDPAVSVALGQTVRITCQGDSLRSYYASWYQQKPGQAPVLVIYGKNNRPSGIPDRFSGSSSGNTASLTITGAQAEDEADYYCNSRDSSGWVFGGGTKLTVL

SEQ ID NO: 205211 - protein, 246 aa, Artificial Sequence
  Description of Artificial Sequence: Synthetic scFv sequence
EVQLVESGGGLVQPGRSLRLSCAASGFTFDDYAMHWVRQAPGKGLEWVSGISWNSGSIGYADSVKGRFTISRDNAKNSLYLQMNSLRAEDTALYYCAKGLSSWHFHDALDIWGQGTMVTVSSGGGGSGGGGSGGGGSSSELTQDPAVSVALGQTVRITCQGDSLRSYYASWYQQKPGQAPVLVIYGKNNRPSGIPDRFSGSSSGNTASLTITGAQAEDEADYYCNSRDSSGNHLWVFGGGTKLTVL

SEQ ID NO: 205212 - protein, 254 aa, Artificial Sequence
  Description of Artificial Sequence: Synthetic scFv sequence
QVNLRESGPALVKPTQTLTLTCTFSGFSLNTFGMSVSWIRQPPGKALEWLALIDWDDDKYYSTSLRTRLTISKDTAKNQVVLRMTNMDPMDTATYYCARIYGGDRTNTQAPYFFDLWGQGTLVTVSSGGGGSGGGGSGGGGSDVVMTQSPLSLPVTPGEPASISCRSSQSLLHSNGYNYLDWYLQKPGQSPQLLIYLGSNRASGVPDRFSGSGSGTDFTLKISRVEAEDVGVYYCMQALQTPWTFGQGTKLEIK

SEQ ID NO: 205213 - protein, 250 aa, Artificial Sequence
  Description of Artificial Sequence: Synthetic scFv sequence
QVQLQESGPGLVKPSETLSLTCSVSGGSINSYYWSWIRQAPGKGLEWIAFTSHSGNVKYNPSLTGRVTIAVDTSKNQFYLEVTSVTAADTAVYFCARGLDPLFAYDAFEIWGLGTMVTVSSGGGGSGGGGSGGGGSEIVLTQSPLSLPVTPGEPASISCRSSQSLLHSNGYNYLDWYLQKPGQSPQLLIYLGSNRASGVPDRFSGSGSGTDFTLKISRVEAEDVGVYYCMQVLQTPPLTFGGGTKVDIKR

SEQ ID NO: 205214 - protein, 245 aa, Artificial Sequence
  Description of Artificial Sequence: Synthetic scFv sequence
QVQLQESGPGLVKPSETLSLTCTVSGGSISSSSYYWGWIRQPPGKGLEWIGSIYYSGSTYYNPSLKSRVTISVDTSKNQFSLKLSSVTAADTAVYYCARGRMDTAMAQIWGQGTMVTVSSGDGGSGGGGSGGGGSNFMLTQPHSVSESPGKTVTIPCTGSSGSFASSYVQWYQQRPGSAPATVIYEDNQRPSGVPDRFSGSVDSSSNSASLTISGLKTEDEAVYYCQSYDGATWVFGGGTKLTVL

SEQ ID NO: 205215 - protein, 248 aa, Artificial Sequence
  Description of Artificial Sequence: Synthetic scFv sequence
QVQLQESGPGLVKPSGTLSLTCAVSGASITSRHWWNWVRHSPGKGLEWIGQIYHSGTTTYNPSLGSRVTISVDKSKNQISLELRSVTAADTATYYCVRDYLELATYYGMDVWGQGTTVTVSSGGGGSGGGGSGGGGSEIVLTQSPLSLPVTPGEPASISCRSSQSLLYSDGYNYLDWYLQKPGQSPQLLIYLGSNRASGVPDRFSGSGSGTDFTLQISGVETEDVGVYYCMQALQTQSFGQGTKLEIK

SEQ ID NO: 205216 - protein, 254 aa, Artificial Sequence
  Description of Artificial Sequence: Synthetic scFv sequence
QVQLQESGPGLVKPSQTLSLTCAISGDSVLSNSDTWNWIRQSPSRGLEWLGRTYHRSTWYDDYASSVRGRVSINVDTSKNQYSLQLNAVTPEDTGVYYCARDRLQDGNSWSDAFDVWGQGTMVTVSSGGGGSGGGGSGSGGSQSALTQPASVSGSPGQSITISCTGTSSDVGGYNYVSWYQQHPGKAPKLMIYEVSNRPSGVSNRFSGSKSGNTASLTISGLQAEDEADYYCSSYTSSSTLYVFGTGTKVTVLG

SEQ ID NO: 205217 - protein, 236 aa, Artificial Sequence
  Description of Artificial Sequence: Synthetic scFv sequence
QVQLQQSGPGLVKPSQTLSLTCAISGDSVSSNSAAWNWIRQSPSRGLEWLGRTYYRSKWYNDYAVSVKSRITINPDTSKNQFSLQLNSVTPEDTAVYYCAREVTGDLEDAFDIWGQGTMVTVSSGGGGSDIQMTQSPSSLSASVGDRVTITCRASQTIWSYLNWYQQRPGKAPNLLIYAASSLQSGVPSRFSGRGSGTDFTLTISSLQAEDFATYYCQQSYSIPQTFGQGTKLEIK

SEQ ID NO: 205218 - protein, 247 aa, Artificial Sequence
  Description of Artificial Sequence: Synthetic scFv sequence
QVQLVQSGAEVKKPGASVKVSCKASGYTFTGYYMHWVRQAPGQGLEWMGWINPNSGGTNYAQKFQGRVTMTRDTSISTAYMELSRLRSDDTAVYYCARDYWGYYGSGTLDYWGQGTLVTVSSGGGGSGGGGSGGGGSQSALTQPGSVSGSPGQSITISCTGTSSDVGGYNYVSWYQQHPGKAPKLIIYDVSSRPSGVSNRFSGSQSGNTASLTISGLQAEDEADYSCSSYAGSNTLVFGTGTKVTVL

SEQ ID NO: 205219 - protein, 252 aa, Artificial Sequence
  Description of Artificial Sequence: Synthetic scFv sequence
QVQLVQSGAEVKKPGASVKVSCKASGYTFTSYDINWVRQATGQGLEWMGWMNPNSGNTGYAQKFQGRVTMTRNTSISTAYMELSSLRSEDTAVYYCARGDSNYWSYYGMDVWGQGTLVTVSSGGGGSGGGGSGGGGSGGGGSQSVLTQPRSVSGSPGQSVTISCTGTSSDVGGYNYVSWYQQHPGEAPKLIIYDADKRPSGISNRFSSGKSGNTASLTISGLQVEDEADYYCCSYAGGSTWVFGGGTKVTVL

SEQ ID NO: 205220 - protein, 254 aa, Artificial Sequence
  Description of Artificial Sequence: Synthetic scFv sequence
QVQLVQSGAEVKKPGASVKVSCKASGYTFTSYGISWVRQAPGQGLEWMGWISAYNGNTNYAQKLQGRVTMTTDTSTSTAYMELRSLRSDDTAVYYCARAGLALYSNYVPYYYYGMDVWGQGTTVTVSSGGGGSGGGGSGGGGSNFMLTQPHSVSESPGKTVTISCTRSSGSIASNYVQWYQQRPGSSPTTVIYEDNQRPSGVPDRFSGSIDSSSNSASLTISGLKTEDEADYYCQSYDSSNPWVFGGGTKLTVL

SEQ ID NO: 205221 - protein, 247 aa, Artificial Sequence
  Description of Artificial Sequence: Synthetic scFv sequence
QVQLVQSGAEVKKPGASVKVSCKASGYTFTSYGISWVRQAPGQGLEWMGWISAYNGNTNYAQKLQGRVTMTTDTSTSTAYMELRSLRSDDTAVYYCASFSSSDSYDYWGQGTLVTVSSGGGGSGGGGSGGGGSGGGGSEIVLTQSPATLSVSPGERATLSCRASQSVTSNLAWYQQKPGQAPRLLIYAASTRATGIPARFSGSGSGTEFTLTISSMQSEDFAVYFCQQYHTWPPLTFGGGTKVEIKT

SEQ ID NO: 205222 - protein, 244 aa, Artificial Sequence
  Description of Artificial Sequence: Synthetic scFv sequence
QVQLVQSGAEVKKPGASVKVSCKASGYTFTSYYMHWVRQAPGQGLEWMGIINPSGGSTSYAQKFQGRVTMTRDTSISTAYMELSRLRSDDTAVYYCAREMDDSSGPDYWGQGTLVTVSSGGGGSGGGGSGGGGSQSALTQPASVSGSPGQSITISCTGTSSDVGGYNYVSWYQQHPGKAPKLMIYEVSNRPSGVSNRFSGSKSGNTASLTISGLQAEDEADYYCSSYTSSSTLVFGTGTKLTVL

SEQ ID NO: 205223 - protein, 246 aa, Artificial Sequence
  Description of Artificial Sequence: Synthetic scFv sequence
QVQLVQSGAEVKKPGASVKVSCKASGYTFTSYYMHWVRQAPGQGLEWMGIINPSGGSTSYAQKFQGRVTMTRDTSTSTVYMELSSLRAEDTAVYYCARGGYGDYLDAFDIWGQGTTVTVSSGGGGSGGGGSGSGGSQSALTQPASVSGSPGQSITISCTGTSSDVGGYNYVSWYQQHPGKAPKLMIYEVSNRPSGVSNRFSGSKSGNTASLTISGLQAEDEADYYCSSYTSSSTLVFGTGTQLTVL

SEQ ID NO: 205224 - protein, 246 aa, Artificial Sequence
  Description of Artificial Sequence: Synthetic scFv sequence
QVQLVQSGAEVKKPGASVKVSCKASGYTFTSYYMHWVRQAPGQGLEWMGIINPSGGSTSYAQKFQGRVTMTRDTSTSTVYMELSSLRSEDTAVYYCARDDDFWSGSGAFDIWGQGTTVTVSSGGGGSGGGGSGGGGSSSELTQDPAVSVALGQTVRITCQGDSLRSYYASWYQQKPGQAPVLVIYGKNNRPSGIPDRFSGSSSGNTASLTITGAQAEDEADYYCNSRDSSGNHPVVFGGGTKLTVL

SEQ ID NO: 205225 - protein, 246 aa, Artificial Sequence
  Description of Artificial Sequence: Synthetic scFv sequence
QVQLVQSGAEVKKPGASVKVSCKASGYTFTSYYMHWVRQAPGQGLEWMGIINPSGGSTSYAQKFQGRVTMTRDTSTSTVYMELSSLRSEDTAVYYCARDGFGELSGAFDIWGQGTMVTVSSGGGGSGGGGSGGGGSQSALTQPASVSGSPGQSITISCTGTSSDVGGYNYVSWYQQHPGKAPKLMIYDVSNRPSGVSNRFSGSKSGNTASLTISGLQAEDEADYYCSSYASSSTLVFGGGTKVTVL

SEQ ID NO: 205226 - protein, 247 aa, Artificial Sequence
  Description of Artificial Sequence: Synthetic scFv sequence
QVQLVQSGAEVKKPGASVKVSCKASGYTFTSYYMHWVRQAPGQGLEWMGIINPSGGSTSYAQKFQGRVTMTRDTSTSTVYMELSSLRSEDTAVYYCARDLAAAGNYYYYGMDVWGQGTTVTVSSGGGGSGGGGSGGGGSSSELTQDPAVSVALGQTARITCQGDSLRSYFTSWYHQKPGQAPVLVIYGNNNRPSGIPDRFSGSSSGNTASLTITGAQAEDEGDYYCDSRDSSGDHLVFGGGTKLTVL

SEQ ID NO: 205227 - protein, 242 aa, Artificial Sequence
  Description of Artificial Sequence: Synthetic scFv sequence
QVQLVQSGAEVKKPGASVKVSCKASGYTFTSYYMHWVRQAPGQGLEWMGIINPSGGSTSYAQKFQGRVTMTRDTSTSTVYMELSSLRSEDTAVYYCARDLDVSLDIWGQGTMVTVSSGGGGSGGGGSGGGGSQSALTQPASVSGSPGQSITISCSGTSSDVGGYNSVSWYQQYPGKAPKLMIYDVNNRPSGVSSRFSGSKSGNTASLTISGLQAEDEADYYCSSYTSSSTLFFGAGTKVTVL

SEQ ID NO: 205228 - protein, 250 aa, Artificial Sequence
  Description of Artificial Sequence: Synthetic scFv sequence
QVQLVQSGAEVKKPGASVKVSCKASGYTFTSYYMHWVRQAPGQGLEWMGIINPSGGSTSYAQKFQGRVTMTRDTSTSTVYMELSSLRSEDTAVYYCAREDDSSGYTSPFDYWGQGTLVTVSSGGGGSGGGGSGGGGSGGGRSSYELTQPPSVSVAPGETASIACGGHNIRSKNVHWYQQKPGQAPVLVISYDGDRPSGIPERFSGSNLGSTATLTISRVEAGDEADYYCQVWDSDSDHYVFGTGTKVTVL

SEQ ID NO: 205229 - protein, 241 aa, Artificial Sequence
  Description of Artificial Sequence: Synthetic scFv sequence
QVQLVQSGAEVKKPGASVKVSCKASGYTFTSYYMHWVRQAPGQGLEWMGIINPSGGSTSYAQKFQGRVTMTRDTSTSTVYMELSSLRSEDTAVYYCARGDYYMDVWGKGTTVTVSSGGGGSGGGGSGGGGSQSALTQPASASGSPGQSVTISCTGTSSDVGGYNYVSWYQQHPGKAPKLMIYEVSKRPSGVPDRFSGSKSGNTASLTISGLQAEDEADYYCSSYTSSGTLVFGGGTKLTVL

SEQ ID NO: 205230 - protein, 245 aa, Artificial Sequence
  Description of Artificial Sequence: Synthetic scFv sequence
QVQLVQSGAEVKKPGASVKVSCKASGYTFTSYYMHWVRQAPGQGLEWMGIINPSGGSTSYAQKFQGRVTMTRDTSTSTVYMELSSLRSEDTAVYYCARGSGSLGDAFDIWGQGTMVTVSSGGGGSGGGGSGGGGSQSALTQPASVSGSPGQSITISCTGSSSDVGGYNYVSWYQQHPGKAPKLMIYEVSNRPSGVSNRFSGSKSGNTASLTISGLQAEDEADYYCSSYTSSSTLVFGTGTKVTVL

SEQ ID NO: 205231 - protein, 246 aa, Artificial Sequence
  Description of Artificial Sequence: Synthetic scFv sequence
QVQLVQSGAEVKKPGASVKVSCKASGYTFTSYYMHWVRQAPGQGLEWMGIINPSGGSTSYAQKFQGRVTMTRDTSTSTVYMELSSLRSEDTAVYYCARGSYGDYGDAFDIWGQGTTVTVSSGGGGSGGGGSGSGGSQSALTQPASVSGSPGQSITISCTGTSSDVGGYKYVSWYQQHPGKAPKLMIYDVSNRPSGVSNRFSGSKSGNTASLTISGLQAEDEADYYCSSYTSSSTLVFGGGTKLTVL

SEQ ID NO: 205232 - protein, 248 aa, Artificial Sequence
  Description of Artificial Sequence: Synthetic scFv sequence
QVQLVQSGAEVKKPGASVKVSCKASGYTFTSYYMHWVRQAPGQGLEWMGIINPSGGSTSYAQKFQGRVTMTRDTSTSTVYMELSSLRSEDTAVYYCARPEGVSYYDSSVLDYWGQGTLVTVSSGGGGSGGGGSGGGGSQSALTQPASVSGSPGQSITISCTGTSSDVGGYKHVSWYQHHPGKAPKLMIYDVSNRPSGVSNRFSGSKSGNTASLTVSGLQAEDEAHYYCVSYRNFNSLVFGTGTKVTVL

SEQ ID NO: 205233 - protein, 251 aa, Artificial Sequence
  Description of Artificial Sequence: Synthetic scFv sequence
QVQLVQSGGGLIQPGGSLRLSCAASGFTVSSNYMSWVRQAPGKGLEWVSVIYSGGSTYYADSVKGRFTISRDNSKNTLYLQMNSLRAEDTAVYYCASQSTPYDSSGYYSGDAFDIWGQGTMVTVSSGGGGSGGGGSGGGGSSYVLTQPPSASGTPGQRVTISCSGSSSNIGSNYVYWYQQLPGTAPKLLIYRNNQRPSGVPDRFSGSKSGTSASLAISGLRSEDEADYYCAAWDDSLSGYVFGTGTKLTVL

SEQ ID NO: 205234 - protein, 250 aa, Artificial Sequence
  Description of Artificial Sequence: Synthetic scFv sequence
QVQLVQSGGGVVQPGRSLRLSCAASGFTFSSYAMSWVRQAPGKGLEWVSAISGSGGSTYYADSVKGRFTISRDNSKNTLYLQMNSLRAEDTAVYYCAKEPLFGVVEEDVDYWGQGTLVTVSSGGGGSGGGGSGGGGSDVVMTQSPLSLPVTPGEPASISCRSSQSLLAGNGHNYLDWYLQKPGQSPQLLIYLGSNRASGVPDRFSGSGSGTDFTLKISRVEAEDVGVYYCMQALQNPLTFGGGTKLEIKR

SEQ ID NO: 205235 - protein, 244 aa, Artificial Sequence
  Description of Artificial Sequence: Synthetic scFv sequence
EVQLVESGGGLVQPGGSLRLSCAASGFTFSSFGMHWVRQAPGKGLEWVAYISSDSSAIYYADTVKGRFTISRDNAKNSLYLQMNSLRDEDTAVYYCGRGRENIYYGSRLDYWGQGTTVTVSSGGGGSGGGGSGGGGSDIQLTQSPSFLSASVGDRVTITCKASQNVDTNVAWYQQKPGKAPKALIYSASYRYSGVPSRFSGSGSGTDFTLTISSLQPEDFATYYCQQYNNYPFTFGQGTKLEIK

SEQ ID NO: 205236 - protein, 248 aa, Artificial Sequence
  Description of Artificial Sequence: Synthetic scFv sequence
QVQLQQSGAEVKKPGSSVKVSCKASGGTFSSYAISWVRQAPGQGLEWMGGIIPILGIANYAQKFQGRVTITADESTSTAYMELSSLRSEDTAVYYCARGGAGGSGSYYPLIWGQGTTVTVSSGGGGSGGGGSGGGGSEIVLTQSPATLSLSPGERATLSCGASQSVSSSYLAWYQQKPGQAPRLLIYDASSRATGIPARFSGSGSGTDFTLTISSLEPEDFAVYYCQQRSSWPPTWTFGQGTKLEIKR

SEQ ID NO: 205237 - protein, 244 aa, Artificial Sequence
  Description of Artificial Sequence: Synthetic scFv sequence
QVQLQQSGAEVKKPGSSVKVSCKASGGTFSSYAISWVRQAPGQGLEWMGGIIPILGIANYAQKFQGRVTITADESTSTAYMELSSLRSEDTAVYYCATGGSGRYALDIWGQGTMVTVSSGGGGSGGGGSGGGGSEIVLTQSPATLSLSPGERATLSCRASQSVSSYLAWYQQKPGQAPRLLIYDASNRATGIPARFSGSGSGTDFTLTISSLEPEDFAVYYCQQRSNWPPSYTFGQGTKLEIKR

SEQ ID NO: 205238 - protein, 242 aa, Artificial Sequence
  Description of Artificial Sequence: Synthetic scFv sequence
QVQLVQSGAEVKKPGSSVKVSCKASGGTFSSYAISWVRQAPGQGLEWMGGIIPILGTANYAQKFQGRVTITADESTSTAYMELSSLRSEDTAVYYCARWGGGAFDIWGQGTMVTVSSGGGGSGGGGSGGGGSEIVLTQSPGTLSLSPGERATLSCRASQSVGGYLAWYQQKPGQAPRLLIYDASNRATGIPARFSGSGSGTDFTLTISSLEPEDFAVYYCQQRNNWPPMYTFGQGTKLEIKR

SEQ ID NO: 205239 - protein, 406 aa, Artificial Sequence
  Description of Artificial Sequence: Synthetic scFv sequence
QEDERIVLVDNKCKCARISRIIRSSEDPNEDIVERIRIIVPLNNREISDPSPLRTRFVYHLSDLCKKCDPTEVELDNQIVTATQSNICDEDSATETCYTYDRNKCYTAVVPLVYGGETKMVETALTPDACYPDGGGGSGGGGSGGGGSQVQLQQSGAELARPGASVKMSCKASGYTFTRYTMHWVKQRPGQGLEWIGYINPSRGYTNYNQKFKDKATLTTDKSSSTAYMQLSSLTSEDSAVYYCARYYDDHYSLDYWGQGTTLTVSSGGGGSGGGGSGGGGSQIVLTQSPAIMSASPGEKVTMTCSASSSVSYMNWYQQKSGTSPKRWIYDSKLASGVPAHFRGSGSGSYSLISGMEAEDAATYYCQQWSSNPFTFGSGTKLEIKEQKLISEEDLNSAVDHHHHHH

SEQ ID NO: 205240 - protein, 558 aa, Artificial Sequence
  Description of Artificial Sequence: Synthetic scFv sequence
QVQLQQWGAGLLKPSETLSLTCAVYGGSFSGYYWSWIRQPPGKGLEWIGEINHSGSNYNPSLKSRVISVDSKNQFSLKLSSVTAADTAVYYCARGRMAWGASVNFDYWGQGTLVTVSSGSASAPTLFPLVSCENSPSDSSVAVGCLAQDFLPDSITFSWKYKNNSDISSTRGFPSVLRGGKYAASQVLLPSKDVMQGTDEHVVCKVQHPNGNKEKNVPLPVIAELPPKVSVFVPPRDGFFGNPRKSKLICQATGFSPRQIQVSWLREGKQVGSGVTTDQVQAEAKESGPTTYKVTSTLTIKESDWLSQSMFTCRVDHRGLTFQQNASSMCVPDQDTAIRVFAIPPSFASIFLTKSKLTCLVTDLTYDSVISWTRQNGEAVKTHTISESHPNAFSAVGEASICEDDWNSGERFTCTVTHDLPSPLKQISRPKGVALHRPDVYLLPPAREQLNLRESAICLVTGFSPADVFVQWMQRGQPLSPEKYVSAPMPEPQAPGRYFAHSILTVSEEEWNTGEYTCVVAHEALPNRVTERTVDKSTGKPTLYNVSLVMSDTAGTCY

SEQ ID NO: 205241 - protein, 246 aa, Artificial Sequence
  Description of Artificial Sequence: Synthetic scFv sequence
LLHESGAEVAKPGASVKMSCKASGYTFTTYWMHWIKQRPGQGLEWIGYINPSTGYTDYNQNFKDKATLTADKSSRTAYMQLSSLTSEDSTVYYCTRRGPSYGNHGAWFPYWGQGTLVTVSAVSSGGGGSGGGGSGGGGSTNIVMTQSPRSMSMSVGERVTLSCKASENVDTYVSWYQQKPEQSPKLLIYGASNRYTGVPDRFTGSGSATDFTLTISSVQAEDLADYHCGQSYRYPPTFGGGTKLEI

SEQ ID NO: 205242 - protein, 252 aa, Artificial Sequence
  Description of Artificial Sequence: Synthetic scFv sequence
RMAQVQLQQSGAELARPGASVKMSCKASGYTFTTYTIHWVRRRPGHDLEWIGYINPSSGCSDYNQNFKGKTTLTADKSSNTAYMQLNSLTSEDSAVYYCARRADYGNYEYTWFAYWGQGTTVTVSSSGGGSGGGGSGGGGSVIELTQSPKFMSTSVGDRVNVTYKASQNVGTNVAWFQQKPGQSPKVLIYSASYRYSGVPDRFTGSGSGTDFTLTISNVQSEDLAEYFCQQYHTYPLTFGGGTKLEIKRSDP

SEQ ID NO: 205243 - protein, 246 aa, Artificial Sequence
  Description of Artificial Sequence: Synthetic scFv sequence
EIVLTQSPGSLAVSPGERVTMSCKSSQSVFFSSSQKNYLAWYQQIPGQSPRLLIYWASTRESGVPDRFTGSGSGTDFTLTISSVQPEDLAIYYCHQYLSSRTFGQGTKLEIKRGGGGSGGGGSSGGGSQVQLQQPGAEVVKPGASVKMSCKASGYTFTSYYIHWIKQTPGQGLEWVGVIYPGNDDISYNQKFQGKATLTADKSSTTAYMQLSSLTSEDSAVYYCAREVRLRYFDVWGQGTTVTVSS

SEQ ID NO: 205244 - protein, 245 aa, Artificial Sequence
  Description of Artificial Sequence: Synthetic scFv sequence
EVQLVESGGGLVQPGGSLRLSCAASGFTFSSYAMSWVRQAPGKGLEWVSAISGSGGSTYYADSVKGRFTISRDNSKNTLYLQMNSLRAEDTAVYYCAKETDYYGSGTFDYWGQGTLVTVSSASGGGGSGGGGSGGGGSDIQMTQSPSSLSASVGDRVTISCRASQGIGIYLAWYQQRSGKPPQLLIHGASTLQSGVPSRFSGSGSGTDFTLTISSLQPEDFASYWCQQSNNFPPTFGQGTKVEIK

SEQ ID NO: 205245 - protein, 267 aa, Artificial Sequence
  Description of Artificial Sequence: Synthetic scFv sequence
MALPVTALLLPLALLLHAARPEVQLQQSGPELVKPGASVKISCKASGYTFTDYNMHWVKQSHGKSLEWIGYIYPYNGGTGYNQKFKSKATLTVDNSSSTAYMDVRSLTSEDSAVYYCARGRPAMDYWGQGTSVTVSSGGGGSGGGGSGGGGSDIVLTQSPASLAVSLGQRATISCRASESVDNYGISFMNWFQQKPGQPPKLLIYAASNQGSGVPARFSGSGSGTDFSLNIHPMEEDDTAMYFCQQSKEVPWTFGGGTKLEIKRSDP

SEQ ID NO: 205246 - protein, 266 aa, Artificial Sequence
  Description of Artificial Sequence: Synthetic scFv sequence
MALPVTALLLPLALLLHAARPEVQLVESGGGLVQPGGSLRLSCAASGFTFSSYAMSWVRQAPGKGLEWVSAISGSGGSTYYADSVKGRFTISRDNSKNTLYLQMNSLRAEDTAVYYCAKETDYYGSGTFDYWGQGTLVTVSSASGGGGSGGGGSGGGGSDIQMTQSPSSLSASVGDRVTISCRASQGIGIYLAWYQQRSGKPPQLLIHGASTLQSGVPSRFSGSGSGTDFTLTISSLQPEDFASYWCQQSNNFPPTFGQGTKVEIK

SEQ ID NO: 205247 - protein, 272 aa, Artificial Sequence
  Description of Artificial Sequence: Synthetic scFv sequence
MALPVTALLLPLALLLHAARPQVQLVQSGAEVKKPGASVRVSCKASGYIFTNYYVHWVRQAPGQGLEWMGIISPSGGSPTYAQRLQGRVTMTRDLSTSTVYMELSSLTSEDTAVYFCARESRLRGNRLGLQSSIFDHWGQGTLVTVSSASGGGGSGGGGSGGGGSDIRMTQSPPSLSASVGDRVTIPCQASQDINNHLNWYQQKPGKAPQLLIYDTSNLEIGVPSRFSGSGSGTDFTLTISSLQPEDIATYYCQQYENLPLTFGGGTKVEIK

SEQ ID NO: 205248 - protein, 266 aa, Artificial Sequence
  Description of Artificial Sequence: Synthetic scFv sequence
MALPVTALLLPLALLLHAARPQVQLVQSGAEVKKPGASVRVSCKASGYMFTDFFIHWVRQAPGQGLEWMGWINPNSGVTKYAQKFQGRVTMTRNTSISTAYMELSSLRSEDTAVYYCATWYSSGWYGIANIWGQGTMVTVSSASGGGGSGGGGSGGGGSDIQLTQSPSSLSASVGDRVTITCQASHDISNYLHWYQQKPGKAPKLLIYDASNLETGVPSRFTGSGSGTDFTLTIRSLQPEDVAAYYCQQSDDLPHTFGQGTKVDIK

SEQ ID NO: 205249 - protein, 265 aa, Artificial Sequence
  Description of Artificial Sequence: Synthetic scFv sequence
MALPVTALLLPLALLLHAARPQVQLVQSGAEVKKPGESLKISCKGSGYSFTNYWIGWVRQMPGKGLEWMGIIYPGDSDTRYSPSFQGQVTISADKSISTAYLQWSSLKASDTAMYYCARHGPSSWGEFDYWGQGTLVTVSSASGGGGSGGGGSGGGGSDIRLTQSPSSLSASVGDRVTITCRASQSISSYLNWYQQKPGKAPKLLIYAASSLQSGVPSRFSGSGSGTDFTLTISSLQPEDFATYYCQQSYSTPLTFGGGTKVDIK

SEQ ID NO: 205250 - protein, 271 aa, Artificial Sequence
  Description of Artificial Sequence: Synthetic scFv sequence
MALPVTALLLPLALLLHAARPQVQLVQSGAEVKKPGESLKISCKGSGYSFTSYWIGWVRQMPGKGLEWMGIIYPGDSDTRYSPSFQGQVTISADKSISTAYLQWSSLKASDTAMYYCARLGGSLPDYGMDVWGQGTMVTVSSASGGGGSGGGGSGGGGSEIVLTQSPLSLPVTPGEPASISCRSSQSLLHSNGYNYLDWYLQKPGQSPQLLIYLGSNRASGVPDRFSGSGSGTDFTLKISRVEAEDVGVYYCMQALQTLITFGQGTKVDIK

SEQ ID NO: 205251 - protein, 271 aa, Artificial Sequence
  Description of Artificial Sequence: Synthetic scFv sequence
MALPVTALLLPLALLLHAARPQVQLVQSGAEVKKPGESLKISCKGSGYSFTSYWIGWVRQMPGKGLEWMGIIYPGDSDTRYSPSFQGQVTISADKSITTAYLQWSSLRASDSAMYYCARGGYSDYDYYFDFWGQGTLVTVSSASGGGGSGGGGSGGGGSEIVMTQSPLSLPVTPGEPASISCRSSQSLLHSNGYNYLDWYLQKPGQSPQLLIYLGSNRASGVPDRFSGSGSGTDFTLKISRVEAEDVGVYYCMQALQTPFTFGGGTKVEIK

SEQ ID NO: 205252 - protein, 261 aa, Artificial Sequence
  Description of Artificial Sequence: Synthetic scFv sequence
MALPVTALLLPLALLLHAARPQVQLVQSGGDLAQPGRSLRLSCAASGFTFDDYAMHWVRQAPGKGLEWVAVIWPDGGQKYYGDSVKGRFTVSRDNPKNTLYLQMNSLRAEDTAIYYCVRHFNAWDYWGQGTLVTVSSASGGGGSGGGGSGGGGSDIQLTQSPSSLSAYVGGRVTITCQASQGISQFLNWFQQKPGKAPKLLISDASNLEPGVPSRFSGSGSGTDFTFTITNLQPEDIATYYCQQYDDLPLTFGGGTKVEIK

SEQ ID NO: 205253 - protein, 270 aa, Artificial Sequence
  Description of Artificial Sequence: Synthetic scFv sequence
MALPVTALLLPLALLLHAARPQVQLVQSGGGLVQPGGSLRLSCAASGFTFSSYAMSWVRQAPGKGLEWVSAISGSGGSTYYADSVKGRFTISRDNSKNTLYLQMNSLRAEDTAVYYCAKEDTIRGPNYYYYGMDVWGQGTTVTVSSASGGGGSGGGGSGGGGSETTLTQSPSSVSASVGDRVSITCRASQDIDTWLAWYQLKPGKAPKLLMYAASNLQGGVPSRFSGSGSGTDFILTISSLQPEDFATYYCQQASIFPPTFGGGTKVDIK

SEQ ID NO: 205254 - protein, 269 aa, Artificial Sequence
  Description of Artificial Sequence: Synthetic scFv sequence
MALPVTALLLPLALLLHAARPQVQLVQSGGGVVQPGKSLRLSCAASGFTFSIFAMHWVRQAPGKGLEWVATISYDGSNAFYADSVEGRFTISRDNSKDSLYLQMDSLRPEDTAVYYCVKAGDGGYDVFDSWGQGTLVTVSSASGGGGSGGGGSGGGGSEIVMTQSPLSLPVTPGEPASISCRSSQSLLHSNGYNYLDWYLQKPGQSPQLLIYLGSNRASGVPDRFSGSGSGTDFTLKISRVEAEDVGVYYCMQALQTPTFGPGTKVDIK

SEQ ID NO: 205255 - protein, 246 aa, Artificial Sequence
  Description of Artificial Sequence: Synthetic scFv sequence
NIMLTQSPSSLAVSAGEKVTMSCKSSQSVFFSSSQKNYLAWYQQIPGQSPKLLIYWASTRESGVPDRFTGSGSGTDFTLTISSVQSEDLAIYYCHQYLSSRTFGGGTKLEIKRGGGGSGGGGSSGGGSQVQLQQPGAEVVKPGASVKMSCKASGYTFTSYYIHWIKQTPGQGLEWVGVIYPGNDDISYNQKFKGKATLTADKSSTTAYMQLSSLTSEDSAVYYCAREVRLRYFDVWGAGTTVTVSS

SEQ ID NO: 205256 - protein, 251 aa, Artificial Sequence
  Description of Artificial Sequence: Synthetic scFv sequence
QVQLVQSGAEVKKPGASVRVSCKASGYIFTNYYVHWVRQAPGQGLEWMGIISPSGGSPTYAQRLQGRVTMTRDLSTSTVYMELSSLTSEDTAVYFCARESRLRGNRLGLQSSIFDHWGQGTLVTVSSASGGGGSGGGGSGGGGSDIRMTQSPPSLSASVGDRVTIPCQASQDINNHLNWYQQKPGKAPQLLIYDTSNLEIGVPSRFSGSGSGTDFTLTISSLQPEDIATYYCQQYENLPLTFGGGTKVEIK

SEQ ID NO: 205257 - protein, 245 aa, Artificial Sequence
  Description of Artificial Sequence: Synthetic scFv sequence
QVQLVQSGAEVKKPGASVRVSCKASGYMFTDFFIHWVRQAPGQGLEWMGWINPNSGVTKYAQKFQGRVTMTRNTSISTAYMELSSLRSEDTAVYYCATWYSSGWYGIANIWGQGTMVTVSSASGGGGSGGGGSGGGGSDIQLTQSPSSLSASVGDRVTITCQASHDISNYLHWYQQKPGKAPKLLIYDASNLETGVPSRFTGSGSGTDFTLTIRSLQPEDVAAYYCQQSDDLPHTFGQGTKVDIK

SEQ ID NO: 205258 - protein, 244 aa, Artificial Sequence
  Description of Artificial Sequence: Synthetic scFv sequence
QVQLVQSGAEVKKPGESLKISCKGSGYSFTNYWIGWVRQMPGKGLEWMGIIYPGDSDTRYSPSFQGQVTISADKSISTAYLQWSSLKASDTAMYYCARHGPSSWGEFDYWGQGTLVTVSSASGGGGSGGGGSGGGGSDIRLTQSPSSLSASVGDRVTITCRASQSISSYLNWYQQKPGKAPKLLIYAASSLQSGVPSRFSGSGSGTDFTLTISSLQPEDFATYYCQQSYSTPLTFGGGTKVDIK

SEQ ID NO: 205259 - protein, 250 aa, Artificial Sequence
  Description of Artificial Sequence: Synthetic scFv sequence
QVQLVQSGAEVKKPGESLKISCKGSGYSFTSYWIGWVRQMPGKGLEWMGIIYPGDSDTRYSPSFQGQVTISADKSISTAYLQWSSLKASDTAMYYCARLGGSLPDYGMDVWGQGTMVTVSSASGGGGSGGGGSGGGGSEIVLTQSPLSLPVTPGEPASISCRSSQSLLHSNGYNYLDWYLQKPGQSPQLLIYLGSNRASGVPDRFSGSGSGTDFTLKISRVEAEDVGVYYCMQALQTLITFGQGTKVDIK

SEQ ID NO: 205260 - protein, 250 aa, Artificial Sequence
  Description of Artificial Sequence: Synthetic scFv sequence
QVQLVQSGAEVKKPGESLKISCKGSGYSFTSYWIGWVRQMPGKGLEWMGIIYPGDSDTRYSPSFQGQVTISADKSITTAYLQWSSLRASDSAMYYCARGGYSDYDYYFDFWGQGTLVTVSSASGGGGSGGGGSGGGGSEIVMTQSPLSLPVTPGEPASISCRSSQSLLHSNGYNYLDWYLQKPGQSPQLLIYLGSNRASGVPDRFSGSGSGTDFTLKISRVEAEDVGVYYCMQALQTPFTFGGGTKVEIK

SEQ ID NO: 205261 - protein, 240 aa, Artificial Sequence
  Description of Artificial Sequence: Synthetic scFv sequence
QVQLVQSGGDLAQPGRSLRLSCAASGFTFDDYAMHWVRQAPGKGLEWVAVIWPDGGQKYYGDSVKGRFTVSRDNPKNTLYLQMNSLRAEDTAIYYCVRHFNAWDYWGQGTLVTVSSASGGGGSGGGGSGGGGSDIQLTQSPSSLSAYVGGRVTITCQASQGISQFLNWFQQKPGKAPKLLISDASNLEPGVPSRFSGSGSGTDFTFTITNLQPEDIATYYCQQYDDLPLTFGGGTKVEIK

SEQ ID NO: 205262 - protein, 249 aa, Artificial Sequence
  Description of Artificial Sequence: Synthetic scFv sequence
QVQLVQSGGGLVQPGGSLRLSCAASGFTFSSYAMSWVRQAPGKGLEWVSAISGSGGSTYYADSVKGRFTISRDNSKNTLYLQMNSLRAEDTAVYYCAKEDTIRGPNYYYYGMDVWGQGTTVTVSSASGGGGSGGGGSGGGGSETTLTQSPSSVSASVGDRVSITCRASQDIDTWLAWYQLKPGKAPKLLMYAASNLQGGVPSRFSGSGSGTDFILTISSLQPEDFATYYCQQASIFPPTFGGGTKVDIK

SEQ ID NO: 205263 - protein, 248 aa, Artificial Sequence
  Description of Artificial Sequence: Synthetic scFv sequence
QVQLVQSGGGVVQPGKSLRLSCAASGFTFSIFAMHWVRQAPGKGLEWVATISYDGSNAFYADSVEGRFTISRDNSKDSLYLQMDSLRPEDTAVYYCVKAGDGGYDVFDSWGQGTLVTVSSASGGGGSGGGGSGGGGSEIVMTQSPLSLPVTPGEPASISCRSSQSLLHSNGYNYLDWYLQKPGQSPQLLIYLGSNRASGVPDRFSGSGSGTDFTLKISRVEAEDVGVYYCMQALQTPTFGPGTKVDIK

SEQ ID NO: 205264 - protein, 511 aa, Artificial Sequence
  Description of Artificial Sequence: Synthetic scFv sequence
QVQLVQSGAEVKKPGESVKVSCKASGYTFTNYGMNWVKQAPGQGLEWMGWINTYTGEPTYADKFQGRVTMTTDTSTSTAYMEIRNLGGDDTAVYYCARWSWSDGYYVYFDYWGQGTSVTVSSGGGGSGGGGSGGGGSDIVMTQSPDSLTVSLGERTTINCKSSQSVLDSSTNKNSLAWYQQKPGQPPKLLLSWASTRESGIPDRFSGSGSGTDFTLTIDSPQPEDSATYYCQQSAHFPITFGQGTRLEIKSGGGGSEVQLVESGGGLVQPGGSLKLSCAASGFTFNKYAMNWVRQAPGKGLEWVARIRSKYNNYATYYADSVKDRFTISRDDSKNTAYLQMNNLKTEDTAVYYCVRHGNFGNSYISYWAYWGQGTLVTVSSGGGGSGGGGSGGGGSQTVVTQEPSLTVSPGGTVTLTCGSSTGAVTSGNYPNWVQQKPGQAPRGLIGGTKFLAPGTPARFSGSLLGGKAALTLSGVQPEDEAEYYCVLWYSNRWVFGGGTKLTVLHHHHHH

SEQ ID NO: 205265 - protein, 728 aa, Artificial Sequence
  Description of Artificial Sequence: Synthetic scFv sequence
QVQLVQSGAEVKKPGESVKVSCKASGYTFTNYGMNWVKQAPGQGLEWMGWINTYTGEPTYADKFQGRVTMTTDTSTSTAYMEIRNLGGDDTAVYYCARWSWSDGYYVYFDYWGQGTSVTVSSGGGGSGGGGSGGGGSDIVMTQSPDSLTVSLGERTTINCKSSQSVLDSSTNKNSLAWYQQKPGQPPKLLLSWASTRESGIPDRFSGSGSGTDFTLTIDSPQPEDSATYYCQQSAHFPITFGQGTRLEIKSGGGGSEVQLVESGGGLVQPGGSLKLSCAASGFTFNKYAMNWVRQAPGKGLEWVARIRSKYNNYATYYADSVKDRFTISRDDSKNTAYLQMNNLKTEDTAVYYCVRHGNFGNSYISYWAYWGQGTLVTVSSGGGGSGGGGSGGGGSQTVVTQEPSLTVSPGGTVTLTCGSSTGAVTSGNYPNWVQQKPGQAPRGLIGGTKFLAPGTPARFSGSLLGGKAALTLSGVQPEDEAEYYCVLWYSNRWVFGGGTKLTVLAPELLGGPSVFLFPPKPKDTLMISRTPEVTCVVVDVSHEDPEVKFNWYVDGVEVHNAKTKPREEQYGSTYRVVSVLTVLHQDWLNGKEYKCKVSNKALPAPIEKTISKAKGQPREPQVTTLPPSREEMTKNQVSLTCLVKGFYPSDIAVEWESNGQPENNYDTTPPVLDSDGSFFLYSDLTVDKSRWQQGNVFSCSVMHEALHNHYTQKSLSLSPGKHHHHHH

SEQ ID NO: 205266 - protein, 728 aa, Artificial Sequence
  Description of Artificial Sequence: Synthetic scFv sequence
QVQLVQSGAEVKKPGESVKVSCKASGYTFTNYGMNWVKQAPGQGLEWMGWINTYTGEPTYADKFQGRVTMTTDTSTSTAYMEIRNLGGDDTAVYYCARWSWSDGYYVYFDYWGQGTSVTVSSGGGGSGGGGSGGGGSDIVMTQSPDSLTVSLGERTTINCKSSQSVLDSSTNKNSLAWYQQKPGQPPKLLLSWASTRESGIPDRFSGSGSGTDFTLTIDSPQPEDSATYYCQQSAHFPITFGQGTRLEIKSGGGGSEVQLVESGGGLVQPGGSLKLSCAASGFTFNKYAMNWVRQAPGKGLEWVARIRSKYNNYATYYADSVKDRFTISRDDSKNTAYLQMNNLKTEDTAVYYCVRHGNFGNSYISYWAYWGQGTLVTVSSGGGGSGGGGSGGGGSQTVVTQEPSLTVSPGGTVTLTCGSSTGAVTSGNYPNWVQQKPGQAPRGLIGGTKFLAPGTPARFSGSLLGGKAALTLSGVQPEDEAEYYCVLWYSNRWVFGGGTKLTVLAPELLGGPSVFLFPPKPKDTLMISRTPEVTCVVVDVSHEDPEVKFNWYVDGVEVHNAKTKPREEQYNSTYRVVSVLTVLHQDWLNGKEYKCKVSNKALPAPIEKTISKAKGQPREPQVTTLPPSREEMTKNQVSLTCLVKGFYPSDIAVEWESNGQPENNYDTTPPVLDSDGSFFLYSDLTVDKSRWQQGNVFSCSVMHEALHNHYTQKSLSLSPGKHHHHHH

SEQ ID NO: 205267 - protein, 214 aa, Artificial Sequence
  Description of Artificial Sequence: Synthetic scFv sequence
DIQMTQSPSSLSVSVGERVTITCRASENIRSNLAWYQQKPGKSPKLLVNVATNLADGVPSRFSGSGSGTDYSLKINSLQPEDFGTYYCQHYWGTTWTFGQGTKLEIKRTVAAPSVFIFPPSDEQLKSGTASVVCLLNNFYPREAKVQWKVDNALQSGNSQESVTEQDSKDSTYSLSSTLTLSKADYEKHKVYACEVTHQGLSSPVTKSFNRGEC

SEQ ID NO: 205268 - protein, 115 aa, Artificial Sequence
  Description of Artificial Sequence: Synthetic scFv sequence
QVQVQESGPGLVAPSQTLSITCTVSGFSLTTSGVSWVRQPPGKGLEWLGVIWGDGSTNYHSSLKSRLSIKKDHSKSQVFLKLNSLTAADTATYYCAKGGYSLAHWGQGTLVTVSS

SEQ ID NO: 205269 - protein, 68 aa, Artificial Sequence
  Description of Artificial Sequence: Synthetic scFv sequence
FWVLVVVGGVLACYSLLVTVAFIIFWVRSKRSRLLHSDYMNMTPRRPGPTRKHYQPYAPPRDFAAYRS

SEQ ID NO: 205270 - protein, 234 aa, Artificial Sequence
  Description of Artificial Sequence: Synthetic scFv sequence
QVNLRESGGGLVQPGGFLRLSCAAFGFTFSGYWMSWVHPAPGKGLEWVANIKQDGSEKFYVDSVKGRFTISRDNAKNSLFLQMNSLRAEDTAVYFCARGLLSDYWGQGTLVPVSSGGGGSGGGGSGGGGSNFMLTQPPSVSVAPGKTASLTCGGYNIGTKSVHWYQQKPGQAPWWHDDSDRPSGIPERFSGSNSGTTATLIIRVEAGDEADYYCQAWDSISEEWFGGGTKLTVL

SEQ ID NO: 205271 - protein, 243 aa, Artificial Sequence
  Description of Artificial Sequence: Synthetic scFv sequence
QVQLLESGGGWQPGTSLRLSCAASGFTFSNYAINWVRQAAGKGLEWVSGISGSGVSTSYADSVKGRFTVSRDNSKNTLYLQMNSLRVEDTALYYCAKNGGGPEYLQHWGQGTLVTVSSGGGGSGGGGSGGGGSQSVLTQPPSASGTPGQRVTISCSGSSSNIGNNTVNWSRQLPGTAPKLLIYSNDQRPSGVPDRFSGSKSGTSASLAITGLQPEDEADYYCGTWDSSLSAYVFGTGTKLTVL

SEQ ID NO: 205272 - protein, 240 aa, Artificial Sequence
  Description of Artificial Sequence: Synthetic scFv sequence
QVQLLQSAGGLVQPGGSLRLSCAASGFTFSTYAMNWVRQAPGKGLEWVSGISGSGGSTNYADSVKGRFTISRDSSKNTLFLQMNSLRAEDTAVYYCAKDYGSGWYDYWGQGTLVTVSSGGGGSGGGGSGGGGSSSELTQDPAVSVALGQTVRITCQGDSLRSYYASWYQERPGQAPLLVIYGRNERPSGIPDRFSASSSGNTASLTITGAQAEDEADYYCQVWDSFNEQWFGGGTKLTVL

SEQ ID NO: 205273 - protein, 245 aa, Artificial Sequence
  Description of Artificial Sequence: Synthetic scFv sequence
QVQLLQSGGGLVQPGGSLRLSCAASGFTFSSYAMSWVRQAPGKGLEWVSAISGSGGSTYYTDSVKGRFTISRDNSKNTLYLQMNSLRAEDTAVYYCAKSHDYGDYAGFDYWGQGTLVTVSSGGGGSGGGGSGGGGSHVILTQDPAVSVALGQTVRITCQGDSLKSYYASWYQQKPGQAPVLVIYGKNNRPSGIPDRFSGSSSGTTASLTITGAQAEDEADYYCHSRDSSGTHLRVFGGGTKLTVL

SEQ ID NO: 205274 - protein, 241 aa, Artificial Sequence
  Description of Artificial Sequence: Synthetic scFv sequence
QVQLQESGGGLVKPGESLRLSCAASGFTFSDHYMDWVRQAPGKGLEWVAYIRYDGSTKYYADSVKGRFTISRDNSKNTLYLQMNSLRPEDTAFYYCARLIAEAEGWFDPWGQGTLVTVSSGGGGSGGGGSGGGGSNFMLTQPPSVSVAPGKTARITCGGNNIGSKSVYWYQQKPGQAPVLWYDDSDRPSGIPERFSGSNSGNTATLTISRVEAGDEADYYCQVWDSSSDHWFGGGTKVTVL

SEQ ID NO: 205275 - protein, 242 aa, Artificial Sequence
  Description of Artificial Sequence: Synthetic scFv sequence
QVQLQESGGGLVKPGGPLRLSCAASGFTFSSYGMYWVRQAPGKGLEWVSTLSRSGSGTYYADSVKGRFTISRBNSKNTLYLQMNSLRAEDTAVYYCASIAVAGNYFDYWGQGTLVTVSSGGGGSGGGGSGGGGSSYVLTQDPAVSVALGQTVRITCQGDSLRSYYASWYQERPGQAPLLVIYGKNNRPSGIPDRFSGSNSGSTATLTISRVEAGDEGDYYCQVWDSINEQVVFGGGTKVTVL

SEQ ID NO: 205276 - protein, 241 aa, Artificial Sequence
  Description of Artificial Sequence: Synthetic scFv sequence
QVQLQESGGGLVKPGGPLRLSCAASGFTFSSYGMYWVRQAPGKGLEWVSTLSRSGSGTYYAESVKGRFTISRDNSKNTLYFQMNSLRAEDTAVYYCASIAVAGNYFEYWGQGTLVTVSSGGGGSGGGGSGGGGSSYVLTQDPAVSVALGQTVRITCQGDSLRSYYASWYQERPGQAPLLVIYGKNNRPSGIPDRFSGSNSGSTATLTISRVEAGDEGDYYCQVWDSINEQWFGGGTKVTVL

SEQ ID NO: 205277 - protein, 244 aa, Artificial Sequence
  Description of Artificial Sequence: Synthetic scFv sequence
QVQLQESGGGLVKPGGSLRLSCAASGFTFSNAWMNWVRQAPGKGLEWVGRIKSKTDEGTTDYAAPVKGRFSISRDDSKNTLYLQMNSLKTEDTGVYYCTATKGLGGSKLGQGTLVTVSSGGGGSGGGGSGGGGSQSVLTQPPSASGTPGQRVTISCSGSSSNIGNNTVNWSRQLPGTAPKLLIYSNDQRPSGVPDRFSGSKSGTSASLAITGLQPEDEADYYCGTWDSSLSAYVFGTGTKLTVL

SEQ ID NO: 205278 - protein, 245 aa, Artificial Sequence
  Description of Artificial Sequence: Synthetic scFv sequence
QVQLQESGGGLVKPGGSLRLSCAASGFTSSSYAMHWVRQAPGKGLEYVSAIGGNGGTYYADSVKGRFTISRDNSKNTLYLQMNSLRAEDTAVYYCAKEGEQWLEYRYYYGMDVWGQGTTVTVSSGGGGSGGGGSGGGGSSSELTQDPAVSVALGQTVRITCQGDSLRSYYASWYQQKPGQAPSLVIYGENSRPSGIPDRFSGSSSGNTASLTITGAQAENEADYYCQAWDSSTAWFGGGTKLTVL

SEQ ID NO: 205279 - protein, 243 aa, Artificial Sequence
  Description of Artificial Sequence: Synthetic scFv sequence
QVQLQESGGGLVQLGGSLRLSCAASGFTFSSYAMSWVRQAPGKGLEWVSAISGSGGSTYYADSVKGRFTISRDNSKNTLYLQMSSLRAEDTAFYYCANSAYTGGWYDYWGHGTLVTVSSGGGGSGGGGSGGGGSSSELTQDPAVSVALGQTVKITCQGDSLRTYYASWYQQRPGQAPVLVIYGENSRPSGIPDRFSGSSSGNTASLTITGAQAEDEADYYCNSRDSSGNHLRVFGGGTKLTVL

SEQ ID NO: 205280 - protein, 245 aa, Artificial Sequence
  Description of Artificial Sequence: Synthetic scFv sequence
QVQLQESGGGLVQPGGSLRLSCAASGFTFSSYAMSWVRQAPGKGLEWVAVISYDGSNKYYADSVKGRFTISRDNSKNTLYLQMNSLRAEDTAVYYCVRGDRSYGAEYFQHWGQGTLVTVSSGGGGSGGGGSGGGGSSSELTQDPAVSVASGQTVRITCQGDSLRSYYASWYQQKPGQAPLLVIYGKNIRPSGIPDRFSGSTSGNSASLTITGAQAEDEADYYCNSRDSSGNRNWVFGGGTKLTVL

SEQ ID NO: 205281 - protein, 238 aa, Artificial Sequence
  Description of Artificial Sequence: Synthetic scFv sequence
QVQLQESGGGLVQPGGSLRLSCAASGTFSSYAMHWVRQAPGKGLEWVAVISYDGSNKYYADSVKGRFTISRDNSKNTLYLQMNSLRAEDTAVYYCARFSSGWYYFDYWGQGTLVTVSSGGGGSGGGGSGGGGSDIQMTQSPSFLSASVGDRITITCRASNDISSYFAWYQQKPGKAPKPLIYAASTLQSGVPSRFSGSGTEFTLTISSLQPEDFATYYCQQLGSYPLTFGGGTKLEIK

SEQ ID NO: 205282 - protein, 239 aa, Artificial Sequence
  Description of Artificial Sequence: Synthetic scFv sequence
QVQLQESGGGLVQPGGSLRLSCSASGFTFGTYAMRWVRQTSGKGLEWVSGIGVSGDAYYTDSVRGRFTISRDNSKNTLYLQMNTLRAEDTAYYCTRKSSTTSNDYWGRGTLVTVSSGGGGSGGGGSGGGGSSYVLTQDPAVSVALGQTVRITCQGDNIGSKSVHWYQQKPGQAPVLVVYDDSDRPSGIPERFSGSNSGTTATLTISSVEAGDEADYYCQAWDSISEHVIFGGGTKVTVL

SEQ ID NO: 205283 - protein, 237 aa, Artificial Sequence
  Description of Artificial Sequence: Synthetic scFv sequence
QVQLQESGGTLVQPGGSLRLSCAASGFTFSSYAMSWVRQAPGRGLEWVSTISGSGGSTYYADSVKGRFTISRDNSKNTLYLQMNSLRAEDTAVYYCAKGAYSGSHWGQGTLVTVSSGGGGSGGGGSGGGGSSSELTQDPAVSVALGQTVRITCQGDSLRSYYASWYQQKPGQAPSLVIYGENSRPSGIPDRFSGSSSGNTASLTITGAQAENEADYYCQAWDSSTAWFGGGTKLTVL

SEQ ID NO: 205284 - protein, 235 aa, Artificial Sequence
  Description of Artificial Sequence: Synthetic scFv sequence
QVQLQESGGTLVQPGGSLRLSCAASGFTFSSYAMSWVRQAPGRGLEWVSTISGSGGSTYYADSVKGRFTISRDNSKNTLYLQMNSLRAEDTAVYYCAKGAYSGSYWGQGTLVTVSSGGGGSGGGGSGGGGSSSELTQDPAVSVALGQTVRITCQGDSLRSYYASWYQQKPGQAPSLVIYGENSRPSGIPDRFSGSSSGNTASLIGAQAENEADYYCQAWDSSTAWFGGGTKLTVL

SEQ ID NO: 205285 - protein, 244 aa, Artificial Sequence
  Description of Artificial Sequence: Synthetic scFv sequence
QVQLVESGAEVKKPGASVKVSCKASGYTFTSYGISWVRQAPGQGLEWMGWISAYNGNTNYAQKLQGRVTMTTDTSTSTAYMELRSLRSDDTAVYYCARPIYDSSGYDAFDIWGQGTMVTVSSGGGGSGGGGSGGGGSDIVMTQSPSTLSASIGDRVTITCRASEGIYHWLAWYQQKPGKAPKLLIYKASSLASGAPSRFSGSGSGTDFTLTISSLQPDDFATYYCQQYHTISRTFGPGTKVDIK

SEQ ID NO: 205286 - protein, 244 aa, Artificial Sequence
  Description of Artificial Sequence: Synthetic scFv sequence
QVQLVESGGGLVKPGGSLRLSCAASGFTFSSYAMHWVRQAPGKGLEWVAVISYDGSNKYYADSVKGRFTISRDNSKNTLYLQMNSLRAEDTAVYFCVRPSDSGWSFEHWGQGTLVPVSSGGGGSGGGGSGGGGSQSVLTQPPSASGTPGQRVTISCSGSSSNIGNNTVNWSRQLPGTAPKLLIYSNDQRPSGVPDRFSGSKSGTSASLAITGLQPEDEADYYCGTWDSSLSAYVFGTGTKLTVL

SEQ ID NO: 205287 - protein, 237 aa, Artificial Sequence
  Description of Artificial Sequence: Synthetic scFv sequence
QVQLVESGGGLVQPGGSLRLSCAASGFTFSSYAMGWVRQAPGKGLEWVSAISGSGGSTYYADSVKGRFTISRDNSKDTLYLQMNSLRAEDTAVYYCASRSLLDYWGQGTLVTVSSGGGGSGGGGSGGGGSNFMLTQDPAVSVALGQTVRITCQGDSLRSYYASWYQQKPGQAPLLVIYGKNNRPSGIPDRFSGSSSGNTASLTITGAQAEDEADYYCNSRDSSGNPVFGGGTKVTVL

SEQ ID NO: 205288 - protein, 245 aa, Artificial Sequence
  Description of Artificial Sequence: Synthetic scFv sequence
QVQLVESGGGLVQPGGSLRLSCAASGFTFSSYAMSWVHQAPGKGLEWVSAISGSGGSTYYADSVKGRFTISRDNSKNTLYLQMNSLRAEDTAVYYCAKTYYGFWSGYYDYLGQGTLVTVSSGGGGSGGGGSGGGGSSSELTQDPAVSVGLGQTVTITCQGDSLRSYYANWYQQKPGQAPILVIYGENNRPSGIPDRFSGSSSGNTASLTITGAQAEDEADYYCHSRDSSGTHLRVFGGGTKLTVL

SEQ ID NO: 205289 - protein, 237 aa, Artificial Sequence
  Description of Artificial Sequence: Synthetic scFv sequence
QVQLVESGGGLVQPGGSLRLSCAASGFTFSSYAMSWVRQAPGKGLEWVSAISGSGGSTYYADSVKGRFTISRDNSKDTLYLQMNSLRAEDTAVYYCASRSLLDYWGQGTLVTVSSGGGGSGGGGSGGGGSNFMLTQDPAVSVALGQTVRITCQGDSLRSYYASWYQQKPGQAPLLVIYGKNNRPSGIPDRFSGSSSGNTASLTITGAQAEDEADYYCNSRDSSGNPVFGGGTKVTVL

SEQ ID NO: 205290 - protein, 244 aa, Artificial Sequence
  Description of Artificial Sequence: Synthetic scFv sequence
QVQLVESGGGWQPGRSLRLSCAASGFTFSSFGMHWVRRAPGKGLEWVAVISYDGSNQYYADSVKGRFTISRDNSKNTLYLQMNSLRAEDTAVYYCGSRPGGGYASGSTVAYWGQGTPVTVSSGGGGSGGGGSGGGGSSSELTQDPAVSVALGQTVRITCQGDSLRSYYASWYQQKPGQAPLLVIYGQNIRPSGIPDRFSGSSSGNSASLTITGAQAEDEADYYCHSRDSSGKYVFGVGTKVTVL

SEQ ID NO: 205291 - protein, 247 aa, Artificial Sequence
  Description of Artificial Sequence: Synthetic scFv sequence
QVQLVESGGGWQPGRSLRLSCTASGFTFSSYGMHWVRQAPGKGLEWVAVISYDGSNKYYADSVKGRFTISRDNSKNTLYLQMNSLRAEDTAVYYCARGGRYSSNWFSYYYYGMDVWGQGTTVTVSSGGGGSGGGGSGGGGSNFMLTQPPSVSVAPGKTARITCGGNNIGSKSVYWYQQKPGQAPVLWYDDSDRPSGIPERFSGSNSGNTATLTISRVEAGDEADYYCQVWDSSSDHWFGGGTKVTVL

SEQ ID NO: 205292 - protein, 241 aa, Artificial Sequence
  Description of Artificial Sequence: Synthetic scFv sequence
QVQLVQSGGGVVQPGRSLRLSCAATGIPFSGSGMHWVRQAPGKGLEWVTMIWYDGSNKFYADSVKGRFTISRDNSKNTLYLQMDSLRAEDTAVYFCARDKGVRSMDVWGLGTTVTVSSGGGGSGGGGSGGGGSNFMLTQPPSVSVAPGQTAKITCDGYSIRTKSVHWYQQKPGQAPVVVVHDDSDRPSGIPERFSGSNSGTTATLTISRVEAGDEADYYCQAWDSISEEVVFGGGTKLTVL

SEQ ID NO: 205293 - protein, 324 aa, Artificial Sequence
  Description of Artificial Sequence: Synthetic scFv sequence
MALPVTALLLPLALLLHAARPDIQVTQSPSSLSASLGERISLTCRTSQDISNYLNWFQQKPDGTFKRLIYATSSLDSGVPKRFSGSGSGSDYSLTISSLESEDFADYYCLQYASYPFTFGSGTKLEIKGGGGSGGGGSGGGGSEVQLQESGPGLVKPSQTLSLTCSVTGYSITSGYYWHWIRQFPGNKLQWMGYISYSGFTNYKTSLINRISITHDTSENQFFLNLNSVTTEDTATYYCAGDRTGSWFAYWGQGTLVTVSATTTPAPRPPTPAPTIASQPLSLRPEACRPAAGGAVHTRGDFACDIYIWAPLAGTLSLVITLYC

SEQ ID NO: 205294 - protein, 252 aa, Artificial Sequence
  Description of Artificial Sequence: Synthetic scFv sequence
DIVLTQSPASLAVSLGQRATISCKASQSVDYDGDGYMDWYQQKPGQPPKLLIFAASNLKSGIPARFSGSGSGTDFTLNIHPVEEEDAATYYCQQTNEYPWTFGGGTKLEIKGSTSGSGKPGSGEGSTKGQIQLVQSGPELKKPGETVKISCKASGYTFTDYSMHWVKQAPGEGLKWMGWINTETGEPTYADDFKGRFAFSLETSASTAYLQINNLKNEDTATYFCYYGSYWGQGTLVTVSAGGGGSGGGGSC

SEQ ID NO: 205295 - protein, 213 aa, Artificial Sequence
  Description of Artificial Sequence: Synthetic scFv sequence
DIQLTQSPSSLSASVGDRVTITCKASQDVGTSVAWYQQKPGKAPKLLIYWTSTRHTGVPSRFSGSGSGTDFTFTISSLQPEDIATYYCQQYSLYRSFGQGTKVEIKRTVAAPSVFIFPPSDEQLKSGTASVVCLLNNFYPREAKVQWKVDNALQSGNSQESVTEQDSKDSTYSLSSTLTLSKADYEKHKVYACEVTHQGLSSPVTKSFNRGEC

SEQ ID NO: 205296 - protein, 257 aa, Artificial Sequence
  Description of Artificial Sequence: Synthetic scFv sequence
MSVPTQVLGLLLLWLTGARCDIQMTQSPASLSASVGDTVTITCRASENIYSYLAWYQQKQGKSPQLLVYNAKALSEGVPSRFSGSGSGTQFSLRINSLQPEDFGDYYCQHHYNSPYTFGGGTKLEIKGSTSGSGKSSEGKGQIQLVQSGPELKKPGETVKISCKASGYSFTNDGINWVKQAPGKGFKYMGWINTITGEPTYTEDFKGRFAFSLETSASTAYLQINNLKDEDTATFFCAKGTGTSAYWGQGTLVTVSA

SEQ ID NO: 205297 - protein, 256 aa, Artificial Sequence
  Description of Artificial Sequence: Synthetic scFv sequence
DILLTQSPVILSVSPGERVSFSCRASQSIGTNIHWYQQRTNGSPRLLIKYASESISGIPSRFSGSGSGTDFTLSINSVESEDIADYYCQQNNNWPTTFGAGTKLELKRGSTSGSGKPGSGEGSTKGQVQLKQSGPGLVQPSQSLSITCTVSGFSLTNYGVHWVRQSPGKGLEWLGVIWSGGNTDYNTPFTSRLSINKDNSKSQVFFKMNSLQSNDTAIYYCARALTYYDYEFAYWGQGTLVTVSAGGGGSGGGGSC

SEQ ID NO: 205298 - protein, 234 aa, Artificial Sequence
  Description of Artificial Sequence: Synthetic scFv sequence
DIQMTQSPSSLSASVGDRVTITCKAGQNVGTSVAWFQQKPGKAPKSLIYSASYRYSGVPSRFSGSGSGTDFTLTISSLQPEDFATYYCQQYITYPYTFGGGTKVEIKGGGGSGGGGSGGGGSEVQLLESGGGLVQPGGSLRLSCAASGFTFSRYWMSWVRQAPGKGLEWVSEINPDSSTIQYTPSLKARFTISRDNSKNTLYLQMNSLRAEDTAVYYCTGPAYWGQGTLVTVSS

SEQ ID NO: 205299 - protein, 249 aa, Artificial Sequence
  Description of Artificial Sequence: Synthetic scFv sequence
EIVLTQSPATLSLSPGERATLSCSVSSSISSSNLHWYQQKPGQAPRLLIYGTSNLASGIPARFSGSGSGTDFTLTISSLEPEDFAVYYCQQWSSYPHTFGGGTKVEIKGGGGSGGGGSGGGGSQVQLVQSGAEVKKPGASVKVSCKASGYTFTNYLIEWVRQAPGQGLEWMGLINPGSGGTNYNEKFKGRVTMTTDTSTSTAYMELRSLRSDDTAVYYCARRSPLGSWIYYAYDGVAYWGQGTLVTVSS

SEQ ID NO: 205300 - protein, 480 aa, Artificial Sequence
  Description of Artificial Sequence: Synthetic scFv sequence
MALPVTALLLPLALLLHAARPDIQMTQSPSSLSASVGDRVTITCKAGQNVGTSVAWFQQKPGKAPKSLIYSASYRYSGVPSRFSGSGSGTDFTLTISSLQPEDFATYYCQQYITYPYTFGGGTKVEIKGGGGSGGGGSGGGGSEVQLLESGGGLVQPGGSLRLSCAASGFTFSRYWMSWVRQAPGKGLEWVSEINPDSSTIQYTPSLKARFTISRDNSKNTLYLQMNSLRAEDTAVYYCTGPAYWGQGTLVTVSSSSTTTPAPRPPTPAPTIASQPLSLRPEACRPAAGGAVHTRGLDFACDIYIWAPLAGTCGVLLLSLVITLYCKRGRKKLLYIFKQPFMRPVQTTQEEDGCSCRFPEEEEGGCELRVKFSRSADAPAYKQGQNQLYNELNLGRREEYDVLDKRRGRDPEMGGKPRRKNPQEGLYNELQKDKMAEAYSEIGMKGERRRGKGHDGLYQGLSTATKDTYDALHMQALPPR

SEQ ID NO: 205301 - protein, 493 aa, Artificial Sequence
  Description of Artificial Sequence: Synthetic scFv sequence
MALPVTALLLPLALLLHAARPEIVLTQSPATLSLSPGERATLSCSVSSSISSSNLHWYQQKPGQAPRLLIYGTSNLASGIPARFSGSGSGTDFTLTISSLEPEDFAVYYCQQWSSYPHTFGGGTKVEIKGGGGSGGGGSGGGGSQVQLVQSGAEVKKPGASVKVSCKASGYTFTNYLIEWVRQAPGQGLEWMGLINPGSGGTNYNEKFKGRVTMTTDTSTSTAYMELRSLRSDDTAVYYCARRSPLGSWIYYAYDGVAYWGQGTLVTVSSTTTPAPRPPTPAPTIASQPLSLRPEACRPAAGGAVHTRGLDFACDIYIWAPLAGTCGVLLLSLVITLYCKRGRKKLLYIFKQPFMRPVQTTQEEDGCSCRFPEEEEGGCELRVKFSRSADAPAYKQGQNQLYNELNLGRREEYDVLDKRRGRDPEMGGKPRRKNPQEGLYNELQKDKMAEAYSEIGMKGERRRGKGHDGLYQGLSTATKDTYDALHMQALPPR

SEQ ID NO: 205302 - protein, 242 aa, Artificial Sequence
  Description of Artificial Sequence: Synthetic scFv sequence
SQVQLQQPGAELVRPGASVKLSCKASGYSFTTYWMNWVKQRPGQGLEWIGMIHPSDSETRLNQKFKDKATLTVDKSSSTAYMQLSSPTSEDSAVYYCARSTMIATRAMDYWGQGTSVTVSGGGGSGGGGSGGGGSDIVMTQSQKSMSTSVGDRVSITCKASQDVITGVAWYQQKPGQSPKLLIYSASYRYTGVPDRFTGSGSGTDFTFTISNVQAEDLAVYYCQQHYSTPLTFGAGTKLELK

SEQ ID NO: 205303 - protein, 244 aa, Artificial Sequence
  Description of Artificial Sequence: Synthetic scFv sequence
EVQLQQSGPELVKPGASMKISCKASGYSFTGYTMNWVKQSHGKNLEWIGLINPYNGGTIYNQKFKGKATLTVDKSSSTAYMELLSLTSEDSAVYYCARDYGFVLDYWGQGTTLTVSSGGGGSGGGGSGGGGSGGGGSQIVLTQSPSIMSVSPGEKVTITCSASSSVSYMHWFQQKPGTSPKLCIYSTSNLASGVPARFSGRGSGTSYSLTISRVAAEDAATYYCQQRSNYPPWTFGGGTKLEIK

SEQ ID NO: 205304 - protein, 244 aa, Artificial Sequence
  Description of Artificial Sequence: Synthetic scFv sequence
EVQLQQSGPELVKPGASMKISCKASGYSFTGYTMNWVKQSHGKNLEWIGLINPYNGGTIYNQKFKGKATLTVDKSSSTAYMELLSLTSEDSAVYYCARDYGFVLDYWGQGTTLTVSSGGGGSGGGGSGGGGSGGGGSQIVLTQSPAIMSASPGEKVTITCSASSSVSYLHWFQQKPGTSPKLWVYSTSNLPSGVPARFGGSGSGTSYSLTISRMEAEDAATYYCQQRSIYPPWTFGGGTKLEIK

SEQ ID NO: 205305 - protein, 244 aa, Artificial Sequence
  Description of Artificial Sequence: Synthetic scFv sequence
EVQLQQSGPELVKPGASMKISCKASGYSFTGYTMNWVKQSHGKNLEWIGLINPYNGGTIYNQKFKGKATLTVDKSSSTAYMELLSLTSEDSAVYYCARDYGFVLDYWGQGTTLTVSSGGGGSGGGGSGGGGSGGGGSQIVLTQSPSIMSVSPGEKVTITCSASSSVSYMHWFQQKPGTSPKLGIYSTSNLASGVPARFSGRGSGTSYSLTISRVAAEDAATYYCQQRSNYPPWTFGGGTKLEIK

SEQ ID NO: 205306 - protein, 239 aa, Artificial Sequence
  Description of Artificial Sequence: Synthetic scFv sequence
EVQLQQSGPELVKPGASMKISCKASGYSFTGYTMNWVKQSHGKNLEWIGLINPYNGGTIYNQKFKGKATLTVDKSSSTAYMELLSLTSEDSAVYYCARDYGFVLDYWGQGTTLTVSSGGGGSGGGGSGGGGSQIVLTQSPSIMSVSPGEKVTITCSASSSVSYMHWFQQKPGTSPKLCIYSTSNLASGVPARFSGRGSGTSYSLTISRVAAEDAATYYCQQRSNYPPWTFGGGTKLEIK

SEQ ID NO: 205307 - protein, 241 aa, Artificial Sequence
  Description of Artificial Sequence: Synthetic scFv sequence
DIQMTQSPASLSASVGETVTITCRASENIDSYLAWYQQKQGKSPQLLVYASTLLVDGVPSRFSGSRSGTQFSLKINSLQSEDVARYYCQHYYSIPYTFGSGTKLEIKGGGGSGGGGSGGGGSEVKLVESGGGLVKPGGSLKLSCAASGFTFNSYTMSWVRQTPAKRLEWVVTISSGGGRTYYPDSVKGRFTISRDNARNTLYLQMSSLRSEDTAMYYCIRGDYRYDGFAYWGQGTVVTVST

SEQ ID NO: 205308 - protein, 241 aa, Artificial Sequence
  Description of Artificial Sequence: Synthetic scFv sequence
EVKLVESGGGLVKPGGSLKLSCAASGFTFNSYTMSWVRQTPAKRLEWVVTISSGGGRTYYPDSVKGRFTISRDNARNTLYLQMSSLRSEDTAMYYCIRGDYRYDGFAYWGQGTVVTVSTGGGGSGGGGSGGGGSDIQMTQSPASLSASVGETVTITCRASENIDSYLAWYQQKQGKSPQLLVYASTLLVDGVPSRFSGSRSGTQFSLKINSLQSEDVARYYCQHYYSIPYTFGSGTKLEIK

SEQ ID NO: 205309 - protein, 247 aa, Artificial Sequence
  Description of Artificial Sequence: Synthetic scFv sequence
EVQLQQSGAEVKKPGSSVKVSCKASGGTFSSYAISWVRQAPGQGLEWMGGIIPIFGTANYAQKFQGRVTITADESTSTAYMELSSLRSEDTAVYYCARDLEMATIMGGYWGQGTLVTVSSGGGGSGGGGSGGGGSQSALTQPASVSGSPGQSITISCTGTSSDVGGYNYVSWYQQHPGKAPKLMIYDVSNRPSGVSNRFSGSKSGNTASLTISGLQAEDEADYYCSSYTSSSTLDVVFGGGTKLTVL

SEQ ID NO: 205310 - protein, 245 aa, Artificial Sequence
  Description of Artificial Sequence: Synthetic scFv sequence
EVQLQQSGPGLVRPSETLSLTCTVSGGPVRSGSHYWNWIRQPPGRGLEWIGYIYYSGSTNYNPSLENRVTISIDTSNNHFSLKLSSVTAADTALYFCARGTATFDWNFPFDSWGQGTLVTVSSGGGGSGGGGSGSGGSDIQMTQSPSSLSASIGDRVTITCRASQSISSYLNWYQQKPGKAPKLLIYAASSLQSGVPSRFSGSGSGTDFTLTISSLQPEDFATYYCQQSYSTPWTFGQGTKLEIK

SEQ ID NO: 205311 - protein, 255 aa, Artificial Sequence
  Description of Artificial Sequence: Synthetic scFv sequence
EVQLVESGGGLVKPGGSLRLSCAASGFTFSSYSMNWVRQAPGKGLEWVSSISSSSSYIYYADSVKGRFTISRDNAKNSLYLQMNSLRAEDTAVYYCARDPSSSGSYYMEDSYYYGMDVWGQGTTVTVSSGGGGSGGGGSGGGGSNFMLTQPHSVSESFGKTVTISCTGSSGSIASNYVQWYQQRPGSAPTTVIYEDNQRPSGVPDRFSGSIDSSSNSASLTISGLKTEDEADYYCQSYDSSNQVVFGGGTKLTVL

SEQ ID NO: 205312 - protein, 255 aa, Artificial Sequence
  Description of Artificial Sequence: Synthetic scFv sequence
EVQLVESGGGLVKPGGSLRLSCAASGFTFSSYSMNWVRQAPGKGLEWVSSISSSSSYIYYADSVKGRFTISRDNAKNSLYLQMNSLRAEDTAVYYCARDPSSSGSYYMEDSYYYGMDVWGQGTTVTVSSGGGGSGGGGSGGGGSNFMLTQPHSVSESPGKTVTISCTGSSGSIASNYVQWYQQRPGSAPTTVIYEDNQRPSGVPDRFSGSIDSSSNSASLTISGLKTEDEADYYCQSYDSSNQVVFGGGTKLTVL

SEQ ID NO: 205313 - protein, 245 aa, Artificial Sequence
  Description of Artificial Sequence: Synthetic scFv sequence
EVQLVESGGGLVQPGGSLRLSCAASGFTFSSYEMNWVRQAPGKGLEWVSYISSSGSTIYYADSVKGRFTISRDNAKNSLYLQMNSLRAEDTAVYYCARDPYSSSWHDAFDIWGQGTMVTVSSGGGGSGGGGSGGGGSEIVLTQSPGTLSLSPGERATLSCRASQSVSSSYLAWYQQKPGQAPRLLIYGASSRATGIPDRFSGSGSGTDFTLTISRLEPEDFAVYYCQQYGSSPLTFGGGTKVDIK

SEQ ID NO: 205314 - protein, 245 aa, Artificial Sequence
  Description of Artificial Sequence: Synthetic scFv sequence
EVQLVESGGGVVQPGGSLRLSCAASGFTFDDYAMHWVRQAPGKGLEWVSLISGDGGSTYYADSVKGRFTISRDNSKNTLYLQMNSLRVEDTAVYYCARVFDSYYMDVWGKGTTVTVSSGGGGSGGGGSGSGGSEIVLTQSPLSLPVTPGQPASISCRSSQSLVYTDGNTYLNWFQQRPGQSPRRLIYKVSNRDSGVPDRFSGSGSDTDFTLKISRVEAEDVGIYYCMQGTHWSFTFGQGTRLEIK

SEQ ID NO: 205315 - protein, 245 aa, Artificial Sequence
  Description of Artificial Sequence: Synthetic scFv sequence
EVQLVESGGGVVQPGGSLRLSCAASGFTFDDYAMHWVRQAPGKGLEWVSLISGDGGSTYYADSVKGRFTISRDNSKNTLYLQMNSLRVEDTAVYYCARVFDSYYMDVWGKGTTVTVSSGGGGSGGGGSGSGGSEIVLTQSPLSLPVTPGQPASISCRSSQSLVYTDGNTYLNWFQQRPGQSPRRLIYKVSNRDSGVPDRFSGSGSDTDFTLKISRVEAEEVGIYYCMQGTHWSFTFGQGTRLEIK

SEQ ID NO: 205316 - protein, 246 aa, Artificial Sequence
  Description of Artificial Sequence: Synthetic scFv sequence
EVQLVQSGGGVVRSGRSLRLSCAASGFTFNSYGLHWVRQAPGKGLEWVALIEYDGSNKYYGDSVKGRFTISRDKSKSTLYLQMDNLRAEDTAVYYCAREGNEDLAFDIWGQGTLVTVSSGGGGSGGGGSGGGGSGGGGSEIVLTQSPSSLSASVGDRVTITCQASQFIKKNLNWYQHKPGKAPKLLIYDASSLQTGVPSRFSGNRSGTTFSFTISSLQPEDVATYYCQQHDNLPLTFGGGTKVEIK

SEQ ID NO: 205317 - protein, 239 aa, Artificial Sequence
  Description of Artificial Sequence: Synthetic scFv sequence
QVNLRESGGGLVQPGGSLRLSCAASGFTFSSYEMNWVRQAPGKGLEWVSYISSSGSTIYYADSVKGRFTISRDNAKNSLYLQMNSLRAEDTAVYYCAREALGSSWEWGQGTTVTVSSGGGGSGGGGSGGGGSDIQMTQSPSSLSASVGDRVTITCQASQDISNYLNWYQQKPGKAPKLLIYDASNLETGVPSRFSGSGSGTDFTFTISSLQPEDIATYYCQQYDNLPLTFGGGTKLEIK

SEQ ID NO: 205318 - protein, 249 aa, Artificial Sequence
  Description of Artificial Sequence: Synthetic scFv sequence
QVQLQESGAGLLKPSETLSLTCAVYGGSFSGYYWSWIRQPPGKGLEWVGEINHSGSTNYNPSLKSRVTISVDTSKNQFSLKLSSVTAADTAVYYCARGSGLVVYAIRVGSGWFDYWGQGTLVTVSSGGGGSGGGDSGGGGSDIQMTQSPSSLSASVGDRVTITCRASQSISSYLNWYQQKPGKAPKLLMYAASSLQSGVPSRFSGSGSGTDFTLTISSLQPEDFATYYCQQSYSTPPWTFGQGTKVDIK

SEQ ID NO: 205319 - protein, 247 aa, Artificial Sequence
  Description of Artificial Sequence: Synthetic scFv sequence
QVQLQESGPGLVKPSETLSLTCTVSGGSISSSSYYWGWIRQPPGKGLEWIGSIYYSGSTYYNPSLKSRVSISVDTSKNQFSLKLKYVTAADTAVYYCATPGTYYDFLSGYYPFYWGQGTLVTVSSGGGGSGGGGSGGGGSDIVMTQSPSSLSASVGDRVTITCRASQGISSYLAWYQQKPGKAPKLLIYAASTLQSGVPSRFSGSGSGTDFTLTISSLQPEDFATYYCQQLNSYPYTFGQGTKLEIK

SEQ ID NO: 205320 - protein, 255 aa, Artificial Sequence
  Description of Artificial Sequence: Synthetic scFv sequence
QVQLVESGGGLVQPGGSLRLSCAASGFNVSSNYMTWVRQAPGKGLEWVSVIYSGGATYYGDSVKGRFTVSRDNSKNTVYLQMNRLTAEDTAVYYCARDRLYCGNNCYLYYYYGMDVWGQGTLVTVSSGGGGSGGGGSGGGGSGGGGSDIQVTQSPSSLSASVGDRVTITCRASQSISSYLNWYQQKPGKAPKLLIYAASSLQSGVPSRFSGSGSGTDFTLTISSLQPEDFATYYCQQSYSTPPLTFGQGTKVEIK

SEQ ID NO: 205321 - protein, 239 aa, Artificial Sequence
  Description of Artificial Sequence: Synthetic scFv sequence
QVQLVESGGGLVQPGGSLRLSCAASGFTFSSYWMSWVRQAPGKGLEWVANINEDGSAKFYVDSVKGRFTISRDNAKNSLYLQMNSLRAEDTAVYFCARDLRSGRYWGQGTLVTVSSGGGGSGGGGSGGGGSEIVLTQSPGTLSLSPGGRATLSCRASQSISGSFLAWYQQKPGQAPRLLIYGASSRATGIPDRFSGSGSGTDFTLTISRLEPEDFAVYYCQQYGSSPPTFGLGTKLEIK

SEQ ID NO: 205322 - protein, 246 aa, Artificial Sequence
  Description of Artificial Sequence: Synthetic scFv sequence
QVQLVQSGAEVKEPGASVKVSCKAPANTFSDHVMHWVRQAPGQRFEWMGYIHAANGGTHYSQKFQDRVTITRDTSANTVYMDLSSLRSEDTAVYYCARGGYNSDAFDIWGQGTMVTVSSGGGGSGGGGSGGGGSGGGGSDIVMTQSPSSVSASVGDRVTITCRASQDISSWLAWYQQKPGKAPKLLIYAASSLQSGVPSRFNGSGSGTDFTLTISSLQPEDFATYYCQQSYSTPLTFGGGTKVEIK

SEQ ID NO: 205323 - protein, 247 aa, Artificial Sequence
  Description of Artificial Sequence: Synthetic scFv sequence
QVQLVQSGAEVKKSGASVKVSCKASGYPFTGYYIQWVRQAPGQGLEWMGWIDPNSGNTGYAQKFQGRVTMTRNTSISTAYMELSSLRSEDTAVYYCASDSYGYYYGMDVWGQGTLVTVSSGGGGSGGGGSGGGGSGGGGSDIQMTQSPSSLSASVGDRVTFTCRASQGISSALAWYQQKPGKPPKLLIYDASSLESGVPSRFSGSGSGTDFTLTISSLQFEDFATYYCQQFNNYPLTFGGGTKVEIK

SEQ ID NO: 205324 - protein, 247 aa, Artificial Sequence
  Description of Artificial Sequence: Synthetic scFv sequence
QVQLVQSGAEVKKSGASVKVSCKASGYPFTGYYIQWVRQAPGQGLEWMGWIDPNSGNTGYAQKFQGRVTMTRNTSISTAYMELSSLRSEDTAVYYCASDSYGYYYGMDVWGQGTLVTVSSGGGGSGGGGSGGGGSGGGGSDIQMTQSPSSLSASVGDRVTFTCRASQGISSALAWYQQKPGKPPKLLIYDASSLESGVPSRFSGSGSGTDFTLTISSLQPEDFATYYCQQFNNYPLTFGGGTKVEIK

SEQ ID NO: 205325 - protein, 248 aa, Artificial Sequence
  Description of Artificial Sequence: Synthetic scFv sequence
QVQLVQSGGGLVQPGGSLRLSCAASGFTFSSYSMNWVRQAPGKGLEWVSYISSSSSTIYYADSVKGRFTISRDNAKNSLYLQMNSLRAEDTAVYYCARDLSVRAIDAFDIWGQGTMVTVSSGGGGSGGGGSGGGGSGGGGSDIVLTQSPSSLSASVGDRVTITCQASQDISNYLNWYQQKPGKAPKLLIYDASNLETGVPSRFSGSGSGTDFTFTISSLQPEDFATYYCQQAYSTPFTFGPGTKVEIK

SEQ ID NO: 205326 - protein, 253 aa, Artificial Sequence
  Description of Artificial Sequence: Synthetic scFv sequence
EVQLVESGGGLVQPGRSLRLSCAASGFTFDDYDMHWVRQAPGKGLEWVSSISWSGGTIGYADSVKGRFTVSRDNAKNSLYLQMNSVRAEDTALYYCAKDRGAVAALPDYQYGMDVWGRGTLVTVSSGGGGSGGGGSGGGGSAQSALTQPASVSGSPGQSITISCTGTSSDIGSYNLVSWYQQHPGKAPKLMIYEDYKRASGVSNHFSGSKSGNTASLTISGLQAEDEADYYCSSYAGSSAWVFGGGTKVTVLG

SEQ ID NO: 205327 - protein, 248 aa, Artificial Sequence
  Description of Artificial Sequence: Synthetic scFv sequence
EVQLVESGPGLVKPSGTLSLTCAVSGGSISTSDWWSWVRRPPGKGLEWIGEIYHSGSTNYHPSLKSRVTISLDKSKNQFSLKLSSVTAADTAVYYCAREGGHSGSYPLDYWGRGTLVTVSSGGGGSGGGGSGGGGSAQSVVTQPPSVSAAPGQKVTISCSGNFSNIEYNYVSWYQHLPGTAPKLLIFDNNQRPSWIPDRFSGSKSGTSATLGITGLQTGDEADYYCGTWDSSLNAGVFGGGTKVTVLG

SEQ ID NO: 205328 - protein, 255 aa, Artificial Sequence
  Description of Artificial Sequence: Synthetic scFv sequence
EVQLVQSGAEMKKPGSSVKVSCKASGGTFSSYAVNWVRQAPGQGLEWMGGIIPIFDTSNYAQKFQGRLTMTADDSTNTAYMELRSLRSEDTAVYYCARGAPRGTVMAFSSYYFDLWGQGTLVTVSSGGGGSGGGGSGGGGSALNFMLTQPHSVSESPGKTVIISCAGSGGNIATNYVQWYQHRPGSAPITVIYEDNQRPSGVPDRFSGSVDSSSNSASLTISGLQTEDEADYYCHSYDNTDQGVFGTGTKVTVLG

SEQ ID NO: 205329 - protein, 257 aa, Artificial Sequence
  Description of Artificial Sequence: Synthetic scFv sequence
EVQLVQSGAEVKKPGASVKVSCKASGYSFPSSGLSWVRQAPGQGPEWMGWIGIYNGNTDYAQKFQGRVTMTTDKSTSTAYMELRSLRSDDTAVYYCARDSVGSISVAGTMQYYYFAMDVWGQGTLVTVSSGGGGSGGGGSGGGGSAQSVLTQPPSASGSPGQSVTISCAGTRYDIGTYNYVSWYQQHPAKGPKLIIYAVSERPSGVPNRFSGSKSGNTASLTVSGLRAEDEAHYYCSSYAGNNNVIFGGGTKVTVLG

SEQ ID NO: 205330 - protein, 248 aa, Artificial Sequence
  Description of Artificial Sequence: Synthetic scFv sequence
EVQLVQSGAEVKKPGASVKVSCKVSGYSLSELSMHWVRQAPGKGLEWMGGFDPQNGYTIYAQEFQGRITMTEDTSTDTVYMELGSLRSEDTAVYFCAAIEITGVNWYFDLWGKGTLVTVSSGGGGSGGGGSGGGGSALSSELTQDPDVSVALGQTVRITCQGDSLKKFYPGWYQQKPGQAPLLVLYGENIRPSRIPDRFSGSSSGNTATLTITGAQAEDEAVYYCNSREASVHHVRVFGGGTKLTVLG

SEQ ID NO: 205331 - protein, 250 aa, Artificial Sequence
  Description of Artificial Sequence: Synthetic scFv sequence
EVQLVQSGAEVKKPGATLKVSCKVSAYTFTDYSMHWVQQAPGKGLKWMGLIDLEDGNTIYAEEFQDRVTITADTSTDTAYMDLSSLRSEDTAVFYCAISPLRGLTADVFDVWGQGTLVTVSSGGGGSGGGGSGGGGSAQSALTQPASASGSPGQSITISCTGTSSDIGRYDFVSWYQRQPGKAPKLMIYDVINRPSGVSSRFSGSKSGNTASLTISGLQAEDEADYYCSSYAGSTTLYVFGTGTKLTVLG

SEQ ID NO: 205332 - protein, 246 aa, Artificial Sequence
  Description of Artificial Sequence: Synthetic scFv sequence
EVQLVQSGAEVKKPGSSVKVSCKASGGSFSNYDFSWVRQAPGQGLEWMGEIINAFGSSRYAQKFQDRVTITADESASTAYMELRGLTSEDTATYYCARAERWELNMAFDMWGRGTLVTVSSGGGGSGGGGSGGGGSAQSVLTQPPSVSVAPGQTARITCGGDNIGRKNVHWYQQRPGLAPVLVVYDDTDRPSGIPERFSGSNSGDTATLTITWVEAGDEADYYCQLWDSDTYDVLFGGGTKLTVLG

SEQ ID NO: 205333 - protein, 251 aa, Artificial Sequence
  Description of Artificial Sequence: Synthetic scFv sequence
EVQLVQSGAEVKKPGSSVKVSCKASGGTFKTYAINWVRQAPGQGLEWMGGIIPVLGTANYVQKFQGRVTITADESTTTAYMELRGLRSEDTAVYYCARGEGSGWYDHYYGLDVWGQGTLVTVSSGGGGSGGGGSGGGGSAQSVLTQPPSASGTPGQRVTISCSGSSSNIGSNTVNWYRQLPGTAPKLLIFGDDQRPSGVPDRFSGSRSGTSVSLAISGLQSEDEADYYCAAWDDSLNGGVFGGGTKLTVLG

SEQ ID NO: 205334 - protein, 247 aa, Artificial Sequence
  Description of Artificial Sequence: Synthetic scFv sequence
EVQLVQSGAEVKKPGSSVKVSCKSSGGPFSSYGISWVRQAPGQGLEWMGGISPIFGTANYAQKFQGRVTITADESTETAYMELSSLRSEDTAVYYCARDESPVGFYALDIWGRGTTVTVSSGGGGSGGGGSGGGGSALSYELTQPPSVSVAPGQTARINCGGDKIGSRSVHWYQQKPGQAPVMVVYDDSDRPSGIPERFSGSNSGNTATLTISSVEAGDEADYYCQVWDGSTDPWVFGGGTKVTVLG

SEQ ID NO: 205335 - protein, 249 aa, Artificial Sequence
  Description of Artificial Sequence: Synthetic scFv sequence
EVQLVQSGAEVKKPGSSVKVSCQASGGTFTSHAMYWVRQAPGQGLEWMGGIIPIFGRTNYAQKFQGRVTFTADMSTSTAYMEMTSLRSDDTAVYYCARGDNWNDLYPIDYWGRGTLVTVSSGGGGSGGGGSGGGGSALNFMLTQPHSVSESPGKTVTISCTRSSGSIATTYVQWFQQRPGSSPTTVIYDDDQRPSGVPDRFSGSIDSSSNSASLTISGLMPEDEADYYCQSYDNTDLVFGGGTQLTVLS

SEQ ID NO: 205336 - protein, 245 aa, Artificial Sequence
  Description of Artificial Sequence: Synthetic scFv sequence
EVQLVQSGAEVRKPGSSMKVSCKASGDTFRNFAFSWVRQAPGQGLEWMGGVIPLVGPPKYAQKFQGRLTITADESTSTSYMDLTSLTLEDTAVYFCARGGVYAPFDKWGQGTLVTVSSGGGGSGGGGSGGGGSAQSVVTQPPSVSEAPRQRVTISCSGSSSNIGNNAVNWYQQLPGKAPKLLIYYNDLLPSGVSDRFSGSKSGTSASLAISGLQSEDEADYYCAAWDDSLNGWVFGGGTKVTVLG

SEQ ID NO: 205337 - protein, 240 aa, Artificial Sequence
  Description of Artificial Sequence: Synthetic scFv sequence
GVQLVESGGGLVKPGGSLRLSCAASGFTFSSYTMNWVRQAPGKGLEWVSYISSSGSATYYADSVKGRFTISRDNANNSLYLQMNSLRAEDTAVYYCARGYRYGMDVWGQGTLVTVSSGGGGSGGGGSGGGGSGIVMTQSPSTLSASVGDRVTITCRASQGISSWLAWYQQKPGRAPKVLIYKASTLESGVPSRFSGSGSGTDFTLTISSLQPEDFATYYCQQSYSTPWTFGQGTKLEIKR

SEQ ID NO: 205338 - protein, 242 aa, Artificial Sequence
  Description of Artificial Sequence: Synthetic scFv sequence
KVQLLESGGGLVQPGGSLRLSCAASGFTFSSYAMSWVRQAPGKGLEWVSAISGSGGSTYYADSVKGRFTISRDNSKNTLYLQMNSLRAEDTAVYYCAKDDVRNAFDIWGRGTTVTVSSGGGGSGGGGSGGGGSAQSVLTQPPSVSVSPGQTTSITCSRDKLGEQYVYWYQQRPGQSPILLLYQDSRRPSWIPERFSGSNSGDTATLTISGTQALDEADYYCQAWDNSSYVAFGGGTKVTVLG

SEQ ID NO: 205339 - protein, 240 aa, Artificial Sequence
  Description of Artificial Sequence: Synthetic scFv sequence
QLQLQESGPGLVKPSGTLSLTCAVSGDSVSSYYWWSWVRQPPGKGLEWIGEIFRDGSSNYNRSLKSRVTISPDKPKNQFSLRLSSVTAADTAIYYCARHIRGYDAFDIWGRGTLVTVSSGGGGSGGGGSGGGGSAQSVLTQPPSVSGAPGQRVTISCTGSSSNIGAGYDVHWYQQFPGRAPKLLIYGNTNRPSGVPDRFSGSKSDISASLAITGLQAEDEADYYCQSYDSNLTGVFGGGT

SEQ ID NO: 205340 - protein, 250 aa, Artificial Sequence
  Description of Artificial Sequence: Synthetic scFv sequence
QLQLQESGPGLVKPSGTLSLTCAVSGGSISSTNWWSWVRQPPGKGLEWIGEIYHSGSTNYNPSLKSRVTISVDKSKNHFSLNLSSVTAADTAVYYCARDSMGSTGWHYGMDLWGKGTLVTVSSGGGGSGGGGSGGGGSAQSALTQPASVSGSPGQSIAISCTGTSSDVGGYNYVSWYQQHPGKAPKLMIYAVTNRPSGVSDRFSGSKSGNTASLTISGLQADDEADYYCSSYTSSSSLVFGGGTKLTVLG

SEQ ID NO: 205341 - protein, 250 aa, Artificial Sequence
  Description of Artificial Sequence: Synthetic scFv sequence
QLQLQESGPGLVKPSGTLSLTCAVSGGSISSTNWWSWVRQPPGKGLEWIGEIYHSGSTNYNPSLKSRVTISVDKSKNHFSLNLSSVTAADTAVYYCARDSMGSTGWHYGMDLWGRGTLVTVSSGGGGSGGGGSGGGGSAQSALTQPPSASGSPGQSVTISCSGSSSDIGDYNHVSWYQQHPGKAPKLMIYDVNKWPSGVPDRFSGSKSGNTASLTVSGLQAEDEADYYCSSYSGIYNLVFGGGTKVTVLG

SEQ ID NO: 205342 - protein, 251 aa, Artificial Sequence
  Description of Artificial Sequence: Synthetic scFv sequence
QLQLQESGPGLVKPSGTLSLTCAVSGGSISTSDWWSWVRRPPGKGLEWIGEIYHSGSTNYHPSLKSRVTISLDKSKNQFSLKLSSVTAADTAVYYCAREGGHSGSYPLDYWGKGTLVTVSSGGGGSGGGGSGGGGSALNFMLTQPHSVSESPGKTVTISCTRSSGSIASNYVQWYQQRPGSSPTTVIYEDNQRPSGVPDRFSGSIDSSSNSASLTISGLKTEDEADYYCQSYDSSNPYVVFGGGTKLTVLG

SEQ ID NO: 205343 - protein, 248 aa, Artificial Sequence
  Description of Artificial Sequence: Synthetic scFv sequence
QLQLQESGPGLVKPSGTLSLTCAVSGGSISTSDWWSWVRRPPGKGLEWIGEIYHSGSTNYHPSLKSRVTISLDKSKNQFSLKLSSVTAADTAVYYCAREGGHSGSYPLDYWGKGTLVTVSSGGGGSGGGGSGGGGSAQAVLTQPSSVSAAPGQKVTISCSGSSSNIGNNYVSWYQQLPGTAPKLLIYDNNKRPSGIPDRFSGSRSGTSATLGITGLQTGDEADYYCGTWDSSLSAVVFGTGTKLTVLG

SEQ ID NO: 205344 - protein, 251 aa, Artificial Sequence
  Description of Artificial Sequence: Synthetic scFv sequence
QLQLQESGPGLVKPSGTLSLTCAVSGGSISTSDWWSWVRRPPGKGLEWIGEIYHSGSTNYHPSLKSRVTISLDKSKNQFSLKLSSVTAADTAVYYCAREGGHSGSYPLDYWGQGTLVTVSSGGGGSGGGGSGGGGSALNFMLTQPHSVSESPGKTVTISCTGSSGSIASNYVQWYQQRPGSAPTTLIYEDDQRPSGVPDRFSGSVDSSSNSASLTISGLKTEDEADYYCQSYDRSNQAVVFGGGTKLTVLG

SEQ ID NO: 205345 - protein, 251 aa, Artificial Sequence
  Description of Artificial Sequence: Synthetic scFv sequence
QLQLQESGPGLVKPSGTLSLTCAVSGGSISTSDWWSWVRRPPGKGLEWIGEIYHSGSTNYHPSLKSRVTISLDKSKNQFSLKLSSVTAADTAVYYCAREGGHSGSYPLDYWGQGTLVTVSSGGGGSGGGGSGGGGSALNFMLTQPHSVSESPGKTVTISCTRSSGSIDNNYVQWYQQRPGSSPTTVIFEDNQRPSGVPDRFSGSIDSSSNSASLTISGLKTEDEADYYCQSYDSHNQGVVFGGGTKLTVLG

SEQ ID NO: 205346 - protein, 249 aa, Artificial Sequence
  Description of Artificial Sequence: Synthetic scFv sequence
QLQLQESGPGLVKPSGTLSLTCAVSGGSISTSDWWSWVRRPPGKGLEWIGEIYHSGSTNYHPSLKSRVTISLDKSKNQFSLKLSSVTAADTAVYYCAREGGHSGSYPLDYWGQGTLVTVSSGGGGSGGGGSGGGGSALNFMLTQPHSVSESPGKTVTVSCTGSGGNIASNYVQWYQQRPDSAPTLVIFEDTQRPSGVPARFSGSIDSSSNSASLIISSLRTEDEADYYCQSSDSNRVVFGGGTKVTVLG

SEQ ID NO: 205347 - protein, 248 aa, Artificial Sequence
  Description of Artificial Sequence: Synthetic scFv sequence
QLQLQESGPGLVKPSGTLSLTCAVSGGSISTSDWWSWVRRPPGKGLEWIGEIYHSGSTNYHPSLKSRVTISLDKSKNQFSLKLSSVTAADTAVYYCAREGGHSGSYPLDYWGQGTLVTVSSGGGGSGGGGSGGGGSAQSVVTQPPSVSAAPGQKVTISCSGSSSNIGNNYVSWYKQLPGTAPKLLIYDNNKRPSGIPDRFSGSKSGTSATLGITGLQTGDEADYYCGTWDSSLSGVVFGGGTKLTVLG

SEQ ID NO: 205348 - protein, 250 aa, Artificial Sequence
  Description of Artificial Sequence: Synthetic scFv sequence
QLQLQESGPGLVKPSGTLSLTCAVSGGSISTSDWWSWVRRPPGKGLEWIGEIYHSGSTNYHPSLKSRVTISLDKSKNQFSLKLSSVTAADTAVYYCAREGGHSGSYPLDYWGRGTLVTVSSGGGGSGGGGSGGGGSALNFMLTQPHSVSESPGKTVTISCARSSGSIASNYVQWYQQRPGSSPTTLIYEDRQRPSGVPDRFSGSIDSSSNSASLTISGLKTEDEADYYCQSYDSSDHVVFGGGTKLTVLG

SEQ ID NO: 205349 - protein, 251 aa, Artificial Sequence
  Description of Artificial Sequence: Synthetic scFv sequence
QLQLQESGPGLVKPSGTLSLTCAVSGGSISTSDWWSWVRRPPGKGLEWIGEIYHSGSTNYHPSLKSRVTISLDKSKNQFSLKLSSVTAADTAVYYCAREGGHSGSYPLDYWGRGTLVTVSSGGGGSGGGGSGGGGSALNFMLTQPHSVSESPGKTVTISCTRSSGSIASNYVQWYQQRPGSSPTTLIYDDNQRPSGVPDRFSGSIDSSSNSASLTISGLKTEDEADYYCQSYDSSNLGVVFGGGTKLTVLG

SEQ ID NO: 205350 - protein, 248 aa, Artificial Sequence
  Description of Artificial Sequence: Synthetic scFv sequence
QLQLQESGPGLVKPSGTLSLTCAVSGGSISTSDWWSWVRRPPGKGLEWIGEIYHSGSTNYHPSLKSRVTISLDKSKNQFSLKLSSVTAADTAVYYCAREGGHSGSYPLDYWGRGTLVTVSSGGGGSGGGGSGGGGSAQSVLTQPPSVSAAPGQKVTISCSGSSSNIGNSYVSWYKQLPGTAPKVLIYDNQKRSSGIPDRFSASKSGTSATLGITGLRTEDEADYYCGTWDTSLSAVVFGGGTKLTVLG

SEQ ID NO: 205351 - protein, 252 aa, Artificial Sequence
  Description of Artificial Sequence: Synthetic scFv sequence
QVQLQESGAEVKKPGSSVKVSCKASGGTFSSSAISWVRQAPGQGLEWMGGIIPVFGTANYAQKFQDRVTITADESTSTAYLELSRLTSEDTAVYYCASRGEYDYGDYDVYYYYMEVWGQGTLVTVSSGGGGSGGGGSGGGGSAQSVLTQPPSVSVAPGQTARLTCGANNIGSTSVHWYQQKPGQAPVLVIYDDTDRPSGIPERFSGSNSGNTATLTIRRVEAGDEADYYCQVWDTNSDHVIFGGGTKLTVLG

SEQ ID NO: 205352 - protein, 243 aa, Artificial Sequence
  Description of Artificial Sequence: Synthetic scFv sequence
QVQLQESGGGLLQPGGSLRLSCAASRFTFSNYAMSWVRQAPGKGLEWVSAISGSGASTYYADSVKGRFTISRDNSKNTLYLQMNSLRAEDTAVYYCSNLYGDYDYWGQGTLVTVSSGGGGGSGGGGSGGGGSQSVLTQPASVSGSPGQSITISCTGTSSDVGGYNYVSWYQQHPGKAPKLMIYDVSNRPSGVSNRFSGSKSGNTASLTISGLQAEDEADYYCSSYTSSSTLLFGGGTKLTVLG

SEQ ID NO: 205353 - protein, 245 aa, Artificial Sequence
  Description of Artificial Sequence: Synthetic scFv sequence
QVQLQESGGGLVQPGGSLRLSCAASGFTFSNYAMSWVRQAPGKGLEWVSAISGSGGSTYYADSVKGRFTISRDNSKNTLYLQMNSLRAEDTAVYYCAKDRFRAAAYWGQGTLVTVSSGGGGGSGGGGSGGGGSQSVLTQPPSVSAAPGQKVTISCTGSSSNIGAGYDVHWYQQLPGTAPKLLIYGNSNRPSGVPDRFSGSKSGTSASLAISGLQSEDEADYYCAAWDDILNGEIFGGGTKVTVLG

SEQ ID NO: 205354 - protein, 245 aa, Artificial Sequence
  Description of Artificial Sequence: Synthetic scFv sequence
QVQLQESGGGLVQPGGSLRLSCAASGFTFSSYAMSWVRQAPGKGLEWVSAISGSGGSTYYADSVKGRFTISRDNSKNTLYLQMNSLRAEDTAVYYCASQHVGEQSRYFDYWGQGTLVTVSSGGGGGSGGGGSGGGGSDIVMTQSPSSLSASIGDRVTITCRASHSISSYVNWYQKKPGKAPNLLIYAASYLPRGVPSRFSGSGLGTDFTLTISNLQPEDFATYYCQESYSTPYSFGQGTKVDIKR

SEQ ID NO: 205355 - protein, 255 aa, Artificial Sequence
  Description of Artificial Sequence: Synthetic scFv sequence
QVQLQESGGGVVQPGGSLRLSCAASGFTFSSYSMNWVRQAPGKGLEWVSSISSSSSYIYYADSVKGRFTISRDNAKNSLYLQMNSLRAEDTAVYYCARDLPSDDYGDYDYYYYGMDVWGQGTTVTVSSGGGGGSGGGGSGGGGSQSVLTQPPSASGTPGQRVTLFCSGSSSNIASNSVKWYQQPPQRAPKLLMFSDDQRPSGVPVRFSASKSGTSASLAISGLQSEDEADYYCAAWDDSLNAEVFGGGTKVTVLG

SEQ ID NO: 205356 - protein, 241 aa, Artificial Sequence
  Description of Artificial Sequence: Synthetic scFv sequence
QVQLQESGGGVVQPGRSLRLSCAASGFTFSSYGMHWVRQAPGKGLEWVSAIGSSGGSTHDADTVKGRFTISRDNAKNSLYLQMNSLRAEDTAVYYCARDRARGFDYWGQGTLVTVSSGGGGGSGGGGSGGGGSEIVLTQSPSTLSASIGDRVTITCRASQGISSYLAWYQQKPGKAPKLLIYGASSLQSGVPSRFSGRGSGADFTLTISSLQPEDFATYYCQQLISYPLTFGGGTKVEIKR

SEQ ID NO: 205357 - protein, 246 aa, Artificial Sequence
  Description of Artificial Sequence: Synthetic scFv sequence
QVQLQESGPGLVKPSATLSLTCAVSGGSISSNHWWSWVRQSPGKGLEWIGEIYTYGGANYNPSLKSRVDISMDKSKNQFSLHLSSVTAADTAVYYCGRHLTGYDCFDIWGQGTLVTVSSGGGGSGGGGSGGGGSAQAVLTQPSSVSGAPGQRVTISCTGSSSNIGAGYDVHWYQQLPGTAPKLLIYGNSNRPSGVPDRFSGSKSGTSASLAITGLQAEDEADYYCQSYDSSLSGVFGTGTQLTVLS

SEQ ID NO: 205358 - protein, 241 aa, Artificial Sequence
  Description of Artificial Sequence: Synthetic scFv sequence
QVQLQESGPGLVKPSETLSLTCNVSGGSIRNYFWSWIRQPPGQGLEYIGYIYYSGTTDYNPSLKGRVTISLDTSKTQFSLKLNSVTAADTAFYYCVRGPNKYAFDPWGQGTLVTVSSGGGGSGGGGSGGGGSALSYELTQPPSVSVSPGQTASITCSGDKLGDKFASWYQQKAGQSPVLVIYRDTKRPSGIPERFSGSNSGNTATLTISGTQAMDEADYYCQAWDSSTAVFGTGTKVTVLG

SEQ ID NO: 205359 - protein, 250 aa, Artificial Sequence
  Description of Artificial Sequence: Synthetic scFv sequence
QVQLQESGPGLVKPSGTLSLTCAVSGDSISSSNWWTWVRQPPGKGLEWIGEIFHSGTTNYNPSLNNRVTISLDESRNQFSLELSSVTAADTAIYYCARDSGNYDDNRGYDYWGRGTLVTVSSGGGGSGGGGSGGGGSAQSVLTQPPSVSGAPGQRVTISCAGTSSNIGAGFDVHWYQLLPGRAPKLLIYGNNNRPSGVPDRFSGSKSGTSASLAISGLQSEDEGDYYCAAWDDTVGGPVFGGGTKLTVLG

SEQ ID NO: 205360 - protein, 247 aa, Artificial Sequence
  Description of Artificial Sequence: Synthetic scFv sequence
QVQLQESGPGLVKPSGTLSLTCAVSGGSISSSNWWSWVRQAPGKGLEWIGEIYYGGSTNYNPSLKSRVTLSVDKSKNQFSLRLISVTAADTAVYYCARSSGLYGDYGNLWGRGTLVTVSSGGGGSGGGGSGGGGSAQSVVTQPPSVSAAPGQKVTISCSGSASNIGDHYISWYQQFPGTAPKLLISDNDQRPSGIPDRFSGSKSGTSATLGITGLQTGDEADYYCGTWDSNLSSWVFGSGTKVTVLG

SEQ ID NO: 205361 - protein, 251 aa, Artificial Sequence
  Description of Artificial Sequence: Synthetic scFv sequence
QVQLQESGPGLVKPSGTLSLTCAVSGGSISSTNWWSWVRQPPGKGLEWIGEIYHSGSTNYNPSLKSRVTISVDKSKNHFSLNLSSVTAADTAVYYCARDSMGSTGWHYGMDLWGQGTTVTVSSGGGGSGGGGSGGGGSAQSALTQPASVSGSPGQSITISCTGTSSDVGGYNYVSWYQQHPGKAPKLMIYEVSNRPLGVSNRFSGSKSGNTASLTISGLQAEDEGDYYCSSYTSSTTLIVFGGGTKLTVLG

SEQ ID NO: 205362 - protein, 250 aa, Artificial Sequence
  Description of Artificial Sequence: Synthetic scFv sequence
QVQLQESGPGLVKPSGTLSLTCAVSGGSISSTNWWSWVRQPPGKGLEWIGEIYHSGSTNYNPSLKSRVTISVDKSKNHFSLNLSSVTAADTAVYYCARDSMGSTGWHYGMDLWGRGTLVTVSSGGGGSGGGGSGGGGSAQSALTQPAAVSGSPGQSITISCTGSSSDVGGYNYVSWYQQHPGKAPKLLIYDVSDRPSGVSYRFSGSKSGNTASLTISGLQAEDEADYYCSSYTATGTLVFGGGTKLTVLG

SEQ ID NO: 205363 - protein, 251 aa, Artificial Sequence
  Description of Artificial Sequence: Synthetic scFv sequence
QVQLQESGPGLVKPSGTLSLTCAVSGGSISTSDWWSWVRRPPGKGLEWIGEIYHSGSTNYHPSLKSRVTISLDKSKNQFSLKLSSVTAADTAVYYCAREGGHSGSYPLDYWGKGTLVTVSSGGGGSGGGGSGGGGSALNFMLTQPHSVSESPGKTVTISCTRSSGSIASNYVQWYQQRPGSSPTTVIYEDNQRPSGVPDRFSGSIDSSSNSASLTISGLKTEDEADYYCQSYDSSNQGVVFGGGTKLTVLG

SEQ ID NO: 205364 - protein, 249 aa, Artificial Sequence
  Description of Artificial Sequence: Synthetic scFv sequence
QVQLQESGPGLVKPSGTLSLTCAVSGGSISTSDWWSWVRRPPGKGLEWIGEIYHSGSTNYHPSLKSRVTISLDKSKNQFSLKLSSVTAADTAVYYCAREGGHSGSYPLDYWGQGTLVTVSSGGGGSGGGGSGGGGSALNFMLTQPHSVSESPGKTVTISCTRSSGSIASKYVQWYQQRPGSAPTSVIYEDNQRPSGVPDRFSGSIDSASNSASLTISGLKTEDEADYYCQSDDGSSVVFGGGTKVTVLG

SEQ ID NO: 205365 - protein, 251 aa, Artificial Sequence
  Description of Artificial Sequence: Synthetic scFv sequence
QVQLQESGPGLVKPSGTLSLTCAVSGGSISTSDWWSWVRRPPGKGLEWIGEIYHSGSTNYHPSLKSRVTISLDKSKNQFSLKLSSVTAADTAVYYCAREGGHSGSYPLDYWGQGTLVTVSSGGGGSGGGGSGGGGSALNFMLTQPHSVSGSPGRTVTISCTRSSGSIATNYVQWYQQRPGSSPTIVIYEDNQRPSGVPDRFSGSIDTSSNSASLTISGLKTEDEADYYCQSYDSNNLGVVFGGGTQLTVLS

SEQ ID NO: 205366 - protein, 248 aa, Artificial Sequence
  Description of Artificial Sequence: Synthetic scFv sequence
QVQLQESGPGLVKPSGTLSLTCAVSGGSISTSDWWSWVRRPPGKGLEWIGEIYHSGSTNYHPSLKSRVTISLDKSKNQFSLKLSSVTAADTAVYYCAREGGHSGSYPLDYWGQGTLVTVSSGGGGSGGGGSGGGGSAQSVLTQPPSVSGTTGQRVILSCSGGNSNIGYNSVNWYQQLPGTAPKLLIYTDDQRPSGVPDRFSGSRSGTSASLAISGLQSEDEADYYCATWDDSLNAGVFGGGTKLTVLG

SEQ ID NO: 205367 - protein, 250 aa, Artificial Sequence
  Description of Artificial Sequence: Synthetic scFv sequence
QVQLQESGPGLVKPSGTLSLTCAVSGGSISTSDWWSWVRRPPGKGLEWIGEIYHSGSTNYHPSLKSRVTISLDKSKNQFSLKLSSVTAADTAVYYCAREGGHSGSYPLDYWGRGTLVTVSSGGGGSGGGGSGGGGSALNFMLTQPHSVSESPGKTATISCTGSGGSIARSYVQWYQQRPGRAPSIVIYEDYQRPSGVPDRFSGSIDSSSNSASLTITGLKTDDEADYYCQSSDDNNNVVFGGGTKVTVLG

SEQ ID NO: 205368 - protein, 248 aa, Artificial Sequence
  Description of Artificial Sequence: Synthetic scFv sequence
QVQLQESGPGLVKPSGTLSLTCAVSGGSISTSDWWSWVRRPPGKGLEWIGEIYHSGSTNYHPSLKSRVTISLDKSKNQFSLKLSSVTAADTAVYYCAREGGHSGSYPLDYWGRGTLVTVSSGGGGSGGGGSGGGGSAQAVLTQPSSVSAAPGQKVTISCSGSSSNIGNNYVSWYQQLPGTAPKLLIYDNNERPSGIPDRFSGSKSGTSATLGITGLQTGDEADYYCGTWDSSLSTVVFGTGTKVTVLG

SEQ ID NO: 205369 - protein, 247 aa, Artificial Sequence
  Description of Artificial Sequence: Synthetic scFv sequence
QVQLQESGPGLVKPSGTLSLTCAVSGGSISTSDWWSWVRRPPGKGLEWIGEIYHSGSTNYHPSLKSRVTISLDKSKNQFSLKLSSVTAADTAVYYCAREGGHSGSYPLDYWGRGTMVTVSSGGGGSGGGGSGGGGSAQSVLTQPPSASGTPGQRVTISCSGSFSNIGGNYVNWYQQLPGTAPKLLIYGNNQRPSGVPDRFSSFKSGTSASLAISGLRSEDEADYYCATWDDSQTVLFGGGTKLTVLG

SEQ ID NO: 205370 - protein, 247 aa, Artificial Sequence
  Description of Artificial Sequence: Synthetic scFv sequence
QVQLQESGPGLVRSSGILSLTCSVSGVSVSSNNWWSWVRQTPGKGLEWIGEIYQTGTTNYNPSLKSRVAISLDKSRNQFSLILKSVTAADTAVYYCARTSSAWSNADWGKGTMVTVSSGGGGSGGGGSGGGGSALSSELTQDPSASGSPGQSVSISCTGTSSDVGGYNYVSWYQQHPGKAPKLMISEVTKRPSGVPDRFSGSKSGNTASLTVSGLQAEDEADYYCSSFGANNNYLVFGGGTKLTVLG

SEQ ID NO: 205371 - protein, 251 aa, Artificial Sequence
  Description of Artificial Sequence: Synthetic scFv sequence
QVQLQESGPRLVKPSQTLSLTCTVSNDSIISGDYFWSWIRQPPGKGLEWIGNIFYTGSTSYNPSLKSRLTMSLDTSKNQFSLRLSSVTAADTAVYFCARGRQGMNWNSGTYFDSWGRGTLVTVSSGGGGSGGGGSGGGGSALSYVLTQPPSVSVAPGKTANITCGGKNIGNKSVQWYQQKPGQAPVVVMYYDSDRPSGIPERFSGSNAGNTATLTIDRVEAGDEADYYCQVWDKSSDRPVFGGGTKLTVLG

SEQ ID NO: 205372 - protein, 244 aa, Artificial Sequence
  Description of Artificial Sequence: Synthetic scFv sequence
QVQLQQSGAEVRKPGASAKVSCKTSGYTFIDYYIHWVRQAPGQGLEWMGWINPVTGASGSSPNFRGRVTLTTDTSGNTAYMELRSLRSDDTAVFYCARRHQQSLDYWGRGTTVTVSSGGGGSGGGGSGGGGSAQSVVTQPPSVSAAPGQKVTISCSGRTSNIGNNYVSWYQQVPGAPPKLLIFDNNKRPSGTPARFSGSKSGTSATLAISGLQTGDEADYYCGTWDTTLRGFVFGPGTKVTVLG

SEQ ID NO: 205373 - protein, 249 aa, Artificial Sequence
  Description of Artificial Sequence: Synthetic scFv sequence
QVQLQQSGAEVRKPGASVKISCKTSGYTFMDYYIHWVRQAPGQGLEWMGWSNPVTGTSGSSPKFRGRVTLTTDTSGNTAYLDLRSLRSDDTAVFYCARRHQQSLDYWGQGTLVTVSSGGGGSGGGGSGGGGSAQAVLTQPSSLSASPGASASLTCTLRSDINVGSYSINWYQQKPGSPPQYLLNYRSDSDKQQGSGVPSRFSGSKDASANAGILLISGLQSEDEADYYCMIWYRTAWVFGGGTKVTVLG

SEQ ID NO: 205374 - protein, 241 aa, Artificial Sequence
  Description of Artificial Sequence: Synthetic scFv sequence
QVQLVQSGAEVKKPGASVKVSCKASGYTFTDYYMHWVRQAPGEGLEWMGWMNPNSGGTNYAQKFQGRVTMTRDTSISTAYMELSRLRSDDTAVYYCARSHYWDSWSPGTLVTVSSGGGGGSGGGGSGGGGSSALTQPASVSGSPGQSITISCTGTSGDVGGYNYVSWYQQHPGKAPKLMIYDVSNRPSGVSNRFSGSKSGNTASLTISGLQAEDEADYYCTSYAGSRNLVFGGGTKLTVLG

SEQ ID NO: 205375 - protein, 245 aa, Artificial Sequence
  Description of Artificial Sequence: Synthetic scFv sequence
QVQLVQSGAEVKKPGASVKVSCKTSGYTFMEYYIHWVRQAPGQGLEWMGWSNPVTGTSGSSPKFRGRVTLTTDTSGNTAYLDLRSLRSDDTAVFYCARRHQQSLDYWGQGTLVTVSSGGGGSGGGGSGGGGSAQSVVTQPPSASGSPGQSVTISCSGYSSSNIGNNAVSWYQQLPGTAPKLLIFDNNKRPSGIPARFSGSQSGTTATLGITGLQTGDEADYFCGTWDSSLSAFVFGSGTKVTVLG

SEQ ID NO: 205376 - protein, 250 aa, Artificial Sequence
  Description of Artificial Sequence: Synthetic scFv sequence
QVQLVQSGAEVKKPGESLKISCKGSGYTFTNYWIAWVRQMPGKGLEWMGIIYPDDSDTRYNPSFQGQVTMSADKSIDTAYLQWSSLKASDTAIYYCARPSGWNDNGYFDYWGRGTTVTVSSGGGGSGGGGSGGGGSALNFMLTQPHSVSASPGKTVTLSCTGSSGSIASNYVQWYRQRPGSAPTTVIYDDNQRPSGVPDRFSGSIDSSSNSASLTISGLKTEDEADYYCQSFDNDNHWVFGGGTKLTVLG

SEQ ID NO: 205377 - protein, 244 aa, Artificial Sequence
  Description of Artificial Sequence: Synthetic scFv sequence
QVQLVQSGAEVRKPGASVKVSCKTSGYTFIDYYIHWVRQAPGQGLEWMGWVNPVTGTSGSSPNFRGRVTMTTDTSGNTAYMELRSLRSDDTAVFYCARRHQQSLDYWGQGTLVTVSSGGGGSGGGGSGGGGSAQSVLTQPPSVSAPPGQKVTISCSGSSSNIGTNYVSWYQQLPGTAPKLLIYDNHKRPSVIPDRFSGSKSGTSATLGISGLQTGDEADYYCGTWDYSLSTWVFGGGTKLTVLG

SEQ ID NO: 205378 - protein, 244 aa, Artificial Sequence
  Description of Artificial Sequence: Synthetic scFv sequence
QVQLVQSGAEVRKPGASVKVSCKTSGYTFIEYYIHWVRQAPGQGLEWMGWSNPVTGTSGSSPKFRGRVTLTTDTSGNTAYLDLRSLRSDDTAVFYCARRHQQSLDYWGRGTTVTVSSGGGGSGGGGSGGGGSAQSVLTQPPSVSAAPGQKVTISCSGTNSNIGNYYVSWYQQLPGTAPKLLIYDNNKRPSGVPDRFSGSKSGTSASLVISGLRSEDEADYYCAAWDGSLTAWVFGGGTKVTVLG

SEQ ID NO: 205379 - protein, 244 aa, Artificial Sequence
  Description of Artificial Sequence: Synthetic scFv sequence
QVQLVQSGAEVRKPGASVKVSCKTSGYTFMDYYIHWVRQAPGQGLEWMGWSNPVTGTSGSSPKFRGRVTLTTDTSGNTAYLDLRSLRSDDTAVFYCARRHQQSLDYWGQGTMVTVSSGGGGSGGGGSGGGGSAQSVLTQPPSVSAAPGQKVTISCSGSSSNIGNNYVSWYQQLPGTAPKLLMYENSKRPSGIPDRFSGSKSGTSGTLGITGLQTGDEADYYCGTWDTSLRAWVFGGGTKVTVLG

SEQ ID NO: 205380 - protein, 245 aa, Artificial Sequence
  Description of Artificial Sequence: Synthetic scFv sequence
QVQLVQSGAEVRKPGASVRVSCKTSGYTFLEYYIHWVRQAPGQGLEWMAWSNPVTGTSGSSPKFRGRVTLTADTSGNTAYLDLKSLTSDDTAIFYCARRHQQSLDYWGQGTLVTVSSGGGGSGGGGSGGGGSAQSVLTQPPSVSAAPGQTVTISCSGSNSNIGNNHVSWYRQLPETAPKLLIYDNNKRPSGIPDRFSGSKSGTSATLDITGLQTGDEADYYCATWDNSLSAPWVFGGGTKLTVLG

SEQ ID NO: 205381 - protein, 246 aa, Artificial Sequence
  Description of Artificial Sequence: Synthetic scFv sequence
QVQLVQSGGGLVQPGGSLRLSCAASGFTFSSYAMSWVRQAPGKGLEWVSAISGSGGSTYYADSVKGRFTISRDNSKNTLYLQMNSLRAEDTAVYYCAKSSSSWYRSYYFDYWGQGTLVTVSSGGGGGSGGGGSGGGGSQSALTQDPAVSVALGQTVRITCRGDSLRNYYASWYQQKPGQAPVLVIYGKNNRPSGIPDRFSGSFSGNTASLTITGAQAEDEADYYCNSRDSSANQMFGGGTKVTVLG

SEQ ID NO: 205382 - protein, 253 aa, Artificial Sequence
  Description of Artificial Sequence: Synthetic scFv sequence
QVQLVQSGPEVKKPGASVEVSCKASGYTFTGDYMHWVRQAPGQGPEWMGWINPQTGVTKYAQKFQGRVTMARDTSINTAYMELRGLRSDDTAVYYCVREDHNYDLWSAYNGLDVWGQGTLVTVSSGGGGSGGGGSGGGGSAQSVLTQPPSVSAAPGQKVTISCSGSSSNIGNNHVSWYQQLAGTAPKLLIFDNDKRPSGIPDRFSGSKSGTSATLGITGLQTGDEADYYCGTWDKSPTDIYVFGSGTKLTVLG

SEQ ID NO: 205383 - protein, 243 aa, Artificial Sequence
  Description of Artificial Sequence: Synthetic scFv sequence
EVQLVESGGGLVQPGGSLRLSCAASGFDFSRYWMSWVRQAPGKGLEWIGEINPDSSTINYAPSLKDKFIISRDNAKSLYLQMNSLRAEDTAVYYCARPDGNYWYFDVWGQGTLVTVSSGSTSGGGSGGGSGGGGSSDIQMTQSPSSLSASVGDRVTITCKASQDVGIAVAWYQQKPGKVPKLLIYWASTRHTGVPDRFSGSGSGTDFTLTISSLQPEDVATYYCQQYSSYPYTFGQGTKVEIK

SEQ ID NO: 205384 - protein, 259 aa, Artificial Sequence
  Description of Artificial Sequence: Synthetic scFv sequence
MEFGLSWLFLVAILKGVQCSRMAQVKLKESGPELKKPGETVKISCKASGYTFTDYSMHWVKKTPGKGLKWLGWINTATGEPTYADDFKGRFAISLETSARTVYLQINNLRNEDTATYFCFSYYDYWGQGTTVTVSSGGGGSGGGGSGGGGLDIKLTQSPSILSVTPGETVSLSCRASQTIYKNLHWYQQKSHRSPRLLIKYGSDSISGIPSRFTGSGSGTDYTLNINSVKPEDEGIYYCLQGYSTPWTFGGGTKLEIKR

SEQ ID NO: 205385 - protein, 219 aa, Artificial Sequence
  Description of Artificial Sequence: Synthetic scFv sequence
DIVMTQSPSSLAVSLGERATMSCKSSQSLFNSRTRKNYLAWYQQKPGQSPKLLIYWASARDSGVPARFTGSGSETYFTLTISRVQAEDLAVYYCMQSFNLRTFGQGTKVEIKRTVAAPSVFIFPPSDEQLKSGTASVVCLLNNFYPREAKVQWKVDNALQSGNSQESVTEQDSKDSTYSLSSTLTLSKADYEKHKVYACEVTHQGLSSPVTKSFNRGEC

SEQ ID NO: 205386 - protein, 450 aa, Artificial Sequence
  Description of Artificial Sequence: Synthetic scFv sequence
EVNLVESGGGLVQPGRSLRLSCTASGFTFTDNYMSWVRQAPGKGLEWLGFIRNKANGYTTDYAASVRGRFTISRDNSKSILYLQMNALRTEDTAVYYCARDVGSNYFDYWGQGTLVTVSSASTKGPSVFPLAPSSKSTSGGTAALGCLVKDYFPEPVTVSWNSGALTSGVHTFPAVLQSSGLYSLSSVVTVPSSSLGTQTYICNVNHKPSNTKVDKRVEPKSCDKTHTCPPCPAPELLGGPSVFLFPPKPKDTLMISRTPEVTCVVVDVSHEDPEVKFNWYVDGVEVHNAKTKPREEQYNSTYRVVSVLTVLHQDWLNGKEYKCKVSNKALPAPIEKTISKAKGQPREPQVYTLPPSREEMTKNQVSLTCLVKGFYPSDIAVEWESNGQPENNYKTTPPVLDSDGSFFLYSKLTVDKSRWQQGNVFSCSVMHEALHNHYTQKSLSLSPGK

SEQ ID NO: 205387 - protein, 450 aa, Artificial Sequence
  Description of Artificial Sequence: Synthetic scFv sequence
EVQLVESGGGLVQPGRSLRLSCTASGFTFTDNYMSWVRQAPGKGLEWLGFIRNKANGYTTEYAASVKGRFTISRDNSKSIAYLQMNSLKTEDTAVYYCARDVGSNYFDYWGQGTLVTVSSASTKGPSVFPLAPSSKSTSGGTAALGCLVKDYFPEPVTVSWNSGALTSGVHTFPAVLQSSGLYSLSSVVTVPSSSLGTQTYICNVNHKPSNTKVDKRVEPKSCDKTHTCPPCPAPELLGGPSVFLFPPKPKDTLMISRTPEVTCVVVDVSHEDPEVKFNWYVDGVEVHNAKTKPREEQYNSTYRVVSVLTVLHQDWLNGKEYKCKVSNKALPAPIEKTISKAKGQPREPQVYTLPPSREEMTKNQVSLTCLVKGFYPSDIAVEWESNGQPENNYKTTPPVLDSDGSFFLYSKLTVDKSRWQQGNVFSCSVMHEALHNHYTQKSLSLSPGK

SEQ ID NO: 205388 - protein, 450 aa, Artificial Sequence
  Description of Artificial Sequence: Synthetic scFv sequence
EVQLVESGGGLVQPGRSLRLSCTASGFTFTDNYMSWVRQAPGKGLEWVGFIRNKANGYTTEYAASVKGRFTISRDDSKSIAYLQMNSLKTEDTAVYYCARDVGSNYFDYWGQGTLVTVSSASTKGPSVFPLAPSSKSTSGGTAALGCLVKDYFPEPVTVSWNSGALTSGVHTFPAVLQSSGLYSLSSVVTVPSSSLGTQTYICNVNHKPSNTKVDKRVEPKSCDKTHTCPPCPAPELLGGPSVFLFPPKPKDTLMISRTPEVTCVVVDVSHEDPEVKFNWYVDGVEVHNAKTKPREEQYNSTYRVVSVLTVLHQDWLNGKEYKCKVSNKALPAPIEKTISKAKGQPREPQVYTLPPSREEMTKNQVSLTCLVKGFYPSDIAVEWESNGQPENNYKTTPPVLDSDGSFFLYSKLTVDKSRWQQGNVFSCSVMHEALHNHYTQKSLSLSPGK

SEQ ID NO: 205389 - protein, 250 aa, Artificial Sequence
  Description of Artificial Sequence: Synthetic scFv sequence
SYELTQPPSVSGTPGQRVAISCSGSSSNIGTRMVTWYQHVPGTAPKLLIFNNNQRPSGVPDRFSASKSGTSASLAIIGLQSDDEADYYCAAWDDNLKSYVFGTGTKVTVLGSRGGGGSGGGGSDGGGSLEMAQVQLQQWGAGLLKPSETLSLTCAVYGGSFSGYYWSWIRQLPGKGLEWIGEINHSGSTNYNPYLKSRVTISVDTSKRQFSLKLSSVTAADTAVYYCARAPQSWYVGDVWGQGTLVTVSS

SEQ ID NO: 205390 - protein, 250 aa, Artificial Sequence
  Description of Artificial Sequence: Synthetic scFv sequence
SYELTQPPSVSGTPGQRVAISCSGSSSNIGTRMVTWYQHVPGTAPKLLIFNNNQRPSGVPDRFSASKSGTSASLAIIGLQSDDEADYYCAAWDDNLKSYVFGTGTKVTVLGSRGGGGSGGGGSGGGGSLEMAQVQLQQWGAGLLKPSETLSLTCAVYGGSFSGYYWSWIRQPPGKGLEWIGEINHSGSTNYNPSLKSRVTISVDTSKNQFSLKLSSVTAADTAVYYCARAPQSWYRGDVWGQGTLVTVSS

SEQ ID NO: 205391 - protein, 250 aa, Artificial Sequence
  Description of Artificial Sequence: Synthetic scFv sequence
SYELTQPPSVSGTPGQRVAISCSGSSSNIGTRMVTWYQHVPGTAPKLLIFNNNQRPSGVPDRFSASKSGTSASLAIIGLQSDDEADYYCAAWDDNLKSYVFGTGTKVTVLGSRGGGGSGGGGSGGGGSLEMAQVQLQQWGAGLLKPSETLSLTCAVYGGSFSGYYWSWIRQPPGKGLEWIGEINHSGSTNYNPSLKSRVTISVDTSKNQFSLKLSSVTAADTAVYYCLRAPQSWYVGDVWGQGTLVTVSS

SEQ ID NO: 205392 - protein, 250 aa, Artificial Sequence
  Description of Artificial Sequence: Synthetic scFv sequence
SYELTQPPSVSGTPGQRVAISCSGSSSNIGTRMVTWYQHVPGTAPKLLIFNNNQRPSGVPDRFSASKSGTSASLAIIGLQSDDEADYYCAAWDDNLKSYVFGTGTKVTVLGSRGGGGSGGGGSGGGGSLEMAQVQLQQWGAGLLKPSETMSLTCAVYGGSFSGYYWSWIRQPPGKGLEWIGEINHSGSTNYNPSLKSRVTISVDTSKNQFSLKLSSVTAADTAVYYCARAPQSWYRGDVWGQGTLVTVSS

SEQ ID NO: 205393 - protein, 250 aa, Artificial Sequence
  Description of Artificial Sequence: Synthetic scFv sequence
SYELTQPPSVSGTPGQRVAISCSGSSSNIGTRMVTWYQHVPGTAPKLLIFNNNQRPSGVPDRFSASKSGTSASLAIIGLQSDDEADYYCAAWDDNPKSYHFGTGTKVTVLGSRGGGGSGGGGSGGGGSLEMAQVQLQQWGAGLLKPSETLSLTCAVYGGSFSGYYWSWIRQPPGKGLEWIGEINHSGSTNYNPSLKSRVTISVDTSKNQFSLKLSSVTAADTAVYYCARAPQSWYVGDVWGQGTLVTVSS

SEQ ID NO: 205394 - protein, 250 aa, Artificial Sequence
  Description of Artificial Sequence: Synthetic scFv sequence
SYELTQPPSVSGTPGQRVAISCSGSSSNIGTRMVTWYQHVPGTAPKLLIFNNNQRPSGVPDRFSASKSGTSASLAIIGLQSDDEADYYCATWDDNVKSYVFGTGTKVTVLGSRGGGGSGGGGSGGGGSLEMAQVQLQQWGAGLLKPSETLSLTCAVYGGSFSGYYWSWIRQPPGKGLEWIGEINHSGSTNYNPSLKSRVTISVDTSKNQFSLKLSSVTAADTAVYYCARAPQSWYVGDVWGQGTLVTVSS

SEQ ID NO: 205395 - protein, 250 aa, Artificial Sequence
  Description of Artificial Sequence: Synthetic scFv sequence
SYELTQPPSVSGTPGQRVAISCSGSSSNIGTRMVTWYQHVPGTAPKLLIFNNNQRPSGVPDRFSASKSGTSASLAIIGLQSDDEADYYCATWDENPKSYVFGTGTKVTVLGSRGGGGSGGGGSGGGGSLEMAQVQLQQWGAGLLKPSETLSLTCAVYGGSFSGYYWSWIRQPPGKGLEWIGEINHSGSTNYNPSLKSRVTISVDTSKNQFSLKLSSVTAADTAVYYCARAPQSWYVGDVWGQGTLVTVSS

SEQ ID NO: 205396 - protein, 250 aa, Artificial Sequence
  Description of Artificial Sequence: Synthetic scFv sequence
SYELTQPPSVSGTPGQRVAISCSGSSSNIGTRMVTWYQHVPGTAPKLLIFNNNQRPSGVPDRFSASKSGTSASLAIIGLQSDDEADYYCATWEDNRKSYVFGTGTKVTVLGSRGGGGSGGGGSGGGGSLEMAQVQLQQWGAGLLKPSETLSLTCAVYGGSFSGYYWSWIRQPPGKGLEWIGEINHSGSTNYNPSLKSRVTISVDTSKNQFSLKLSSVTAADTAVYYCARAPQSWYVGDVWGQGTLVTVSS

SEQ ID NO: 205397 - protein, 250 aa, Artificial Sequence
  Description of Artificial Sequence: Synthetic scFv sequence
SYELTQPPSVSGTPGQRVAISCSGSSSNIGTRMVTWYQHVPGTAPKLLIFNNNQRPSGVPDRFSASKSGTSASLTIIGLQSDDEADYYCAAWDDNLKSYVFGTGTKVTVLGSRGGGGSGGGGSGGGGSLEMAQVQLQQWGAGLLKPSETLSLTCAVYGGSFSGYYWSWIRQPPGKGLEWIGEINHSGSTNYNPSLKSRVTMSVDTSKRQFSLKLSSVTAADTAVYYCARAPQSWYVGDVWGQGTLVTVSS

SEQ ID NO: 205398 - protein, 250 aa, Artificial Sequence
  Description of Artificial Sequence: Synthetic scFv sequence
SYELTQPPSVSGTPGQRVAISCSGSSSNIGTRVVTWYQHVPGTAPKLLIFNNNQRPSGVPDRFSASKSGTSASLAIIGLQSDDEADYYCAAWDDNLKSYVFGTGTKVTVLGSRGGGGSGGGGSGGGGSLEMAQVQLQQWGAGLLKPSETLSLTCAVYGGSFSGYYWSWIRQPPGKGLEWIGEINHSGSTNYNPSLKSRVTISVDTSKNQFSLKLSSVTAADTAVYYCARAPQSWYVGDVWGQGTLVTVSS

SEQ ID NO: 205399 - protein, 240 aa, Artificial Sequence
  Description of Artificial Sequence: Synthetic scFv sequence
DIQMTQSPSSLSASVGDRVTITCRASQGIRNNLAWYQQKPGKAPKRLIYAASNLQSGVPSRFTGSGSGTEFTLIVSSLQPEDFATYYCLQHHSYPLTSGGGTKVEIKRTGSTSGSGKPGSGEGSEVQVLESGGGLVQPGGSLRLSCAASGFTFSSYAMSWVRQAPGKGLEWVSAISGSGGSTNYADSVKGRFTISRDNSKNTLYLQMNSLRAEDTAVYYCAGSSGWSEYWGQGTLVTVSS

SEQ ID NO: 205400 - protein, 126 aa, Artificial Sequence
  Description of Artificial Sequence: Synthetic scFv sequence
EAQLVQSGAEGKKPGSSVKVSCKAPGGTFNSYAISWVRQAPGQGLEWMGGIIPIFGTAYYAQKFQGRVTITADESTSTAYMELSSLRSEDTAVYYCAREEGPYCSSTSCYAAFDIWGRGTLVTVSS

SEQ ID NO: 205401 - protein, 126 aa, Artificial Sequence
  Description of Artificial Sequence: Synthetic scFv sequence
EAQLVQSGAEGKKPGSSVKVSCKAPGGTFNSYAISWVRQAPGQGLEWMGGIIPIFGTAYYAQKFQGRVTITADESTSTAYMELSSLRSEDTAVYYCAREEGPYCSSTSCYGAFDIWGRGTLVTVSS

SEQ ID NO: 205402 - protein, 126 aa, Artificial Sequence
  Description of Artificial Sequence: Synthetic scFv sequence
EVQLVQSGAEVKKLGSSVKVSCKASGGTFSSYAISWVRQAPGQGLEWVGGIIPIFGTANYAQKFQGRVKITADESASTAYMELSSLRSEDTAVYYCAREEGPYCSSTSCYGAFDIWGQGTLVTVSS

SEQ ID NO: 205403 - protein, 126 aa, Artificial Sequence
  Description of Artificial Sequence: Synthetic scFv sequence
EVQLVQSGAEVKKPGSSVKVSCKASGGTFSSYAIGWVRQAPGQGLEWMGGIIPIFGIANYAQKFQGRVTITADESTSSAYMELSSLRSEDTAVYYCAREEGPYCSSTSCYAAFDIWGQGTLVTVSS

SEQ ID NO: 205404 - protein, 126 aa, Artificial Sequence
  Description of Artificial Sequence: Synthetic scFv sequence
EVQLVQSGAEVKKPGSSVKVSCKASGGTFSSYAIGWVRQAPGQGLEWMGGIIPIFGIANYAQKFQGRVTITADESTSSAYMELSSLRSEDTAVYYCAREEGPYCSSTSCYGAFDIWGQGTLVTVSS

SEQ ID NO: 205405 - protein, 126 aa, Artificial Sequence
  Description of Artificial Sequence: Synthetic scFv sequence
EVQLVQSGAEVKKPGSSVKVSCKASGGTFSSYAISWVRQAPGQGLEWMGGIIPIFGTANYAQKFQGRVTITADESTSTAYMELSSLRSEDTAVYYCAREEGPYCSSTSCYAAFDIWGQGTLVTVSS

SEQ ID NO: 205406 - protein, 126 aa, Artificial Sequence
  Description of Artificial Sequence: Synthetic scFv sequence
EVQLVQSGAEVKKPGSSVKVSCKASGGTFSSYAISWVRQAPGQGLEWMGGIIPIFGTANYAQKFQGRVTITADESTSTAYMELSSLRSEDTAVYYCAREEGPYCSSTSCYGAFDIWGQGTLVTVSS

SEQ ID NO: 205407 - protein, 126 aa, Artificial Sequence
  Description of Artificial Sequence: Synthetic scFv sequence
EVQLVQSGAEVKKPGSSVKVSCKASGGTFSSYAISWVRQAPGQGLEWVGGIIPIFGTANYAQKFQGRVKITADESASTAYMELSSLRSEDTAVYYCAREEGPYCSSTSCYAAFDIWGQGTLVTVSS

SEQ ID NO: 205408 - protein, 126 aa, Artificial Sequence
  Description of Artificial Sequence: Synthetic scFv sequence
EVQLVQSGAEVKKPGSSVKVSCKASGGTFSSYAISWVRQAPGQGLEWVGGIIPIFGTANYAQKFQGRVKITADESASTAYMELSSLRSEDTAVYYCAREEGPYCSSTSCYGAFDIWGQGTLVTVSS

SEQ ID NO: 205409 - protein, 261 aa, Artificial Sequence
  Description of Artificial Sequence: Synthetic scFv sequence
HAARPDVVMTQSPDSLAVSLGERATINCKSSQSLLDSDGKTYLNWLQQKPGQPPKRLISLVSKLDSGVPDRFSGSGSGTDFTLTISSLQAEDVAVYYCWQGTHFPGTFGGGTKVEIKGGGGSGGGGSGGGGSGGGGSEIQLVQSGAEVKKPGATVKISCKGSGFNIEDYYIHWVQQAPGKGLEWMGRIDPENDETKYGPIFQGRVTITADTSTNTVYMELSSLRSEDTAVYYCAFRGGVYWGQGTTVTVSSGSHHHHHHHH

SEQ ID NO: 205410 - protein, 269 aa, Artificial Sequence
  Description of Artificial Sequence: Synthetic scFv sequence
MALPVTALLLPLALLLHAARPDIQMTQSPSSLSASVGDRVTITCRASQGIRNNLAWYQQKPGKAPKRLIYAASNLQSGVPSRFTGSGSGTEFTLIVSSLQPEDFATYYCLQHHSYPLTSGGGTKVEIKRTGSTSGSGKPGSGEGSEVQVLESGGGLVQPGGSLRLSCAASGFTFSSYAMSWVRQAPGKGLEWVSAISGSGGSTNYADSVKGRFTISRDNSKNTLYLQMNSLRAEDTAVYYCAGSSGWSEYWGQGTLVTVSSHHHHHHHH

SEQ ID NO: 205411 - protein, 278 aa, Artificial Sequence
  Description of Artificial Sequence: Synthetic scFv sequence
MALPVTALLLPLALLLHAARPDVVMTQSPDSLAVSLGERATINCKSSQSLLDSDGKTYLNWLQQKPGQPPKRLISLVSKLDSGVPDRFSGSGSGTDFTLTISSLQAEDVAVYYCWQGTHFPGTFGGGTKVEIKGGGGSGGGGSGGGGSGGGGSEIQLVQSGAEVKKPGESLRISCKGSGFNIEDYYIHWVRQMPGKGLEWMGRIDPENDETKYGPIFQGHVTISADTSINTVYLQWSSLKASDTAMYYCAFRGGVYWGQGTTVTVSSGSHHHHHHHHH

SEQ ID NO: 205412 - protein, 277 aa, Artificial Sequence
  Description of Artificial Sequence: Synthetic scFv sequence
MALPVTALLLPLALLLHAARPDVVMTQSPLSLPVTLGQPASISCKSSQSLLDSDGKTYLNWLQQRPGQSPRRLISLVSKLDSGVPDRFSGSGSGTDFTLKISRVEAEDVGVYYCWQGTHFPGTFGGGTKVEIKGGGGSGGGGSGGGGSGGGGSEIQLVQSGAEVKKPGATVKISCKGSGFNIEDYYIHWVQQAPGKGLEWMGRIDPENDETKYGPIFQGRVTITADTSTNTVYMELSSLRSEDTAVYYCAFRGGVYWGQGTTVTVSSGSHHHHHHHH

SEQ ID NO: 205413 - protein, 277 aa, Artificial Sequence
  Description of Artificial Sequence: Synthetic scFv sequence
MALPVTALLLPLALLLHAARPDVVMTQSPLSLPVTLGQPASISCKSSQSLLDSDGKTYLNWLQQRPGQSPRRLISLVSKLDSGVPDRFSGSGSGTDFTLKISRVEAEDVGVYYCWQGTHFPGTFGGGTKVEIKGGGGSGGGGSGGGGSGGGGSEIQLVQSGAEVKKPGESLRISCKGSGFNIEDYYIHWVRQMPGKGLEWMGRIDPENDETKYGPIFQGHVTISADTSINTVYLQWSSLKASDTAMYYCAFRGGVYWGQGTTVTVSSGSHHHHHHHH

SEQ ID NO: 205414 - protein, 274 aa, Artificial Sequence
  Description of Artificial Sequence: Synthetic scFv sequence
MALPVTALLLPLALLLHAARPEIQLQQSGAELVKPGASVKLSCTGSGFNIEDYYIHWVKQRTEQGLEWIGRIDPENDETKYGPIFQGRATITADTSSNTVYLQLSSLTSEDTAVYYCAFRGGVYWGPGTTLTVSSGGGGSGGGGSGGGGSHMDVVMTQSPLTLSVAIGQSASISCKSSQSLLDSDGKTYLNWLLQRPGQSPKRLISLVSKLDSGVPDRFTGSGSGTDFTLRISRVEAEDLGIYYCWQGTHFPGTFGGGTKLEIKGSHHHHHHHH

SEQ ID NO: 205415 - protein, 277 aa, Artificial Sequence
  Description of Artificial Sequence: Synthetic scFv sequence
MALPVTALLLPLALLLHAARPEIQLVQSGAEVKKPGATVKISCKGSGFNIEDYYIHWVQQAPGKGLEWMGRIDPENDETKYGPIFQGRVTITADTSTNTVYMELSSLRSEDTAVYYCAFRGGVYWGQGTTVTVSSGGGGSGGGGSGGGGSGGGGSDVVMTQSPDSLAVSLGERATINCKSSQSLLDSDGKTYLNWLQQKPGQPPKRLISLVSKLDSGVPDRFSGSGSGTDFTLTISSLQAEDVAVYYCWQGTHFPGTFGGGTKVEIKGSHHHHHHHH

SEQ ID NO: 205416 - protein, 277 aa, Artificial Sequence
  Description of Artificial Sequence: Synthetic scFv sequence
MALPVTALLLPLALLLHAARPEIQLVQSGAEVKKPGATVKISCKGSGFNIEDYYIHWVQQAPGKGLEWMGRIDPENDETKYGPIFQGRVTITADTSTNTVYMELSSLRSEDTAVYYCAFRGGVYWGQGTTVTVSSGGGGSGGGGSGGGGSGGGGSDVVMTQSPLSLPVTLGQPASISCKSSQSLLDSDGKTYLNWLQQRPGQSPRRLISLVSKLDSGVPDRFSGSGSGTDFTLKISRVEAEDVGVYYCWQGTHFPGTFGGGTKVEIKGSHHHHHHHH

SEQ ID NO: 205417 - protein, 278 aa, Artificial Sequence
  Description of Artificial Sequence: Synthetic scFv sequence
MALPVTALLLPLALLLHAARPEIQLVQSGAEVKKPGESLRISCKGSGFNIEDYYIHWVRQMPGKGLEWMGRIDPENDETKYGPIFQGHVTISADTSINTVYLQWSSLKASDTAMYYCAFRGGVYWGQGTTVTVSSGGGGSGGGGSGGGGSGGGGSDVVMTQSPDSLAVSLGERATINCKSSQSLLDSDGKTYLNWLQQKPGQPPKRLISLVSKLDSGVPDRFSGSGSGTDFTLTISSLQAEDVAVYYCWQGTHFPGTFGGGTKVEIKGSHHHHHHHHH

SEQ ID NO: 205418 - protein, 277 aa, Artificial Sequence
  Description of Artificial Sequence: Synthetic scFv sequence
MALPVTALLLPLALLLHAARPEIQLVQSGAEVKKPGESLRISCKGSGFNIEDYYIHWVRQMPGKGLEWMGRIDPENDETKYGPIFQGHVTISADTSINTVYLQWSSLKASDTAMYYCAFRGGVYWGQGTTVTVSSGGGGSGGGGSGGGGSGGGGSDVVMTQSPLSLPVTLGQPASISCKSSQSLLDSDGKTYLNWLQQRPGQSPRRLISLVSKLDSGVPDRFSGSGSGTDFTLKISRVEAEDVGVYYCWQGTHFPGTFGGGTKVEIKGSHHHHHHHH

SEQ ID NO: 205419 - protein, 363 aa, Artificial Sequence
  Description of Artificial Sequence: Synthetic scFv sequence
MATGSRTSLLLAFGLLCLPWLQEGSAAPDVQDCPECTLQENPFFSQPGAPILQCMGCCFSRAYPTPLRSKKTMLVQKNVTSESTCCVAKSYNRVTVMGGFKVENHTACHCSTCGFSASPAFFQVQLKQSGPGLVQPSQSLSITCTVSGFSLTNYGVHWVRQSPGKGLEWLGVIWSGGNTDYNTPFTSRLSINKDNSKSQVFFKMNSLQSNDTAIYYCARALTYYDYEFAYWGQGTLVTVSAGGGGSGGGGSGGGGSDILLTQSPVILSVSPGERVSFSCRASQSIGTNIHWYQQRTNGSPRLLIKYASESISGIPSRFSGSGSGTDFTLSINSVESEDIADYYCQQNNNWPTTFGAGTKLELK

SEQ ID NO: 205420 - protein, 232 aa, Artificial Sequence
  Description of Artificial Sequence: Synthetic scFv sequence
MATGSRTSLLLAFGLLCLPWLQEGSAAPDVQDCPECTLQENPFFSQPGAPILQCMGCCFSRAYPTPLRSKKTMLVQKNVTSESTCCVAKSYNRVTVMGGFKVENHTACHCSTCQVQLKQSGPGLVQPSQSLSITCTVSGFSLTNYGVHWVRQSPGKGLEWLGVIWSGGNTDYNTPFTSRLSINKDNSKSQVFFKMNSLQSNDTAIYYCARALTYYDYEFAYWGQGTLVTVSA

SEQ ID NO: 205421 - protein, 353 aa, Artificial Sequence
  Description of Artificial Sequence: Synthetic scFv sequence
MATGSRTSLLLAFGLLCLPWLQEGSAAPDVQDCPECTLQENPFFSQPGAPILQCMGCCFSRAYPTPLRSKKTMLVQKNVTSESTCCVAKSYNRVTVMGGFKVENHTACHCSTCQVQLKQSGPGLVQPSQSLSITCTVSGFSLTNYGVHWVRQSPGKGLEWLGVIWSGGNTDYNTPFTSRLSINKDNSKSQVFFKMNSLQSNDTAIYYCARALTYYDYEFAYWGQGTLVTVSAGGGGSGGGGSGGGGSDILLTQSPVILSSPGERVSFSCRASQSIGTNIHWYQQRTNGSPRLLIKYASESISGIPSRFSGSGSGTDFTLSINSVESEDIADYYCQQNNNWPTTFGAGTKLELK

SEQ ID NO: 205422 - protein, 222 aa, Artificial Sequence
  Description of Artificial Sequence: Synthetic scFv sequence
MATGSRTSLLLAFGLLCLPWLQEGSADILLTQSPVILSVSPGERVSFSCRASQSIGTNIHWYQQRTNGSPRLLIKYASESISGIPSRFSGSGSGTDFTLSINSVESEDIADYYCQQNNNWPTTFGAGTKLELKAAAPDVQDCPECTLQENPFFSQPGAPILQCMGCCFSRAYPTPLRSKKTMLVQKNVTSESTCCVAKSYNRVTVMGGFKVENHTACHCSTC

SEQ ID NO: 205423 - protein, 616 aa, Artificial Sequence
  Description of Artificial Sequence: Synthetic scFv sequence
MATGSRTSLLLAFGLLCLPWLQEGSADIQMTQSPSSLSASVGDRVTITCITSNDIDDDMNWYQQKPGKAPKLLISEGNTLRPGVPSRFSGSGYGTDFTLTISSLQPEDVATYYCFQSDNLPYTFGQGTKVEIKGGGGSGGGGSGGGGSEVQLVQSGAEVKKPGASVKVSCKASGDTFTTYVIHWMRQAPGQGLEWIGYINPYNDGTKYNEKFKGRVTITSDKSTSTAYMELSSLRSEDTAVYYCARIYYDYDGDYWGQGTLVTVSSAAAPDVQDCPECTLQENPFFSQPGAPILQCMGCCFSRAYPTPLRSKKTMLVQKNVTSESTCCVAKSYNRVTVMGGFKVENHTACHCSTCGGGGSGGGGSGGGGSGGGGSQVQLKQSGPGLVQPSQSLSITCTVSGFSLTNYGVHWVRQSPGKGLEWLGVIWSGGNTDYNTPFTSRLSINKDNSKSQVFFKMNSLQSNDTAIYYCARALTYYDYEFAYWGQGTLVTVSAGGGGSGGGGSGGGGSDILLTQSPVILSVSPGERVSFSCRASQSIGTNIHWYQQRTNGSPRLLIKYASESISGIPSRFSGSGSGTDFTLSINSVESEDIADYYCQQNNNWPTTFGAGTKLELK

SEQ ID NO: 205424 - protein, 658 aa, Artificial Sequence
  Description of Artificial Sequence: Synthetic scFv sequence
MATGSRTSLLLAFGLLCLPWLQEGSAEVQLVESGGGLVQPGGSLRLSCAASGYTFTNYGMNWVRQAPGKGLEWVGWINTYTGEPTYAADFKRRFTFSLDTSKSTAYLQMNSLRAEDTAVYYCAKYPHYYGSSHWYFDVWGQGTLVTVSSGGGGSGGGGSGGGGSDIQMTQSPSSLSASVGDRVTITCSASQDISNYLNWYQQKPGKAPKVLIYFTSSLHSGVPSRFSGSGSGTDFTLTISSLQPEDFATYYCQQYSTVPWTFGQGTKVEIKRSKEPLRPRCRPINATLAVEKEGCPVCITVNTTICAGYCPTMTRVLQGVLPALPQVVCNYRDVRFESIRLPGCPRGVNPVVSYAVALSCQCALCRRSTTDCGGPKDHPLTCDDPRFQDSSSSKAPPPSLPSPSRLPGPSDTPILPQQVQLKQSGPGLVQPSQSLSITCTVSGFSLTNYGVHWVRQSPGKGLEWLGVIWSGGNTDYNTPFTSRLSINKDNSKSQVFFKMNSLQSNDTAIYYCARALTYYDYEFAYWGQGTLVTVSAGGGGSGGGGSGGGGSDILLTQSPVILSVSPGERVSFSCRASQSIGTNIHWYQQRTNGSPRLLIKYASESISGIPSRFSGSGSGTDFTLSINSVESEDIADYYCQQNNNWPTTFGAGTKLELK

SEQ ID NO: 205425 - protein, 616 aa, Artificial Sequence
  Description of Artificial Sequence: Synthetic scFv sequence
MATGSRTSLLLAFGLLCLPWLQEGSAEVQLVQSGAEVKKPGASVKVSCKASGDTFTTYVIHWMRQAPGQGLEWIGYINPYNDGTKYNEKFKGRVTITSDKSTSTAYMELSSLRSEDTAVYYCARIYYDYDGDYWGQGTLVTVSSGGGGSGGGGSGGGGSDIQMTQSPSSLSASVGDRVTITCITSNDIDDDMNWYQQKPGKAPKLLISEGNTLRPGVPSRFSGSGYGTDFTLTISSLQPEDVATYYCFQSDNLPYTFGQGTKVEIKAAAPDVQDCPECTLQENPFFSQPGAPILQCMGCCFSRAYPTPLRSKKTMLVQKNVTSESTCCVAKSYNRVTVMGGFKVENHTACHCSTCGGGGSGGGGSGGGGSGGGGSQVQLKQSGPGLVQPSQSLSITCTVSGFSLTNYGVHWVRQSPGKGLEWLGVIWSGGNTDYNTPFTSRLSINKDNSKSQVFFKMNSLQSNDTAIYYCARALTYYDYEFAYWGQGTLVTVSAGGGGSGGGGSGGGGSDILLTQSPVILSVSPGERVSFSCRASQSIGTNIHWYQQRTNGSPRLLIKYASESISGIPSRFSGSGSGTDFTLSINSVESEDIADYYCQQNNNWPTTFGAGTKLELK

SEQ ID NO: 205426 - protein, 359 aa, Artificial Sequence
  Description of Artificial Sequence: Synthetic scFv sequence
MATGSRTSLLLAFGLLCLPWLQEGSAQVQLQESGPGLVKPSETLSLTCTVSGYSITGGYLWNWIRQPPGKGLEWIGYISYDGTNNYKPSLKDRVTISRDTSKNQFSLKLSSVTAADTAVYYCARYGRVFFDYWGQGTLVTVSSGGGGSGGGGSGGGGSDIVMTQSPLSLPVTPGEPASISCRSSQSIVHSNGNTYLQWYLQKPGQSPQLLIYKVSNRLYGVPDRFSGSGSGTDFTLKISRVEAEDVGVYYCFQGSHVPWTFGQGTKVEIKAAAPDVQDCPECTLQENPFFSQPGAPILQCMGCCFSRAYPTPLRSKKTMLVQKNVTSESTCCVAKSYNRVTVMGGFKVENHTACHCSTC

SEQ ID NO: 205427 - protein, 418 aa, Artificial Sequence
  Description of Artificial Sequence: Synthetic scFv sequence
MATGSRTSLLLAFGLLCLPWLQEGSAQVQLQESGPGLVKPSETLSLTCTVSGYSITGGYLWNWIRQPPGKGLEWIGYISYDGTNNYKPSLKDRVTISRDTSKNQFSLKLSSVTAADTAVYYCARYGRVFFDYWGQGTLVTVSSGGGGSGGGGSGGGGSDIVMTQSPLSLPVTPGEPASISCRSSQSIVHSNGNTYLQWYLQKPGQSPQLLIYKVSNRLYGVPDRFSGSGSGTDFTLKISRVEAEDVGVYYCFQGSHVPWTFGQGTKVEIKAAASKEPLRPRCRPINATLAVEKEGCPVCITVNTTICAGYCPTMTRVLQGVLPALPQVVCNYRDVRFESIRLPGCPRGVNPVVSYAVALSCQCALCRRSTTDCGGPKDHPLTCDDPRFQDSSSSKAPPPSLPSPSRLPGPSDTPILPQ

SEQ ID NO: 205428 - protein, 278 aa, Artificial Sequence
  Description of Artificial Sequence: Synthetic scFv sequence
MATGSRTSLLLAFGLLCLPWLQEGSASKEPLRPRCRPINATLAVEKEGCPVCITVNTTICAGYCPTMTRVLQGVLPALPQVVCNYRDVRFESIRLPGCPRGVNPVVSYAVALSCQCALCRRSTTDCGGPKDHPLTCDDPRFQDSSSSKAPPPSLPSPSRLPGPSDTPILPQDILLTQSPVILSVSPGERVSFSCRASQSIGTNIHWYQQRTNGSPRLLIKYASESISGIPSRFSGSGSGTDFTLSINSVESEDIADYYCQQNNNWPTTFGAGTKLELK

SEQ ID NO: 205429 - protein, 412 aa, Artificial Sequence
  Description of Artificial Sequence: Synthetic scFv sequence
MATGSRTSLLLAFGLLCLPWLQEGSASKEPLRPRCRPINATLAVEKEGCPVCITVNTTICAGYCPTMTRVLQGVLPALPQVVCNYRDVRFESIRLPGCPRGVNPVVSYAVALSCQCALCRRSTTDCGGPKDHPLTCDDPRFQDSSSSKAPPPSLPSPSRLPGPSDTPILPQQVQLKQSGPGLVQPSQSLSITCTVSGFSLTNYGVHWVRQSPGKGLEWLGVIWSGGNTDYNTPFTSRLSINKDNSKSQVFFKMNSLQSNDTAIYYCARALTYYDYEFAYWGQGTLVTVSAGGGGSGGGGSGGGGSDILLTQSPVILSVSPGERVSFSCRASQSIGTNIHWYQQRTNGSPRLLIKYASESISGIPSRFSGSGSGTDFTLSINSVESEDIADYYCQQNNNWPTTFGAGTKLELK

SEQ ID NO: 205430 - protein, 108 aa, Artificial Sequence
  Description of Artificial Sequence: Synthetic scFv sequence
QSVLTQDPAASVALGQTVKITCQGDSLRSYFASWYQQKPGQAPTLVMYARNDRPAGVPDRFSGSKSGTSASLAISGLQSEDEADYYCAAWDDSLNGYLFGAGTKLTVL

SEQ ID NO: 205431 - protein, 108 aa, Artificial Sequence
  Description of Artificial Sequence: Synthetic scFv sequence
QSVLTQDPAVSAALGQTVKITCQGDSLRSYFASWYQQKPGQAPTLVMYARNDRPAGVPDRFSGSKSGTSASLAISGLQSEDEADYYCAAWDDSLNGYLFGAGTKLTVL

SEQ ID NO: 205432 - protein, 108 aa, Artificial Sequence
  Description of Artificial Sequence: Synthetic scFv sequence
QSVLTQDPAVSVALGQTVKITCQGDSLRSYFASWYQQKPGQAPTLVMYARNDRPAGVPDRFSGSKSGTSASLAISGLQPEDEADYYCAAWDDSLNGYLFGAGTKLTVL

SEQ ID NO: 205433 - protein, 108 aa, Artificial Sequence
  Description of Artificial Sequence: Synthetic scFv sequence
QSVLTQDPAVSVALGQTVKITCQGDSLRSYFASWYQQKPGQAPTLVMYARNDRPAGVPDRFSGSKSGTSASLAISGLQSEDEADYYCAAWDDSLNGYLFGAGTKLTVL

SEQ ID NO: 205434 - protein, 108 aa, Artificial Sequence
  Description of Artificial Sequence: Synthetic scFv sequence
QSVLTQDPAVSVALGQTVKITCQGDSLRSYLASWYQQKPGQAPTLVTYARNDRPAGVPDRFSGSKSGTSASLAISGLQSEDEADYYCAAWDDSLNGYLFGAGTKLTVL

SEQ ID NO: 205435 - protein, 330 aa, Artificial Sequence
  Description of Artificial Sequence: Synthetic scFv sequence
QVQLKQSGPGLVQPSQSLSITCTVSGFSLTNYGVHWVRQSPGKGLEWLGVIWSGGNTDYNTPFTSRLSINKDNSKSQVFFKMNSLQSNDTAIYYCARALTYYDYEFAYWGQGTLVTVSAGGGGSGGGGSGGGGSDILLTQSPVILSVSPGERVSFSCRASQSIGTNIHWYQQRTNGSPRLLIKYASESISGIPSRFSGSGSGTDFTLSINSVESEDIADYYCQQNNNWPTTFGAGTKLELKAAAPDVQDCPECTLQENPFFSQPGAPILQCMGCCFSRAYPTPLRSKKTMLVQKNVTSESTCCVAKSYNRVTVMGGFKVENHTACHCSTC

SEQ ID NO: 205436 - protein, 227 aa, Artificial Sequence
  Description of Artificial Sequence: Synthetic scFv sequence
SVKLSCTGSGFNIEDYYIHWVKQRTEQGLEWIGRIDPENDETKYGPIFQGRATITADTSSNTVYLQLSSLTSEDTAVYYCAFRGGVYWGPGTTLTVSSGGGGSGGGGSGGGGSHMDVVMTQSPLTLSVAIGQSASISCKSSQSLLDSDGKTYLNWLLQRPGQSPKRLISLVSKLDSGVPDRFTGSGSGTDFTLRISRVEAEDLGIYYCWQGTHFPGTFGGGTKLEIK

SEQ ID NO: 205437 - protein, 249 aa, Artificial Sequence
  Description of Artificial Sequence: Synthetic scFv sequence
SYELTQPPSVSVAPGQTARITCSGDALGDKYASWYQQKPGQAPVLVIYEDSKRPSGIPERFSGSNSGNTATLTISGTQAEDEADYYCSVWDGDWGMPVFGGGTKLTVLGSGGSTITSYNVYYTKLSSSGSEVQLVQSGAEVKKPGESLKISCKGSGYSFTSYWIGWVRQMPGKGLEWMGIIYPGDSDTRYSPSFQGQVTISADKSISTAYLQWSSLKASDTAMYYCARGIIYPSNVAVWGQGTLVTVSS

SEQ ID NO: 205438 - protein, 246 aa, Artificial Sequence
  Description of Artificial Sequence: Synthetic scFv sequence
DVVMTQSPDSLAVSLGERATINCKSSQSLLDSDGKTYLNWLQQKPGQPPKRLISLVSKLDSGVPDRFSGSGSGTDFTLTISSLQAEDVAVYYCWQGTHFPGTFGGGTKVEIKGGGGSGGGGSGGGGSGGGGSEIQLVQSGAEVKKPGATVKISCKGSGFNIEDYYIHWVQQAPGKGLEWMGRIDPENDETKYGPIFQGRVTITADTSTNTVYMELSSLRSEDTAVYYCAFRGGVYWGQGTTVTVSS

SEQ ID NO: 205439 - protein, 246 aa, Artificial Sequence
  Description of Artificial Sequence: Synthetic scFv sequence
EIQLVQSGAEVKKPGESLRISCKGSGFNIEDYYIHWVRQMPGKGLEWMGRIDPENDETKYGPIFQGHVTISADTSINTVYLQWSSLKASDTAMYYCAFRGGVYWGQGTTVTVSSGGGGSGGGGSGGGGSGGGGSDVVMTQSPLSLPVTLGQPASISCKSSQSLLDSDGKTYLNWLQQRPGQSPRRLISLVSKLDSGVPDRFSGSGSGTDFTLKISRVEAEDVGVYYCWQGTHFPGTFGGGTKVEIK

SEQ ID NO: 205440 - protein, 246 aa, Artificial Sequence
  Description of Artificial Sequence: Synthetic scFv sequence
DVVMTQSPLSLPVTLGQPASISCKSSQSLLDSDGKTYLNWLQQRPGQSPRRLISLVSKLDSGVPDRFSGSGSGTDFTLKISRVEAEDVGVYYCWQGTHFPGTFGGGTKVEIKGGGGSGGGGSGGGGSGGGGSEIQLVQSGAEVKKPGESLRISCKGSGFNIEDYYIHWVRQMPGKGLEWMGRIDPENDETKYGPIFQGHVTISADTSINTVYLQWSSLKASDTAMYYCAFRGGVYWGQGTTVTVSS

SEQ ID NO: 205441 - protein, 246 aa, Artificial Sequence
  Description of Artificial Sequence: Synthetic scFv sequence
EIQLVQSGAEVKKPGATVKISCKGSGFNIEDYYIHWVQQAPGKGLEWMGRIDPENDETKYGPIFQGRVTITADTSTNTVYMELSSLRSEDTAVYYCAFRGGVYWGQGTTVTVSSGGGGSGGGGSGGGGSGGGGSDVVMTQSPLSLPVTLGQPASISCKSSQSLLDSDGKTYLNWLQQRPGQSPRRLISLVSKLDSGVPDRFSGSGSGTDFTLKISRVEAEDVGVYYCWQGTHFPGTFGGGTKVEIK

SEQ ID NO: 205442 - protein, 246 aa, Artificial Sequence
  Description of Artificial Sequence: Synthetic scFv sequence
EIQLVQSGAEVKKPGESLRISCKGSGFNIEDYYIHWVRQMPGKGLEWMGRIDPENDETKYGPIFQGHVTISADTSINTVYLQWSSLKASDTAMYYCAFRGGVYWGQGTTVTVSSGGGGSGGGGSGGGGSGGGGSDVVMTQSPDSLAVSLGERATINCKSSQSLLDSDGKTYLNWLQQKPGQPPKRLISLVSKLDSGVPDRFSGSGSGTDFTLTISSLQAEDVAVYYCWQGTHFPGTFGGGTKVEIK

SEQ ID NO: 205443 - protein, 246 aa, Artificial Sequence
  Description of Artificial Sequence: Synthetic scFv sequence
DVVMTQSPDSLAVSLGERATINCKSSQSLLDSDGKTYLNWLQQKPGQPPKRLISLVSKLDSGVPDRFSGSGSGTDFTLTISSLQAEDVAVYYCWQGTHFPGTFGGGTKVEIKGGGGSGGGGSGGGGSGGGGSEIQLVQSGAEVKKPGESLRISCKGSGFNIEDYYIHWVRQMPGKGLEWMGRIDPENDETKYGPIFQGHVTISADTSINTVYLQWSSLKASDTAMYYCAFRGGVYWGQGTTVTVSS

SEQ ID NO: 205444 - protein, 246 aa, Artificial Sequence
  Description of Artificial Sequence: Synthetic scFv sequence
DVVMTQSPLSLPVTLGQPASISCKSSQSLLDSDGKTYLNWLQQRPGQSPRRLISLVSKLDSGVPDRFSGSGSGTDFTLKISRVEAEDVGVYYCWQGTHFPGTFGGGTKVEIKGGGGSGGGGSGGGGSGGGGSEIQLVQSGAEVKKPGATVKISCKGSGFNIEDYYIHWVQQAPGKGLEWMGRIDPENDETKYGPIFQGRVTITADTSTNTVYMELSSLRSEDTAVYYCAFRGGVYWGQGTTVTVSS

SEQ ID NO: 205445 - protein, 246 aa, Artificial Sequence
  Description of Artificial Sequence: Synthetic scFv sequence
EIQLVQSGAEVKKPGATVKISCKGSGFNIEDYYIHWVQQAPGKGLEWMGRIDPENDETKYGPIFQGRVTITADTSTNTVYMELSSLRSEDTAVYYCAFRGGVYWGQGTTVTVSSGGGGSGGGGSGGGGSGGGGSDVVMTQSPDSLAVSLGERATINCKSSQSLLDSDGKTYLNWLQQKPGQPPKRLISLVSKLDSGVPDRFSGSGSGTDFTLTISSLQAEDVAVYYCWQGTHFPGTFGGGTKVEIK

SEQ ID NO: 205446 - protein, 262 aa, Artificial Sequence
  Description of Artificial Sequence: Synthetic scFv sequence
MVLLVTSLLLCELPHPAFLLIPDIQMTQSPSSLSASVGDRVTITCRASQGIRNNLAWYQQKPGKAPKRLIYAASNLQSGVPSRFTGSGSGTEFTLIVSSLQPEDFATYYCLQHHSYPLTSGGGTKVEIKRTGSTSGSGKPGSGEGSEVQVLESGGGLVQPGGSLRLSCAASGFTFSSYAMSWVRQAPGKGLEWVSAISGSGGSTNYADSVKGRFTISRDNSKNTLYLQMNSLRAEDTAVYYCAGSSGWSEYWGQGTLVTVSS

SEQ ID NO: 205447 - protein, 243 aa, Artificial Sequence
  Description of Artificial Sequence: Synthetic scFv sequence
EIQLQQSGAELVKPGASVKLSCTGSGFNIEDYYIHWVKQRTEQGLEWIGRIDPENDETKYGPIFQGRATITADTSSNTVYLQLSSLTSEDTAVYYCAFRGGVYWGPGTTLTVSSGGGGSGGGGSGGGGSHMDVVMTQSPLTLSVAIGQSASISCKSSQSLLDSDGKTYLNWLLQRPGQSPKRLISLVSKLDSGVPDRFTGSGSGTDFTLRISRVEAEDLGIYYCWQGTHFPGTFGGGTKLEIK

SEQ ID NO: 205448 - protein, 240 aa, Artificial Sequence
  Description of Artificial Sequence: Synthetic scFv sequence
MKYLLPTAAAGLLLLAASGAHAQVQLVQSGGGLVKPGGSLRLSCAASGFTFSSYSMNWVRQAPGKGLEWVANIKPDGSERHSVDSVKGRFTISRDNSKNSLYLQMNSLRAEDTAVYYCARPGAGRLDYWGQGTLVTVSSGGGGSGGGGSGGGGSNFMLTQDAAVSVALGQTVRITCQGDSLRSYYASWYQQKPGQAPVLVVYGKNNRPSGIPDRFSGSSSGNTASLTITGAQAEDEADYY

SEQ ID NO: 205449 - protein, 248 aa, Artificial Sequence
  Description of Artificial Sequence: Synthetic scFv sequence
QVQLQESGGGLVKPGGSLRLSCAASGFTFSSYWMSWVRQAPGKGLEWVANINRDGSASYYVDSVKGRFTISRDDAKNSLYLQMNSLRAEDTAVYYCARDRGVGYFDLWGRGTLVTVSSASTGGGGSGGGGSGGGGSQSALTQPASVSGSPGQSITISCTGTSSDVGGYNFVSWYQQHPGKAPKLMIYDVSDRPSGVSDRFSGSKSGNTASLIISGLQADDEADYYCSSYGSSSTHVIFGGGTKVTVLG

SEQ ID NO: 205450 - protein, 246 aa, Artificial Sequence
  Description of Artificial Sequence: Synthetic scFv sequence
QVQLVESGGGLVQPGGSLRLSCAASGFTFRSYAMSWVRQAPGKGLEWVSAISGRGDNTYYADSVKGRFTISRDNSKNTLYLQMNSLRAEDTAVYYCAKMTSNAFAFDYWGQGTLVTVSSGGGGSGGGGSGGGGSQSVLTQPPSVSGAPGQRVTISCTGSSSNIGAGYGVHWYQQLPGTAPKLLIYGNTNRPSGVPDRFSGFKSGTSASLAITGLQAEDEADYYCQSYDSSLSGWVFGGGTKLTVLG

SEQ ID NO: 205451 - protein, 255 aa, Artificial Sequence
  Description of Artificial Sequence: Synthetic scFv sequence
QVQLVQSGAEVKKPGESLKISCKGSGYSFTSYWIAWVRQMPGKGLEYMGLIYPGDSDTKYSPSFQGQVTISVDKSVSTAYLQWSSLKPSDSAVYFCARHDVGYCTDRTCAKWPEWLGVWGQGTLVTVSSGGGGSSGGGSGGGGSQSVLTQPPSVSAAPGQKVTISCSGSSSNIGNNYVSWYQQLPGTAPKLLIYDHTNRPAGVPDRFSGSKSGTSASLAISGFRSEDEADYYCASWDYTLSGWVFGGGTKLTVLG

SEQ ID NO: 205452 - protein, 242 aa, Artificial Sequence
  Description of Artificial Sequence: Synthetic scFv sequence
QVQLVESGGGLVQPGGSLRLSCAASGFTFSSYAMGWVRQAPGKGLEWVSSISGSSRYIYYADSVKGRFTISRDNSKNTLYLQMNSLRAEDTAVYYCAKMDASGSYFNFWGQGTLVTVSSGGGGSGGGGSGGGGSETTLTQSPSFLSAFVGDRITITCRASPGIRNYLAWYQQKPGKAPKLLIYAASTLQSGVPSRFSGSGSGTDFTLTISSLQPEDFATYYCQQYNSYPLSFGGGTKVEIKR

SEQ ID NO: 205453 - protein, 241 aa, Artificial Sequence
  Description of Artificial Sequence: Synthetic scFv sequence
EVQLLESGGGLVQPGGSLRLSCAASGFTFSSYAMSWVRQAPGKGLEWVSQIDPWGQETLYADSVKGRFTISRDNSKNTLYLQMNSLRAEDTAVYYCAKLTGRFDYWGQGTLVTVSSGGGGSGGGGSGGGGSTDIQMTQSPSSLSASVGDRVTITCRASQSISSYLNWYQQKPGKAPKLLIYSASQLQSGVPSRFSGSGSGTDFTLTISSLQPEDFATYYCQQGPGTPNTFGQGTKVEIKRA

SEQ ID NO: 205454 - protein, 247 aa, Artificial Sequence
  Description of Artificial Sequence: Synthetic scFv sequence
DIQMTQSPSSLSASVGDRVTITCRASQSISSYLNWYQQKPGKAPKLLIYAASSLQSGVPSRFSGSGSGTDFTLTISSLQPEDFATYYCQQSYSTPFTFGPGTKVDIKRSRGGGGSGGGGSGGGGSLEMAEVQLVQSGAEVKKPGSSVKVSCKASGGTFSSYAISWVRQAPGQGLEWMGGIIPIFGTANYAQKFQGRVTITADESTSTAYMELSSLRSEDTAMYYCARYWGYDSYDEWGQGTLVTVSS

SEQ ID NO: 205455 - protein, 272 aa, Artificial Sequence
  Description of Artificial Sequence: Synthetic scFv sequence
DIQMTQSPSSLSASVGDRVTITCRASQSISSYLNWYQQKPGKAPKLLIYAASSLQSGVPSRFSGSGSGTDFTLTISSLQPEDFATYYCQQSYSTPFTFGPGTKVDIKRSRGGGGSGGGGSGGGGSLEMAEVQLVQSGAEVKKPGSSVKVSCKASGGTFSSYAISWVRQAPGQGLEWMGGIIPIFGTANYAQKFQGRVTITADESTSTAYMELSSLRSEDTAMYYCARYWGYDSYDEWGQGTLVTVSSTSGQAGQHHHHHHGAYPYDVPDYAS

SEQ ID NO: 205456 - protein, 253 aa, Artificial Sequence
  Description of Artificial Sequence: Synthetic scFv sequence
DVVMTQSPPSLSVTPGEPASITCRSSQSLLERNAYNYLDWYLQRPGQSPQLLIYLGSNRAAGVPDRFSGSGSGRDFTLKISRVEPEDVGVYYCMQALQAPFTFGGGTKVEIKRSRGGGGSGGGGSGGGGSLEMAEVQLVQSGGGLVQPGGSLRLSCAASGFTFSSYAMSWVRQAPGKGLEWVSAISGSGGSTYYADSVKGRFTISRDNSKNTLYLQMNSLRAEDTAVYYCAKWGPFQDAFDIWGQGTMVTVSS

SEQ ID NO: 205457 - protein, 278 aa, Artificial Sequence
  Description of Artificial Sequence: Synthetic scFv sequence
DVVMTQSPPSLSVTPGEPASITCRSSQSLLERNAYNYLDWYLQRPGQSPQLLIYLGSNRAAGVPDRFSGSGSGRDFTLKISRVEPEDVGVYYCMQALQAPFTFGGGTKVEIKRSRGGGGSGGGGSGGGGSLEMAEVQLVQSGGGLVQPGGSLRLSCAASGFTFSSYAMSWVRQAPGKGLEWVSAISGSGGSTYYADSVKGRFTISRDNSKNTLYLQMNSLRAEDTAVYYCAKWGPFQDAFDIWGQGTMVTVSSTSGQAGQHHHHHHGAYPYDVPDYAS

SEQ ID NO: 205458 - protein, 254 aa, Artificial Sequence
  Description of Artificial Sequence: Synthetic scFv sequence
LPVLTQPPSASATPGQRVTISCSGTTSNIGSNTVHWYQQLPGTAPKLLIYNNNQRPSGVPDRFSGSKSGTSASLAISGLRSEDEATYSCATWDDSLSGVVFGGGTKLTVLGSRGGGGSGGGGSGGGGSLEMAEVQLVQSGAEVKKPGSSVKVSCKASGGTFSSYAISWVRQAPGQGLEWMGGIIPIFGTANYAQKFQGRVTITADESTSTAYMELSSLRSEDTAVYYCARDPAYGDYEYDAFDRGQGTMVTVSS

SEQ ID NO: 205459 - protein, 280 aa, Artificial Sequence
  Description of Artificial Sequence: Synthetic scFv sequence
LPVLTQPPSASATPGQRVTISCSGTTSNIGSNTVHWYQQLPGTAPKLLIYNNNQRPSGVPDRFSGSKSGTSASLAISGLRSEDEATYSCATWDDSLSGVVFGGGTKLTVLGSRGGGGSGGGGSGGGGSLEMAEVQLVQSGAEVKKPGSSVKVSCKASGGTFSSYAISWVRQAPGQGLEWMGGIIPIFGTANYAQKFQGRVTITADESTSTAYMELSSLRSEDTAVYYCARDPAYGDYEYDAFDRVGQGTMVTVSSTSGQAGQHHHHHHGAYPYDVPDYAS

SEQ ID NO: 205460 - protein, 251 aa, Artificial Sequence
  Description of Artificial Sequence: Synthetic scFv sequence
LPVLTQPPSASGTPGQRVTISCSGSSSNVGSYTVNWYRQLPGTAPTLLIYNNNQRPSGVPDRFSDSKSGTSASLTISGLQPEDEADYYCAAWDDRLGGYVFGTGTKVTVLGSRGGGGSGGGGSGGGGSLEMAEVQLVQSGAEVKKPGESLKISCKGSGYSFTNYWIGWVRQMPGKGLEWMGIIYPGDSDTRYSPSFQGQVTISADKSISTAYLQWSSLKASDTAMYYCARSTGSSHMSDEWGQGTLVTVSS

SEQ ID NO: 205461 - protein, 276 aa, Artificial Sequence
  Description of Artificial Sequence: Synthetic scFv sequence
LPVLTQPPSASGTPGQRVTISCSGSSSNVGSYTVNWYRQLPGTAPTLLIYNNNQRPSGVPDRFSDSKSGTSASLTISGLQPEDEADYYCAAWDDRLGGYVFGTGTKVTVLGSRGGGGSGGGGSGGGGSLEMAEVQLVQSGAEVKKPGESLKISCKGSGYSFTNYWIGWVRQMPGKGLEWMGIIYPGDSDTRYSPSFQGQVTISADKSISTAYLQWSSLKASDTAMYYCARSTGSSHMSDEWGQGTLVTVSSTSGQAGQHHHHHHGAYPYDVPDYAS

SEQ ID NO: 205462 - protein, 264 aa, Artificial Sequence
  Description of Artificial Sequence: Synthetic scFv sequence
LPVLTQPPSASGTPGQRVTISCSGTSSNIGSNSVDWYQQLPGTAPKLLIYSNNQRPSGVPDRISGSKSGTSASLAISGLQSEDEADYYCAAWDDSLNGYVFGTGTKVTVLGSRGGGGSGGGGSGGGGSLEMAEVQLVQSGAEVKKPGASVKVSCKASGYTFTGYYMHWVRQAPGQGLEWMGWINPNSGGTNYAQKFQGRVTMTRDTSISTAYMELSRLRSDDTAVYYCARDYGYYGSGSYSSGPLYYYYGMDVWGQGTTVTVSS

SEQ ID NO: 205463 - protein, 289 aa, Artificial Sequence
  Description of Artificial Sequence: Synthetic scFv sequence
LPVLTQPPSASGTPGQRVTISCSGTSSNIGSNSVDWYQQLPGTAPKLLIYSNNQRPSGVPDRISGSKSGTSASLAISGLQSEDEADYYCAAWDDSLNGYVFGTGTKVTVLGSRGGGGSGGGGSGGGGSLEMAEVQLVQSGAEVKKPGASVKVSCKASGYTFTGYYMHWVRQAPGQGLEWMGWINPNSGGTNYAQKFQGRVTMTRDTSISTAYMELSRLRSDDTAVYYCARDYGYYGSGSYSSGPLYYYYGMDVWGQGTTVTVSSTSGQAGQHHHHHHGAYPYDVPDYAS

SEQ ID NO: 205464 - protein, 249 aa, Artificial Sequence
  Description of Artificial Sequence: Synthetic scFv sequence
LPVLTQPPSVSVAPGKTARITCGGNNIGSKSVHWYQQKPGQAPVLVVYADSDRPSGIPERFSGSNSGNTATLTISRVEAGDEADYYCQVWDSSSYHNYVFGTGTKVTVLGSRGGGGSGGGGSGGGGSLEMAEVQLVQSGAEVKKPGASVKVSCKASGYTFTSYGISWVRQAPGQGLEWMGWISAYNGNTNYAQKLQGRVTMTTDTSTSTAYMELSSLRSEDTAMYYCARYWGFGVSDRWGQGTLVTVSS

SEQ ID NO: 205465 - protein, 274 aa, Artificial Sequence
  Description of Artificial Sequence: Synthetic scFv sequence
LPVLTQPPSVSVAPGKTARITCGGNNIGSKSVHWYQQKPGQAPVLVVYADSDRPSGIPERFSGSNSGNTATLTISRVEAGDEADYYCQVWDSSSYHNYVFGTGTKVTVLGSRGGGGSGGGGSGGGGSLEMAEVQLVQSGAEVKKPGASVKVSCKASGYTFTSYGISWVRQAPGQGLEWMGWISAYNGNTNYAQKLQGRVTMTTDTSTSTAYMELSSLRSEDTAMYYCARYWGFGVSDRWGQGTLVTVSSTSGQAGQHHHHHHGAYPYDVPDYAS

SEQ ID NO: 205466 - protein, 250 aa, Artificial Sequence
  Description of Artificial Sequence: Synthetic scFv sequence
LPVLTQPPSVSVSPGQTAIITCSGDKLGEKYVSWYQQKPGQSPVLVIDQDTRRPSGIPERFSGSNSGTTATLTISGTQAMDEADYYCQAWDRGVVFGGGTKLTVLGSRGGGGSGGGGSGGGGSLEMAEVQLVESGGDLVQPGRSLRLSCAASGFTFNDYAMHWVRQAPGKGLEWVSGISWSGNNIGYADSVKGRFTISRDNAKNSLYLQMNSLRAEDTALYYCAKDSIRYGITWGGFDYWGQGTLVTVSS

SEQ ID NO: 205467 - protein, 275 aa, Artificial Sequence
  Description of Artificial Sequence: Synthetic scFv sequence
LPVLTQPPSVSVSPGQTAIITCSGDKLGEKYVSWYQQKPGQSPVLVIDQDTRRPSGIPERFSGSNSGTTATLTISGTQAMDEADYYCQAWDRGVVFGGGTKLTVLGSRGGGGSGGGGSGGGGSLEMAEVQLVESGGDLVQPGRSLRLSCAASGFTFNDYAMHWVRQAPGKGLEWVSGISWSGNNIGYADSVKGRFTISRDNAKNSLYLQMNSLRAEDTALYYCAKDSIRYGITWGGFDYWGQGTLVTVSSTSGQAGQHHHHHHGAYPYDVPDYAS

SEQ ID NO: 205468 - protein, 251 aa, Artificial Sequence
  Description of Artificial Sequence: Synthetic scFv sequence
NFMLTQPHAVSESPGKTVTISCTRSSGSIASNYVQWYQQRPGSSPRTVIYEDNQRPSGVPGRFSGSIDSSSNSASLTISGLKTEDEADYYCQSYDSTSVLFGGGTKLTVLGSRGGGGSGGGGSGGGGSLEMAEVQLVQSGAEVKKPGSSVKVSCKASGGTFSSNSLSWVRQAPGQGLEWMGRIFPILGITNYAQKFQGRVTITADKSTSTAYMELSSLRSEDTAVYYCARGNYQWYDAFDVGQGTMVTVSS

SEQ ID NO: 205469 - protein, 276 aa, Artificial Sequence
  Description of Artificial Sequence: Synthetic scFv sequence
NFMLTQPHAVSESPGKTVTISCTRSSGSIASNYVQWYQQRPGSSPRTVIYEDNQRPSGVPGRFSGSIDSSSNSASLTISGLKTEDEADYYCQSYDSTSVLFGGGTKLTVLGSRGGGGSGGGGSGGGGSLEMAEVQLVQSGAEVKKPGSSVKVSCKASGGTFSSNSLSWVRQAPGQGLEWMGRIFPILGITNYAQKFQGRVTITADKSTSTAYMELSSLRSEDTAVYYCARGNYQWYDAFDVGQGTMVTVSSTSGQAGQHHHHHHGAYPYDVPDYAS

SEQ ID NO: 205470 - protein, 254 aa, Artificial Sequence
  Description of Artificial Sequence: Synthetic scFv sequence
NFMLTQPHSVSESPGKTVTISCTGSSDSIANNYVQWYQQRPGSAPTNVIYEDVQRPSGVPDRFSGSIDSSSNSASLTISGLKTEDEAVYYCQSYHSDNRWVFGGGTKLTVLGSRGGGGSGGGGSGGGGSLEMAQVQLVESGGGLVQPGGSLRLSCAASGFTFSSYAMSWVRQAPGKGLEWVSAISGSGGSTYYADSVKGRFTISRDNSKNTLYLQMNSLRAEDTAVYYCARSGAYWDYSVYDEWGQGTLVTVSS

SEQ ID NO: 205471 - protein, 279 aa, Artificial Sequence
  Description of Artificial Sequence: Synthetic scFv sequence
NFMLTQPHSVSESPGKTVTISCTGSSDSIANNYVQWYQQRPGSAPTNVIYEDVQRPSGVPDRFSGSIDSSSNSASLTISGLKTEDEAVYYCQSYHSDNRWVFGGGTKLTVLGSRGGGGSGGGGSGGGGSLEMAQVQLVESGGGLVQPGGSLRLSCAASGFTFSSYAMSWVRQAPGKGLEWVSAISGSGGSTYYADSVKGRFTISRDNSKNTLYLQMNSLRAEDTAVYYCARSGAYWDYSVYDEWGQGTLVTVSSTSGQAGQHHHHHHGAYPYDVPDYAS

SEQ ID NO: 205472 - protein, 248 aa, Artificial Sequence
  Description of Artificial Sequence: Synthetic scFv sequence
NFMLTQPHSVSESPGKTVTISCTGSSGSIASNYVQWYQQRPGSAPTTVIYEDNQRPSGVPDRFSGSIDSSSNSASLTISGLKTEDEADYYCQSYDSSNHWVFGGGTKLTVLGSRGGGGSGGGGSGGGGSLEMAQVQLQQWGAGLLKPSETLSLTCAVYGGSFSGYYWSWIRQPPGKGLEWIGEITHSGRSNYNPSLKSRVTISVDTSKNQFSLKLSSVTAADTAVYYCARSSIMSDYWGQGTLVTVSS

SEQ ID NO: 205473 - protein, 273 aa, Artificial Sequence
  Description of Artificial Sequence: Synthetic scFv sequence
NFMLTQPHSVSESPGKTVTISCTGSSGSIASNYVQWYQQRPGSAPTTVIYEDNQRPSGVPDRFSGSIDSSSNSASLTISGLKTEDEADYYCQSYDSSNHWVFGGGTKLTVLGSRGGGGSGGGGSGGGGSLEMAQVQLQQWGAGLLKPSETLSLTCAVYGGSFSGYYWSWIRQPPGKGLEWIGEITHSGRSNYNPSLKSRVTISVDTSKNQFSLKLSSVTAADTAVYYCARSSIMSDYWGQGTLVTVSSTSGQAGQHHHHHHGAYPYDVPDYAS

SEQ ID NO: 205474 - protein, 250 aa, Artificial Sequence
  Description of Artificial Sequence: Synthetic scFv sequence
NFMLTQPHSVSESPGKTVTISCTGSSGSIASNYVQWYQQRPGSAPTTVIYEDNQRPSGVPDRFSGSIDSSSNSASLTISGLKTEDEADYYCQSYDSSNLWVFGGGTKLTVLGSRGGGGSGGGGSGGGGSLEMAQMQLVQSGAEVKKPGSSVKVSCKASGGTFSSYAISWVRQAPGQGLEWMGGIIPIFGTANYAQKFQGRVTITADESTSTAYMELSSLRSEDTAVYYCARYNYYYYDSWGQGTLVTVSS

SEQ ID NO: 205475 - protein, 275 aa, Artificial Sequence
  Description of Artificial Sequence: Synthetic scFv sequence
NFMLTQPHSVSESPGKTVTISCTGSSGSIASNYVQWYQQRPGSAPTTVIYEDNQRPSGVPDRFSGSIDSSSNSASLTISGLKTEDEADYYCQSYDSSNLWVFGGGTKLTVLGSRGGGGSGGGGSGGGGSLEMAQMQLVQSGAEVKKPGSSVKVSCKASGGTFSSYAISWVRQAPGQGLEWMGGIIPIFGTANYAQKFQGRVTITADESTSTAYMELSSLRSEDTAVYYCARYNYYYYDSWGQGTLVTVSSTSGQAGQHHHHHHGAYPYDVPDYAS

SEQ ID NO: 205476 - protein, 249 aa, Artificial Sequence
  Description of Artificial Sequence: Synthetic scFv sequence
NFMLTQPHSVSESPGKTVTISCTGSSGSIASNYVQWYQQRPGSAPTTVIYEDNQRPSGVPDRFSGSIDSSSNSASLTISGLKTEDEADYYCQSYDSSNWVFGGGTKLTVLGSRGGGGSGGGGSGGGGSLEMAEVQLVQSGAEVKKPGSSVKVSCKASGGTFSSYAISWVRQAPGQGLEWMGGIIPIFGTANYAQKFQGRVTITADESTSTAYMELSSLRSEDTAVYYCARNNHYYNDYWGQGTLVTVSS

SEQ ID NO: 205477 - protein, 274 aa, Artificial Sequence
  Description of Artificial Sequence: Synthetic scFv sequence
NFMLTQPHSVSESPGKTVTISCTGSSGSIASNYVQWYQQRPGSAPTTVIYEDNQRPSGVPDRFSGSIDSSSNSASLTISGLKTEDEADYYCQSYDSSNWVFGGGTKLTVLGSRGGGGSGGGGSGGGGSLEMAEVQLVQSGAEVKKPGSSVKVSCKASGGTFSSYAISWVRQAPGQGLEWMGGIIPIFGTANYAQKFQGRVTITADESTSTAYMELSSLRSEDTAVYYCARNNHYYNDYWGQGTLVTVSSTSGQAGQHHHHHHGAYPYDVPDYAS

SEQ ID NO: 205478 - protein, 248 aa, Artificial Sequence
  Description of Artificial Sequence: Synthetic scFv sequence
NFMLTQPHSVSESPGKTVTISCTRSSGSIASNFVQWYQQRPGSAPTPMIYEDNNRPPGVPDRFSASVDSSSNSASLTISGLKTEDEADYYCQSYDTSNVVFGGGTKLTVLGSRGGGGSGGGGSGGGGSLEMAEVQLVESGGGLVQPGGSLRLSCAASGFTFSSYEMNWVRQAPGKGLEWVSYISSSGSTIYYADSVKGRFTISRDNAKNSLYLQMNSLRAEDTAVYYCARWDYGMDVWGQGTTVTVSS

SEQ ID NO: 205479 - protein, 273 aa, Artificial Sequence
  Description of Artificial Sequence: Synthetic scFv sequence
NFMLTQPHSVSESPGKTVTISCTRSSGSIASNFVQWYQQRPGSAPTPMIYEDNNRPPGVPDRFSASVDSSSNSASLTISGLKTEDEADYYCQSYDTSNVVFGGGTKLTVLGSRGGGGSGGGGSGGGGSLEMAEVQLVESGGGLVQPGGSLRLSCAASGFTFSSYEMNWVRQAPGKGLEWVSYISSSGSTIYYADSVKGRFTISRDNAKNSLYLQMNSLRAEDTAVYYCARWDYGMDVWGQGTTVTVSSTSGQAGQHHHHHHGAYPYDVPDYAS

SEQ ID NO: 205480 - protein, 249 aa, Artificial Sequence
  Description of Artificial Sequence: Synthetic scFv sequence
NFMLTQPHSVSESPGKTVTISCTRSSGSIASNYVQWYQQRPGSAPTTVIYEDNQRPSGVPDRFSGSIDSSSNSASLTISGLKTEDEADYYCQSYDSSNSVVFGGGTKLTVLGSRGGGGSGGGGSGGGGSLEMAQVQLVQSGTEVKKPGASVRVACKASGYPFNKYDINWVRQAPGQGLEWMGGIIPIFRTTNYAQKFQGRVTITADESTSTAYMELSSLRSEDTAVYYCAREWFYWDIWGQGTLVTVSS

SEQ ID NO: 205481 - protein, 274 aa, Artificial Sequence
  Description of Artificial Sequence: Synthetic scFv sequence
NFMLTQPHSVSESPGKTVTISCTRSSGSIASNYVQWYQQRPGSAPTTVIYEDNQRPSGVPDRFSGSIDSSSNSASLTISGLKTEDEADYYCQSYDSSNSVVFGGGTKLTVLGSRGGGGSGGGGSGGGGSLEMAQVQLVQSGTEVKKPGASVRVACKASGYPFNKYDINWVRQAPGQGLEWMGGIIPIFRTTNYAQKFQGRVTITADESTSTAYMELSSLRSEDTAVYYCAREWFYWDIWGQGTLVTVSSTSGQAGQHHHHHHGAYPYDVPDYAS

SEQ ID NO: 205482 - protein, 265 aa, Artificial Sequence
  Description of Artificial Sequence: Synthetic scFv sequence
NFMLTQPHSVSESPGKTVTISCTRSSGSIASNYVQWYQQRPGSAPTTVIYEDNQRPSGVPDRFSGSIDSSSNSASLTISGLKTEDEADYYCQSYDSSNSWVFGGGTKLTVLGSRGGGGSGGGGSGGGGSLEMAQVQLVQSGAEVKRPGSSVKVSCTASGGTFSSDAISWVRQAPGQGLEWMGGIIPMFGTANYAQKFQGRVTITADESTSTAYMELSSLRSEDTAVYYCAREGYYYPSAYLGSVLNDISSVYDEWGQGTLVTVSS

SEQ ID NO: 205483 - protein, 290 aa, Artificial Sequence
  Description of Artificial Sequence: Synthetic scFv sequence
NFMLTQPHSVSESPGKTVTISCTRSSGSIASNYVQWYQQRPGSAPTTVIYEDNQRPSGVPDRFSGSIDSSSNSASLTISGLKTEDEADYYCQSYDSSNSWVFGGGTKLTVLGSRGGGGSGGGGSGGGGSLEMAQVQLVQSGAEVKRPGSSVKVSCTASGGTFSSDAISWVRQAPGQGLEWMGGIIPMFGTANYAQKFQGRVTITADESTSTAYMELSSLRSEDTAVYYCAREGYYYPSAYLGSVLNDISSVYDEWGQGTLVTVSSTSGQAGQHHHHHHGAYPYDVPDYAS

SEQ ID NO: 205484 - protein, 273 aa, Artificial Sequence
  Description of Artificial Sequence: Synthetic scFv sequence
NFMLTQPHSVSESPGKTVTISCTRSSGSIASNYVQWYQQRPGSAPTTVIYEDNQRPSGVPDRFSGSIDSSSNSASLTISGLKTEDEADYYCQSYDSSNVVFGGGTKVTVLGSRGGGGSGGGGSGGGGSLEMAEVQLVESGGGLVQPGGSLRLSCAASGFTFSSYEMNWVRQAPGKGLEWVSYISSSGSTIYYADSVKGRFTISRDNAKNSLYLQMNSLRAEDTAVYYCARWDYGMDVWGQGTTVTVSSTSGQAGQHHHHHHGAYPYDVPDYAS

SEQ ID NO: 205485 - protein, 249 aa, Artificial Sequence
  Description of Artificial Sequence: Synthetic scFv sequence
NFMLTQPHSVSESPGKTVTISCTRSSGSIASNYVQWYQQRPGSAPTTVIYEDNQRPSGVPDRFSGSIDSSSNSASLTISGLKTEDEADYYCQSYDSTNWVFGGGTKLTVLGSRGGGGSGGGGSGGGGSLEMAQVQLVQSGAEVKKPGSSVKVSCKASGGTFSSYAISWVRQAPGQGLEWMGGIIPIFGTANYAQKFQGRVTITADESTSTAYMELSSLRSEDTAVYYCARYNYYFNDYWGQGTLVTVSS

SEQ ID NO: 205486 - protein, 274 aa, Artificial Sequence
  Description of Artificial Sequence: Synthetic scFv sequence
NFMLTQPHSVSESPGKTVTISCTRSSGSIASNYVQWYQQRPGSAPTTVIYEDNQRPSGVPDRFSGSIDSSSNSASLTISGLKTEDEADYYCQSYDSTNWVFGGGTKLTVLGSRGGGGSGGGGSGGGGSLEMAQVQLVQSGAEVKKPGSSVKVSCKASGGTFSSYAISWVRQAPGQGLEWMGGIIPIFGTANYAQKFQGRVTITADESTSTAYMELSSLRSEDTAVYYCARYNYYFNDYWGQGTLVTVSSTSGQAGQHHHHHHGAYPYDVPDYAS

SEQ ID NO: 205487 - protein, 249 aa, Artificial Sequence
  Description of Artificial Sequence: Synthetic scFv sequence
NFMLTQPHSVSESPGKTVTISCTRSSGSIASNYVQWYQQRPGSSPTTVIYEDNQRPSGVPDRFSGSIDSSSNSASLTISGLKTEDEADYYCQSYDSSNWVFGGGTKLTVLGSRGGGGSGGGGSGGGGSLEMAEVQLVQSGAEVKKPGSSVKVSCKASGGTFSSYAISWVRQAPGQGLEWMGGIIPIFGTANYAQKFQGRVTITADESTSTAYMELSSLRSEDTAVYYCARSNYYYNDYWGQGTLVTVSS

SEQ ID NO: 205488 - protein, 274 aa, Artificial Sequence
  Description of Artificial Sequence: Synthetic scFv sequence
NFMLTQPHSVSESPGKTVTISCTRSSGSIASNYVQWYQQRPGSSPTTVIYEDNQRPSGVPDRFSGSIDSSSNSASLTISGLKTEDEADYYCQSYDSSNWVFGGGTKLTVLGSRGGGGSGGGGSGGGGSLEMAEVQLVQSGAEVKKPGSSVKVSCKASGGTFSSYAISWVRQAPGQGLEWMGGIIPIFGTANYAQKFQGRVTITADESTSTAYMELSSLRSEDTAVYYCARSNYYYNDYWGQGTLVTVSSTSGQAGQHHHHHHGAYPYDVPDYAS

SEQ ID NO: 205489 - protein, 249 aa, Artificial Sequence
  Description of Artificial Sequence: Synthetic scFv sequence
NFMLTQPHSVSGSPGKTVTISCTGSSGSIADNFVQWYQQRPGGVPTTVIFNDDERPSGVPDRFSGSIDTSSNSASLTISGLKTEDEADYYCQSYDNNNRGVFGGGTKLTVLGSRGGGGSGGGGSGGGGSLEMAQVQLVQSGAEVKKPGSSVKVSCKASGGTFSSYAISWVRQAPGQGLEWMGWMNPNSGNTGYAQKFQGRVTMTRNTSISTAYMELSNLRSEDTAVYYCARYYSYGYDWGQGTLVTVSS

SEQ ID NO: 205490 - protein, 274 aa, Artificial Sequence
  Description of Artificial Sequence: Synthetic scFv sequence
NFMLTQPHSVSGSPGKTVTISCTGSSGSIADNFVQWYQQRPGGVPTTVIFNDDERPSGVPDRFSGSIDTSSNSASLTISGLKTEDEADYYCQSYDNNNRGVFGGGTKLTVLGSRGGGGSGGGGSGGGGSLEMAQVQLVQSGAEVKKPGSSVKVSCKASGGTFSSYAISWVRQAPGQGLEWMGWMNPNSGNTGYAQKFQGRVTMTRNTSISTAYMELSNLRSEDTAVYYCARYYSYGYDWGQGTLVTVSSTSGQAGQHHHHHHGAYPYDVPDYAS

SEQ ID NO: 205491 - protein, 256 aa, Artificial Sequence
  Description of Artificial Sequence: Synthetic scFv sequence
QAVLTQPASVSGSPGQSITISCTGTSSDVGGYNYVSWYQQHPGKAPKLMIYEVSNRPSGVSNRFSGSKSGNTASLTISGLQAEDEADYYCSSYTSSSTPYVFGAGTKVTVLGSRGGGGSGGGGSGGGGSLEMAEVQLVESGGGLVQPGRSLRLSCAASGFTFDDYAMHWVRQAPGKGLEWVSGISWNSGSIGYADSVKGRFTISRDNAKNSLYLQMNSLRAEDTALYYCAKARWTAVASDHHFDYWGQGTLVTVSS

SEQ ID NO: 205492 - protein, 281 aa, Artificial Sequence
  Description of Artificial Sequence: Synthetic scFv sequence
QAVLTQPASVSGSPGQSITISCTGTSSDVGGYNYVSWYQQHPGKAPKLMIYEVSNRPSGVSNRFSGSKSGNTASLTISGLQAEDEADYYCSSYTSSSTPYVFGAGTKVTVLGSRGGGGSGGGGSGGGGSLEMAEVQLVESGGGLVQPGRSLRLSCAASGFTFDDYAMHWVRQAPGKGLEWVSGISWNSGSIGYADSVKGRFTISRDNAKNSLYLQMNSLRAEDTALYYCAKARWTAVASDHHFDYWGQGTLVTVSSTSGQAGQHHHHHHGAYPYDVPDYAS

SEQ ID NO: 205493 - protein, 257 aa, Artificial Sequence
  Description of Artificial Sequence: Synthetic scFv sequence
QAVLTQPHSVSESPGKTVTISCTRSSGSIASNYVQWYQQRPGSAPTTVIYEDNQRPSGVPDRFSGSIDSSSNSASLTISGLKTEDEADYYCQSYDSTITVFGGGTKLTVLGSRGGGGSGGGGSGGGGSLEMAQVQLVQSGAEVKKPGSSVKVSCKASGGTFSSYAISWVRQAPGQGLEWMGGIIPIFGTANYAQKFQGRVTITADESTSTAYMELSSLRSEDTAVYYCAGEGYYDSSGYSNGDAFDRGQGTMVTVSS

SEQ ID NO: 205494 - protein, 283 aa, Artificial Sequence
  Description of Artificial Sequence: Synthetic scFv sequence
QAVLTQPHSVSESPGKTVTISCTRSSGSIASNYVQWYQQRPGSAPTTVIYEDNQRPSGVPDRFSGSIDSSSNSASLTISGLKTEDEADYYCQSYDSTITVFGGGTKLTVLGSRGGGGSGGGGSGGGGSLEMAQVQLVQSGAEVKKPGSSVKVSCKASGGTFSSYAISWVRQAPGQGLEWMGGIIPIFGTANYAQKFQGRVTITADESTSTAYMELSSLRSEDTAVYYCAGEGYYDSSGYSNGDAFDRVGQGTMVTVSSTSGQAGQHHHHHHGAYPYDVPDYAS

SEQ ID NO: 205495 - protein, 247 aa, Artificial Sequence
  Description of Artificial Sequence: Synthetic scFv sequence
QAVLTQPPSASETPGQRVTISCSGSRSNIGTNIVHWYQQRPGMAPKLLTYGSRRPSGVPDRFSGSKFGTSASLAISGLQSEDEADYYCAAWDDSLNGPAFGGGTKLTVLGSRGGGGSGGGGSGGGGSLEMAQVQLQQWGAGLLKPSETLSLTCAVYGGSFSGYYWSWIRQPPGKGLEWIGEINHSGSTNYNPSLKSRVTISVDTSKNQFSLKLSSVTAADTAVYYCARDGGGYFDYWGQGTLVTVSS

SEQ ID NO: 205496 - protein, 272 aa, Artificial Sequence
  Description of Artificial Sequence: Synthetic scFv sequence
QAVLTQPPSASETPGQRVTISCSGSRSNIGTNIVHWYQQRPGMAPKLLTYGSRRPSGVPDRFSGSKFGTSASLAISGLQSEDEADYYCAAWDDSLNGPAFGGGTKLTVLGSRGGGGSGGGGSGGGGSLEMAQVQLQQWGAGLLKPSETLSLTCAVYGGSFSGYYWSWIRQPPGKGLEWIGEINHSGSTNYNPSLKSRVTISVDTSKNQFSLKLSSVTAADTAVYYCARDGGGYFDYWGQGTLVTVSSTSGQAGQHHHHHHGAYPYDVPDYAS

SEQ ID NO: 205497 - protein, 253 aa, Artificial Sequence
  Description of Artificial Sequence: Synthetic scFv sequence
QAVLTQPPSASGAPGQRVTVSCSGSNSNIGSNYVNWYQQFPGTAPKLLMYSSSQRPSGVPDRFSGSKSGTSASLAISGLHSEDEADYYCATWDDSLNAWVFGGGTKLTVLGSRGGGGSGGGGSGGGGSLEMAEVQLVQSGAEVRKPGASVKVSCKTSGYTFTWYAIHWVRQAPGQRLEWMGWINAGSGNTKYSQKFQGRVTLTRDTSASTAYMELSSLRSDDTAVYYCARPNNYGSGGDVFDRGQGTMVTVSS

SEQ ID NO: 205498 - protein, 278 aa, Artificial Sequence
  Description of Artificial Sequence: Synthetic scFv sequence
QAVLTQPPSASGAPGQRVTVSCSGSNSNIGSNYVNWYQQFPGTAPKLLMYSSSQRPSGVPDRFSGSKSGTSASLAISGLHSEDEADYYCATWDDSLNAWVFGGGTKLTVLGSRGGGGSGGGGSGGGGSLEMAEVQLVQSGAEVRKPGASVKVSCKTSGYTFTWYAIHWVRQAPGQRLEWMGWINAGSGNTKYSQKFQGRVTLTRDTSASTAYMELSSLRSDDTAVYYCARPNNYGSGGDVFDRGQGTMVTVSSTSGQAGQHHHHHHGAYPYDVPDYAS

SEQ ID NO: 205499 - protein, 248 aa, Artificial Sequence
  Description of Artificial Sequence: Synthetic scFv sequence
QAVLTQPPSASGTPGQRVTISCSGSSSNIGSNTVNWYQQLPGTAPKLLIYSNNQRPSGVPDRFSGSKSGTSASLAISGLQSEDEADYYCAAWDDSLNGYVFGTGTKLTVLGSRGGGGSGGGGSGGGGSLEMAEVQLVQSGAEVKKPGSSVKVSCKASGGTFSSYAISWVRQAPGQGLEWMGGIIPIFGTANYAQKFQGRVTITADESTSTAYMELSSLRSEDTAVYYCARDWDYMDVWGKGTTVTVSS

SEQ ID NO: 205500 - protein, 273 aa, Artificial Sequence
  Description of Artificial Sequence: Synthetic scFv sequence
QAVLTQPPSASGTPGQRVTISCSGSSSNIGSNTVNWYQQLPGTAPKLLIYSNNQRPSGVPDRFSGSKSGTSASLAISGLQSEDEADYYCAAWDDSLNGYVFGTGTKLTVLGSRGGGGSGGGGSGGGGSLEMAEVQLVQSGAEVKKPGSSVKVSCKASGGTFSSYAISWVRQAPGQGLEWMGGIIPIFGTANYAQKFQGRVTITADESTSTAYMELSSLRSEDTAVYYCARDWDYMDVWGKGTTVTVSSTSGQAGQHHHHHHGAYPYDVPDYAS

SEQ ID NO: 205501 - protein, 248 aa, Artificial Sequence
  Description of Artificial Sequence: Synthetic scFv sequence
QAVLTQPPSASGTPGQRVTISCSGSSSNIGSNTVNWYQQLPGTAPKLLIYSNNQRPSGVPDRFSGSKSGTSASLAISGLQSEDETDYYCAAWDDSLNGYVFGTGTKVTVLGSRGGGGSGGGGSGGGGSLEMAQVQLQQWGAGLLKPSETLSLTCAVYGGSFSGYYWSWIRQPPGKGLEWIGEINHSGSTNYNPSLKSRVTISVDTSKNQFSLKLSSVTAADTAVYYCAREGLDAFDIWGQGTMVTVSS

SEQ ID NO: 205502 - protein, 273 aa, Artificial Sequence
  Description of Artificial Sequence: Synthetic scFv sequence
QAVLTQPPSASGTPGQRVTISCSGSSSNIGSNTVNWYQQLPGTAPKLLIYSNNQRPSGVPDRFSGSKSGTSASLAISGLQSEDETDYYCAAWDDSLNGYVFGTGTKVTVLGSRGGGGSGGGGSGGGGSLEMAQVQLQQWGAGLLKPSETLSLTCAVYGGSFSGYYWSWIRQPPGKGLEWIGEINHSGSTNYNPSLKSRVTISVDTSKNQFSLKLSSVTAADTAVYYCAREGLDAFDIWGQGTMVTVSSTSGQAGQHHHHHHGAYPYDVPDYAS

SEQ ID NO: 205503 - protein, 259 aa, Artificial Sequence
  Description of Artificial Sequence: Synthetic scFv sequence
QAVLTQPPSASGTPGQRVTISCSGSSSNIGSNTVNWYQQLPGTAPKLLMYNNDQRPSGVPDRFSGSKSGTSASLAISGLQSEDEADYYCAAWDDSLNGYVFGPGTKVTVLGSRGGGGSGGGGSGGGGSLEMAQVQLVESGAEVKKPGASVKVSCKASGYTFTSYGISWVRQAPGQGLEWMGWISAYNGNTNYAQKLQGRVTMTTDTSTSTAYMELRSLRSDDTAVYYCARDLSRGANPHYYYYYGMDVWGQGTTVTVSS

SEQ ID NO: 205504 - protein, 284 aa, Artificial Sequence
  Description of Artificial Sequence: Synthetic scFv sequence
QAVLTQPPSASGTPGQRVTISCSGSSSNIGSNTVNWYQQLPGTAPKLLMYNNDQRPSGVPDRFSGSKSGTSASLAISGLQSEDEADYYCAAWDDSLNGYVFGPGTKVTVLGSRGGGGSGGGGSGGGGSLEMAQVQLVESGAEVKKPGASVKVSCKASGYTFTSYGISWVRQAPGQGLEWMGWISAYNGNTNYAQKLQGRVTMTTDTSTSTAYMELRSLRSDDTAVYYCARDLSRGANPHYYYYYGMDVWGQGTTVTVSSTSGQAGQHHHHHHGAYPYDVPDYAS

SEQ ID NO: 205505 - protein, 247 aa, Artificial Sequence
  Description of Artificial Sequence: Synthetic scFv sequence
QAVLTQPPSASGTPGQRVTISCSGSSSNIGSNTVNWYQQLPGTAPKLLMYSNDQRPSGVPDRFSGSKSGTSASLAISGLQSEDEADYYCAAWDDSLNGYVFAAGTQLTVLSSRGGGGSGGGGSGGGGSLEMAQVQLQQWGAGLLKPSETLSLTCAVYGGSFSGYYWSWIRQPPGKGLEWIGEINHSGSTNYNPSLKSRVTISVDTSKNQFSLKLSSVTAADTAVYYCAREGLDAFDRGQGTMVTVSS

SEQ ID NO: 205506 - protein, 273 aa, Artificial Sequence
  Description of Artificial Sequence: Synthetic scFv sequence
QAVLTQPPSASGTPGQRVTISCSGSSSNIGSNTVNWYQQLPGTAPKLLMYSNDQRPSGVPDRFSGSKSGTSASLAISGLQSEDEADYYCAAWDDSLNGYVFAAGTQLTVLSSRGGGGSGGGGSGGGGSLEMAQVQLQQWGAGLLKPSETLSLTCAVYGGSFSGYYWSWIRQPPGKGLEWIGEINHSGSTNYNPSLKSRVTISVDTSKNQFSLKLSSVTAADTAVYYCAREGLDAFDRVGQGTMVTVSSTSGQAGQHHHHHHGAYPYDVPDYAS

SEQ ID NO: 205507 - protein, 247 aa, Artificial Sequence
  Description of Artificial Sequence: Synthetic scFv sequence
QAVLTQPPSTSGTPGQRVTISCSGSSSNIGRNGVNWYQQLPGAAPKVLIYNDNQRPSGVPDRVSGSQSGSSGTLAIDGLRSEDEADYYCAAWDDSLHGVVFGGGTKLTVLGSRGGGGSGGGGSGGGGSLEMAQVQLVQSGAEVKKPGASVKVSCKVSGYTLNELSMHWVRQAPGKGLEWMGGFDPEDGETIYAQKFQGRVTMTEDTSTDTAYMELSSLRSEDTAVYYCARGGYGDSWGQGTLVTVSS

SEQ ID NO: 205508 - protein, 272 aa, Artificial Sequence
  Description of Artificial Sequence: Synthetic scFv sequence
QAVLTQPPSTSGTPGQRVTISCSGSSSNIGRNGVNWYQQLPGAAPKVLIYNDNQRPSGVPDRVSGSQSGSSGTLAIDGLRSEDEADYYCAAWDDSLHGVVFGGGTKLTVLGSRGGGGSGGGGSGGGGSLEMAQVQLVQSGAEVKKPGASVKVSCKVSGYTLNELSMHWVRQAPGKGLEWMGGFDPEDGETIYAQKFQGRVTMTEDTSTDTAYMELSSLRSEDTAVYYCARGGYGDSWGQGTLVTVSSTSGQAGQHHHHHHGAYPYDVPDYAS

SEQ ID NO: 205509 - protein, 249 aa, Artificial Sequence
  Description of Artificial Sequence: Synthetic scFv sequence
QAVLTQPPSVSVAPGKTARVTCGGNNIGSESVHWYQQKPGQAPVLVIYYDTDRPSGIPERFSGSHSGTTATLTISRVEAGDEADYYCQVWDSSRDHVVFGGGTKLTVLGSRGGGGSGGGGSGGGGSLEMAQVQLVQSGGGVVQPGRSLRLSCAASGFTFSSYAMHWVRQAPGKGLEWVAVISYDGSNKYYADSVKGLFTISRDNSKNTLYLQMNSLRAEDTAVYYCARSYFTSGFYDYWGQGTLVTVSS

SEQ ID NO: 205510 - protein, 274 aa, Artificial Sequence
  Description of Artificial Sequence: Synthetic scFv sequence
QAVLTQPPSVSVAPGKTARVTCGGNNIGSESVHWYQQKPGQAPVLVIYYDTDRPSGIPERFSGSHSGTTATLTISRVEAGDEADYYCQVWDSSRDHVVFGGGTKLTVLGSRGGGGSGGGGSGGGGSLEMAQVQLVQSGGGVVQPGRSLRLSCAASGFTFSSYAMHWVRQAPGKGLEWVAVISYDGSNKYYADSVKGLFTISRDNSKNTLYLQMNSLRAEDTAVYYCARSYFTSGFYDYWGQGTLVTVSSTSGQAGQHHHHHHGAYPYDVPDYAS

SEQ ID NO: 205511 - protein, 250 aa, Artificial Sequence
  Description of Artificial Sequence: Synthetic scFv sequence
QPVLTQPPSVSKGLRQTATLTCTGNSNNVGNLGVAWLQQHQGHPPKLLSYRNNNRPSGISERLSASRSGNTASLTITGLQPEDEADYYCSAWDSSLSAWVFGGGTKLTVLGSRGGGGSGGGGSGGGGSLEMAEVQLVESGGVVVQPGGSLRLSCAASGFTFDDYAMHWVRQAPGKGLEWVSLINWDGGSTYYADSVKGRFTISRDNSKNSLYLQMNSLRAEDTALYYCAKGMGLRAFDYWGQGTLVTVSS

SEQ ID NO: 205512 - protein, 275 aa, Artificial Sequence
  Description of Artificial Sequence: Synthetic scFv sequence
QPVLTQPPSVSKGLRQTATLTCTGNSNNVGNLGVAWLQQHQGHPPKLLSYRNNNRPSGISERLSASRSGNTASLTITGLQPEDEADYYCSAWDSSLSAWVFGGGTKLTVLGSRGGGGSGGGGSGGGGSLEMAEVQLVESGGVVVQPGGSLRLSCAASGFTFDDYAMHWVRQAPGKGLEWVSLINWDGGSTYYADSVKGRFTISRDNSKNSLYLQMNSLRAEDTALYYCAKGMGLRAFDYWGQGTLVTVSSTSGQAGQHHHHHHGAYPYDVPDYAS

SEQ ID NO: 205513 - protein, 245 aa, Artificial Sequence
  Description of Artificial Sequence: Synthetic scFv sequence
QPVLTQPPSVSVAPGKTATITCGGNNIGSESVHWYHQKPGQAPVLVIYDDAGRPSGIPERFTGSNSGNTATLTISRVEAGDEADYYCQVWDRNSAQFVFGPGTKVTVLGSRGGGGSGGGGSGGGGSLEMAEVQLVQSGAEVKKPGASVKVSCKASGYTFTSYGISWVRQAPGQGLEWMGWISAYNGNTNYAQKLQGRVTMTTDTSTSTAYMELRSLRSDDTAVYYCARGVHLDWWGQGTLVTVSS

SEQ ID NO: 205514 - protein, 270 aa, Artificial Sequence
  Description of Artificial Sequence: Synthetic scFv sequence
QPVLTQPPSVSVAPGKTATITCGGNNIGSESVHWYHQKPGQAPVLVIYDDAGRPSGIPERFTGSNSGNTATLTISRVEAGDEADYYCQVWDRNSAQFVFGPGTKVTVLGSRGGGGSGGGGSGGGGSLEMAEVQLVQSGAEVKKPGASVKVSCKASGYTFTSYGISWVRQAPGQGLEWMGWISAYNGNTNYAQKLQGRVTMTTDTSTSTAYMELRSLRSDDTAVYYCARGVHLDWWGQGTLVTVSSTSGQAGQHHHHHHGAYPYDVPDYAS

SEQ ID NO: 205515 - protein, 250 aa, Artificial Sequence
  Description of Artificial Sequence: Synthetic scFv sequence
QPVLTQPPSVSVSPGQTAAIPCSGDKLGDKFASWYQQKPGQSPVLVIYQDTKRPSGIPERFSGSNSGNTATLTISGTQAMDEADYYCQTWASGRVVFGGGTKLTVLGSRGGGGSGGGGSGGGGSLEMAQVQLQQSGPGLVKPSQTLSLTCAISGDSVSSNSAAWNWIRQSPSRGLEWLGRTYYRSKWYNDYAVSVKSRITINPDTSKNQFSLQLNSVTPEDTAVYYCARERSGWKGFDYWGQGTLVTVSS

SEQ ID NO: 205516 - protein, 275 aa, Artificial Sequence
  Description of Artificial Sequence: Synthetic scFv sequence
QPVLTQPPSVSVSPGQTAAIPCSGDKLGDKFASWYQQKPGQSPVLVIYQDTKRPSGIPERFSGSNSGNTATLTISGTQAMDEADYYCQTWASGRVVFGGGTKLTVLGSRGGGGSGGGGSGGGGSLEMAQVQLQQSGPGLVKPSQTLSLTCAISGDSVSSNSAAWNWIRQSPSRGLEWLGRTYYRSKWYNDYAVSVKSRITINPDTSKNQFSLQLNSVTPEDTAVYYCARERSGWKGFDYWGQGTLVTVSSTSGQAGQHHHHHHGAYPYDVPDYAS

SEQ ID NO: 205517 - protein, 248 aa, Artificial Sequence
  Description of Artificial Sequence: Synthetic scFv sequence
QPVLTQPPSVSVVPGKTARITCGGKNIGSKSVHWYQQKPGQAPVVVIHYDSDRPSGIPERFSGSNSGNTATLTISRVEAGDEADYYCQVWDSSSDHPYVFGTGTKVTVLGSRGGGGSGGGGSGGGGSLEMAQVQLVQSGAEVKKPGASVKVSCKASGYTFTNYGISWVRQAPGQGLEWMGWISAYNGNTNYAHKLQGRVTMTTDTSTSTANMELRSLRPDDTAVYYCARSYFGSHDYWGQGTLVTVSS

SEQ ID NO: 205518 - protein, 273 aa, Artificial Sequence
  Description of Artificial Sequence: Synthetic scFv sequence
QPVLTQPPSVSVVPGKTARITCGGKNIGSKSVHWYQQKPGQAPVVVIHYDSDRPSGIPERFSGSNSGNTATLTISRVEAGDEADYYCQVWDSSSDHPYVFGTGTKVTVLGSRGGGGSGGGGSGGGGSLEMAQVQLVQSGAEVKKPGASVKVSCKASGYTFTNYGISWVRQAPGQGLEWMGWISAYNGNTNYAHKLQGRVTMTTDTSTSTANMELRSLRPDDTAVYYCARSYFGSHDYWGQGTLVTVSSTSGQAGQHHHHHHGAYPYDVPDYAS

SEQ ID NO: 205519 - protein, 256 aa, Artificial Sequence
  Description of Artificial Sequence: Synthetic scFv sequence
QSALTQPASVSGSPGQSITISCTGTSSDIGGYNYVSWYQQHPGKAPKLMIYDVSNRPSGVSNRFSGSKSGNTASLTISGLQAEDEADYYCISYTRTWNPYVFGSGTKVTVLGSRGGGGSGGGGSGGGGSLEMAEVQLVQSGGGVVQPGGSLRLSCAASGFTFDDYAMHWVRQAPGKGLEWVSLISGDGGSTYYADSVKGRFTISRDNSKNSLYLQMNSLRTEDTALYYCAKDRAAAGYYYYGMDVWGQGTTVTVSS

SEQ ID NO: 205520 - protein, 274 aa, Artificial Sequence
  Description of Artificial Sequence: Synthetic scFv sequence
QSALTQPASVSGSPGQSITISCTGTSSDVGGYNSVSWYQQHPGKAPRLMIYDVSNRPSGVSNRFSGSKSGNTASLTISGLQAEDEADYYCSSYTSSSTPLVFGTGTKVTVLGSRGGGGSGGGGSGGGGSLEMAQVQLVQSGAEVKKPGASVKVSCKASGYTFTSYGISWVRQAPGQGLEWMGWISAYNGNTNYAQKLQGRVTMTTDTSTSTAYMELRSLRSDDTAVYYCARGAVAYHDWGQGTLVTVSSTSGQAGQHHHHHHGAYPYDVPDYAS

SEQ ID NO: 205521 - protein, 279 aa, Artificial Sequence
  Description of Artificial Sequence: Synthetic scFv sequence
QSALTQPASVSGSPGQSMSCTGTSSDIGGYNYVSWYQQHPGKAPKLMIYDVSNRPSGVSNRFSGSKSGNTASLTISGLQAEDEADYYCISYTRTWNPYVFGSGTKVTVLGSRGGGGSGGGGSGGGGSLEMAEVQLVQSGGGVVQPGGSLRLSCAASGFTFDDYAMHWVRQAPGKGLEWVSLISGDGGSTYYADSVKGRFTISRDNSKNSLYLQMNSLRTEDTALYYCAKDRAAAGYYYYGMDVWGQGTTVTVSSTSGQAGQHHHHHHGAYPYDVPDYAS

SEQ ID NO: 205522 - protein, 272 aa, Artificial Sequence
  Description of Artificial Sequence: Synthetic scFv sequence
QSALTQPASVSGSPGQSMSCTGTSSDVGGYNSVSWYQQHPGKAPRLMIYDVSNRPSGVSNRFSGSKSGNTASLTISGLQAEDEADYYCSSYTSSSTPLVFGTGTKVTVLGSRGGGGSGGGGSGGGGSLEMAQVQLVQSGAEVKKPGASVKVSCKASGYTFTSYGISWVRQAPGQGLEWMGWISAYNGNTNYAQKLQGRVTMTTDTSTSTAYMELRSLRSDDTAVYYCARGAVAYHDWGQGTLVTVSSTSGQAGQHHHHHHGAYPYDVPDYAS

SEQ ID NO: 205523 - protein, 276 aa, Artificial Sequence
  Description of Artificial Sequence: Synthetic scFv sequence
QSALTQPASVSGSPGQSMSCTGTSSDVGGYNYVSWYQQHPGKAPKLMIYDVSNRPSGVSNRFSGSKSGNTASLTISGLQAEDEADYYCSSYTSSSTSKVFGGGTKLTVLGSRGGGGSGGGGSGGGGSLEMAEVQLVESGGGVVRPGGSLRLSCAASGFTFGDYGMSWVRQAPGKGLEWVSGINWNGGSTGYADSVKGRFTISRDNAKNSLYLQMNSLRAEDTAVYYCARSKYNFHVYYDYWGQGTLVTVSSTSGQAGQHHHHHHGAYPYDVPDYAS

SEQ ID NO: 205524 - protein, 249 aa, Artificial Sequence
  Description of Artificial Sequence: Synthetic scFv sequence
QSALTQPASVSGSPGQSRRISCTGTSSDVGGYNSVSWYQQHPGKAPRLMIYDVSNRPSGVSNRFSGSKSGNTASLTISGLQAEDEADYYCSSYTSSSTPLVFGTGTKVTVLGSRGGGGSGGGGSGGGGSLEMAQVQLVQSGAEVKKPGASVKVSCKASGYTFTSYGISWVRQAPGQGLEWMGWISAYNGNTNYAQKLQGRVTMTTDTSTSTAYMELRSLRSDDTAVYYCARGAVAYHDWGQGTLVTVSS

SEQ ID NO: 205525 - protein, 253 aa, Artificial Sequence
  Description of Artificial Sequence: Synthetic scFv sequence
QSALTQPASVSGSPGQSRRISCTGTSSDVGGYNYVSWYQQHPGKAPKLMIYDVSNRPSGVSNRFSGSKSGNTASLTISGLQAEDEADYYCSSYTSSSTSKVFGGGTKLTVLGSRGGGGSGGGGSGGGGSLEMAEVQLVESGGGVVRPGGSLRLSCAASGFTFGDYGMSWVRQAPGKGLEWVSGINWNGGSTGYADSVKGRFTISRDNAKNSLYLQMNSLRAEDTAVYYCARSKYNFHVYYDYWGQGTLVTVSS

SEQ ID NO: 205526 - protein, 278 aa, Artificial Sequence
  Description of Artificial Sequence: Synthetic scFv sequence
QSALTQPASVSGSPGQSRRISCTGTSSDVGGYNYVSWYQQHPGKAPKLMIYDVSNRPSGVSNRFSGSKSGNTASLTISGLQAEDEADYYCSSYTSSSTSKVFGGGTKLTVLGSRGGGGSGGGGSGGGGSLEMAEVQLVESGGGVVRPGGSLRLSCAASGFTFGDYGMSWVRQAPGKGLEWVSGINWNGGSTGYADSVKGRFTISRDNAKNSLYLQMNSLRAEDTAVYYCARSKYNFHVYYDYWGQGTLVTVSSTSGQAGQHHHHHHGAYPYDVPDYAS

SEQ ID NO: 205527 - protein, 251 aa, Artificial Sequence
  Description of Artificial Sequence: Synthetic scFv sequence
QSVLTQPPAASGTPGQRVTISCSGGVSNIGSGALNWYQQLPGTAPKLLIYSYNQRPSGVSDRFSGSRSATSASLAISGLQSEDEADYYCATWDDSVNGWVFGGGTKLTVLGSRGGGGSGGGGSGGGGSLEMAQVQLVQSGAEVKKPGDSVKVSCKPSGYNFLNYGINWVRQAPGQGLEWMGWISTYTGNTNYAQKLQGRVTFTTDTSTSTAYMEMRSLRSDDTAVYYCARDLYYYEGVDYWGQGTLVTVSS

SEQ ID NO: 205528 - protein, 276 aa, Artificial Sequence
  Description of Artificial Sequence: Synthetic scFv sequence
QSVLTQPPAASGTPGQRVTISCSGGVSNIGSGALNWYQQLPGTAPKLLIYSYNQRPSGVSDRFSGSRSATSASLAISGLQSEDEADYYCATWDDSVNGWVFGGGTKLTVLGSRGGGGSGGGGSGGGGSLEMAQVQLVQSGAEVKKPGDSVKVSCKPSGYNFLNYGINWVRQAPGQGLEWMGWISTYTGNTNYAQKLQGRVTFTTDTSTSTAYMEMRSLRSDDTAVYYCARDLYYYEGVDYWGQGTLVTVSSTSGQAGQHHHHHHGAYPYDVPDYAS

SEQ ID NO: 205529 - protein, 254 aa, Artificial Sequence
  Description of Artificial Sequence: Synthetic scFv sequence
QSVLTQPPSASGTPGQRVTISCSGSSSNIGSNTVNWYQQLPGTAPKLLIYSNDQRPSGVPDRFSGSKSGTSASLAISGLQSEDEADYYCASWDDSLNGRYVFGTGTKVTVLGSRGGGGSGGGGSGGGGSLEMAQVQLVQSGAEVRKPGASVKVSCKTSGYTFSWYAIHWVRQAPGQRLEWMGWINAGNGNTKYSQKFQGRVSLTRDTSASTAYMELSSLRSDDTAVYYCARPDNYGSGGDVFDRGQGTMVTVSS

SEQ ID NO: 205530 - protein, 279 aa, Artificial Sequence
  Description of Artificial Sequence: Synthetic scFv sequence
QSVLTQPPSASGTPGQRVTISCSGSSSNIGSNTVNWYQQLPGTAPKLLIYSNDQRPSGVPDRFSGSKSGTSASLAISGLQSEDEADYYCASWDDSLNGRYVFGTGTKVTVLGSRGGGGSGGGGSGGGGSLEMAQVQLVQSGAEVRKPGASVKVSCKTSGYTFSWYAIHWVRQAPGQRLEWMGWINAGNGNTKYSQKFQGRVSLTRDTSASTAYMELSSLRSDDTAVYYCARPDNYGSGGDVFDRGQGTMVTVSSTSGQAGQHHHHHHGAYPYDVPDYAS

SEQ ID NO: 205531 - protein, 249 aa, Artificial Sequence
  Description of Artificial Sequence: Synthetic scFv sequence
QSVLTQPPSASGTPGQRVTISCSGSSSNIGSNTVNWYQQLPGTAPKLLIYSNNQRPSGVPDRFSGSKSGTSASLAISGLQSEDEADYYCAAWDDSLNGYVFGTGTKVTVLGSRGGGGSGGGGSGGGGSLEMAQVQLQQWGAGLLKPSETLSLTCAVYGGSFSGYYWSWIRQPPGKGLEWIGEINHSGSTNYNPSLKSRVTISVDTSKNQFSLKLSSVTAADTAVYYCAREGPYDGFDSWGQGTLVTVSS

SEQ ID NO: 205532 - protein, 274 aa, Artificial Sequence
  Description of Artificial Sequence: Synthetic scFv sequence
QSVLTQPPSASGTPGQRVTISCSGSSSNIGSNTVNWYQQLPGTAPKLLIYSNNQRPSGVPDRFSGSKSGTSASLAISGLQSEDEADYYCAAWDDSLNGYVFGTGTKVTVLGSRGGGGSGGGGSGGGGSLEMAQVQLQQWGAGLLKPSETLSLTCAVYGGSFSGYYWSWIRQPPGKGLEWIGEINHSGSTNYNPSLKSRVTISVDTSKNQFSLKLSSVTAADTAVYYCAREGPYDGFDSWGQGTLVTVSSTSGQAGQHHHHHHGAYPYDVPDYAS

SEQ ID NO: 205533 - protein, 250 aa, Artificial Sequence
  Description of Artificial Sequence: Synthetic scFv sequence
QSVLTQPPSASGTPGQRVTISCSGSSSNIGSNTVNWYQQLPGTAPKLLIYSNNQRPSGVPDRFSGSKSGTSASLAISGLQSEDEADYYCAAWDDSLNGYWVFGGGTKLTVLGSRGGGGSGGGGSGGGGSLEMAQVQLQQWGAGLLKPSETLSLTCAVYGGSFSGYYWSWIRQPPGKGLEWIGEINHSGSTNYNPSLKSRVTISVDTSKNQFSLKLSSVTAADTAVYYCAREGAFDAFDIWGQGTMVTVSS

SEQ ID NO: 205534 - protein, 275 aa, Artificial Sequence
  Description of Artificial Sequence: Synthetic scFv sequence
QSVLTQPPSASGTPGQRVTISCSGSSSNIGSNTVNWYQQLPGTAPKLLIYSNNQRPSGVPDRFSGSKSGTSASLAISGLQSEDEADYYCAAWDDSLNGYWVFGGGTKLTVLGSRGGGGSGGGGSGGGGSLEMAQVQLQQWGAGLLKPSETLSLTCAVYGGSFSGYYWSWIRQPPGKGLEWIGEINHSGSTNYNPSLKSRVTISVDTSKNQFSLKLSSVTAADTAVYYCAREGAFDAFDIWGQGTMVTVSSTSGQAGQHHHHHHGAYPYDVPDYAS

SEQ ID NO: 205535 - protein, 250 aa, Artificial Sequence
  Description of Artificial Sequence: Synthetic scFv sequence
QSVLTQPPSASGTPGQRVTISCSGSSSNIGTNGVNWFQQFPGTAPKLLIYTNDQRPSGVPDRFSGSKSGTSASLAISGLQSADEADYYCAVWDHSLNGPVFGGGTKLTVLGSRGGGGSGGGGSGGGGSLEMAQVQLVQSGAEVKKPGSSVKVSCKASGGTFSSYAISWVRQAPGQGLEWMGGIIPIFGTANYAQKFQGRVTITADESTSTAYMELSSLRSEDTAVYYCARGAGFDAFDIWGQGTMVTVSS

SEQ ID NO: 205536 - protein, 275 aa, Artificial Sequence
  Description of Artificial Sequence: Synthetic scFv sequence
QSVLTQPPSASGTPGQRVTISCSGSSSNIGTNGVNWFQQFPGTAPKLLIYTNDQRPSGVPDRFSGSKSGTSASLAISGLQSADEADYYCAVWDHSLNGPVFGGGTKLTVLGSRGGGGSGGGGSGGGGSLEMAQVQLVQSGAEVKKPGSSVKVSCKASGGTFSSYAISWVRQAPGQGLEWMGGIIPIFGTANYAQKFQGRVTITADESTSTAYMELSSLRSEDTAVYYCARGAGFDAFDIWGQGTMVTVSSTSGQAGQHHHHHHGAYPYDVPDYAS

SEQ ID NO: 205537 - protein, 252 aa, Artificial Sequence
  Description of Artificial Sequence: Synthetic scFv sequence
QSVLTQPPSASGTPGQTVTISCSGSNSNIGSNYVYWYQQLPGTAPKLLIYRNNQRPSGVPDRFSGSKSGTSASLAISGLRSEDEADYYCAAWDDSLSAYVFGTGTKVTVLGSRGGGGSGGGGSGGGGSLEMAQVQLVQSGAEVKKPGASVKVSCKASGYTFTSYGISWVRQAPGQGLEWMGWISAYNGNTNYAQKLQGRVTMTTDTSTSTAYMELRSLRSDDTAVYYCARSSGNMVSWKDMWGQGTLVTVSS

SEQ ID NO: 205538 - protein, 277 aa, Artificial Sequence
  Description of Artificial Sequence: Synthetic scFv sequence
QSVLTQPPSASGTPGQTVTISCSGSNSNIGSNYVYWYQQLPGTAPKLLIYRNNQRPSGVPDRFSGSKSGTSASLAISGLRSEDEADYYCAAWDDSLSAYVFGTGTKVTVLGSRGGGGSGGGGSGGGGSLEMAQVQLVQSGAEVKKPGASVKVSCKASGYTFTSYGISWVRQAPGQGLEWMGWISAYNGNTNYAQKLQGRVTMTTDTSTSTAYMELRSLRSDDTAVYYCARSSGNMVSWKDMWGQGTLVTVSSTSGQAGQHHHHHHGAYPYDVPDYAS

SEQ ID NO: 205539 - protein, 249 aa, Artificial Sequence
  Description of Artificial Sequence: Synthetic scFv sequence
QSVLTQPPSVSAAAGQKVTISCSGSDSNIGNNYVSWYQHLPGTAPKLLIYDVKNRPSGIPDRFSGSKSGSSATLGIAGLQPGDEADYYCGTWDSRLDAYVFGTGTKVTVLGSRGGGGSGGGGSGGGGSLEMAQMQLVQSGAEVKKPGASVKVSCKTSGFPFNIFGITWVRQAPGQGLEWMGWISGYNGNTDYPQKFQGRVTMSTDTSTSTAYMELRNLKSDDTAVYYCARGAYGGMDTWGQGTLVTVSS

SEQ ID NO: 205540 - protein, 274 aa, Artificial Sequence
  Description of Artificial Sequence: Synthetic scFv sequence
QSVLTQPPSVSAAAGQKVTISCSGSDSNIGNNYVSWYQHLPGTAPKLLIYDVKNRPSGIPDRFSGSKSGSSATLGIAGLQPGDEADYYCGTWDSRLDAYVFGTGTKVTVLGSRGGGGSGGGGSGGGGSLEMAQMQLVQSGAEVKKPGASVKVSCKTSGFPFNIFGITWVRQAPGQGLEWMGWISGYNGNTDYPQKFQGRVTMSTDTSTSTAYMELRNLKSDDTAVYYCARGAYGGMDTWGQGTLVTVSSTSGQAGQHHHHHHGAYPYDVPDYAS

SEQ ID NO: 205541 - protein, 249 aa, Artificial Sequence
  Description of Artificial Sequence: Synthetic scFv sequence
QSVLTQPPSVSAAPGQKVTISCSGSNSNIGNNYVSWYQQLPGTAPKLLIYDNNKRPSGIPDRFSGSRSGTSATLGITGLQTGDEADYYCGTWNTTVTPGYVFGTGTKVTVLGSRGGGGSGGGGSGGGGSLEMAEVQLVQSGAEVKKPGASVKVSCKASGYTFTSYGISWVRQAPGQGLEWMGWISAYNGNTNYAQKLQGRVTMTTDTSTSTAYMELRSLRSDDTAMYYCARSVYDLDTWGQGTLVTVSS

SEQ ID NO: 205542 - protein, 274 aa, Artificial Sequence
  Description of Artificial Sequence: Synthetic scFv sequence
QSVLTQPPSVSAAPGQKVTISCSGSNSNIGNNYVSWYQQLPGTAPKLLIYDNNKRPSGIPDRFSGSRSGTSATLGITGLQTGDEADYYCGTWNTTVTPGYVFGTGTKVTVLGSRGGGGSGGGGSGGGGSLEMAEVQLVQSGAEVKKPGASVKVSCKASGYTFTSYGISWVRQAPGQGLEWMGWISAYNGNTNYAQKLQGRVTMTTDTSTSTAYMELRSLRSDDTAMYYCARSVYDLDTWGQGTLVTVSSTSGQAGQHHHHHHGAYPYDVPDYAS

SEQ ID NO: 205543 - protein, 256 aa, Artificial Sequence
  Description of Artificial Sequence: Synthetic scFv sequence
QSVLTQPPSVSAPPGQKVTISCSGSSSNIGNNYVSWYQQFPGTAPKLLIYDNNKRPSGISDRFSGSKSGTSATLGIAGLQTGDEADYYCGTWDTSLSGFYVFGSGTKVTVLGSRGGGGSGGGGSGGGGSLEMAEVQLVQSGAEVKKPGASVKVSCKASGYTFTSYTISWVRQAPGQGLEWMGWISTYNGLTNYAQNLQGRVTMTTDTFTTTAYMELRSLRSDDTAVYYCVREGSPDYGDFASFDYWGQGTLVTVSS

SEQ ID NO: 205544 - protein, 281 aa, Artificial Sequence
  Description of Artificial Sequence: Synthetic scFv sequence
QSVLTQPPSVSAPPGQKVTISCSGSSSNIGNNYVSWYQQFPGTAPKLLIYDNNKRPSGISDRFSGSKSGTSATLGIAGLQTGDEADYYCGTWDTSLSGFYVFGSGTKVTVLGSRGGGGSGGGGSGGGGSLEMAEVQLVQSGAEVKKPGASVKVSCKASGYTFTSYTISWVRQAPGQGLEWMGWISTYNGLTNYAQNLQGRVTMTTDTFTTTAYMELRSLRSDDTAVYYCVREGSPDYGDFASFDYWGQGTLVTVSSTSGQAGQHHHHHHGAYPYDVPDYAS

SEQ ID NO: 205545 - protein, 259 aa, Artificial Sequence
  Description of Artificial Sequence: Synthetic scFv sequence
QSVLTQPPSVSGAPGQGVTIPCTGSSSNIGAGYDVHWYQQLPGTAPKLLIYGNNNRPSGVPDRFSGSRSGSSASLAITGLQAEDEADYYCQSYDSSLSDVVFGGGTKVTVLGSRGGGGSGGGGSGGGGSLEMAEVQLVQSGAEVKKPGATVKISCKVSGYTFTDYYMHWVQQAPGKGLEWMGLVDPEDGETIYAEKFQGRVTITADTSTDTAYMELSSLRSEDTAVYYCARYWSYSFDYLYMPEGNDWWGQGTLVTVSS

SEQ ID NO: 205546 - protein, 284 aa, Artificial Sequence
  Description of Artificial Sequence: Synthetic scFv sequence
QSVLTQPPSVSGAPGQGVTIPCTGSSSNIGAGYDVHWYQQLPGTAPKLLIYGNNNRPSGVPDRFSGSRSGSSASLAITGLQAEDEADYYCQSYDSSLSDVVFGGGTKVTVLGSRGGGGSGGGGSGGGGSLEMAEVQLVQSGAEVKKPGATVKISCKVSGYTFTDYYMHWVQQAPGKGLEWMGLVDPEDGETIYAEKFQGRVTITADTSTDTAYMELSSLRSEDTAVYYCARYWSYSFDYLYMPEGNDWWGQGTLVTVSSTSGQAGQHHHHHHGAYPYDVPDYAS

SEQ ID NO: 205547 - protein, 251 aa, Artificial Sequence
  Description of Artificial Sequence: Synthetic scFv sequence
QSVLTQPPSVSGAPGQRVTISCTGSSSNIGAGFDVHWYQLLPGTAPKLLIYANSNRPSGVPDRFSGSKSGTSASLAITGLLAEDEADYYCQSYDSSLSGVVFGGGTKLTVLGSRGGGGSGGGGSGGGGSLEMAQVQLVQSGAEVKKPGSSVKVSCKASGGTFSSYAISWVRQAPGQGLEWMGGIIPIFGTANYAQKFQGRVTITADESTSTAYMELSSLRSEDTAVYYCARGASFDRHDNWGQGTLVTVSS

SEQ ID NO: 205548 - protein, 276 aa, Artificial Sequence
  Description of Artificial Sequence: Synthetic scFv sequence
QSVLTQPPSVSGAPGQRVTISCTGSSSNIGAGFDVHWYQLLPGTAPKLLIYANSNRPSGVPDRFSGSKSGTSASLAITGLLAEDEADYYCQSYDSSLSGVVFGGGTKLTVLGSRGGGGSGGGGSGGGGSLEMAQVQLVQSGAEVKKPGSSVKVSCKASGGTFSSYAISWVRQAPGQGLEWMGGIIPIFGTANYAQKFQGRVTITADESTSTAYMELSSLRSEDTAVYYCARGASFDRHDNWGQGTLVTVSSTSGQAGQHHHHHHGAYPYDVPDYAS

SEQ ID NO: 205549 - protein, 249 aa, Artificial Sequence
  Description of Artificial Sequence: Synthetic scFv sequence
QSVLTQPPSVSGAPGQRVTISCTGSSSNIGAGYDVHWYQQLPGTAPKLLIYGNSNRPSGVPDRFSGSKSGTSASLAITGLQAEDEADYYCQSYDSSLSGYVFGTGTKVTVLGSRGGGGSGGGGSGGGGSLEMAQVQLVQSGAEVKKPGASVKVSCKVSGYTLTELSMHWVRQAPGKGLEWMGGFDPEDGETIYAQKFQGRVTMTEDTSTDTAYMELSSLRSEDTAVYYCARYSGVYYDWGQGTLVTVSS

SEQ ID NO: 205550 - protein, 274 aa, Artificial Sequence
  Description of Artificial Sequence: Synthetic scFv sequence
QSVLTQPPSVSGAPGQRVTISCTGSSSNIGAGYDVHWYQQLPGTAPKLLIYGNSNRPSGVPDRFSGSKSGTSASLAITGLQAEDEADYYCQSYDSSLSGYVFGTGTKVTVLGSRGGGGSGGGGSGGGGSLEMAQVQLVQSGAEVKKPGASVKVSCKVSGYTLTELSMHWVRQAPGKGLEWMGGFDPEDGETIYAQKFQGRVTMTEDTSTDTAYMELSSLRSEDTAVYYCARYSGVYYDWGQGTLVTVSSTSGQAGQHHHHHHGAYPYDVPDYAS

SEQ ID NO: 205551 - protein, 253 aa, Artificial Sequence
  Description of Artificial Sequence: Synthetic scFv sequence
QSVLTQPPSVSGAPGQRVTISCTGSSSNIGARYDVHWYQQLPGTAPRLLISANYDRPSGVPDRFSGSKSGTSASLAITGLQAEDEADYYCQSYDSSVSAWVFGGGTKVTVLGSRGGGGSGGGGSGGGGSLEMAEVQLVQSGAEVKEPGASVRISCQASGYNFISYYMHWVRQAPGQGLEWMGTINPGSGETDYSQKLQGRVTMTRDPSTGTFDMGLSSLTSGDTAVYYCATGLIRGASDAFNRGRGTMVTVSS

SEQ ID NO: 205552 - protein, 278 aa, Artificial Sequence
  Description of Artificial Sequence: Synthetic scFv sequence
QSVLTQPPSVSGAPGQRVTISCTGSSSNIGARYDVHWYQQLPGTAPRLLISANYDRPSGVPDRFSGSKSGTSASLAITGLQAEDEADYYCQSYDSSVSAWVFGGGTKVTVLGSRGGGGSGGGGSGGGGSLEMAEVQLVQSGAEVKEPGASVRISCQASGYNFISYYMHWVRQAPGQGLEWMGTINPGSGETDYSQKLQGRVTMTRDPSTGTFDMGLSSLTSGDTAVYYCATGLIRGASDAFNRGRGTMVTVSSTSGQAGQHHHHHHGAYPYDVPDYAS

SEQ ID NO: 205553 - protein, 251 aa, Artificial Sequence
  Description of Artificial Sequence: Synthetic scFv sequence
QSVLTQPPSVSGAPGQRVTISCTGSTSNIGAGYDVHWYQQLPGTAPKLLINNNRNRPSGVPDRFSGSKSGTSATLGITGLQTGDEADYYCGTWDGSLTGAVFGGGTKLTVLGSRGGGGSGGGGSGGGGSLEMAEVQLVQSGAEVKKPGSSVKVSCKASGGTFSSYAISWVRQAPGQGLEWMGGIIPIFGTANYAQKFQGRVTITADESTSTAYMELSSLRSEDTAVYYCARGSALDHYDRWGQGTLVTVSS

SEQ ID NO: 205554 - protein, 276 aa, Artificial Sequence
  Description of Artificial Sequence: Synthetic scFv sequence
QSVLTQPPSVSGAPGQRVTISCTGSTSNIGAGYDVHWYQQLPGTAPKLLINNNRNRPSGVPDRFSGSKSGTSATLGITGLQTGDEADYYCGTWDGSLTGAVFGGGTKLTVLGSRGGGGSGGGGSGGGGSLEMAEVQLVQSGAEVKKPGSSVKVSCKASGGTFSSYAISWVRQAPGQGLEWMGGIIPIFGTANYAQKFQGRVTITADESTSTAYMELSSLRSEDTAVYYCARGSALDHYDRWGQGTLVTVSSTSGQAGQHHHHHHGAYPYDVPDYAS

SEQ ID NO: 205555 - protein, 260 aa, Artificial Sequence
  Description of Artificial Sequence: Synthetic scFv sequence
QSVLTQPPSVSGAPGQRVTVSCTGSRSNIGAGYDVHWYQQLPGTAPKLLIYGNSNRPPGVPDRFSGSKSGTSASLVITGLQAEDAADYYCQSYDNTVRESPYVFGTGTKVTVLGSRGGGGSGGGGSGGGGSLEMAEVQLVQSGAEVKKPGASVKVSCKVSGYTLTELSMHWVRQAPGKGLEWMGGFDPEDGETIYAQKFQGRVTMTEDTSTDTAYMELSSLRSEDTAVYYCATESNLVSRHYYYYGMDVWGQGTTVTVSS

SEQ ID NO: 205556 - protein, 285 aa, Artificial Sequence
  Description of Artificial Sequence: Synthetic scFv sequence
QSVLTQPPSVSGAPGQRVTVSCTGSRSNIGAGYDVHWYQQLPGTAPKLLIYGNSNRPPGVPDRFSGSKSGTSASLVITGLQAEDAADYYCQSYDNTVRESPYVFGTGTKVTVLGSRGGGGSGGGGSGGGGSLEMAEVQLVQSGAEVKKPGASVKVSCKVSGYTLTELSMHWVRQAPGKGLEWMGGFDPEDGETIYAQKFQGRVTMTEDTSTDTAYMELSSLRSEDTAVYYCATESNLVSRHYYYYGMDVWGQGTTVTVSSTSGQAGQHHHHHHGAYPYDVPDYAS

SEQ ID NO: 205557 - protein, 250 aa, Artificial Sequence
  Description of Artificial Sequence: Synthetic scFv sequence
QSVLTQPPSVSVSPGQTASISCSGNKLGTKYVYWYQKRPGQSPVLVMYEDNQRPSGIPERFSGSNSGNTATLTIRGTQTVDEADYYCQAWDSDTFVVFGGGTKVTVLGSRGGGGSGGGGSGGGGSLEMAEVQLVETGGGVVQPGRSLRLSCAASGFTFSSYGMHWVRQAPGKGLEWVAVISHDGSNKYYADSVKGRFTISRDNSKDTLYLQMNSLRGEDTAVYYCARSNQWSGYFSFDYWGQGTLVTVSS

SEQ ID NO: 205558 - protein, 275 aa, Artificial Sequence
  Description of Artificial Sequence: Synthetic scFv sequence
QSVLTQPPSVSVSPGQTASISCSGNKLGTKYVYWYQKRPGQSPVLVMYEDNQRPSGIPERFSGSNSGNTATLTIRGTQTVDEADYYCQAWDSDTFVVFGGGTKVTVLGSRGGGGSGGGGSGGGGSLEMAEVQLVETGGGVVQPGRSLRLSCAASGFTFSSYGMHWVRQAPGKGLEWVAVISHDGSNKYYADSVKGRFTISRDNSKDTLYLQMNSLRGEDTAVYYCARSNQWSGYFSFDYWGQGTLVTVSSTSGQAGQHHHHHHGAYPYDVPDYAS

SEQ ID NO: 205559 - protein, 248 aa, Artificial Sequence
  Description of Artificial Sequence: Synthetic scFv sequence
QSVLTQPPSVSVSPGQTATIACSGHKLGDKYASWYQQKSGQSPVLIIYQDNKRPSGIPERFSGSNSGNTATLTISGTQALDEADYYCQAWDSSTYVAFGGGTKLTVLGSRGGGGSGGGGSGGGGSLEMAQVQLQESGPGLVKPSETLSLTCVVSGGSISSSNWWSWVRQPPGKGLEWIGEIYHSGSPNYNPSLKSRVTISVDKSKNQFSLKLSSVTAADTAVYYCARMTTHTFGYDAWGQGTLVTVSS

SEQ ID NO: 205560 - protein, 273 aa, Artificial Sequence
  Description of Artificial Sequence: Synthetic scFv sequence
QSVLTQPPSVSVSPGQTATIACSGHKLGDKYASWYQQKSGQSPVLIIYQDNKRPSGIPERFSGSNSGNTATLTISGTQALDEADYYCQAWDSSTYVAFGGGTKLTVLGSRGGGGSGGGGSGGGGSLEMAQVQLQESGPGLVKPSETLSLTCVVSGGSISSSNWWSWVRQPPGKGLEWIGEIYHSGSPNYNPSLKSRVTISVDKSKNQFSLKLSSVTAADTAVYYCARMTTHTFGYDAWGQGTLVTVSSTSGQAGQHHHHHHGAYPYDVPDYAS

SEQ ID NO: 205561 - protein, 257 aa, Artificial Sequence
  Description of Artificial Sequence: Synthetic scFv sequence
QSVVTQPPSASGTPGQRVTISCSGSSSNIGSNYVYWYQQLPGTAPKLLIYSNNQRPSGVPDRFSGSKSGTSASLAISGLRSEDEADYYCAAWDDSLSGYVFGTGTKLTVLGSRGGGGSGGGGSGGGGSLEMAQVQLQQWGAGLLKPSETLSLTCAVYGGSFSGYYWSWIRQPPGKGLEWIGEINHSGSTNYNPSLKSRVTISVDTSKNQFSLKLSSVTAADTAVYYCARLYEGGYHGWGSWLSSDSWGQGTLVTVSS

SEQ ID NO: 205562 - protein, 282 aa, Artificial Sequence
  Description of Artificial Sequence: Synthetic scFv sequence
QSVVTQPPSASGTPGQRVTISCSGSSSNIGSNYVYWYQQLPGTAPKLLIYSNNQRPSGVPDRFSGSKSGTSASLAISGLRSEDEADYYCAAWDDSLSGYVFGTGTKLTVLGSRGGGGSGGGGSGGGGSLEMAQVQLQQWGAGLLKPSETLSLTCAVYGGSFSGYYWSWIRQPPGKGLEWIGEINHSGSTNYNPSLKSRVTISVDTSKNQFSLKLSSVTAADTAVYYCARLYEGGYHGWGSWLSSDSWGQGTLVTVSSTSGQAGQHHHHHHGAYPYDVPDYAS

SEQ ID NO: 205563 - protein, 256 aa, Artificial Sequence
  Description of Artificial Sequence: Synthetic scFv sequence
QSVVTQPPSVSAAPGEKVTISCSGSNFNVGNNDVSWYQQLPGAAPKLLIYDNNKRPSGIPDRFSGSKSGTSATLDITGLHSDDEADYYCGTWDSSLNTGGVFGTGTKVTVLGSRGGGGSGGGGSGGGGSLEMAEVQLVQSGAEVKKPGASVKVSCKASGYTFTSYTISWVRQAPGQGLEWMGWISTYNGLTNYAQNLQGRVTMTTDTFTTTAYMELRSLRSDDTAVYYCVREGSPDYGDFASFDYWGQGTLVTVSS

SEQ ID NO: 205564 - protein, 281 aa, Artificial Sequence
  Description of Artificial Sequence: Synthetic scFv sequence
QSVVTQPPSVSAAPGEKVTISCSGSNFNVGNNDVSWYQQLPGAAPKLLIYDNNKRPSGIPDRFSGSKSGTSATLDITGLHSDDEADYYCGTWDSSLNTGGVFGTGTKVTVLGSRGGGGSGGGGSGGGGSLEMAEVQLVQSGAEVKKPGASVKVSCKASGYTFTSYTISWVRQAPGQGLEWMGWISTYNGLTNYAQNLQGRVTMTTDTFTTTAYMELRSLRSDDTAVYYCVREGSPDYGDFASFDYWGQGTLVTVSSTSGQAGQHHHHHHGAYPYDVPDYAS

SEQ ID NO: 205565 - protein, 252 aa, Artificial Sequence
  Description of Artificial Sequence: Synthetic scFv sequence
QSVVTQPPSVSAAPGQKVTISCSGSSSNIGNNYVSWYQQLPGTAPKLLIYDNNKRPSGIPDRFSGSKSGTSATLGITGLQTGDEADYYCGTWDSSLGAPYVFGTGTKVTVLGSRGGGGSGGGGSGGGGSLEMAEVQLVQSWGGSEQPGRSLRLSCAASGFTFDDYAMHWVRQAPGKGLEWVSGISWNSGSIGYADSVKGRFTISRDNAKNSLYLQMNSLRAEDTAMYYCARYRQVGSAYDSWGQGTLVTVSS

SEQ ID NO: 205566 - protein, 277 aa, Artificial Sequence
  Description of Artificial Sequence: Synthetic scFv sequence
QSVVTQPPSVSAAPGQKVTISCSGSSSNIGNNYVSWYQQLPGTAPKLLIYDNNKRPSGIPDRFSGSKSGTSATLGITGLQTGDEADYYCGTWDSSLGAPYVFGTGTKVTVLGSRGGGGSGGGGSGGGGSLEMAEVQLVQSWGGSEQPGRSLRLSCAASGFTFDDYAMHWVRQAPGKGLEWVSGISWNSGSIGYADSVKGRFTISRDNAKNSLYLQMNSLRAEDTAMYYCARYRQVGSAYDSWGQGTLVTVSSTSGQAGQHHHHHHGAYPYDVPDYAS

SEQ ID NO: 205567 - protein, 256 aa, Artificial Sequence
  Description of Artificial Sequence: Synthetic scFv sequence
QSVVTQPPSVSAAPGQKVTISCSGSSSNIGNNYVSWYQQLPGTAPKLLIYDNNKRPSGIPDRFSGSKSGTSATLGITGLQTGDEADYYCGTWDSSLSAAYVFGTGTKVTVLGSRGGGGSGGGGSGGGGSLEMAQVQLVQSGAEVKKPGASVKVSCKASGYSFTSYTISWVRQAPGQGLEWMGWVSTYNGLRNYAQNLQGRVTMTTDTLTTTAYMELRSLRSDDTAVYYCVREGSPDYGDFAAFDYWGQGTLVTVSS

SEQ ID NO: 205568 - protein, 281 aa, Artificial Sequence
  Description of Artificial Sequence: Synthetic scFv sequence
QSVVTQPPSVSAAPGQKVTISCSGSSSNIGNNYVSWYQQLPGTAPKLLIYDNNKRPSGIPDRFSGSKSGTSATLGITGLQTGDEADYYCGTWDSSLSAAYVFGTGTKVTVLGSRGGGGSGGGGSGGGGSLEMAQVQLVQSGAEVKKPGASVKVSCKASGYSFTSYTISWVRQAPGQGLEWMGWVSTYNGLRNYAQNLQGRVTMTTDTLTTTAYMELRSLRSDDTAVYYCVREGSPDYGDFAAFDYWGQGTLVTVSSTSGQAGQHHHHHHGAYPYDVPDYAS

SEQ ID NO: 205569 - protein, 253 aa, Artificial Sequence
  Description of Artificial Sequence: Synthetic scFv sequence
QSVVTQPPSVSAAPGQKVTISCSGSSSNIGNNYVSWYQQLPGTAPKLLIYDNNKRPSGIPDRFSGSKSGTSATLGITGLQTGDEADYYCGTWDSSLSAYVFGTGTKVTVLGSRGGGGSGGGGSGGGGSLEMAQVQLVQSGAEVKKPGASVKVSCKASGYTFTNYALHWVRQAPGQGLEWMAWINGGNGNTKYSQNFQGRVTITRDTSASTAYMELSSLRSEDTAVYYCAKPEETAGTIHFDYWGQGTPVTVSS

SEQ ID NO: 205570 - protein, 278 aa, Artificial Sequence
  Description of Artificial Sequence: Synthetic scFv sequence
QSVVTQPPSVSAAPGQKVTISCSGSSSNIGNNYVSWYQQLPGTAPKLLIYDNNKRPSGIPDRFSGSKSGTSATLGITGLQTGDEADYYCGTWDSSLSAYVFGTGTKVTVLGSRGGGGSGGGGSGGGGSLEMAQVQLVQSGAEVKKPGASVKVSCKASGYTFTNYALHWVRQAPGQGLEWMAWINGGNGNTKYSQNFQGRVTITRDTSASTAYMELSSLRSEDTAVYYCAKPEETAGTIHFDYWGQGTPVTVSSTSGQAGQHHHHHHGAYPYDVPDYAS

SEQ ID NO: 205571 - protein, 249 aa, Artificial Sequence
  Description of Artificial Sequence: Synthetic scFv sequence
QSVVTQPPSVSAAPGQKVTISCSGSTSNIGNNDVSWYQQLPGTAPKLLIYDNNKRPSGIPDRFSGSKSGTSATLGITGLQTGDEADYYCGTWDSSVSASWVFGRGTKLTVLGSRGGGGSGGGGSGGGGSLEMAQVQLVQSGAEVKKPGASVKVSCKASGYTFTSYGISWVRQAPGQGLEWMGWISAYNGNTNYPQKLQGRVTMTTDPSTSTAYMELRSLRSDDTAVYYCARSMTSFDYWGQGTLVTVSS

SEQ ID NO: 205572 - protein, 274 aa, Artificial Sequence
  Description of Artificial Sequence: Synthetic scFv sequence
QSVVTQPPSVSAAPGQKVTISCSGSTSNIGNNDVSWYQQLPGTAPKLLIYDNNKRPSGIPDRFSGSKSGTSATLGITGLQTGDEADYYCGTWDSSVSASWVFGRGTKLTVLGSRGGGGSGGGGSGGGGSLEMAQVQLVQSGAEVKKPGASVKVSCKASGYTFTSYGISWVRQAPGQGLEWMGWISAYNGNTNYPQKLQGRVTMTTDPSTSTAYMELRSLRSDDTAVYYCARSMTSFDYWGQGTLVTVSSTSGQAGQHHHHHHGAYPYDVPDYAS

SEQ ID NO: 205573 - protein, 274 aa, Artificial Sequence
  Description of Artificial Sequence: Synthetic scFv sequence
QSVVTQPPSVSAAPGQRVTISCSGSSSNISIYDVSWYQQLPGTAPKLLIYGNNKRPSGIADRFSGSTSGTSATLGITGLQTGDEADYYCGTWDDSLSGGVFGGGTKLTVLGRGGGGSGGGGSGGGGSLEMAQMQLVQSGAEVKKPGSSVKVSCEASGGTLSSYAINWVRQAPGQGLEWMGGIIPMFGTAHYAQKFQGRVTITADESTKTAYMELSSLRSEDTAVYYCARGVHYASFDHWGQGTLVTVSSTSGQAGQHHHHHHGAYPYDVPDYAS

SEQ ID NO: 205574 - protein, 250 aa, Artificial Sequence
  Description of Artificial Sequence: Synthetic scFv sequence
QSVVTQPPSVSAAPGQRVTISCSGSSSNISIYDVSWYQQLPGTAPKLLIYGNNKRPSGIADRFSGSTSGTSATLGITGLQTGDEADYYCGTWDDSLSGGVFGGGTKLTVLGSRGGGGSGGGGSGGGGSLEMAQMQLVQSGAEVKKPGSSVKVSCEASGGTLSSYAINWVRQAPGQGLEWMGGIIPMFGTAHYAQKFQGRVTITADESTKTAYMELSSLRSEDTAVYYCARGVHYASFDHWGQGTLVTVSS

SEQ ID NO: 205575 - protein, 275 aa, Artificial Sequence
  Description of Artificial Sequence: Synthetic scFv sequence
QSVVTQPPSVSAAPGQRVTISCSGSSSNISIYDVSWYQQLPGTAPKLLIYGNNKRPSGIADRFSGSTSGTSATLGITGLQTGDEADYYCGTWDDSLSGGVFGGGTKLTVLGSRGGGGSGGGGSGGGGSLEMAQMQLVQSGAEVKKPGSSVKVSCEASGGTLSSYAINWVRQAPGQGLEWMGGIIPMFGTAHYAQKFQGRVTITADESTKTAYMELSSLRSEDTAVYYCARGVHYASFDHWGQGTLVTVSSTSGQAGQHHHHHHGAYPYDVPDYAS

SEQ ID NO: 205576 - protein, 250 aa, Artificial Sequence
  Description of Artificial Sequence: Synthetic scFv sequence
QSVVTQPPSVSGAPGQRVTISCTGSSSNIGAGYDVNWYQQFPGTAPKLLIYGNSNRPSGVPDRFSGSKSGTSASLAITGLQAEDEADYYCQSYDSSLSGSYVFGTGTKVTVLGSRGGGGSGGGGSGGGGSLEMAQMQLVQSGAEVKKPGASVKVSCKASGYTLTELSMHWVRQAPGKGLEWMGGFDPEDGETIYAQKFQGRVTMTEDTSTDTAYMELSSLRSEDTAVYYCARMSSMYYDWGQGTLVTVSS

SEQ ID NO: 205577 - protein, 275 aa, Artificial Sequence
  Description of Artificial Sequence: Synthetic scFv sequence
QSVVTQPPSVSGAPGQRVTISCTGSSSNIGAGYDVNWYQQFPGTAPKLLIYGNSNRPSGVPDRFSGSKSGTSASLAITGLQAEDEADYYCQSYDSSLSGSYVFGTGTKVTVLGSRGGGGSGGGGSGGGGSLEMAQMQLVQSGAEVKKPGASVKVSCKASGYTLTELSMHWVRQAPGKGLEWMGGFDPEDGETIYAQKFQGRVTMTEDTSTDTAYMELSSLRSEDTAVYYCARMSSMYYDWGQGTLVTVSSTSGQAGQHHHHHHGAYPYDVPDYAS

SEQ ID NO: 205578 - protein, 251 aa, Artificial Sequence
  Description of Artificial Sequence: Synthetic scFv sequence
QSVVTQPPSVSGAPGQRVTISCTGSTSNIGAGYDVHWYQQLPGTAPKLLIYTNNFRPSGVPDRFSASKSGTSASLAITGLQAEDEADYYCGTWDSSLSAVVFGGGTKLTVLGSRGGGGSGGGGSGGGGSLEMAEVQLVESGTEVKKPGASVKVSCKASGYMFTSYGLNWVRQAPGQGLEWMGWISANNGKTNYAKKFQDRVTMTRDTSTSTGYMELRSLRSDDTAVYYCARHIGGSYFDRWGQGTLVTVSS

SEQ ID NO: 205579 - protein, 276 aa, Artificial Sequence
  Description of Artificial Sequence: Synthetic scFv sequence
QSVVTQPPSVSGAPGQRVTISCTGSTSNIGAGYDVHWYQQLPGTAPKLLIYTNNFRPSGVPDRFSASKSGTSASLAITGLQAEDEADYYCGTWDSSLSAVVFGGGTKLTVLGSRGGGGSGGGGSGGGGSLEMAEVQLVESGTEVKKPGASVKVSCKASGYMFTSYGLNWVRQAPGQGLEWMGWISANNGKTNYAKKFQDRVTMTRDTSTSTGYMELRSLRSDDTAVYYCARHIGGSYFDRWGQGTLVTVSSTSGQAGQHHHHHHGAYPYDVPDYAS

SEQ ID NO: 205580 - protein, 255 aa, Artificial Sequence
  Description of Artificial Sequence: Synthetic scFv sequence
QSVVTQPPSVSGAPGQTVTISCTGGSSNIGTGYFVNWYQQVPGKAPKLLILGNNNRPSGVPDRLSGSTSGTSASLAITGLQAEDEGTYYCQSYDSSLSGYVFGTGTKVTVLGSRGGGGSGGGGSGGGGSLEMAQVQLQQSGPGLVKPSQTLSLTCGISGDSVSTNSVAWHWIRQSPSRGLEWLGRTYYRSKWSNDYGVSVKSRITIIPDTSKNQFSLQLNSVTPEDTAVYYCARSSSWYQIFDYWGQGTLVTVSS

SEQ ID NO: 205581 - protein, 280 aa, Artificial Sequence
  Description of Artificial Sequence: Synthetic scFv sequence
QSVVTQPPSVSGAPGQTVTISCTGGSSNIGTGYFVNWYQQVPGKAPKLLILGNNNRPSGVPDRLSGSTSGTSASLAITGLQAEDEGTYYCQSYDSSLSGYVFGTGTKVTVLGSRGGGGSGGGGSGGGGSLEMAQVQLQQSGPGLVKPSQTLSLTCGISGDSVSTNSVAWHWIRQSPSRGLEWLGRTYYRSKWSNDYGVSVKSRITIIPDTSKNQFSLQLNSVTPEDTAVYYCARSSSWYQIFDYWGQGTLVTVSSTSGQAGQHHHHHHGAYPYDVPDYAS

SEQ ID NO: 205582 - protein, 247 aa, Artificial Sequence
  Description of Artificial Sequence: Synthetic scFv sequence
QSVVTQPPSVSVAPGKTARITCGGNNIGSKSVHWYQQKPGQAPVLVIYYDSDRPSGIPERFSGSNSGNTATLTISRVEAGDEADYYCQVWDSSSDVVFGGGTKLTVLGSRGGGGSGGGGSGGGGSLEMAEVQLVQSGAEVKKPGASVKVSCKASGYTFTSYGISWVRQAPGQGLEWMGWISAYNGNTNYAQKLQGRVTMTTDTSTSTAYMELRSLRSDDTAVYYCARWGGFGAVDHWGQGTLVTVSS

SEQ ID NO: 205583 - protein, 272 aa, Artificial Sequence
  Description of Artificial Sequence: Synthetic scFv sequence
QSVVTQPPSVSVAPGKTARITCGGNNIGSKSVHWYQQKPGQAPVLVIYYDSDRPSGIPERFSGSNSGNTATLTISRVEAGDEADYYCQVWDSSSDVVFGGGTKLTVLGSRGGGGSGGGGSGGGGSLEMAEVQLVQSGAEVKKPGASVKVSCKASGYTFTSYGISWVRQAPGQGLEWMGWISAYNGNTNYAQKLQGRVTMTTDTSTSTAYMELRSLRSDDTAVYYCARWGGFGAVDHWGQGTLVTVSSTSGQAGQHHHHHHGAYPYDVPDYAS

SEQ ID NO: 205584 - protein, 245 aa, Artificial Sequence
  Description of Artificial Sequence: Synthetic scFv sequence
SSELTQDPAVSVALGQTVKITCQGDSLTDYHATWYQQKPGQAPVAVIYATNNRPTGIPDRFSGSSSGNTASLTITGAQAEDEADYYCNSRDSGTDEVLFGGGTKLTVLGSRGGGGSGGGGSGGGGSLEMAEVQLVETGGGLVKPGGSLRLSCAASGFTFSSYSMNWVRQAPGKGLEWVSSISSSSSYIYYADSVKGRFTISRDNAKNSLYLQMNSLRAEDTAVYYCARGQGYDYWGQGTLVTVSS

SEQ ID NO: 205585 - protein, 270 aa, Artificial Sequence
  Description of Artificial Sequence: Synthetic scFv sequence
SSELTQDPAVSVALGQTVKITCQGDSLTDYHATWYQQKPGQAPVAVIYATNNRPTGIPDRFSGSSSGNTASLTITGAQAEDEADYYCNSRDSGTDEVLFGGGTKLTVLGSRGGGGSGGGGSGGGGSLEMAEVQLVETGGGLVKPGGSLRLSCAASGFTFSSYSMNWVRQAPGKGLEWVSSISSSSSYIYYADSVKGRFTISRDNAKNSLYLQMNSLRAEDTAVYYCARGQGYDYWGQGTLVTVSSTSGQAGQHHHHHHGAYPYDVPDYAS

SEQ ID NO: 205586 - protein, 250 aa, Artificial Sequence
  Description of Artificial Sequence: Synthetic scFv sequence
SYELTQPPAASGTPGQRVTISCSGGVSNIGSGALNWYQQLPGTAPKLLIYSYNQRPSGVSDRFSGSRSATSASLAISGLQSEDEADYYCATWDDSVNGWVFGGGTKLTVLGSRGGGGSGGGGSGGGGSLEMAEVQLVESGAEVKKPGDSVKVSCKPSGYNFLNYGINWVRQAPGQGLEWMGWISTYTGNTNYAQKLQGRVTFTTDTSTSTAYMEMRSLRSDDTAVYYCARQQGGGWYDVWGQGTLVTVSS

SEQ ID NO: 205587 - protein, 275 aa, Artificial Sequence
  Description of Artificial Sequence: Synthetic scFv sequence
SYELTQPPAASGTPGQRVTISCSGGVSNIGSGALNWYQQLPGTAPKLLIYSYNQRPSGVSDRFSGSRSATSASLAISGLQSEDEADYYCATWDDSVNGWVFGGGTKLTVLGSRGGGGSGGGGSGGGGSLEMAEVQLVESGAEVKKPGDSVKVSCKPSGYNFLNYGINWVRQAPGQGLEWMGWISTYTGNTNYAQKLQGRVTFTTDTSTSTAYMEMRSLRSDDTAVYYCARQQGGGWYDVWGQGTLVTVSSTSGQAGQHHHHHHGAYPYDVPDYAS

SEQ ID NO: 205588 - protein, 284 aa, Artificial Sequence
  Description of Artificial Sequence: Synthetic scFv sequence
SYELTQPPSASGTPGQRVTISCSGSSSNIGSNTVNWYQQLPGTAPKLLIYSNNQRPSGVPDRFSGSKSGTSASLAISGLQSEDEADYYCAAWDDSLNGYVFGTGTKVTVLGSRGGGGSGGGGSGGGGSLEMAEVQLVESGAEVKKPGASVKVSCKASGYTFTSYGISWVRQAPGQGLEWMGWISAYNGNTNYAQKLQGRVTMTTDTSTSTAYMELRSLRSDDTAVYYCARDLSRGANPHYYYYYGMDVWGQGTTVTVSSTSGQAGQHHHHHHGAYPYDVPDYAS

SEQ ID NO: 205589 - protein, 252 aa, Artificial Sequence
  Description of Artificial Sequence: Synthetic scFv sequence
SYELTQPPSASGTPGQRVTISCSGSSSNIGSNYVYWYQQLPGTAPKLFIYRNNQRPSGVPDRFSGSKSGTSASLAISGLRSEDEADYYCAAWDDSLSGYLFGTGTKVTVLGSRGGGGSGGGGSGGGGSLEMAEVQLVESGGGLVQPGRSLRLSCAASGFTFDDYAMHWVRQAPGKGLEWVSGISWNSGSIGYADSVKGRFTISRDNAKNSLYLQMNSLRAEDTALYYCANGDSNYYYGMDVWGQGTTVTVSS

SEQ ID NO: 205590 - protein, 277 aa, Artificial Sequence
  Description of Artificial Sequence: Synthetic scFv sequence
SYELTQPPSASGTPGQRVTISCSGSSSNIGSNYVYWYQQLPGTAPKLFIYRNNQRPSGVPDRFSGSKSGTSASLAISGLRSEDEADYYCAAWDDSLSGYLFGTGTKVTVLGSRGGGGSGGGGSGGGGSLEMAEVQLVESGGGLVQPGRSLRLSCAASGFTFDDYAMHWVRQAPGKGLEWVSGISWNSGSIGYADSVKGRFTISRDNAKNSLYLQMNSLRAEDTALYYCANGDSNYYYGMDVWGQGTTVTVSSTSGQAGQHHHHHHGAYPYDVPDYAS

SEQ ID NO: 205591 - protein, 246 aa, Artificial Sequence
  Description of Artificial Sequence: Synthetic scFv sequence
SYVLTQPLSVSVAPGKTARITCGGNNIGSKTVHWYQQKPGQAPVLVIYYDSDRPSGIPERFSGSNSGNTATLTISRVEAGDEADYYCQVWDSSSDHRVFGGGTKLTVLGSRGGGGSGGGGSGGGGSLEMAQVQLQESGPGLVKPSETLSLTCNVSGYSISSGYFWGWIRQPPGKGLEWIGSIYHSRSTYYNPSLKSRVTISVDTSKNQFSLKLNSVTAADTAVYYCARGYGYFDYWGQGTLVTVSS

SEQ ID NO: 205592 - protein, 271 aa, Artificial Sequence
  Description of Artificial Sequence: Synthetic scFv sequence
SYVLTQPLSVSVAPGKTARITCGGNNIGSKTVHWYQQKPGQAPVLVIYYDSDRPSGIPERFSGSNSGNTATLTISRVEAGDEADYYCQVWDSSSDHRVFGGGTKLTVLGSRGGGGSGGGGSGGGGSLEMAQVQLQESGPGLVKPSETLSLTCNVSGYSISSGYFWGWIRQPPGKGLEWIGSIYHSRSTYYNPSLKSRVTISVDTSKNQFSLKLNSVTAADTAVYYCARGYGYFDYWGQGTLVTVSSTSGQAGQHHHHHHGAYPYDVPDYAS

SEQ ID NO: 205593 - protein, 253 aa, Artificial Sequence
  Description of Artificial Sequence: Synthetic scFv sequence
SYVLTQPPSVSVAPGKTARISCGGNDIGSKSVFWYQQRPGQAPVLVVYDDSDRPSGLPERFSGFNSGNTATLTISRVEAGDEADYYCQVWDSSSDHYVFGTGTKVTVLGSRGGGGSGGGGSGGGGSLEMAQVQLVESGGGLVQPGRSLRLSCAASGFTFDDYAMHWVRQAPGKGLEWVSGISWNSGSIGYADSVKGRFTISRDNAKNSLYLQMNSLRAEDTALYYCAKDITYGSGSYGAFDIWGQGTMVTVSS

SEQ ID NO: 205594 - protein, 278 aa, Artificial Sequence
  Description of Artificial Sequence: Synthetic scFv sequence
SYVLTQPPSVSVAPGKTARISCGGNDIGSKSVFWYQQRPGQAPVLVVYDDSDRPSGLPERFSGFNSGNTATLTISRVEAGDEADYYCQVWDSSSDHYVFGTGTKVTVLGSRGGGGSGGGGSGGGGSLEMAQVQLVESGGGLVQPGRSLRLSCAASGFTFDDYAMHWVRQAPGKGLEWVSGISWNSGSIGYADSVKGRFTISRDNAKNSLYLQMNSLRAEDTALYYCAKDITYGSGSYGAFDIWGQGTMVTVSSTSGQAGQHHHHHHGAYPYDVPDYAS

SEQ ID NO: 205595 - protein, 248 aa, Artificial Sequence
  Description of Artificial Sequence: Synthetic scFv sequence
SYVLTQPPSVSVAPGKTARITCGGNNIGSKSVHWYQQKPGQAPVLVIYYDSDRPSGIPERFSGSNSGNTATLTISRVEAGDEADYYCQVWDSSSDHPYVFGTGTKVTVLGSRGGGGSGGGGSGGGGSLEMAQMQLVQSGAEVKKPGASVKVSCKASGYTFTSYGISWVRQAPGQGLEWMGWISAYNGNTNYAQKLQGRVTMTTDTSTSTAYMELRSLRSDDTAVYYCARSMFGAHDSWGQGTLVTVSS

SEQ ID NO: 205596 - protein, 273 aa, Artificial Sequence
  Description of Artificial Sequence: Synthetic scFv sequence
SYVLTQPPSVSVAPGKTARITCGGNNIGSKSVHWYQQKPGQAPVLVIYYDSDRPSGIPERFSGSNSGNTATLTISRVEAGDEADYYCQVWDSSSDHPYVFGTGTKVTVLGSRGGGGSGGGGSGGGGSLEMAQMQLVQSGAEVKKPGASVKVSCKASGYTFTSYGISWVRQAPGQGLEWMGWISAYNGNTNYAQKLQGRVTMTTDTSTSTAYMELRSLRSDDTAVYYCARSMFGAHDSWGQGTLVTVSSTSGQAGQHHHHHHGAYPYDVPDYAS

SEQ ID NO: 205597 - protein, 249 aa, Artificial Sequence
  Description of Artificial Sequence: Synthetic scFv sequence
SYVLTQPPSVSVAPGKTARITCGGNNIGSKSVHWYQQKPGQAPVLVIYYDSDRPSGIPERFSGSNSGNTATLTISRVEAGDEADYYCQVWDSSSDHYVFGTGTKVTVLGSRGGGGSGGGGSGGGGSLEMAEVQLVETGGGLVQPGGSLRLSCAASGFTFSSYAMSWVRQAPGKGLEWVSAISGSDGSTYYADSVKGRFTISRDNSKNTLYLQMNSLRDEDTAVYYCARSHEANLVGDWWGQGTLVTVSS

SEQ ID NO: 205598 - protein, 274 aa, Artificial Sequence
  Description of Artificial Sequence: Synthetic scFv sequence
SYVLTQPPSVSVAPGKTARITCGGNNIGSKSVHWYQQKPGQAPVLVIYYDSDRPSGIPERFSGSNSGNTATLTISRVEAGDEADYYCQVWDSSSDHYVFGTGTKVTVLGSRGGGGSGGGGSGGGGSLEMAEVQLVETGGGLVQPGGSLRLSCAASGFTFSSYAMSWVRQAPGKGLEWVSAISGSDGSTYYADSVKGRFTISRDNSKNTLYLQMNSLRDEDTAVYYCARSHEANLVGDWWGQGTLVTVSSTSGQAGQHHHHHHGAYPYDVPDYAS

SEQ ID NO: 205599 - protein, 244 aa, Artificial Sequence
  Description of Artificial Sequence: Synthetic scFv sequence
SYVLTQPPSVSVAPGKTARITCGGNNIGSKSVHWYQQKPGQAPVLVIYYDSDRPSGIPERFSGSNSGNTATLTISRVEAGDEADYYCQVWDSSSDYVFGTGTKVTVLGSRGGGGSGGGGSGGGGSLEMAEVQLVETGGGLVKPGGSLRLSCAASGFTVSDYYMSWIRQAPGKGLEWISYISGSGNSIYYADSVKGRFTISRDNAKNSLDLQMTSLRAEDTAVYYCARSTKFDYWGQGTLVTVSS

SEQ ID NO: 205600 - protein, 269 aa, Artificial Sequence
  Description of Artificial Sequence: Synthetic scFv sequence
SYVLTQPPSVSVAPGKTARITCGGNNIGSKSVHWYQQKPGQAPVLVIYYDSDRPSGIPERFSGSNSGNTATLTISRVEAGDEADYYCQVWDSSSDYVFGTGTKVTVLGSRGGGGSGGGGSGGGGSLEMAEVQLVETGGGLVKPGGSLRLSCAASGFTVSDYYMSWIRQAPGKGLEWISYISGSGNSIYYADSVKGRFTISRDNAKNSLDLQMTSLRAEDTAVYYCARSTKFDYWGQGTLVTVSSTSGQAGQHHHHHHGAYPYDVPDYAS

SEQ ID NO: 205601 - protein, 270 aa, Artificial Sequence
  Description of Artificial Sequence: Synthetic scFv sequence
SYVLTQPPSVSVAPGKTARITCGGNNIGSKSVHWYQQKPGQAPVLVVYDDSDRPSGIPERFSGSNSGNTATLSISRVEAGDEADYYCQVWDSSSDHTVFGTGTKVTVLGSRGGGGSGGGGSGGGGSLEMAQVQLQQWGAGLLKPSETLSLTCAVYGGSFSGYYWSWIRQPPGKGLEWIGEINHSGSTNYNPSLKSRVTISVDTSKNQFSLKLSSVTAADTAVYYCARYYPGMDMWGQGTLVTVSSTSGQAGQHHHHHHGAYPYDVPDYAS

SEQ ID NO: 205602 - protein, 244 aa, Artificial Sequence
  Description of Artificial Sequence: Synthetic scFv sequence
SYVLTQPPSVSVAPGKTARITCGGNNIGSKSVHWYQQKPGQAPVLVVYDDSDRPSGIPERFSGSNSGNTATLSISRVEAGDEADYYCQVWDSSSDHTVFGTGTKVTVLGSRGGGGSGGGGSGGGGSLEMAQVQLQQWGAGLLKPSETLSLTCAVYGGSFSGYYWSWIRQPPGKGLEWIGEINHSGSTNYNPSLKSRVTISVDTSKNQFSLLSSVTAADTAVYYCARYYPGMDMWGQGTLVTVSS

SEQ ID NO: 205603 - protein, 248 aa, Artificial Sequence
  Description of Artificial Sequence: Synthetic scFv sequence
SYVLTQPPSVSVAPGKTARITCGGNNIGSKSVHWYQQKPGQAPVVVIHYDSDRPSGIPERFSGSNSGNTATLTISRVEAGDEADYYCQVWDSSSDHPYVFGTGTKVTVLGSRGGGGSGGGGSGGGGSLEMAEVQLVQSGAEVKKPGASVKVSCKASGYTFTTYGISWVRQAPGQGLEWMGWINTYNGHTNYAQKLQGRATMTADTSTNTAYMELRSLRSDDTAVYYCARVIYGSGDYWGQGTLVTVSS

SEQ ID NO: 205604 - protein, 273 aa, Artificial Sequence
  Description of Artificial Sequence: Synthetic scFv sequence
SYVLTQPPSVSVAPGKTARITCGGNNIGSKSVHWYQQKPGQAPVVVIHYDSDRPSGIPERFSGSNSGNTATLTISRVEAGDEADYYCQVWDSSSDHPYVFGTGTKVTVLGSRGGGGSGGGGSGGGGSLEMAEVQLVQSGAEVKKPGASVKVSCKASGYTFTTYGISWVRQAPGQGLEWMGWINTYNGHTNYAQKLQGRATMTADTSTNTAYMELRSLRSDDTAVYYCARVIYGSGDYWGQGTLVTVSSTSGQAGQHHHHHHGAYPYDVPDYAS

SEQ ID NO: 205605 - protein, 251 aa, Artificial Sequence
  Description of Artificial Sequence: Synthetic scFv sequence
SYVLTQPPSVSVSPGQTASITCSGDRLTNKYVSWYQQKPGQSPVLVIYEDAKRPSGIPARFSGSNSGNTATLTISGTQAMDESEYYCQAWDSSVVVFGGGTKLTVLGSRGGGGSGGGGSGGGGSLEMAEVQLVESGGGLVQPGRSLRLSCAASGFTFDDYAMHWVRQAPGKGLEWVSGISWNSGSIGYADSVKGRFTISRDNAKNSLYLQMNSLRDEDTALYYCAKDRGGGVIVKDAFDIWGQGTMVTVSS

SEQ ID NO: 205606 - protein, 276 aa, Artificial Sequence
  Description of Artificial Sequence: Synthetic scFv sequence
SYVLTQPPSVSVSPGQTASITCSGDRLTNKYVSWYQQKPGQSPVLVIYEDAKRPSGIPARFSGSNSGNTATLTISGTQAMDESEYYCQAWDSSVVVFGGGTKLTVLGSRGGGGSGGGGSGGGGSLEMAEVQLVESGGGLVQPGRSLRLSCAASGFTFDDYAMHWVRQAPGKGLEWVSGISWNSGSIGYADSVKGRFTISRDNAKNSLYLQMNSLRDEDTALYYCAKDRGGGVIVKDAFDIWGQGTMVTVSSTSGQAGQHHHHHHGAYPYDVPDYAS

SEQ ID NO: 205607 - protein, 256 aa, Artificial Sequence
  Description of Artificial Sequence: Synthetic scFv sequence
SRAAQPAMAQVQLQQSGAELVKPGASVKISCKASGYSFTGYFMNWVKQSHGKSLEWIGRIHPYDGDTFYNQNFKDKATLTVDKSSNTAHMELLSLTSEDFAVYYCTRYDGSRAMDYWGQGTTVTVSSGGGGSGGGGSGGGGSDIELTQSPASLAVSLGQRAIISCKASQSVSFAGTSLMHWYHQKPGQQPKLLIYRASNLEAGVPTRFSGSGSKTDFTLNIHPVEEEDAATYYCQQSREYPYTFGGGTKLEIKRAA

SEQ ID NO: 205608 - protein, 504 aa, Artificial Sequence
  Description of Artificial Sequence: Synthetic scFv sequence
QVQLQESGPGLVKPSQTLSLTCTVSGGSISSGAYYWTWIRQHPGKGLEWIGYIYYSGSTYYNPSLKSRVSISIDTSKNQFSLKLSSVTAADTAVYYCARGSSSWFDYWGQGTLVTVSSGGGGSGGGGSGGGGSQSVLTQPPSVSEAPRQRVTISCSGSSSNIGNNAVNWYQQLPGKAPKLLIYYDDMLSSGVSDRFSGSKSGTSASLAISGLQSEDEADYYCAAWDDSLNGVVFGGGTKLTVLSGGGGSEVQLVESGGGLVQPGGSLKLSCAASGFTFNKYAMNWVRQAPGKGLEWVARIRSKYNNYATYYADSVKDRFTISRDDSKNTAYLQMNNLKTEDTAVYYCVRHGNFGNSYISYWAYWGQGTLVTVSSGGGGSGGGGSGGGGSQTVVTQEPSLTVSPGGTVTLTCGSSTGAVTSGNYPNWVQQKPGQAPRGLIGGTKFLAPGTPARFSGSLLGGKAALTLSGVQPEDEAEYYCVLWYSNRWVFGGGTKLTVLHHHHHH

SEQ ID NO: 205609 - protein, 225 aa, Artificial Sequence
  Description of Artificial Sequence: Synthetic scFv sequence
EVQLQQSGPELVKPGASVKISCKASGYTFTDYYMNWVKQSHGKSLEWIGDINPNNGGTSYNQKFKGKATLTVDKSSSTAYMELRSLTSEDSAVYYCATYGLGGYWGQGTTLTVSSGNIVMTQSPKSMSMSVGERVTLTCKASENVVTYVSWYQQKPEQSPKLLIYGASNRYTGVPDRFTGSGSATDFTLTISSVQAEDLADYHCGQGYSYPYTFGGGTKLEVKKA

SEQ ID NO: 205610 - protein, 248 aa, Artificial Sequence
  Description of Artificial Sequence: Synthetic scFv sequence
HMQVQLQQPGAELVKPGASVKLSCKASGYTFTRYWMHWVRQRPGQGLEWIGEINPMDSRTNYNKKFKSKATLTVDKSSSTAYMQLSSLKSEDSAVYYCARPGRARGMDYWGQGNSVTVSSGGGGSGGGGSGGGGSGNIVLTQSPASLAVSLGQRAIISCLYGESVESYGNNFMHWYQQKPGQAPKLLIYLASNLESGVPARFSGSGSRTDFTLTIDPVEADDAATYYCQQNNEDPTFGGGTKLEIKKA

SEQ ID NO: 205611 - protein, 244 aa, Artificial Sequence
  Description of Artificial Sequence: Synthetic scFv sequence
MEVQLVESGGGLVKPGGSLKLSCAASGFTFSSYAMSWARQTPEKRLEWVATISDGGYYTYYPDNVKGRFTISRDNAKNNLYLQMSHLKSGDTAMYYCARYDSFDYWGQGTTLTVSSGGGGSGGGGSRGGGSGDIVLTQSPASLAVSLGQRATISYRASKSVSTSGYSYMHWNQQKPGQPPRLLIYLVSNLESGVPARFSGSGSGTDFTLNIHPVEEEDAATYYCQHIRELTTFGGGTKLEIKKA

SEQ ID NO: 205612 - protein, 230 aa, Artificial Sequence
  Description of Artificial Sequence: Synthetic scFv sequence
MQVQLQQPGAELVKPGASVKLSCKASGYTFTRYWMHWVRQRPGQGLEWIGEINPSNGRTNYNEKFKSKATLTVDKSSSTAYMQLSSLKSEDSAVYYCARPGRARGMDYWGQGNSVTVSSGNIVLTQSPASLAVSLGQRATISCRASESVESYGNNFMHWYQQKPGQAPKLLIYLASNLESGVPARFSGSGSRTDFTLTIDPVEADDAATYYCQQNNEDPTFGGGTKLEIK

SEQ ID NO: 205613 - protein, 237 aa, Artificial Sequence
  Description of Artificial Sequence: Synthetic scFv sequence
QAVVTQEPSLTVSPGGTVTLTCGSSTGAVTTSNYASWVQQKPDHLFRGLIGGTNNRAPGVPARFSGSLLGGKAALTISGAQPEDEAEYYCVLWYSDHWVFGGGTKLTVLGGGGSGGGGSGGGGSQVQLQESGPGLVKPSETLSITCTVSGFLLTDYGVNWVRQPPGKGLEWLGVLWGDGITDYNPSLKSRLTVSKDTSKNQVSLKMSSLTAADTAVYYCVTGLFDYWGQGTLLTVSS

SEQ ID NO: 205614 - protein, 237 aa, Artificial Sequence
  Description of Artificial Sequence: Synthetic scFv sequence
QAVVTQEPSLTVSPGGTVTLTCGSSTGAVTTSNYASWVQQKPDHLFRGLIGGTNNRAPGVPARFSGSLLGGKAALTISGAQPEDEAEYYCVLWYSDHWVFGGGTKLTVLGGGGSGGGGSGGGGSQVQLQESGPGLVKPSETLSLTCTVSGFLLTDYGVNWLRQPPGKGLEWIGVLWGDGITDYNPSLKSRVTISKDTSKNQFSLKLSSVTAADTAVYYCVTGLFDYWGQGTLVTVSS

SEQ ID NO: 205615 - protein, 237 aa, Artificial Sequence
  Description of Artificial Sequence: Synthetic scFv sequence
QAVVTQEPSLTVSPGGTVTLTCGSSTGAVTTSNYASWVQQKPGQAFRGLIGGTNNRAPGVPARFSGSLLGGKAALTISGAQPEDEAEYYCVLWYSDHWVFGGGTKLTVLGGGGSGGGGSGGGGSQVQLQESGPGLVKPSETLSITCTVSGFLLTDYGVNWVRQPPGKGLEWLGVLWGDGITDYNPSLKSRLTVSKDTSKNQVSLKMSSLTAADTAVYYCVTGLFDYWGQGTLLTVSS

SEQ ID NO: 205616 - protein, 237 aa, Artificial Sequence
  Description of Artificial Sequence: Synthetic scFv sequence
QAVVTQEPSLTVSPGGTVTLTCGSSTGAVTTSNYASWVQQKPGQAFRGLIGGTNNRAPGVPARFSGSLLGGKAALTISGAQPEDEAEYYCVLWYSDHWVFGGGTKLTVLGGGGSGGGGSGGGGSQVQLQESGPGLVKPSETLSLTCTVSGFLLTDYGVNWLRQPPGKGLEWIGVLWGDGITDYNPSLKSRVTISKDTSKNQFSLKLSSVTAADTAVYYCVTGLFDYWGQGTLVTVSS

SEQ ID NO: 205617 - protein, 237 aa, Artificial Sequence
  Description of Artificial Sequence: Synthetic scFv sequence
QAVVTQEPSLTVSPGGTVTLTCGSSTGAVTTSNYASWVQQKPGQAPRGLIGGTNNRAPGVPARFSGSLLGGKAALTISGAQPEDEAEYYCVLWYSDHWVFGGGTKLTVLGGGGSGGGGSGGGGSQVQLQESGPGLVKPSETLSITCTVSGFLLTDYGVNWVRQPPGKGLEWLGVLWGDGITDYNPSLKSRLTVSKDTSKNQVSLKMSSLTAADTAVYYCVTGLFDYWGQGTLLTVSS

SEQ ID NO: 205618 - protein, 237 aa, Artificial Sequence
  Description of Artificial Sequence: Synthetic scFv sequence
QAVVTQEPSLTVSPGGTVTLTCGSSTGAVTTSNYASWVQQKPGQAPRGLIGGTNNRAPGVPARFSGSLLGGKAALTISGAQPEDEAEYYCVLWYSDHWVFGGGTKLTVLGGGGSGGGGSGGGGSQVQLQESGPGLVKPSETLSLTCTVSGFLLTDYGVNWLRQPPGKGLEWIGVLWGDGITDYNPSLKSRVTISKDTSKNQFSLKLSSVTAADTAVYYCVTGLFDYWGQGTLVTVSS

SEQ ID NO: 205619 - protein, 239 aa, Artificial Sequence
  Description of Artificial Sequence: Synthetic scFv sequence
EIVMTQTPATLSVSAGERVTITCKASQSVSNDVTWYQQKPGQAPRLLIYSASNRYSGVPARFSGSGYGTEFTFTISSVQSEDFAVYFCQQDYSSFGQGTKLEIKRGGGGSGGGGSGGGGSQVQLVESGPGVVQPGRSLRISCAVSGFSVTNYGVHWVRQPPGKGLEWLGVIWAIGITNYNSAFMSRLTISKDNSKNTVYLQMNSLRAEDTAMYYCASRGGHYGYALDYWGQGTLVTVSS

SEQ ID NO: 205620 - protein, 524 aa, Artificial Sequence
  Description of Artificial Sequence: Synthetic scFv sequence
EIVMTQTPATLSVSAGERVTITCKASQSVSNDVTWYQQKPGQAPRLLIYSASNRYSGVPARFSGSGYGTEFTFTISSVQSEDFAVYFCQQDYSSFGQGTKLEIKRTVAAPSVFIFPPSDEQLKSGTASVVCLLNNFYPREAKVQWKVDNALQSGNSQESVTEQDSKDSTYSLSSTLTLSKADYEKHKVYACEVTHQGLSSPVTKSFNRGECGGGGSGGGGSASHVKLQESGPLTLSKADYEKHKVYACEVTHQGLSSPVTKSFNRGECGGGGSGGGGSASHVKLQESGPGLVQPSQSLSLTCTVSGFSLTDYGVHWVRQSPGKGLEWLGVIWSGGGTAYNTALISRLNIYRDNSKNQVFLEMNSLQAEDTAMYYCARRGSYPYNYFDAWGCGTTVTVSSGGGGSGGGGSGGGGSQAVVIQESALTTPPGETVTLTCGSSTGAVTASNYANWVQEKPDHCFTGLIGGHNNRPPGVPARFSGSLIGDKAALTIAGTQTEDEAIYFCALWYSDHWVIGGGTRLTVLG

SEQ ID NO: 205621 - protein, 518 aa, Artificial Sequence
  Description of Artificial Sequence: Synthetic scFv sequence
EIVMTQTPATLSVSAGERVTITCKASQSVSNDVTWYQQKPGQAPRLLIYSASNRYSGVPARFSGSGYGTEFTFTISSVQSEDFAVYFCQQDYSSFGQGTKLEIKRTVAAPSVFIFPPSDEQLKSGTASVVCLLNNFYPREAKVQWKVDNALQSGNSQESVTEQDSKDSTYSLSSTLTLSKADYEKHKVYACEVTHQGLSSPVTKSFNRGECGGGGSGGGGSQVQLVQSGGGLTLSKADYEKHKVYACEVTHQGLSSPVTKSFNRGECGGGGSGGGGSQVQLVQSGGGVVQPGRSLRLSCKASGYTFTRYTMHWVRQAPGKCLEWIGYINPSRGYTNYNQKFKDRFTISRDNSKNTAFLQMDSLRPEDTGVYFCARYYDDHYCLDYWGQGTPVTVSSGGGGSGGGGSGGGGSDIQMTQSPSSLSASVGDRVTITCSASSSVSYMNWYQQTPGKAPKRWIYDTSKLASGVPSRFSGSGSGTDYTFTISSLQPEDIATYYCQQWSSNPFTFGCGTKLQITR

SEQ ID NO: 205622 - protein, 239 aa, Artificial Sequence
  Description of Artificial Sequence: Synthetic scFv sequence
EIVMTQTPATLSVSAGERVTITCKASQSVSNHVTWYQQKPGQAPRLLIYSASNRYSGVPARFSGSGYGTEFTFTISSVQSEDFAVYFCQQDYSSFGQGTKLEIKRGGGGSGGGGSGGGGSQVQLVESGPGVVQPGRSLRISCAVSGFSVTNYGVHWVRQPPGKGLEWLGVIWAGGITNYNSAFMSRLTISKDNSKNTVYLQMNSLRAEDTAMYYCASRGGHYGYALDYWGQGTLVTVSS

SEQ ID NO: 205623 - protein, 239 aa, Artificial Sequence
  Description of Artificial Sequence: Synthetic scFv sequence
EIVMTQTPATLSVSAGERVTITCKASQSVSNHVTWYQQKPGQAPRLLIYSASNRYSGVPARFSGSGYGTEFTFTISSVQSEDFAVYFCQQDYSSFGQGTKLEIKRGGGGSGGGGSGGGGSQVQLVESGPGVVQPGRSLRISCAVSGFSVTNYGVHWVRQPPGKGLEWLGVIWAIGITNYNSAFMSRLTISKDNSKNTVYLQMNSLRAEDTAMYYCASRGGHYGYALDYWGQGTLVTVSS

SEQ ID NO: 205624 - protein, 239 aa, Artificial Sequence
  Description of Artificial Sequence: Synthetic scFv sequence
EIVMTQTPATLSVSAGERVTITCRASQSVSNDVTWYQQKPGQAPRLLIYSASNRYTGIPARFSGSGYGTEFTFTISSVQSEDFAVYFCQQDYSSFGQGTKLEIKRGGGGSGGGGSGGGGSQVQLVESGPGVVQPGRSLRLSCAVSGFSVTNYGVHWVRQPPGKGLEWLGVIWAGGITNYNSSVKGRLTISKDNSKNTVYLQMNSLRAEDTAVYYCASRGGHYGYALDYWGQGTLVTVSS

SEQ ID NO: 205625 - protein, 239 aa, Artificial Sequence
  Description of Artificial Sequence: Synthetic scFv sequence
EIVMTQTPATLSVSAGERVTITCRASQSVSNDVTWYQQKPGQAPRLLIYSASNRYTGIPARFSGSGYGTEFTFTISSVQSEDFAVYFCQQDYSSFGQGTKLEIKRGGGGSGGGGSGGGGSQVQLVESGPGVVQPGRSLRLSCAVSGFSVTNYGVHWVRQPPGKGLEWLGVIWAIGITNYNSSVKGRLTISKDNSKNTVYLQMNSLRAEDTAVYYCASRGGHYGYALDYWGQGTLVTVSS

SEQ ID NO: 205626 - protein, 239 aa, Artificial Sequence
  Description of Artificial Sequence: Synthetic scFv sequence
EIVMTQTPATLSVSAGERVTITCRASQSVSNHVTWYQQKPGQAPRLLIYSASNRYTGIPARFSGSGYGTEFTFTISSVQSEDFAVYFCQQDYSSFGQGTKLEIKRGGGGSGGGGSGGGGSQVQLVESGPGVVQPGRSLRLSCAVSGFSVTNYGVHWVRQPPGKGLEWLGVIWAGGITNYNSSVKGRLTISKDNSKNTVYLQMNSLRAEDTAVYYCASRGGHYGYALDYWGQGTLVTVSS

SEQ ID NO: 205627 - protein, 239 aa, Artificial Sequence
  Description of Artificial Sequence: Synthetic scFv sequence
EIVMTQTPATLSVSAGERVTITCRASQSVSNHVTWYQQKPGQAPRLLIYSASNRYTGIPARFSGSGYGTEFTFTISSVQSEDFAVYFCQQDYSSFGQGTKLEIKRGGGGSGGGGSGGGGSQVQLVESGPGVVQPGRSLRLSCAVSGFSVTNYGVHWVRQPPGKGLEWLGVIWAIGITNYNSSVKGRLTISKDNSKNTVYLQMNSLRAEDTAVYYCASRGGHYGYALDYWGQGTLVTVSS

SEQ ID NO: 205628 - protein, 249 aa, Artificial Sequence
  Description of Artificial Sequence: Synthetic scFv sequence
EVKLVESGGGLVLPGDSLRLSCATSEFTFTDYYMTWVRQPPRKALEWLGFIRNRANGYTTEYNPSVKGRFTISRDNSQSILYLQMNTLRTEDSATYYCARVSNWAFDYWGQGTTLTVSSGSTSGSGKPGSSEGSTKGDVVMTQTPLSLPVSLGDQASISCRSSQSLLKNNGNTFLHWYLQKSGQSPKLLIYKVSNRLSGVPDRFSGSGSGTYFTLKISRVEAEDLGVYFCSQSTHIPYTFGGGTKLEIK

SEQ ID NO: 205629 - protein, 244 aa, Artificial Sequence
  Description of Artificial Sequence: Synthetic scFv sequence
EVQLVQSGAEVEKPGASVKISCKASGSSFTGYNMNWVRQNIGKSLEWIGAIDPYYGGTSYNQKFKGRATLTVDKSTSTAYMHLKSLRSEDTAVYYCVSGMEYWGQGTSVTVSSGSTSGSGKPGSSEGSTKGDVVMTQTPLSLPVTPGEPASISCRSSQSLVHRNGNTYLHWYLQKPGQSPKLLIHKVSNRFSGVPDRFSGSGSGTDFTLKISRVEAEDLGVYFCSQSTHVPPLTFGAGTKLELK

SEQ ID NO: 205630 - protein, 239 aa, Artificial Sequence
  Description of Artificial Sequence: Synthetic scFv sequence
KIVMTQTPATLSVSAGERVTITCKASQSVSNDVTWYQQKPGQAPRLLIYSASNRYSGVPARFSGSGYGTEFTFTISSVQSEDFAVYFCQQDYSSFGQGTKLEIKRGGGGSGGGGSGGGGSQVQLVESGPGVVQPGRSLRISCAVSGFSVTNYGVHWVRQPPGKGLEWLGVIWAGGITNYNSAFMSRLTISKDNSKNTVYLQMNSLRAEDTAMYYCASRGGHYGYALDYWGQGTLVTVSS

SEQ ID NO: 205631 - protein, 239 aa, Artificial Sequence
  Description of Artificial Sequence: Synthetic scFv sequence
KIVMTQTPATLSVSAGERVTITCKASQSVSNDVTWYQQKPGQAPRLLIYSASNRYSGVPARFSGSGYGTEFTFTISSVQSEDFAVYFCQQDYSSFGQGTKLEIKRGGGGSGGGGSGGGGSQVQLVESGPGVVQPGRSLRISCAVSGFSVTNYGVHWVRQPPGKGLEWLGVIWAIGITNYNSAFMSRLTISKDNSKNTVYLQMNSLRAEDTAMYYCASRGGHYGYALDYWGQGTLVTVSS

SEQ ID NO: 205632 - protein, 239 aa, Artificial Sequence
  Description of Artificial Sequence: Synthetic scFv sequence
KIVMTQTPATLSVSAGERVTITCKASQSVSNHVTWYQQKPGQAPRLLIYSASNRYSGVPARFSGSGYGTEFTFTISSVQSEDFAVYFCQQDYSSFGQGTKLEIKRGGGGSGGGGSGGGGSQVQLVESGPGVVQPGRSLRISCAVSGFSVTNYGVHWVRQPPGKGLEWLGVIWAGGITNYNSAFMSRLTISKDNSKNTVYLQMNSLRAEDTAMYYCASRGGHYGYALDYWGQGTLVTVSS

SEQ ID NO: 205633 - protein, 239 aa, Artificial Sequence
  Description of Artificial Sequence: Synthetic scFv sequence
KIVMTQTPATLSVSAGERVTITCKASQSVSNHVTWYQQKPGQAPRLLIYSASNRYSGVPARFSGSGYGTEFTFTISSVQSEDFAVYFCQQDYSSFGQGTKLEIKRGGGGSGGGGSGGGGSQVQLVESGPGVVQPGRSLRISCAVSGFSVTNYGVHWVRQPPGKGLEWLGVIWAIGITNYNSAFMSRLTISKDNSKNTVYLQMNSLRAEDTAMYYCASRGGHYGYALDYWGQGTLVTVSS

SEQ ID NO: 205634 - protein, 239 aa, Artificial Sequence
  Description of Artificial Sequence: Synthetic scFv sequence
KIVMTQTPATLSVSAGERVTITCRASQSVSNDVTWYQQKPGQAPRLLIYSASNRYTGIPARFSGSGYGTEFTFTISSVQSEDFAVYFCQQDYSSFGQGTKLEIKRGGGGSGGGGSGGGGSQVQLVESGPGVVQPGRSLRLSCAVSGFSVTNYGVHWVRQPPGKGLEWLGVIWAGGITNYNSSVKGRLTISKDNSKNTVYLQMNSLRAEDTAVYYCASRGGHYGYALDYWGQGTLVTVSS

SEQ ID NO: 205635 - protein, 239 aa, Artificial Sequence
  Description of Artificial Sequence: Synthetic scFv sequence
KIVMTQTPATLSVSAGERVTITCRASQSVSNDVTWYQQKPGQAPRLLIYSASNRYTGIPARFSGSGYGTEFTFTISSVQSEDFAVYFCQQDYSSFGQGTKLEIKRGGGGSGGGGSGGGGSQVQLVESGPGVVQPGRSLRLSCAVSGFSVTNYGVHWVRQPPGKGLEWLGVIWAIGITNYNSSVKGRLTISKDNSKNTVYLQMNSLRAEDTAVYYCASRGGHYGYALDYWGQGTLVTVSS

SEQ ID NO: 205636 - protein, 100 aa, Artificial Sequence
  Description of Artificial Sequence: Synthetic scFv sequence
KIVMTQTPATLSVSAGERVTITCRASQSVSNHVTWYQQKPGQAPRLLIYSASNRYTGIPARFSGSGYGTEFTFTISSVQSEDFAVYFCQQDYSSFGQGTK

SEQ ID NO: 205637 - protein, 239 aa, Artificial Sequence
  Description of Artificial Sequence: Synthetic scFv sequence
KIVMTQTPATLSVSAGERVTITCRASQSVSNHVTWYQQKPGQAPRLLIYSASNRYTGIPARFSGSGYGTEFTFTISSVQSEDFAVYFCQQDYSSFGQGTKLEIKRGGGGSGGGGSGGGGSQVQLVESGPGVVQPGRSLRLSCAVSGFSVTNYGVHWVRQPPGKGLEWLGVIWAGGITNYNSSVKGRLTISKDNSKNTVYLQMNSLRAEDTAVYYCASRGGHYGYALDYWGQGTLVTVSS

SEQ ID NO: 205638 - protein, 139 aa, Artificial Sequence
  Description of Artificial Sequence: Synthetic scFv sequence
LEIKRGGGGSGGGGSGGGGSQVQLVESGPGVVQPGRSLRLSCAVSGFSVTNYGVHWVRQPPGKGLEWLGVIWAIGITNYNSSVKGRLTISKDNSKNTVYLQMNSLRAEDTAVYYCASRGGHYGYALDYWGQGTLVTVSS

SEQ ID NO: 205639 - protein, 243 aa, Artificial Sequence
  Description of Artificial Sequence: Synthetic scFv sequence
QVQLKESGPVLVAPSQTLSITCTVSGFSLASYNIHVWRQPPGKGLEWLGVIWAGGSTNYNSALMSRLSISKDNSKSQVFLQMNSLQTDDTAMYYCAKRSDDYSWFAYWGQGTLVTVSASGGGGSGGGGSGGGGSENVLTQSPAIMSASPGEKVTMTCRASSSVSSSYLHWYQQKSGASPKVWIYSTSNLASGVPGRFSGSGSGTSYSLTISSVEAEDAATYYCQQYSGYPITFGAGTKVEVKR

SEQ ID NO: 205640 - protein, 243 aa, Artificial Sequence
  Description of Artificial Sequence: Synthetic scFv sequence
QVQLKESGPVLVAPSQTLSITCTVSGFSLASYNIHWVRQPPGKGLEWLGVIWAGGSTNYNSALMSRLSISKDNSKSQVFLQMNSLQTDDTAMYYCAKRSDDYSWFAYWGQGTLVTVSASGGGGSGGGGSGGGGSENVLTQSPAIMSASPGEKVTMTCRASSSVSSSYLHWYQQKSGASPKVWIYSTSNLASGVPGRFSGSGSGTSYSLTISSVEAEDAATYYCQQYSGYPITFGAGTKVEVKR

SEQ ID NO: 205641 - protein, 242 aa, Artificial Sequence
  Description of Artificial Sequence: Synthetic scFv sequence
QVQLQESGPGLVKPSQTLSITCTVSGFSLASYNIHWVRQPPGKGLEWLGVIWAGGSTNYNSALMSRLTISKDNSKNQVFLKMSSLTAADTAVYYCAKRSDDYSWFAYWGQGTLVTVSSGGGGSGGGGSGGGGSENQMTQSPSSLSASVGDRVTMTCRASSSVSSSYLHWYQQKSGKAPKVWIYSTSNLASGVPSRFSGSGSGTDYTLTISSLQPEDFATYYCQQYSGYPITFGQGTKVEIKR

SEQ ID NO: 205642 - protein, 241 aa, Artificial Sequence
  Description of Artificial Sequence: Synthetic scFv sequence
QVQLQESGPGLVKPSQTLSITCTVSGFSLASYNIHWVRQPPGKGLEWLGVIWAGGSTNYNSALMSRLTISKDNSKNQVFLKMSSLTAADTAVYYCAKRSDDYSWFAYWGQTLVTVSSGGGGSGGGGSGGGGSENQMTQSPSSLSASVGDRVTMTCRASSSVSSSYLHWYQQKSGKAPKVWIYSTSNLASGVPSRFSGSGSGTDYTLTISSLQPEDFATYYCQQYSGYPITFGQGTKVEIKR

SEQ ID NO: 205643 - protein, 241 aa, Artificial Sequence
  Description of Artificial Sequence: Synthetic scFv sequence
QVQLVESGPGVVQPGRSLRISCAVSGFSVTNYGVHWVRQPPGKGLEWLGVIWAGGITNYNSAFMSRLTISKDNSKNTVYLQMNSLRAEDTAMYYCASRGGHYGYALDYWGQGTLVTVSSGSTSGSGKPGSSEGSTKGEIVMTQTPATLSVSAGERVTITCKASQSVSNDVTWYQQKPGQAPRLLIYSASNRYSGVPARFSGSGYGTEFTFTISSVQSEDFAVYFCQQDYSSFGQGTKLEIK

SEQ ID NO: 205644 - protein, 239 aa, Artificial Sequence
  Description of Artificial Sequence: Synthetic scFv sequence
EVQLLESGGGLVQPGGSLRLSCAASGFTFSSYAMSWVRQAPGKGLEWVSTIQKQGLPTEYADSVKGRFTISRDNSKNTLYLQMNSLRAEDTAVYYCAKNRAKFDYWGQGTLVTVSSGGGGSGGGGSGGGGSTDIQMTQSPSSLSASVGDRVTITCRASQSISSYLNWYQQKPGKAPKLLIYNASMLQSGVPSRFSGSGSGTDFTLTISSLQPEDFATYYCQQNRGFPLTFGQGTKVEIK

SEQ ID NO: 205645 - protein, 261 aa, Artificial Sequence
  Description of Artificial Sequence: Synthetic scFv sequence
MDWIWRILFLVGAATGAHSQVQLQQSGAELVRPGASVKLSCKASGYTFTDYEMHWVKQTPVHGLKWIGALDPKTGDTAYSQKFKGKATLTADKSSSTAYMELRSLTSEDSAVYYCTRFYSYTYWGQGTLVTVSAGGGGSGGGGSGGGGSDVVMTQTPLSLPVSLGDQASISCRSSQSLVHSNGNTYLHWYLQKPGQSPKLLIYKVSNRFSGVPDRFSGSGSGTDFTLKISRVEAEDLGVYFCSQNTHVPPTFGSGTKLEIK

SEQ ID NO: 205646 - protein, 242 aa, Artificial Sequence
  Description of Artificial Sequence: Synthetic scFv sequence
QVQLQQSGAELVRPGASVKLSCKASGYTFTDYEMHWVKQTPVHGLKWIGALDPKTGDTAYSQKFKGKATLTADKSSSTAYMELRSLTSEDSAVYYCTRFYSYTYWGQGTLVTVSAGGGGSGGGGSGGGGSDVVMTQTPLSLPVSLGDQASISCRSSQSLVHSNGNTYLHWYLQKPGQSPKLLIYKVSNRFSGVPDRFSGSGSGTDFTLKISRVEAEDLGVYFCSQNTHVPPTFGSGTKLEIK

SEQ ID NO: 205647 - protein, 248 aa, Artificial Sequence
  Description of Artificial Sequence: Synthetic scFv sequence
DIQLTQSPSSLSASVGDRVTITCRASQSISSYLNWYQQKPGKAPKLLIYAASSLQSGVPSRFSGSGSGTDFTLTISSLQPADFATYYCQQSYSVPYTFGQGTKLEIKRSRGGGGSGGGGSGGGGSLEMAEVQLVQSGGGLVQPGGSLRLSCATSGFTFNNYWMSWVRQAPGKGLEWVANIKQDGSEKYYADSVRGRFTISRDNAKNSLSLQLNNLRAEDTAVYYCARSMSTAWGYDEWGQGTLVTVSS

SEQ ID NO: 205648 - protein, 269 aa, Artificial Sequence
  Description of Artificial Sequence: Synthetic scFv sequence
MKKTAIAIAVALAGFATVAQAAELQAVLTQPPSASGTPGQRVTISCSGSSSNIGSNYVYWYQQLPGTAPKLLIYRNNQRPSGVPDRFSGSKSGTSASLAISGLRSEDEADYYCAAWDDSLSGRVFGTGTKVTVLGSRGGGGSGGGGSGGGGSLEMAQLQLVQSGAEVKKPGSSVKVSCKASGYTFNTYYLHWVRQAPGQGLEWMGRINPNNGGTNYAQKFQGRVTMTRDTSINTAYMELSRLRSDDTAVYYCARSYDYWGQGTLVTVSS

SEQ ID NO: 205649 - protein, 276 aa, Artificial Sequence
  Description of Artificial Sequence: Synthetic scFv sequence
MKKTAIAIAVALAGFATVAQAAELQPVLTQPPSASGTPGQRVTISCSGSSSNIGGNTVSWYQQVPGTAPRLLIFRNNQRPPGVPDRFSGSKSGTSASLAISGLRSEDEADYYCAAWDASRQGVFGGGTKLTVLGSRGGGGSGGGGSGGGGSLEMAQVQLVQSGAEVKKPGSSVKVSCKASGGTFRSYAITWVRQAPGQGLEWMGRIIPMLDITNYAQKFQGRVTITADKSTSTAYMELSSLRSEDTAVYYCARTYSRSPFHMEDFWGQGTLVTVSS

SEQ ID NO: 205650 - protein, 271 aa, Artificial Sequence
  Description of Artificial Sequence: Synthetic scFv sequence
MKKTAIAIAVALAGFATVAQAAELQSALTQPPSASGSPGQSVTISCTGTSRDAGGYNYFSWYQQHPGKAPKLLIYEVTKRPSGVPDRFSGSKSGKTASLTVSGLQADDEAVYYCSSYGGSNNFRVFGGGTKLTVLGSRGGGGSGGGGSGGGGSLEMAEVQLVESGGGVVRPGGSLRLSCAASGFTFGDYGMSWVRQAPGKGLEWVSGINWNGGSTGYADSVKGRFTISRDNAKNSLYLQMNSLRAEDTAVYYCARSKQDYWGQGTLVTVSS

SEQ ID NO: 205651 - protein, 273 aa, Artificial Sequence
  Description of Artificial Sequence: Synthetic scFv sequence
MKKTAIAIAVALAGFATVAQAAELQSVLTQPPSASGSPGQSLTISCTGTSSDVGGYNHVSWYQQYPGKAPKLMIYEVTKRPSGVPDRFSGSKSGNTASLTVSGLQAEDEADYYCSSYAGSAHWVFGGGTKLTVLGSRGGGGSGGGGSGGGGSLEMAEVQLVQSGAEVKKPGASVKVSCKASGYTFSRYYIHWVRQAPGQGLEWMGWMNPNSGNTGYAQKFQGRVTMTRNTSISTAYMELSSLRSEDTAVYYCARGRYHVIDYWGQGTLVTVSS

SEQ ID NO: 205652 - protein, 270 aa, Artificial Sequence
  Description of Artificial Sequence: Synthetic scFv sequence
MKKTAIAIAVALAGFATVAQAAELQSVLTQPPSASGTPGQRVTISCSGSSSNIGSNTVNWYQQLPGTAPKLLIYRNNQRPSGVPDRFSGSKSGTSASLAISGLRSEDEADYYCAAWDDSLSGRVFGGGTKLTVLGSRGGGGSGGGGSGGGGSLEMAEVQLVESGGGLVQPGGSLRLSCAASGFTFSSYAMSWVRQAPGKGLEWVSAISGSGGSTYYADSVKGRFTISRDNAKNTLYLQMNSLRAEDTAVYYCARKYQDVWGQGTLVTVSS

SEQ ID NO: 205653 - protein, 279 aa, Artificial Sequence
  Description of Artificial Sequence: Synthetic scFv sequence
MKKTAIAIAVALAGFATVAQAAELQSVLTQPPSVSGAPGQRVTISCTGSSSNIGAGYDVHWYQQLPGRAPKLLIYGNSNRPSGVPDRFSGSKSGTSASLAITGLQAEDEADYYCQSYDSSLRGYVFGTGTKVTVLGSRGGGGSGGGGSGGGGSLEMAQVQLVQSGGGVVQPGRSLRLSCAASGFSFSGTAMHWVRQAPGKGLEWVSTISSTGRSTYYRDSVKGRFTISRDNSKNTLYLQMNSLRGEDTAVYYCARPVSSMTLSIQSDGWGQGTLVTVSS

SEQ ID NO: 205654 - protein, 286 aa, Artificial Sequence
  Description of Artificial Sequence: Synthetic scFv sequence
MKKTAIAIAVALAGFATVAQAAELQSVVTQPPSVSAAPGQRVTISCSGGSSNIGNNYVSWFQQLPRTAPKLLIYDNNKRPSGIPDRFSGSKSGTSAALDITVLQTGDEADYYCGTWDSSLRNWVFGGGTKLTVLGSRGGGGSGGGGSGGGGSLEMAQMQLVQSGAEVKKPGASVKVSCKASGYTFTSYYMHWVRQAPGQGLEWMGIINPSGGSTSYAQKFQGRVTMTRDTSTSTVYMELSSLRSEDTAVYYCARGQKYHSQYSRGGTGGGMTQDMWGQGTLVTVSS

SEQ ID NO: 205655 - protein, 277 aa, Artificial Sequence
  Description of Artificial Sequence: Synthetic scFv sequence
MKKTAIAIAVALAGFATVAQAAELSYELTQPPSASGTPGQRVSISCSGSSSNIGSNTVNWYQQFPGTAPKLLIHSNNQRPSGVPDRFSGSKSGTSASLAISGPQSEDEADYYCAAWDDSVNGYVFGTGTKVTVLGSRGGGGSGGGGSGGGGSLEMAQLQLQESGGGSVQPGGSLRLSCAASGFTFSNYAMSWVRQAPGKGLEWVSAITNSGRSTYYADSVKGRFTISRDNSKNTLSLQMSSLRAEDTAVYYCARVTHRRYGSTFDSRGQGTLVTVSS

SEQ ID NO: 205656 - protein, 250 aa, Artificial Sequence
  Description of Artificial Sequence: Synthetic scFv sequence
NFMLTQPHSVSESPGKTVSISCTRTSGAIAGAYVQWFQQRPGSAPTTVIYDDNKRPSGVPDRFSGSIDKSSNSASLTISGLKTEDEADYYCQSYDYDSSNVLFGGGTKLTVLGSRGGGGSGGGGSGGGGSLEMAEVQLVESGGGLVQPGGSLRLSCAASGFTFSNYAMSWVRQAPGKGLEWVSAISGSGNTYYADSVKGRFTISRDNSKNTLYLQMNSLRAEDTAVYYCARGSVRYTDIWGQGTLVTVSS

SEQ ID NO: 205657 - protein, 253 aa, Artificial Sequence
  Description of Artificial Sequence: Synthetic scFv sequence
QAVLTQPPSASGTPGQRVTISCSGSSSNIGSNYVYWYQQLPGTAPKLLIYRNNQRPSGVPDRFSGSKSGTSASLAISGLRSEDEADYYCAAWDDSLSGYVFGTGTKVTVLGSRGGGGSGGGGSGGGGSLEMAQVQLVQSGAEVQRPGASVRVSCKAIAYTFTDYYIHWVRQAPGQGPEWMGWINPKSGRTQYAPKFQDRVTLARETPISTASMELRGLTSDDTAVYYCARVYGYSRWSGFDLWGQGTLVTVSS

SEQ ID NO: 205658 - protein, 256 aa, Artificial Sequence
  Description of Artificial Sequence: Synthetic scFv sequence
QSALTQPASVSGSPGQSITISCTGTSRDVGGYNYVSWYQQYPGKAPKLMIYEVSKRPSGVSNRFSGSKSGNTASLTISGLQAEDEADYYCSSYTSSSTLDFGTGTKVTVLGSRGGGGSGGGGSGGGGSLEMAQVQLVQSGAEVKQPGASVKVSCQASGYTFTTYYMHWVRQAPGQGLEWMGIINPNGGGTFYAQKFQDRVTMTRDTSTGTVYMELSSLRSDDTAVYYCARGHKVYKSHPTGGYDRWGQGTLVTVSS

SEQ ID NO: 205659 - protein, 253 aa, Artificial Sequence
  Description of Artificial Sequence: Synthetic scFv sequence
QSALTQPASVSGSPGQSITISCTGTSSDVGGYNFVSWYQQHPGKAPKVMIYDVSKRPSGISNRFSGSKSGNTASLTISGLQVEDEAEYYCSSYTSTRTVIFAGGTKVTVLGSRGGGGSGGGGSGGGGSLEMAQVQLVQSGAEVKKPGASVKVSCKASGYTFTSYYMHWVRQAPGQGLEWMGIINPSGGSTRYAQKFQGRVTMTRDTSTSTVYMELSSLRSEDTAVYYCARGSSRWGGWTGDYWGQGTLVTVSS

SEQ ID NO: 205660 - protein, 259 aa, Artificial Sequence
  Description of Artificial Sequence: Synthetic scFv sequence
QSALTQPASVSGSPGQSITISCTGTSSDVGGYNYVSWYQQHPGKAPKLMIYDVSKRPSGVSNRFSGSKSGNTASLTISGLQAEDEADYYCSSYTRSSTEVFGGGTKLTVLGSRGGGGSGGGGSGGGGSLEMAEVQLVQSGAEVKKPGASVKVSCKASGYTFTSYYMHWVRQAPGQGLEWMGIINPSGGSTSYAQKFQGRVTMTRDTSTSTVYMELSSLRSEDTAVYYCARGGSKKWSGEKWRRENFDYWGQGTLVTVSS

SEQ ID NO: 205661 - protein, 249 aa, Artificial Sequence
  Description of Artificial Sequence: Synthetic scFv sequence
QSALTQPASVSGSPGQSITISCTGTSSDVGGYNYVSWYQQSPGKAPRLMIYGVSKRPSGVPDRFSGSKSGNTASLTVSGLQAEDEADYYCSSYAGVNNLMFGGGTKLTVLGSRGGGGSGGGGSGGGGSLEMAQVQLVQSGAEVKKPGASVKVSCKASGYTFTSYYMHWVRQAPGQGLEWMGIINPSGGSTSYAQKFQGRVTMTRDTSTSTVYMELSSLRSEDTAVYYCARDVISGFDSWGQGTLVTVSS

SEQ ID NO: 205662 - protein, 247 aa, Artificial Sequence
  Description of Artificial Sequence: Synthetic scFv sequence
QSALTQPPSASGSPGQSVTISCTGTSRDAGGYNYFSWYQQHPGKAPKLLIYEVTKRPSGVPDRFSGSKSGKTASLTVSGLQADDEAVYYCSSYGGSNNFRVFGGGTKLTVLGSRGGGGSGGGGSGGGGSLEMAEVQLVESGGGVVRPGGSLRLSCAASGFTFGDYGMSWVRQAPGKGLEWVSGINWNGGSTGYADSVKGRFTISRDNAKNSLYLQMNSLRAEDTAVYYCARSKQDYWGQGTLVTVSS

SEQ ID NO: 205663 - protein, 249 aa, Artificial Sequence
  Description of Artificial Sequence: Synthetic scFv sequence
QSALTQPPSASGSPGQSVTISCTGTSSDIGGYNYVSWYQQHPGKAPKLMIYEVNKRPSGVPDRFSGSKSGNTASLTVSGLQAEDEADYYCASFAGRKTLVFGGGTKLTVLGSRGGGGSGGGGSGGGGSLEMAQVQLVQSGAEVKKPGASVKVSCRASGYTFTAYSLHWVRQAPGQGLEWMGWINPSSGGAVYAQKFQGRVTMTRDTSISTAYMELSGLRSDDTAVYYCARNVGGQADDWGQGTLVTVSS

SEQ ID NO: 205664 - protein, 248 aa, Artificial Sequence
  Description of Artificial Sequence: Synthetic scFv sequence
QSALTQPPSASGSPGQSVTISCTGTSSDVGGYNYVSWYQQHPGKAPKLMIYEVSKRPSGVPDRFSGSKSGNTASLTVSGLQAEDEADYYCSSYAGSNTLVFGGGTKLTVLGSRGGGGSGGGGSGGGGSLEMAQMQLVQSGAEVKKPGASVKVSCKASGYTFTSYYMHWVRQAPGQGLEWMGIINPSGGSSSYAQKFQGRVTMTRDTSTSTVYMELSSLRSEDTAVYYCARAGMGMDTWGQGTLVTVSS

SEQ ID NO: 205665 - protein, 248 aa, Artificial Sequence
  Description of Artificial Sequence: Synthetic scFv sequence
QSALTQPPSASGSPGQSVTISCTGTSSDVGGYNYVSWYQQHPGKAPKLMIYEVSKRPSGVPDRFSGSKSGNTASLTVSGLQAEDEADYYCSSYAGSNTLVFGGGTKLTVLGSRGGGGSGGGGSGGGGSLEMAQMQLVQSGAEVKKPGASVKVSCKASGYTFTSYYMHWVRQAPGQGLEWMGIINPSGGSTSYAQKFQGRVTMTRDTSTSTVYMELSSLRSEDTAVYYCARAGMGMDTWGQGTLVTVSS

SEQ ID NO: 205666 - protein, 249 aa, Artificial Sequence
  Description of Artificial Sequence: Synthetic scFv sequence
QSALTQPPSASGSPGQSVTISCTGTSTDIGGYNYVSWYQHHPSKAPKLMIYEVNKRPSGVPDRFSGSKSGNTASLTVSGLQAEDEADYYCASFAGRKTLVFGGGTKLTVLGSRGGGGSGGGGSGGGGSLEMAQVQLVQSGAEVKKPGASVKVSCRASGYTFTAYSLHWVRQAPGQGLEWMGWINPSSGGAVYAQKFQGRVTMTRDTSISTAYMELSGLRSDDTAVYYCARNVGGHADDWGQGTLVTVSS

SEQ ID NO: 205667 - protein, 246 aa, Artificial Sequence
  Description of Artificial Sequence: Synthetic scFv sequence
QSVLTQPASVSGSPGQSLTISCTGTSNDVGAYKYVSWYQQYPGKAPKLILYDVFKRPSGVSNRFSGSKSDNTASLTISGLQAEDEADYYCFSLTSSNTYVFGTGTKVTVLGSRGGGGSGGGGSGGGGSLEMAQMQLVQSGAEVKKPGASVKVSCKASGYTFNRYAITWVRQAPGQGLEWMGWISAYNGNSHYAQKLQGRVTMTTDTSTGTAYMELRRLRSDDTAVYYCARMAYDSWGQGTLVTVSS

SEQ ID NO: 205668 - protein, 249 aa, Artificial Sequence
  Description of Artificial Sequence: Synthetic scFv sequence
QSVLTQPPSASGTPGQRVTISCSGSRSNVGGNYVFWYQQVPGATPKLLIYRSNQRPSGVPDRFAGSKSGSSASLAISGLRSEDEADYYCATWDDSLSGFVFGTGTKVTVLGSRGGGGSGGGGSGGGGSLEMAEVQLVESGGGLVKPGGSLRLSCAASGFTFSDYYMSWIRQAPGKGLEWVSYISSSGSTIYYADSVKGRFTISRDNAKNSLYLQMNSLRAEDTAVYYCARGYGKAYDQWGQGTLVTVSS

SEQ ID NO: 205669 - protein, 252 aa, Artificial Sequence
  Description of Artificial Sequence: Synthetic scFv sequence
QSVLTQPPSASGTPGQRVTISCSGSSSNIGSNYVYWYQQLPGTAPKLLIYRNNQRPSGVPDRFSGSKSGTSASLAISGLRSEDEADYYCAAWDDSLSGWVFGGGTKLTVLGSRGGGGSGGGGSGGGGSLEMAQVQLVQSGAEVKKPGSSVKVSCKASGGTFSSYAISWVRQAPGQGLEWMGWMNPNSGNTGYAQKFQGRVTMTRNTSISTAYMELSSLRSEDTAVYYCARYQSYKGSQSDSWGQGTLVTVSS

SEQ ID NO: 205670 - protein, 249 aa, Artificial Sequence
  Description of Artificial Sequence: Synthetic scFv sequence
  MOD_RES (37)..(37): Any amino acid
QSVLTQPPSLSGAPGQRVTISCSGSRSNIGTNYVSWXQQLPGTAPKLLIYRNHQWPSGVPDRFTGSKSGTSASLAISGLRSEDEADYYCAAWDDNLSGVVFGGGTKLTVLGSRGGGGSGGGGSGGGGSLEMAEVQLVETGGGLVQPGGSLRLSCAASGSTFSSYAMSWVRQAPGKGLEWVSAISGRGRSTYYADSVKGRFTISRDNSKNTLYLQMNSLRAEDTAVYYCARYYKSSKDHWGQGTLVTVSS

SEQ ID NO: 205671 - protein, 252 aa, Artificial Sequence
  Description of Artificial Sequence: Synthetic scFv sequence
QSVLTQPPSVSAAPGQKVTIPCSGSRSNVGNYYVSWYQQLPGTAPKLLIYDNNKRPSGIPDRFSGSKSGTSATLGITGLQTGDEADYFCGTWDGSLSAHVFGTGTKVTVLGSRGGGGSGGGGSGGGGSLEMAQVQLVQSGSELKKPGASVRVSCTASGYTFTSYYMHWVRQAPGQGLEWMGVINPNAGSTRYAQKFQGRVTMSTDTSTSTAYMDLSSLRSEDTAVYYCARGMYRSLLFYDPWGQGTLVTVSS

SEQ ID NO: 205672 - protein, 250 aa, Artificial Sequence
  Description of Artificial Sequence: Synthetic scFv sequence
QSVVTQPASVSGSPGQSITISCTGTSSDVGGYNYVSWYQQHPGKAPKLMIYDVSKRPSGVSNRFSGSKSGNTASLTISGLQAEDEADYYCSSYTSSSTLVFGGGTKLTVLGSRGGGGSGGGGSGGGGSLEMAEVQLVESGGAFVQPGGSLRLSCAASGFTFSSYAMTWVRQAPGKGLEWVSTISGRGRSTFYADSVKGRFTISRDNSKNTLYLQMNSLRAEDTAVYYCARYYHAGAFDLWGQGTLVTVSS

SEQ ID NO: 205673 - protein, 248 aa, Artificial Sequence
  Description of Artificial Sequence: Synthetic scFv sequence
QSVVTQPPSMSAAPGQQVTISCSGGNSNIERNYVSWYLQLPGTAPKLVIFDNDRRPSGIPDRFSGSKSGTSATLGITGLQTGDEADYYCGTWDSSLRGWVFGGGTKLTVLGSRGGGGSGGGGSGGGGSLEMAEVQLVESGGGLIQPGGSLRLSCAASGFTFSNYAMNWVRQAPGKGLEWVSTINGRGSSTIYADSVKGRFTISRDNSKNTLYLQMNSLRAEDTATYYCARYISRGLGDSWGQGTLVTV

SEQ ID NO: 205674 - protein, 261 aa, Artificial Sequence
  Description of Artificial Sequence: Synthetic scFv sequence
QSVVTQPPSVSAAPGQKVTISCSGSSSNIGNNYVSWYQQLPGTAPKLLIYDNNKRPSGIPDRFSGSKSGTSATLGITGLQTGDEADYYCGTWDSSLSGVVFGGGTKLTVLGSRGGGGSGGGGSGGGGSLEMAQVQLVQSGGEVKKPGASVKVSCKASGFTFNTYGISWVRQAPGQGLEWMGWISANNGHTKSAQRFQDRVAMATDTSTSTAYMELRSLKFDDTAVYYCARGGYHHQMQRYYKATSVYSDYWGQGTLVTVSS

SEQ ID NO: 205675 - protein, 248 aa, Artificial Sequence
  Description of Artificial Sequence: Synthetic scFv sequence
QSVVTQPPSVSGAPGQRVTISCTGSSSNIGAGYDVHWYQQLPGTAPKLLIYGNSNRPSGVPDRFSGSKSGTSASLAITGLQAEDEADYYCQSYDSSLSGSYVFGTGTKLTVLGSRGGGGSGGGGSGGGGSLEMAEVQLVETGGNLVQPGASLRLSCAASGFSFSGTAMHWVRQAPGKGLEWVSTISSTGRSTYYRDSVKGRFTISRDNSKNTLYLQMNSLRGEDTAVYYCARVSFDYWGQGTLVTVSS

SEQ ID NO: 205676 - protein, 250 aa, Artificial Sequence
  Description of Artificial Sequence: Synthetic scFv sequence
SSELTQDPAVSVALGQTVRITCQGDSLRSYYASWYQQKPGQAPVLVIYGKNNRPSGIPDRFSGSSSGNTASLTITGAQAEDEADYYCNSRDSSGNPPVVFGGGTKLTVLGSRGGGGSGGGGSGGGGSLEMAQVQLVESGGGLVHPGGSLRLSCAASGFTFRSHSMNWVRQAPGKGLEWVSSISSDSTYTYYADSVKGRFTISRDNAKNSLYLQMNSLRAEDTAVYYCARSGGQWKYYDYWGQGTLVTVSS

SEQ ID NO: 205677 - protein, 251 aa, Artificial Sequence
  Description of Artificial Sequence: Synthetic scFv sequence
SYELTQPPSASGTPGQRVTISCSGSSSNIGSNYVSWYQQLPGTAPKLLIYRNNQRPSGVPDRFSGSKSGTSASLAISGLRSEDEADYYCAAWDDSLSGVVFGGGTKLTVLGSRGGGGSGGGGSGGGGSLEMAEVQLVQSGAEVKKPGSSVKVSCKASGGTFSSYAISWVRQAPGQGLEWMGGIIPIFGTAKYAQKFQGRVTITADESTSTAYMELSSLRSEDTAVYYCARSHVAWSLLDYWGQGTLVTVSS

SEQ ID NO: 205678 - protein, 244 aa, Artificial Sequence
  Description of Artificial Sequence: Synthetic scFv sequence
SYVLTQPPSASGTPGQRVTISCSGSSSNIGSNTVNWYQQLPGTAPKLLIYRNNQRPSGVPDRFSGSKSGTSASLAISGLRSEDEADYYCAAWDDSLSGLFGTGTKVTVLGSRGGGGSGGGGSGGGGSLEMAQMQLVQSGAEVKKPGASVKVSCKASEYTFTRHILHWVRQAPGQSLEWMGWINPGNGNTKYSQKFQVRVTFTRDTSASTVYMELSSLRSEDTAVYYCARLPDQWGQGTLVTVSS

SEQ ID NO: 205679 - protein, 263 aa, Artificial Sequence
  Description of Artificial Sequence: Synthetic scFv sequence
MAVLGLLFCLVTFPSCVLSQVQVKESGPFLVPPSQSLSITCTVSGFSLTTYGVSWIRQPPGKGLEWLGAIWGDGTTNYHSALISRLSISKDNSKSQVFLKLNSLQTDDTATYYCAKLGNYDALDYWGQGTSVTVSSGGGGSGGGGSGGGGSDVLMTQTPLSLPVSLGDQASISCRSSQSIVHSNGNTYLEWYLQKPGQSPNLLIYFVSNRFSGVPDRFSGSGSGTDFTLKISRVEAEDLGVYYCFQGSHVPWTFGGGTKLEIK

SEQ ID NO: 205680 - protein, 291 aa, Artificial Sequence
  Description of Artificial Sequence: Synthetic scFv sequence
MKYLLPTAAAGLLLLAAQPAMAQVQLVESGGGLVQPGGSLRLSCAASGFTFRSYAMSWVRQAPGKGLEWVSAISGRGDNTYYADSVKGRFTISRDNSKNTLYLQMNSLRAEDTAVYYCAKMTSNAFAFDYWGQGTLVTVSSGGGGSGGGGSGGGGSQSVLTQPPSVSGAPGQRVTISCTGSSSNIGAGYGVHWYQQLPGTAPKLLIYGNTNRPSGVPDRFSGFKSGTSASLAITGLQAEDEADYYCQSYDSSLSGWVFGGGTKLTVLGAAAEQKLISEEDLNGAAHHHHHH

SEQ ID NO: 205681 - protein, 291 aa, Artificial Sequence
  Description of Artificial Sequence: Synthetic scFv sequence
MKYLLPTAAAGLLLLAAQPAMAQVQLVQSGGGLVQPGRSLRLSCAASGFTFDDYAMHWVRQAPGKGLEWVSGISWNSGSIGYADSVKGRFTISRDNAKNSLYLQMNSLRPEDTAVYYCARDLGAKQWLEGFDYWGQGTLVTVSSGGGGSGGGGSGGGGSNFMLTQDPAVSVALGQTVRITCQGDSLRSYYASWYQQKPGQAPVLVIYGKNNRPSGIPDRFSGSTSGNSASLTITGAQAEDEADYYCNSRDSSGNHWVFGGGTKVTVLGAAAEQKLISEEDLNGAAHHHHHH

SEQ ID NO: 205682 - protein, 278 aa, Artificial Sequence
  Description of Artificial Sequence: Synthetic scFv sequence
MRFSTTLATAATALFFTASQVSAEVQLVESGGGLVQPGGSLRLSCAASGFNIKDTYIHWVRQAPGKGLEWVARIYPTNGYTRYADSVKGRFTISADTSKNTAYLQMNSLRAEDTAVYYCSRWGGDGFYAMDYWGQGTLVTVSSGGGGSGGGGSGGGGSGGGGSDIQMTQSPSSLSASVGDRVTITCRASQDVNTAVAWYQQKPGKAPKLLIYSASFLYSGVPSRFSGSRSGTDFTLTISSLQPEDFATYYCQQHYTTPPTFGQGTKVEIKSGHHHHHH

SEQ ID NO: 205683 - protein, 280 aa, Artificial Sequence
  Description of Artificial Sequence: Synthetic scFv sequence
MRFSTTLATAATALFFTASQVSAGHHHHHHSGEVQLVESGGGLVQPGGSLRLSCAASGFNIKDTYIHWVRQAPGKGLEWVARIYPTNGYTRYADSVKGRFTISADTSKNTAYLQMNSLRAEDTAVYYCSRWGGDGFYAMDYWGQGTLVTVSSGGGGSGGGGSGGGGSGGGGSDIQMTQSPSSLSASVGDRVTITCRASQDVNTAVAWYQQKPGKAPKLLIYSASFLYSGVPSRFSGSRSGTDFTLTISSLQPEDFATYYCQQHYTTPPTFGQGTKVEIKS

SEQ ID NO: 205684 - protein, 665 aa, Artificial Sequence
  Description of Artificial Sequence: Synthetic scFv sequence
MTVLAPAWSPTTYLLLLLLLSSGLSGTQDCSFQHSPISSDFAVKIRELSDYLLQDYPVTVASNLQDEELCGGLWRLVLAQRWMERLKTVAGSKMQGLLERVNTEIHFVTKCAFQPPPSCLRFVQTNISRLLQETSEQLVALKPWITRQNFSRCLELQCQPDSSTLPPPWSPRPLEATAPTAPEPKSCDKTHTCPPCPAPELLGGPSVFLFPPKPKDTLMISRTPEVTCVVVDVSHEDPEVKFNWYVDGVEVHNAKTKPREEQYNSTYRVVSVLTVLHQDWLNGKEYKCKVSNKALPAPIEKTISKAKGQPREPQVYTLPPSRDELTKNQVSLTCLVKGFYPSDIAVEWESNGQPENNYKTTPPVLDSDGSFFLYSKLTVDKSRWQQGNVFSCSVMHEALHNHYTQKSLSLSPGKEVQLVESGGGLVQPGGSLRLSCAASGFNIKDTYIHWVRQAPGKGLEWVARIYPTNGYTRYADSVKGRFTISADTSKNTAYLQMNSLRAEDTAVYYCSRWGGDGFYAMDYWGQGTLVTVSSASTKGPSVGGGGSGGGGSGGGGSDIQMTQSPSSLSASVGDRVTITCRASQDVNTAVAWYQQKPGKAPKLLIYSASFLYSGVPSRFSGSRSGTDFTLTISSLQPEDFATYYCQQHYTTPPTFGQGTKVEIKR

SEQ ID NO: 205685 - protein, 643 aa, Artificial Sequence
  Description of Artificial Sequence: Synthetic scFv sequence
EVQLLEQSGAELVRPGALVKLSCKASGFKIKDYFVNWVKQRPEQGLEWIGWIDPENDNSLYGPNFQDKASITADTSSNTGYLQLSGLTSEDTAVYYCALYYGSRGDAMDYWGQGTTVTVSSGGGGSGGGGSGGGGSELVMTQTPSSLSASLGDRVTISCRASQDISNYLNWYQQKPDGTVKLLIYYTSRLHSGVPSRFSGSGSGTDYSLTISNLEQEDIATYFCQQGNTLPLTFGAGTKLEIKSGGGGSEVQLVESGGGLVQPGGSLKLSCAASGFTFNSYAMNWVRQAPGKGLEWVARIRSKYNNYATYYADSVKGRFTISRDDSKNTAYLQMNNLKTEDTAVYYCVRHGNFGNSYVSWWAYWGQGTLVTVSSGGGGSGGGGSGGGGSQTVVTQEPSLTVSPGGTVTLTCGSSTGAVTSGNYPNWVQQKPGQAPRGLIGGTKFLAPGTPARFSGSLLGGKAALTLSGVQPEDEAEYYCVLWYSNRWVFGGGTKLTVLAAADYKDDDDKGSSHHHHHHEVQLVESGGGLVQPGGSLKLSCAASGFTFNKYAMNWVRQAPGKGLEWVARIRSKYNNYATYYADSVKDRFTISRDDSKNTAYLQMNNLKTEDTAVYYCVRHGNFGNSYISYWAYWGQGTLVTVSS

SEQ ID NO: 205686 - protein, 260 aa, Artificial Sequence
  Description of Artificial Sequence: Synthetic scFv sequence
DVQITQSPSYLAASPGETITINCRASKSISKYLAWYQEKPGKTNKLLIYSGSTLQSGIPSRFSGSGSGTDFTLTISSLEPEDFAMYYCQQHNEYPYTFGGGTKLEIKRGSTSGSGKPGSGEGSTKGEVMLVESGGGLVKPGGSLKLSCAASGFTFSSYAMSWVRQTPEKRLEWVATITSGGDYTFYPDSVKGRFTISRDNAKNTLYLQMSSRRSEDTAMYYCARHGEIGYGSSAWFAYWGQGTLVTVSAGGGGSGGGGSC

SEQ ID NO: 205687 - protein, 232 aa, Artificial Sequence
  Description of Artificial Sequence: Synthetic scFv sequence
QVQLVQSGAEVKEPGSSVKVSCKASGGTFSSYAIYWVRQAPGQGLEWMGWINPDSGDTNSAQQFQGRVTMTRDTSISTAYMELSRLRSDDTAMYYCARPPRGDGPDYWGQGTLVTVSSGGGGGSEIVLTQSPGTLSLSPGERATLSCRASQSVSSSYLAWYQQKPGQAPRLLIYGASSRATGIPDRFSGSGSGTDFTLTISRLEPEDFAVYYCQQYGSSPRTFGQGTKVDIK

SEQ ID NO: 205688 - protein, 244 aa, Artificial Sequence
  Description of Artificial Sequence: Synthetic scFv sequence
QVQLVQSGAEVKKPGASVKVSCKASGYTFSNYGITWVRQAPGQGLEWMGWINNGNTHYAQKFQGRVTMTTDTSTSTAYMELRSLRSDDTAVYYCARDPRGDDEPYWGQGTLVTVSSGGGGSGGGGSGGGGSEIVLTQSPLSLPVTLGQPASISCRSSQNLVYSDGNTYLSWFQQRPGQSPRRLIYKVSNRDSGVPDRFSGSGSGTDFTLKISRVEAEDIGVYYCMQGTHWPPRTFGQGTKVEIK

SEQ ID NO: 205689 - protein, 255 aa, Artificial Sequence
  Description of Artificial Sequence: Synthetic scFv sequence
EIVLTQSPGTLSLSPGERATLSCRASQSVGSSYLAWYQQKPGQAPRLLIYGAFSRATGIPDRFSGSGSGTDFTLTISRLEPEDFAVYYCQQYGSSPWTFGQGTKVEIKGSTSGSGKPGSGEGSTKGQVQLVESGGGVVQPGRSLRLSCAASGFTFSSYTMHWVRQAPGKGLEWVTFISYDGNNKYYADSVKGRFTISRDNSKNTLYLQMNSLRAEDTAIYYCARTGWLGPFDYWGQGTLVTVSSGGGGSGGGGSC

SEQ ID NO: 205690 - protein, 511 aa, Artificial Sequence
  Description of Artificial Sequence: Synthetic scFv sequence
METDTLLLWVLLLWVPAGNGEVQLVESGGGLVQPGGSLRLSCSFSGFSLSTSGMGVSWVRQAPGKGLEWLAHIYWDDDKRYNPSLKSRFTISRDNSKNTVYLQMNSLRAEDTAVYYCARRETVFYWYFDVWGQGTTVTVSSGGGGSGGGGSGGGTGDIVMTQSPDSLAVSLGDRATINCKASQSVDYDGDSYMNWYQQKPGQPPKLLIYAASNLESGVPDRFSGSGSGTDFTLTISSLQAEDVAVYYCQQSNEDPPTFGGGTKVEISSSSGSDKTHTCPPCPAPELLGGPSVFLFPPKPKDTLMISRTPEVTCWVDVSHEDPEVKFNWYVDGVEVHNAKTKPREEQYNSTYRWSVLTVLHQDWLNGKEYKCKVSNKALPAPIEKTISKAKGQPREPQVYTLPPSREEMTKNQVSLTCLVKGFYPSDIAVEWESNGQPENNYKTTPPVLDSDGSFFLYSKLTVDKSRWQQGNVFSCSVMHEALHNHYTQKSLSLSPGSSSSSSAWSHPQFEK

SEQ ID NO: 205691 - protein, 506 aa, Artificial Sequence
  Description of Artificial Sequence: Synthetic scFv sequence
METDTLLLWVLLLWVPAGNGEVQLVESGGGLVKPGGSLRLSCAASGFTFNTNAMNWVRQAPGKGLEWVARIRSKSNNYATYYADSVKDRFTLSRDDSKNTLYLQMNSLKTEDTAVYYCTRDRGWGAMDYWGQGTTVTVSSGGGGSGGGGSGGGTGDIQMTQSPSSLSASVGDRVTITCSASQDINNYLNWYQQKPGKAPKLLIYYTSSLHSGVPSRFSGSGSGTDFTLTLSSLQPEDFATYYCQQFSNLPWTFGGGTKLEISSSSGSDKTHTCPPCPAPELLGGPSVFLFPPKPKDTLMISRTPEVTCWVDVSHEDPEVKFNWYVDGVEVHNAKTKPREEQYNSTYRWSVLTVLHQDWLNGKEYKCKVSNKALPAPIEKTISKAKGQPREPQVYTLPPSREEMTKNQVSLTCLVKGFYPSDIAVEWESNGQPENNYKTTPPVLDSDGSFFLYSKLTVDKSRWQQGNVFSCSVMHEALHNHYTQKSLSLSPGSSSSSSAWSHPQFEK

SEQ ID NO: 205692 - protein, 244 aa, Artificial Sequence
  Description of Artificial Sequence: Synthetic scFv sequence
QVQLQQSGAEVKKPGASVKVSCKASGYTFTGYYMHWVRQAPGQGLEWMGRINPNSGGTNYAQKFQGRVTMTRDTSISTAYMELSRLRSEDTAVYYCARGRYYGMDVWGQGTMVTVSSGGGGSGGGGSGGGGSGGGGSEIVLTQSPATLSLSPGERATISCRASQSVSSNFAWYQQRPGQAPRLLIYDASNRATGIPPRFSGSGSGTDFTLTISSLEPEDFAAYYCHQRSNWLYTFGQGTKVDIK

SEQ ID NO: 205693 - protein, 252 aa, Artificial Sequence
  Description of Artificial Sequence: Synthetic scFv sequence
QVQLVQSGAEVKKPGASVKVSCKASGYTFTSYYMHWVRQAPGQGLEWMGIINPSGGSTSYAQKFQGRVTMTRDTSTSTVYMELSSLRSEDTAVYYCARYRLIAVAGDYYYYGMDVWGQGTMVTVSSGGGGSGGGGSGGGGSGGGGSDIQMTQSPSSVASVGDRVTITCRASQGVGRWLAWYQQKPGTAPKLLIYAASTLQSGVPSRFSGSGSGTDFTLTINNLQPEDFATYYCQQANSFPLTFGGGTRLEIK

SEQ ID NO: 205694 - protein, 508 aa, Artificial Sequence
  Description of Artificial Sequence: Synthetic scFv sequence
VLTQTPSPVSAAVGGTVTINCQSSPSLIYDSRLAWYQQKPGQPPKLLIYKASTLASGVPSRFSGSGSGTQFTLTISDVQSDDAATYYCQSHDTNPGSSTYGAPFGGGTEVVVQGGGGSGGGGSSGGGSEVQLMESGGGLVKPEGSLTLTCKVSGFSFSTSAISWVRQAPGKRPEWIAGIYNGGGSTYYASWVNGRFSISRSTSLNTVTLQMTRLTAADTATYFCARWIRIHYSFDLWGPGTLVTVSSSGGGGSEVQLVESGGGLVQPGGSLKLSCAASGFTFNKYAMNWVRQAPGKGLEWVARIRSKYNNYATYYADSVKDRFTISRDDSKNTAYLQMNNLKTEDTAVYYCVRHGNFGNSYISYWAYWGQGTLVTVSSGGGGSGGGGSGGGGSQTVVTQEPSLTVSPGGTVTLTCGSSTGAVTSGNYPNWVQQKPGQAPRGLIGGTKFLAPGTPARFSGSLLGGKAALTLSGVQPEDEAEYYCVLWYSNRWVFGGGTKLTVLHHHHHH

SEQ ID NO: 205695 - protein, 245 aa, Artificial Sequence
  Description of Artificial Sequence: Synthetic scFv sequence
EVQLVESGGGLVQPGRSLRLSCAASGFTFDDYAMHWVRQAPGKGLEWVSISWNSGSTGYADSVKGRFTISRDNAKNSLYLQMNSLRAEDTALYYCAKDSSSWYGGGSAFDIWGQGTMVTVSSGGGGSGGGGSGGGGSSSELTQDPAVSVALGQTVRITCQGDSLRSYYASWYQQKPGQAPVLVIYGKNNRPSGIPDRFSGSSSGNTASLTITGAQAEDEADYYCNSRGSSGNHYVFGTGTKVTVL

SEQ ID NO: 205696 - protein, 245 aa, Artificial Sequence
  Description of Artificial Sequence: Synthetic scFv sequence
EVQLVESGGGLVQPGRSLRLSCAASGFTFDDYAMHWVRQAPGKGLEWVSISWNSGSTGYADSVKGRFTISRDNAKNSLYLQMNSLRAEDTALYYCAKDSSSWYGGGSAFDIWGQGTMVTVSSGGGGSGGGGSGGGGSSSELTQEPAVSVALGQTVRITCQGDSLRSYYASWYQQKPGQAPVLVIFGRSRRPSGIPDRFSGSSSGNTASLIITGAQAEDEADYYCNSRDNTANHYVFGTGTKLTVL

SEQ ID NO: 205697 - protein, 268 aa, Artificial Sequence
  Description of Artificial Sequence: Synthetic scFv sequence
MVLLVTSLLLCELPHPAFLLIPDIQAQVQLVQSGAEVKRPGASVQVSCRASGYSINTYYMQWVRQAPGAGLEWMGVINPSGVTSYAQKFQGRVTLTNDTSTNTVYMQLNSLTSADTAVYYCARWALWGDFGMDVWGKGTLVTVSSGGGGSGGGGSGGGGSDIQMTQSPSTLSASIGDRVTITCRASEGIYHWLAWYQQKPGKAPKLLIYKASSLASGAPSRFSGSGSGTDFTLTISSLQPDDFATYYCQQYSNYPLTFGGGTKLEIKR

SEQ ID NO: 205698 - protein, 267 aa, Artificial Sequence
  Description of Artificial Sequence: Synthetic scFv sequence
MVLLVTSLLLCELPHPAFLLIPDIQQVQLQQSGPELEKPGASVKISCKASGYSFTGYTMNWVKQSHGKSLEWIGLITPYNGASSYNQKFRGKATLTVDKSSSTAYMDLLSLTSEDSAVYFCARGGYDGRGFDYWGQGTTVTVSSGGGGSGGGGSGGGGSDIELTQSPAIMSASPGEKVTMTCSASSSVSYMHWYQQKSGTSPKRWIYDTSKLASGVPGRFSGSGSGNSYSLTISSVEAEDDATYYCQQWSGYPLTFGAGTKLEIKAA

SEQ ID NO: 205699 - protein, 265 aa, Artificial Sequence
  Description of Artificial Sequence: Synthetic scFv sequence
MVLLVTSLLLCELPHPAFLLIPDIQQVQLQQSGPELEKPGASVKISCKASGYSFTGYTMNWVKQSHGKSLEWIGLITPYNGASSYNQKFRGKATLTVDKSSSTAYMDLLSLTSEDSAVYFCARGGYDGRGFDYWGQGTTVTVSSGGGGSGGGGSSGGGSDIELTQSPAIMSASPGEKVTMTCSASSSVSYMHWYQQKSGTSPKRWIYDTSKLASGVPGRFSGSGSGNSYSLTISSVEAEDDATYYCQQWSKHPLTFGAGTKLEIK

SEQ ID NO: 205700 - protein, 262 aa, Artificial Sequence
  Description of Artificial Sequence: Synthetic scFv sequence
QVQLQESGPGLVKPSETLSLTCTVSGGSVSSGSYYWSWIRQPPGKGLEWIGYIYYSGSTNYNPSHKSRVTISVDTSKNQFSLKLSSVTAADTAVYYCAREGKNGAFDIWGQGTMVTVSSSGGGGSGGGGSGGGGERHQMTQSPSSLSASVGDRVTITCRASQSISSYLNWYQQKPGKAPKLLIYAASSLQSGVPSRFSGSGSGTDFTLTISSLQPEDFATYYCQQSYSTPLTFGGGTKVEIKGQAGHHHHHHGDYKDDDDKG

SEQ ID NO: 205701 - protein, 243 aa, Artificial Sequence
  Description of Artificial Sequence: Synthetic scFv sequence
QVQLQQSGAEVKKPGASVKVSCKASGYTFTGYYMHWVRQAPGQGLEWMGINPNSGGTNYAQKFQGRVTMTRDTSISTAYMELSRLRSEDTAVYYCARGRYYGMDVWGQGTMVTVSSGGGGSGGGGSGGGGSGGGGSEIVLTQSPATLSLSPGERATISCRASQSVSSNFAWYQQRPGQAPRLLIYDASNRATGIPPRFSGSGSGTDFTLTISSLEPEDFAAYYCHQRSNWLYTFGQGTKVDIK

SEQ ID NO: 205702 - protein, 240 aa, Artificial Sequence
  Description of Artificial Sequence: Synthetic scFv sequence
QVQLQQSGAEVKKPGASVKVSCKASGYTFTGYYMHWVRQAPGQGLEWMGINPNSGGTNYAQNFQGRVTMTRDTSISTAYMELRRLRSDDTAVYYCASGWDFDYWGQGTLVTVSSGGGGSGGGGSGGGGSGGGGSDIRMTQSPSSLSASVGDRVTITCRASQSIRYYLSWYQQKPGKAPKLLIYTASILQNGVPSRFSGSGSGTDFTLTISSLQPEDFATYYCLQTYTTPDFGPGTKVEIK

SEQ ID NO: 205703 - protein, 249 aa, Artificial Sequence
  Description of Artificial Sequence: Synthetic scFv sequence
QVQLQQSGAEVKKPGASVKVSCKASGYTFTNYYMHWVRQAPGQGLEWMGLINPSGGYTTYAQKFQGRLTMTRDTSTSTVYMELSSLRSEDTAVYYCARIRSCGGDCYYFDNWGQGTLVTVSSGGGGSGGGGSGGGGSGGGGSDIQLTQSPSTLSASVGDRVTITCRASENVNIWLAWYQQKPGKAPKLLIYKSSSLASGVPSRFSGSGSGAEFTLTISSLQPDDFATYYCQQYQSYPLTFGGGTKVDIK

SEQ ID NO: 205704 - protein, 245 aa, Artificial Sequence
  Description of Artificial Sequence: Synthetic scFv sequence
QVQLQQSGAEVKKPGASVKVSCKTSGYPFTGYSLHWVRQAPGQGLEWMGINPNSGGTNYAQKFQGRVTMTRDTSISTAYMELSRLRSDDTAVYYCARDHYGGNSLFYWGQGTLVTVSSGGGGSGGGGSGGGGSGGGGSDIQLTQSPSSISASVGDTVSITCRASQDSGTWLAWYQQKPGKAPNLLMYDASTLEDGVPSRFSGSASGTEFTLTVNRLQPEDSATYYCQQYNSYPLTFGGGTKVDIK

SEQ ID NO: 205705 - protein, 239 aa, Artificial Sequence
  Description of Artificial Sequence: Synthetic scFv sequence
QVQLQQSGPELEKPGASVKISCKASGYSFTGYTMNWVKQSHGKSLEWIGLITPYNGASSYNQKFRGKATLTVDKSSSTAYMDLLSLTSEDSAVYFCARGGYDGRGFDYWGQGTTVTVSSGGGGSGGGGSGGGGSDIELTQSPAIMSASPGEKVTMTCSASSSVSYMHWYQQKSGTSPKRWIYDTSKLASGVPGRFSGSGSGNSYSLTISSVEAEDDATYYCQQWSGYPLTFGAGTKLEI

SEQ ID NO: 205706 - protein, 259 aa, Artificial Sequence
  Description of Artificial Sequence: Synthetic scFv sequence
QVQLQQSGPGLVTPSQTLSLTCAISGDSVSSNSATWNWIRQSPSRGLEWLGRTYYRSKWYNDYAVSVKSRMSINPDTSKNQFSLQLNSVTPEDTAVYYCARGMMTYYYGMDVWGQGTTVTVSSGILGSGGGGSGGGGSGGGGSQPVLTQSSSLSASPGASASLTCTLRSGINVGPYRIYWYQQKPGSPPQYLLNYKSDSDKQQGSGVPSRFSGSKDASANAGVLLISGLRSEDEADYYCMIWHSSAAVFGGGTQLTVLS

SEQ ID NO: 205707 - protein, 241 aa, Artificial Sequence
  Description of Artificial Sequence: Synthetic scFv sequence
QVQLVESGGGLVQPGGSLRLSCAASGFTFSSYWMHWVRQVPGKGLVWVSINTDGSTTTYADSVEGRFTISRDNAKNTLYLQMNSLRDDDTAVYYCVGGHWAVWGQGTTVTVSSGGGGSGGGGSGGGGSGGGGSDIQMTQSPSTLSASVGDRVTITCRASQSISDRLAWYQQKPGKAPKLLIYKASSLESGVPSRFSGSGSGTEFTLTISSLQPDDFAVYYCQQYGHLPMYTFGQGTKVEIK

SEQ ID NO: 205708 - protein, 240 aa, Artificial Sequence
  Description of Artificial Sequence: Synthetic scFv sequence
QVQLVQSGAEVEKPGASVKVSCKASGYTFTDYYMHWVRQAPGQGLEWMGINPNSGGTNYAQKFQGRVTMTRDTSISTAYMELSRLRSDDTAVYYCASGWDFDYWGQGTLVTVSSGGGGSGGGGSGGGGSGGGGSDIVMTQSPSSLSASVGDRVTITCRASQSIRYYLSWYQQKPGKAPKLLIYTASILQNGVPSRFSGSGSGTDFTLTISSLQPEDFATYYCLQTYTTPDFGPGTKVEIK

SEQ ID NO: 205709 - protein, 245 aa, Artificial Sequence
  Description of Artificial Sequence: Synthetic scFv sequence
QVQLVQSGAEVKKPGAPVKVSCKASGYTFTGYYMHWVRQAPGQGLEWMGINPNSGGTNYAQKFQGRVTMTRDTSISTAYMELSRLRSDDTAVYYCARGEWDGSYYYDYWGQGTLVTVSSGGGGSGGGGSGGGGSGGGGSDIVLTQTPSSLSASVGDRVTITCRASQSINTYLNWYQHKPGKAPKLLIYAASSLQSGVPSRFSGSGSGTDFTLTISSLQPEDFATYYCQQSFSPLTFGGGTKLEIK

SEQ ID NO: 205710 - protein, 248 aa, Artificial Sequence
  Description of Artificial Sequence: Synthetic scFv sequence
QVQLVQSGAEVKKPGASVEVSCKASGYTFTSYYMHWVRQAPGQGLEWMGLINPSGGSTGYAQKFQGRVTMTRDTSTSTVHMELSSLRSEDTAVYYCARGGYSSSSDAFDIWGQGTMVTVSSGGGGSGGGGSGGGGSGGGGSDIQMTQSPPSLSASVGDRVTITCRASQDISSALAWYQQKPGTPPKLLIYDASSLESGVPSRFSGSGSGTDFTLTISSLQPEDFATYYCQQFSSYPLTFGGGTRLEIK

SEQ ID NO: 205711 - protein, 252 aa, Artificial Sequence
  Description of Artificial Sequence: Synthetic scFv sequence
QVQLVQSGAEVKKPGASVKVSCKASGYTFTGYYMHWVRQAPGQGLEWMGINPNSGGTNYAQKFQGRVTMTRDTSISTAYMELSRLRSDDTAVYYCARDLRRTVVTPRAYYGMDVWGQGTTVTVSSGGGGSGGGGSGGGGSGGGGSDIQLTQSPSTLSASVGDRVTITCQASQDISNSLNWYQQKAGKAPKLLIYDASTLETGVPSRFSGSGSGTDFSFTISSLQPEDIATYYCQQHDNLPLTFGQGTKVEIK

SEQ ID NO: 205712 - protein, 245 aa, Artificial Sequence
  Description of Artificial Sequence: Synthetic scFv sequence
QVQLVQSGAEVKKPGASVKVSCKASGYTFTGYYMHWVRQAPGQGLEWMGINPNSGGTNYAQKFQGRVTMTTDTSTSTAYMELRSLRSDDTAVYYCARTTTSYAFDIWGQGTMVTVSSGGGGSGGGGSGGGGSGGGGSDIQLTQSPSTLSASVGDRVTITCRASQSISTWLAWYQQKPGKAPNLLIYKASTLESGVPSRFSGSGSGTEFTLTISSLQPDDFATYYCQQYNTYSPYTFGQGTKLEIK

SEQ ID NO: 205713 - protein, 254 aa, Artificial Sequence
  Description of Artificial Sequence: Synthetic scFv sequence
QVQLVQSGAEVKKPGASVKVSCKASGYTFTSYGISWVRQAPGQGLEWMGISAYNGNTNYAQKLQGRVTMTTDTSTSTAYMELRSLRSDDTAVYYCARVAGGIYYYYGMDVWGQGTTITVSSGGGGSGGGGSGGGGSGGGGSDIVMTQTPDSLAVSLGERATISCKSSHSVLYNRNNKNYLAWYQQKPGQPPKLLFYWASTRKSGVPDRFSGSGSGTDFTLTISSLQPEDFATYFCQQTQTFPLTFGQGTRLEIN

SEQ ID NO: 205714 - protein, 251 aa, Artificial Sequence
  Description of Artificial Sequence: Synthetic scFv sequence
QVQLVQSGAEVKKPGASVKVSCKASGYTFTSYYMHWVRQAPGQGLEWMGLINPSGGSTSYAQKFQGRVTMTRDTSTSTVYMELSSLRSEDTAVYYCARYRLIAVAGDYYYYGMDVWGQGTMVTVSSGGGGSGGGGSGGGGSGGGGSDIQMTQSPSSVASVGDRVTITCRASQGVGRWLAWYQQKPGTAPKLLIYAASTLQGVPSRFSGSGSGTDFTLTINNLQPEDFATYYCQQANSFPLTFGGGTRLEIK

SEQ ID NO: 205715 - protein, 249 aa, Artificial Sequence
  Description of Artificial Sequence: Synthetic scFv sequence
QVQLVQSGAEVRAPGASVKISCKASGFTFRGYYIHWVRQAPGQGLEWMGLINPSGGSRAYAQKFQGRVTMTRDTSTSTVYMELSSLRSDDTAMYYCARTASCGGDCYYLDYWGQGTLVTVSSGGGGSGGGGSGGGGSGGGGSDIQMTQSPPTLSASVGDRVTITCRASENVNIWLAWYQQKPGKAPKLLIYKSSSLASGVPSRFSGSGSGAEFTLTISSLQPDDFATYYCQQYQSYPLTFGGGTKVDIK

SEQ ID NO: 205716 - protein, 252 aa, Artificial Sequence
  Description of Artificial Sequence: Synthetic scFv sequence
QVQLVQSGAEVRRPGASVKISCRASGDTSTRHYIHWLRQAPGQGPEWMGINPTTGPATGSPAYAQMLQGRVTMTRDTSTRTVYMELRSLRFEDTAVYYCARSVVGRSAPYYFDYWGQGTLVTVSSGGGGSGGGGSGGGGSGGGGSDIQMTQSPSSLSASVGDRVTITCRASQGISDYSAWYQQKPGKAPKLLIYAASTLQSGVPSRFSGSGSGTDFTLTISYLQSEDFATYYCQQYYSYPLTFGGGTKVDIK

SEQ ID NO: 205717 - protein, 249 aa, Artificial Sequence
  Description of Artificial Sequence: Synthetic scFv sequence
QVQLVQSGGGLVKPGGSLRLSCEASGFIFSDYYMGWIRQAPGKGLEWVSIIGRSGSSMYYADSVKGRFTFSRDNAKNSLYLQMNSLRAEDTAVYYCAASPVVAATEDFQHWGQGTLVTVSSGGGGSGGGGSGGGGSGGGGSDIVMTQTPATLSLSPGERATLSCRASQSVTSNYLAWYQQKPGQAPRLLLFGASTRATGIPDRFSGSGSGTDFTLTINRLEPEDFAMYYCQQYGSAPVTFGQGTKLEIK

SEQ ID NO: 205718 - protein, 248 aa, Artificial Sequence
  Description of Artificial Sequence: Synthetic scFv sequence
QVQLVQSGGGLVQPGGSLRLSCAASGFTFSSYAMSWVRQAPGKGLEWVSISGSGGSTYYADSVKGRFTISRDNSKNTLYLQMNSLRAEDTAVYYCAKREAAAGHDWYFDLWGRGTLVTVSSGGGGSGGGGSGGGGSGGGGSDIRVTQSPSSLSASVGDRVTITCRASQSISSYLNWYQQKPGKAPKLLIYAASSLQSGVPSRFSGSGSGTDFTLTISSLQPEDFATYYCQQSYSIPLTFGQGTKVEIK

SEQ ID NO: 205719 - protein, 250 aa, Artificial Sequence
  Description of Artificial Sequence: Synthetic scFv sequence
QVQLVQSGGGLVQPGGSLRLSCAASGFTFSSYWMHWVRQAPGKGLVWVSINSDGSSTSYADSVKGRFTISRDNAKNTLYLQMNSLRAEDTAVYYCVRTGWVGSYYYYMDVWGKGTTVTVSSGGGGSGGGGSGGGGSGGGGSEIVLTQSPGTLSLSPGERATLSCRASQSVSSNYLAWYQQKPGQPPRLLIYDVSTRATGIPARFSGGGSGTDFTLTISSLEPEDFAVYYCQQRSNWPPWTFGQGTKVEIK

SEQ ID NO: 205720 - protein, 243 aa, Artificial Sequence
  Description of Artificial Sequence: Synthetic scFv sequence
QVQLVQSGGGLVQPGRSLRLSCAASGFTFDDYAMHWVRQAPGKGLEWVSISWNSGSIGYADSVKGRFTISRDNAKNSLYLQMNSLRAEDTAVYYCAKDGSSSWSWGYFDYWGQGTLVTVSSGGGGSGGGGSGGGGSSSELTQDPAVSVALGQTVRTTCQGDALRSYYASWYQQKPGQAPMLVIYGKNNRPSGIPDRFSGSDSGDTASLTITGAQAEDEADYYCNSRDSSGYPVFGTGTKVTVL

SEQ ID NO: 205721 - protein, 249 aa, Artificial Sequence
  Description of Artificial Sequence: Synthetic scFv sequence
QVQLVQSGGGVVQPGRSLRLSCAASGFTFSSYAMHWVRQAPGKGLEWVAISYDGSNKYYADSVKGRFTISRDNSKNTLYLQMNSLRAEDTAVYYCARWKVSSSSPAFDYWGQGTLVTVSSGGGGSGGGGSGGGGSGGGGSEIVLTQSPATLSLSPGERAILSCRASQSVYTKYLGWYQQKPGQAPRLLIYDASTRATGIPDRFSGSGSGTDFTLTINRLEPEDFAVYYCQHYGGSPLITFGQGTRLEIK

SEQ ID NO: 205722 - protein, 249 aa, Artificial Sequence
  Description of Artificial Sequence: Synthetic scFv sequence
QVQLVQSGGGVVQPGRSLRLSCAASGFTFSSYGMHWVRQAPGKGLEWVAISYDGSNKYYADSVKGRFTISRDNSKNTLYLQMNSLRAEDTAVYYCAKGYSRYYYYGMDVWGQGTTVTVSSGGGGSGGGGSGGGGSGGGGSEIVMTQSPATLSLSPGERAILSCRASQSVYTKYLGWYQQKPGQAPRLLIYDASTRATGIPDRFSGSGSGTDFTLTINRLEPEDFAVYYCQHYGGSPLITFGQGTKVDIK

SEQ ID NO: 205723 - protein, 247 aa, Artificial Sequence
  Description of Artificial Sequence: Synthetic scFv sequence
QVQLVQSWAEVKKPGASVKVSCKASGYTFTSYYMHWVRQAPGQGLEWMGLINPSGGSTSYAQKFQGRVTMTRDTSTSTVYMELSNLRSEDTAVYYCARSPRVTTGYFDYWGQGTLVTVSSGGGGSGGGGSGGGGSGGGGSDIQLTQSPSTLSASVGDRVTITCRASQSISSWLAWYQQKPGKAPKLLIYKASSLESGVPSRFSGSGSGTEFTLTISSLQPDDFATYYCQQYSSYPLTFGGGTRLEIK

SEQ ID NO: 205724 - protein, 246 aa, Artificial Sequence
  Description of Artificial Sequence: Synthetic scFv sequence
QITLKESGPALVKPTQTLTLTCTFSGFSLSTAGVHVGWIRQPPGKALEWLALISWADDKRYRPSLRSRLDITRVTSKDQVVLSMTNMQPEDTATYYCALQGFDGYEANWGPGTLVTVSSGGGGSGGGGSGGGGSGGGGSDIVMTQSPSSLSASAGDRVTITCRASRGISSALAWYQQKPGKPPKLLIYDASSLESGVPSRFSGSGSGTDFTLTIDSLEPEDFATYYCQQSYSTPWTFGQGTKVDIK

SEQ ID NO: 205725 - protein, 493 aa, Artificial Sequence
  Description of Artificial Sequence: Synthetic scFv sequence
MALPVTALLLPLALLLHAARPEVQLQQSGGERATPGASVKMSCKTSGYTFTNYWMHWVKQRPGQGLEWIGYINPSSGYTQYNQKFKDKATLTADKSSSTAYIQLSSLTSEDSAVYYCSTYYGDYLFPYWGQGTLVTVSAGGGGSGGGGSGGGGSDVLMTQTPLSLPVSLGDQASISCRSSQDIVYGNGNTYLEWYLQKPGQSPKLLIYKVSNRFSGVPDRFSGSGSGTDFTLKISRVEAEDLGVYYCFQGSHVPYTFGGGTKLEIKRAAAIEVEQKLISEEDLLDNEKSNGTIIHVKGKHLCPSPLFPGPSKPFWVLVVVGGVLACYSLLVTVAFIIFWVRSKRSRLLHSDYMNMTPRRPGPTRKHYQPYAPPRDFAAYRSRVKFSRSADAPAYQQGQNQLYNELNLGRREEYDVLDKRRGRDPEMGGKPRRKNPQEGLYNELQKDKMAEAYSEIGMKGERRRGKGHDGLYQGLSTATKDTYDALHMQALPPR

SEQ ID NO: 205726 - protein, 487 aa, Artificial Sequence
  Description of Artificial Sequence: Synthetic scFv sequence
MALPVTALLLPLALLLHAARPEVQLQQSGGERATPGASVKMSCKTSGYTFTNYWMHWVKQRPGQGLEWIGYINPSSGYTQYNQKFKDKATLTADKSSSTAYIQLSSLTSEDSAVYYCSTYYGDYLFPYWGQGTLVTVSAGGGGSGGGGSGGGGSDVLMTQTPLSLPVSLGDQASISCRSSQDIVYGNGNTYLEWYLQKPGQSPKLLIYKVSNRFSGVPDRFSGSGSGTDFTLKISRVEAEDLGVYYCFQGSHVPYTFGGGTKLEIKRAAAIEFMYPPPYLDNERSNGTIIHIKEKHLCHTQSSPKLFWALVVVAGVLFCYGLLVTVALCVIWTNSRRNRLLQSDYMNMTPRRPGLTRKPYQPYAPARDFAAYRPRAKFSRSAETAANLQDPNQLYNELNLGRREEYDVLEKKRARDPEMGGKQQRRRNPQEGVYNALQKDKMAEAYSEIGTKGERRRGKGHDGLYQGLSTATKDTYDALHMQTLAPR

SEQ ID NO: 205727 - protein, 252 aa, Artificial Sequence
  Description of Artificial Sequence: Synthetic scFv sequence
EIVLTQSPATLSLSPGERATLSCRASQSVSSYLAWYQQKPGQAPRLLIYDASNRATGIPARFSGSGSGTDFTLTISSLEPEDFAVYYCQQSSNWPRTFGQGTKVEIKRGSTSGSGKPGSGEGSTKGQVQLVESGGGVVQPGRSLRLDCKASGITFSNSGMHWVRQAPGKGLEWVAVIWYDGSKRYYADSVKGRFTISRDNSKNTLFLQMNSLRAEDTAVYYCATNDDYWGQGTLVTVSSSSGGGGSGGGGSC

SEQ ID NO: 205728 - protein, 241 aa, Artificial Sequence
  Description of Artificial Sequence: Synthetic scFv sequence
VQLQESGPDLVKPSQSLSLTCTVTGYSITSGYSWHWIRQFPGNKLEWMGYIHYSGDTDYNPSLKSRFSITRDTSKNQFFLQLNSVTTEDTATYYCATPGGFVYWGQGTLVTVSAGGGGSGGGGSGGGGSDVVMTQTPLTLSVTIGQPASISCKSSQSLLDSDGKTYLHWLLQRPGQSPKRLIFLVSKLDSGVPDRFTGSGSGTDFTLKISRVEAEDLGVYYCWQGTHFPQTFGGGTKLEIK

SEQ ID NO: 205729 - protein, 112 aa, Artificial Sequence
  Description of Artificial Sequence: Synthetic scFv sequence
DVVMTQTPLTLSVTIGQPASISCKSSQSLLDSDGKTYLHWLLQRPGQSPKRLIFLVSKLDSGVPDRFTGSGSGTDFTLKISRVEAEDLGVYYCWQGTHFPQTFGGGTKLEIK

SEQ ID NO: 205730 - protein, 114 aa, Artificial Sequence
  Description of Artificial Sequence: Synthetic scFv sequence
VQLQESGPDLVKPSQSLSLTCTVTGYSITSGYSWHWIRQFPGNKLEWMGYIHYSGDTDYNPSLKSRFSITRDTSKNQFFLQLNSVTTEDTATYYCATPGGFVYWGQGTLVTVSA

SEQ ID NO: 205731 - protein, 112 aa, Artificial Sequence
  Description of Artificial Sequence: Synthetic scFv sequence
DVVMTQTPLSLPVSLGDQASISCRSSQSLLKNNGNTFLHWYLQKSGQSPKLLIYKVSNRLSGVPDRFSGSGSGTYFTLKISRVEAEDLGVYFCSQSTHIPYTFGGGTKLEIK

SEQ ID NO: 205732 - protein, 47 aa, Artificial Sequence
  Description of Artificial Sequence: Synthetic scFv sequence
EVKLVESGGGLVLPGDSLRLSCATSEFTFTDYYMTWVRQPPRKALEW

SEQ ID NO: 205733 - protein, 219 aa, Artificial Sequence
  Description of Artificial Sequence: Synthetic scFv sequence
DIQMTQSPDSLPVTPGEPASISCRSSQSLLHSNGYNYLDWYLQKAGQSPQLLIYLGSNRASGVPDRFSGSGSGTDFTLKISRVEAEDVGVYYCQQYYNHPTTFGQGTKLEIKRTVAAPSVFIFPPSDEQLKSGTASVVCLLNNFYPREAKVQWKVDNALQSGNSQESVTEQDSKDSTYSLSSTLTLSKADYEKHKVYACEVTHQGLSSPVTKSFNRGEC

SEQ ID NO: 205734 - protein, 240 aa, Artificial Sequence
  Description of Artificial Sequence: Synthetic scFv sequence
QVQLQQSGAEVKKPGASVKVSCKASGYTFTGYYMHWVRQAPGQGLEWMGRINPNSGGTNYAQKFQGRVTMTRDTSISTAYMELSRLRSEDTAVYYCARGRYYGMDVWGQGTMVTVSSGGGGSGGGGSGGGGSGGGGSEIVLTQSPATLSLSPGERATISCRASQSVSSNFAWYQQRPGQAPRLLIYDASNRATGIPPRFSGSGSGTDFTLTISSLEPEDFAAYYCHQRSNWLYTFGQGTK

SEQ ID NO: 205735 - protein, 253 aa, Artificial Sequence
  Description of Artificial Sequence: Synthetic scFv sequence
QVQLVQSGAEVKKPGASVKVSCKASGYTFTSYYMHWVRQAPGQGLEWMGIINPSGGSTSYAQKFQGRVTMTRDTSTSTVYMELSSLRSEDTAVYYCARYRLIAVAGDYYYYGMDVWGQGTMVTVSSGGGGSGGGGSGGGGSGGGGSDIQMTQSPSSVSASVGDRVTITCRASQGVGRWLAWYQQKPGTAPKLLIYAASTLQSGVPSRFSGSGSGTDFTLTINNLQPEDFATYYCQQANSFPLTFGGGTRLEIK

SEQ ID NO: 205736 - protein, 255 aa, Artificial Sequence
  Description of Artificial Sequence: Synthetic scFv sequence
QVQLVQSGAEVKKPGASVKVSCKASGYTFTSYGISWVRQAPGQGLEWMGWISAYNGNTNYAQKLQGRVTMTTDTSTSTAYMELRSLRSDDTAVYYCARVAGGIYYYYGMDVWGQGTTITVSSGGGGSGGGGSGGGGSGGGGSDIVMTQTPDSLAVSLGERATISCKSSHSVLYNRNNKNYLAWYQQKPGQPPKLLFYWASTRKSGVPDRFSGSGSGTDFTLTISSLQPEDFATYFCQQTQTFPLTFGQGTRLEIN

SEQ ID NO: 205737 - protein, 241 aa, Artificial Sequence
  Description of Artificial Sequence: Synthetic scFv sequence
QVQLQQSGAEVKKPGASVKVSCKASGYTFTGYYMHWVRQAPGQGLEWMGWINPNSGGTNYAQNFQGRVTMTRDTSISTAYMELRRLRSDDTAVYYCASGWDFDYWGQGTLVTVSSGGGGSGGGGSGGGGSGGGGSDIRMTQSPSSLSASVGDRVTITCRASQSIRYYLSWYQQKPGKAPKLLIYTASILQNGVPSRFSGSGSGTDFTLTISSLQPEDFATYYCLQTYTTPDFGPGTKVEIK

SEQ ID NO: 205738 - protein, 246 aa, Artificial Sequence
  Description of Artificial Sequence: Synthetic scFv sequence
QVQLVQSGAEVKKPGASVKVSCKASGYTFTGYYMHWVRQAPGQGLEWMGRINPNSGGTNYAQKFQGRVTMTTDTSTSTAYMELRSLRSDDTAVYYCARTTTSYAFDIWGQGTMVTVSSGGGGSGGGGSGGGGSGGGGSDIQLTQSPSTLSASVGDRVTITCRASQSISTWLAWYQQKPGKAPNLLIYKASTLESGVPSRFSGSGSGTEFTLTISSLQPDDFATYYCQQYNTYSPYTFGQGTKLEIK

SEQ ID NO: 205739 - protein, 249 aa, Artificial Sequence
  Description of Artificial Sequence: Synthetic scFv sequence
QVQLVQSGGGLVKPGGSLRLSCEASGFIFSDYYMGWIRQAPGKGLEWVSYIGRSGSSMYYADSVKGRFTFSRDNAKNSLYLQMNSLRAEDTAVYYCAASPVVAATEDFQHWGQGTLVTVSSGGGGSGGGGSGGGGSGGGGSDIVMTQTPATLSLSPGERATLSCRASQSVTSNYLAWYQQKPGQAPRLLLFGASTRATGIPDRFSGSGSGTDFTLTINRLEPEDFAMYYCQQYGSAPVTFGQGTKLEIK

SEQ ID NO: 205740 - protein, 249 aa, Artificial Sequence
  Description of Artificial Sequence: Synthetic scFv sequence
QVQLVQSGAEVRAPGASVKISCKASGFTFRGYYIHWVRQAPGQGLEWMGIINPSGGSRAYAQKFQGRVTMTRDTSTSTVYMELSSLRSDDTAMYYCARTASCGGDCYYLDYWGQGTLVTVSSGGGGSGGGGSGGGGSGGGGSDIQMTQSPPTLSASVGDRVTITCRASENVNIWLAWYQQKPGKAPKLLIYKSSSLASGVPSRFSGSGSGAEFTLTISSLQPDDFATYYCQQYQSYPLTFGGGTKVDIK

SEQ ID NO: 205741 - protein, 244 aa, Artificial Sequence
  Description of Artificial Sequence: Synthetic scFv sequence
QVQLVQSGGGLVQPGRSLRLSCAASGFTFDDYAMHWVRQAPGKGLEWVSGISWNSGSIGYADSVKGRFTISRDNAKNSLYLQMNSLRAEDTAVYYCAKDGSSSWSWGYFDYWGQGTLVTVSSGGGGSGGGGSGGGGSSSELTQDPAVSVALGQTVRTTCQGDALRSYYASWYQQKPGQAPMLVIYGKNNRPSGIPDRFSGSDSGDTASLTITGAQAEDEADYYCNSRDSSGYPVFGTGTKVTVL

SEQ ID NO: 205742 - protein, 246 aa, Artificial Sequence
  Description of Artificial Sequence: Synthetic scFv sequence
EVQLVESGGGLVQPGRSLRLSCAASGFTFDDYAMHWVRQAPGKGLEWVSGISWNSGSTGYADSVKGRFTISRDNAKNSLYLQMNSLRAEDTALYYCAKDSSSWYGGGSAFDIWGQGTMVTVSSGGGGSGGGGSGGGGSSSELTQEPAVSVALGQTVRITCQGDSLRSYYASWYQQKPGQAPVLVIFGRSRRPSGIPDRFSGSSSGNTASLIITGAQAEDEADYYCNSRDNTANHYVFGTGTKLTVL

SEQ ID NO: 205743 - protein, 246 aa, Artificial Sequence
  Description of Artificial Sequence: Synthetic scFv sequence
EVQLVESGGGLVQPGRSLRLSCAASGFTFDDYAMHWVRQAPGKGLEWVSGISWNSGSTGYADSVKGRFTISRDNAKNSLYLQMNSLRAEDTALYYCAKDSSSWYGGGSAFDIWGQGTMVTVSSGGGGSGGGGSGGGGSSSELTQDPAVSVALGQTVRITCQGDSLRSYYASWYQQKPGQAPVLVIYGKNNRPSGIPDRFSGSSSGNTASLTITGAQAEDEADYYCNSRGSSGNHYVFGTGTKVTVL

SEQ ID NO: 205744 - protein, 251 aa, Artificial Sequence
  Description of Artificial Sequence: Synthetic scFv sequence
QVQLVQSGGGLVQPGGSLRLSCAASGFTFSSYWMHWVRQAPGKGLVWVSRINSDGSSTSYADSVKGRFTISRDNAKNTLYLQMNSLRAEDTAVYYCVRTGWVGSYYYYMDVWGKGTTVTVSSGGGGSGGGGSGGGGSGGGGSEIVLTQSPGTLSLSPGERATLSCRASQSVSSNYLAWYQQKPGQPPRLLIYDVSTRATGIPARFSGGGSGTDFTLTISSLEPEDFAVYYCQQRSNWPPWTFGQGTKVEIK

SEQ ID NO: 205745 - protein, 250 aa, Artificial Sequence
  Description of Artificial Sequence: Synthetic scFv sequence
QVQLVQSGGGVVQPGRSLRLSCAASGFTFSSYGMHWVRQAPGKGLEWVAVISYDGSNKYYADSVKGRFTISRDNSKNTLYLQMNSLRAEDTAVYYCAKGYSRYYYYGMDVWGQGTTVTVSSGGGGSGGGGSGGGGSGGGGSEIVMTQSPATLSLSPGERAILSCRASQSVYTKYLGWYQQKPGQAPRLLIYDASTRATGIPDRFSGSGSGTDFTLTINRLEPEDFAVYYCQHYGGSPLITFGQGTKVDIK

SEQ ID NO: 205746 - protein, 253 aa, Artificial Sequence
  Description of Artificial Sequence: Synthetic scFv sequence
QVQLVQSGAEVKKPGASVKVSCKASGYTFTGYYMHWVRQAPGQGLEWMGWINPNSGGTNYAQKFQGRVTMTRDTSISTAYMELSRLRSDDTAVYYCARDLRRTVVTPRAYYGMDVWGQGTTVTVSSGGGGSGGGGSGGGGSGGGGSDIQLTQSPSTLSASVGDRVTITCQASQDISNSLNWYQQKAGKAPKLLIYDASTLETGVPSRFSGSGSGTDFSFTISSLQPEDIATYYCQQHDNLPLTFGQGTKVEIK

SEQ ID NO: 205747 - protein, 249 aa, Artificial Sequence
  Description of Artificial Sequence: Synthetic scFv sequence
QVQLVQSGGGLVQPGGSLRLSCAASGFTFSSYAMSWVRQAPGKGLEWVSAISGSGGSTYYADSVKGRFTISRDNSKNTLYLQMNSLRAEDTAVYYCAKREAAAGHDWYFDLWGRGTLVTVSSGGGGSGGGGSGGGGSGGGGSDIRVTQSPSSLSASVGDRVTITCRASQSISSYLNWYQQKPGKAPKLLIYAASSLQSGVPSRFSGSGSGTDFTLTISSLQPEDFATYYCQQSYSIPLTFGQGTKVEIK

SEQ ID NO: 205748 - protein, 247 aa, Artificial Sequence
  Description of Artificial Sequence: Synthetic scFv sequence
QVQLVQSWAEVKKPGASVKVSCKASGYTFTSYYMHWVRQAPGQGLEWMGIINPSGGSTSYAQKFQGRVTMTRDTSTSTVYMELSNLRSEDTAVYYCARSPRVTTGYFDYWGQGTLVTVSSGGGGSGGGGSGGGGSGGGGSDIQLTQSPSTLSASVGDRVTITCRASQSISSWLAWYQQKPGKAPKLLIYKASSLESGVPSRFSGSGSGTEFTLTISSLQPDDFATYYCQQYSSYPLTFGGGTRLEIK

SEQ ID NO: 205749 - protein, 253 aa, Artificial Sequence
  Description of Artificial Sequence: Synthetic scFv sequence
QVQLVQSGAEVRRPGASVKISCRASGDTSTRHYIHWLRQAPGQGPEWMGVINPTTGPATGSPAYAQMLQGRVTMTRDTSTRTVYMELRSLRFEDTAVYYCARSVVGRSAPYYFDYWGQGTLVTVSSGGGGSGGGGSGGGGSGGGGSDIQMTQSPSSLSASVGDRVTITCRASQGISDYSAWYQQKPGKAPKLLIYAASTLQSGVPSRFSGSGSGTDFTLTISYLQSEDFATYYCQQYYSYPLTFGGGTKVDIK

SEQ ID NO: 205750 - protein, 249 aa, Artificial Sequence
  Description of Artificial Sequence: Synthetic scFv sequence
QVQLQQSGAEVKKPGASVKVSCKASGYTFTNYYMHWVRQAPGQGLEWMGIINPSGGYTTYAQKFQGRLTMTRDTSTSTVYMELSSLRSEDTAVYYCARIRSCGGDCYYFDNWGQGTLVTVSSGGGGSGGGGSGGGGSGGGGSDIQLTQSPSTLSASVGDRVTITCRASENVNIWLAWYQQKPGKAPKLLIYKSSSLASGVPSRFSGSGSGAEFTLTISSLQPDDFATYYCQQYQSYPLTFGGGTKVDIK

SEQ ID NO: 205751 - protein, 246 aa, Artificial Sequence
  Description of Artificial Sequence: Synthetic scFv sequence
QVQLVQSGAEVKKPGAPVKVSCKASGYTFTGYYMHWVRQAPGQGLEWMGWINPNSGGTNYAQKFQGRVTMTRDTSISTAYMELSRLRSDDTAVYYCARGEWDGSYYYDYWGQGTLVTVSSGGGGSGGGGSGGGGSGGGGSDIVLTQTPSSLSASVGDRVTITCRASQSINTYLNWYQHKPGKAPKLLIYAASSLQSGVPSRFSGSGSGTDFTLTISSLQPEDFATYYCQQSFSPLTFGGGTKLEIK

SEQ ID NO: 205752 - protein, 242 aa, Artificial Sequence
  Description of Artificial Sequence: Synthetic scFv sequence
QVQLVESGGGLVQPGGSLRLSCAASGFTFSSYWMHWVRQVPGKGLVWVSRINTDGSTTTYADSVEGRFTISRDNAKNTLYLQMNSLRDDDTAVYYCVGGHWAVWGQGTTVTVSSGGGGSGGGGSGGGGSGGGGSDIQMTQSPSTLSASVGDRVTITCRASQSISDRLAWYQQKPGKAPKLLIYKASSLESGVPSRFSGSGSGTEFTLTISSLQPDDFAVYYCQQYGHLPMYTFGQGTKVEIK

SEQ ID NO: 205753 - protein, 241 aa, Artificial Sequence
  Description of Artificial Sequence: Synthetic scFv sequence
QVQLVQSGAEVEKPGASVKVSCKASGYTFTDYYMHWVRQAPGQGLEWMGWINPNSGGTNYAQKFQGRVTMTRDTSISTAYMELSRLRSDDTAVYYCASGWDFDYWGQGTLVTVSSGGGGSGGGGSGGGGSGGGGSDIVMTQSPSSLSASVGDRVTITCRASQSIRYYLSWYQQKPGKAPKLLIYTASILQNGVPSRFSGSGSGTDFTLTISSLQPEDFATYYCLQTYTTPDFGPGTKVEIK

SEQ ID NO: 205754 - protein, 250 aa, Artificial Sequence
  Description of Artificial Sequence: Synthetic scFv sequence
QVQLVQSGGGVVQPGRSLRLSCAASGFTFSSYAMHWVRQAPGKGLEWVAVISYDGSNKYYADSVKGRFTISRDNSKNTLYLQMNSLRAEDTAVYYCARWKVSSSSPAFDYWGQGTLVTVSSGGGGSGGGGSGGGGSGGGGSEIVLTQSPATLSLSPGERAILSCRASQSVYTKYLGWYQQKPGQAPRLLIYDASTRATGIPDRFSGSGSGTDFTLTINRLEPEDFAVYYCQHYGGSPLITFGQGTRLEIK

SEQ ID NO: 205755 - protein, 246 aa, Artificial Sequence
  Description of Artificial Sequence: Synthetic scFv sequence
QVQLQQSGAEVKKPGASVKVSCKTSGYPFTGYSLHWVRQAPGQGLEWMGWINPNSGGTNYAQKFQGRVTMTRDTSISTAYMELSRLRSDDTAVYYCARDHYGGNSLFYWGQGTLVTVSSGGGGSGGGGSGGGGSGGGGSDIQLTQSPSSISASVGDTVSITCRASQDSGTWLAWYQQKPGKAPNLLMYDASTLEDGVPSRFSGSASGTEFTLTVNRLQPEDSATYYCQQYNSYPLTFGGGTKVDIK

SEQ ID NO: 205756 - protein, 248 aa, Artificial Sequence
  Description of Artificial Sequence: Synthetic scFv sequence
QVQLVQSGAEVKKPGASVEVSCKASGYTFTSYYMHWVRQAPGQGLEWMGIINPSGGSTGYAQKFQGRVTMTRDTSTSTVHMELSSLRSEDTAVYYCARGGYSSSSDAFDIWGQGTMVTVSSGGGGSGGGGSGGGGSGGGGSDIQMTQSPPSLSASVGDRVTITCRASQDISSALAWYQQKPGTPPKLLIYDASSLESGVPSRFSGSGSGTDFTLTISSLQPEDFATYYCQQFSSYPLTFGGGTRLEIK

SEQ ID NO: 205757 - protein, 262 aa, Artificial Sequence
  Description of Artificial Sequence: Synthetic scFv sequence
FGLRWVFLVAILKGVQCEVQLLESGGGLVQPGGSLRLSCAASGFTFSNFGMTWVRQAPGKGLEWVSGVSIRGIATYYADSVKGRFTISRDDSRNTLYLQMNSLRAEDTALYYCATGVRLLGREWGQGTLVTVSSGGGGSGGGGSGGGGSDVVMTQSPLSLPVPLGQPASISCRSSQSLVDNDGNTYLNWFQQRPGQSPRRLIYKVSMRDSGVPDRFTGSGSGTDFTLRISRVEADDVGVYYCMQGTHWPLTFGPGTKVEIKR

SEQ ID NO: 205758 - protein, 115 aa, Artificial Sequence
  Description of Artificial Sequence: Synthetic scFv sequence
EVQLVESGGGLVQAGGSLRLSCAASGSTFSQYDVGWYRQAPGKQRELVAFSSSGGRTIYPDSVKGRFTFSRDNTKNTVYLQMTSLKPEDTAVYYCKIDWYLNSYWGQGTQVTVSS

SEQ ID NO: 205759 - protein, 114 aa, Artificial Sequence
  Description of Artificial Sequence: Synthetic scFv sequence
EVQLVESGGGLVQAGGSLRLSCAASGVDASNSAMGWYRQAPGKQREWVARITGGGLIAYTDSVKGRFTISRDNAKSTVYLQMNSLEPEDTAVYYCNTINSRDGWGQGTQVTVSS

SEQ ID NO: 205760 - protein, 111 aa, Artificial Sequence
  Description of Artificial Sequence: Synthetic scFv sequence
EVQLVESGGGLVQAGGSLTISCAASGITFSDSIVSWYRRARGKQREWVAGISNGGTTKYAESVLGRFTISRDNAKNMVYLQMNGLNPEDTAVYLCKVRQYWGQGTQVTVSS

SEQ ID NO: 205761 - protein, 124 aa, Artificial Sequence
  Description of Artificial Sequence: Synthetic scFv sequence
EVQLVESGGGLVQPGGSLRLSCAASGFTFDYYAIGWFRQAPGKAREGVSCISGGDNSTYYADSVKGRFTISRDNAKNTVYLQMNSLKPEDTAVYYCATGGWKYCSGYDPEYIYWGQGTQVTVSS

SEQ ID NO: 205762 - protein, 126 aa, Artificial Sequence
  Description of Artificial Sequence: Synthetic scFv sequence
EVQLVESGGGLVQPGGSLRLSCAASGFTLDYYAIGWFRQAPGKEREWASSISSSDGSTYYADSVKGRFTISRDNAKNTVFLQMNSLKPEDTAVYSCAASQAPITIATMMKPFYDYWGQGTQVTVSS

SEQ ID NO: 205763 - protein, 123 aa, Artificial Sequence
  Description of Artificial Sequence: Synthetic scFv sequence
EVQLVESGGGLVQPGGSLRLSCAASGFTLDYYAKCWFRQAPGKEREWVSCISSSDGSTYYADSVKGRFTISRDNAKNTVYLQMNSLKPEDTAVYFCAARHGGPLTVEYFFDYWGQGTQVTVSS

SEQ ID NO: 205764 - protein, 114 aa, Artificial Sequence
  Description of Artificial Sequence: Synthetic scFv sequence
EVQLVESGGGLVEPGGSLRLSCVASGFTFSSYDMSWVRQAPGKGLEWVSTINSGGGITYRGSVKGRFTISRDNAKNTLYLQMNSLKPEDTAVYYCENGGSSYRRGQGTQVTVSS

SEQ ID NO: 205765 - protein, 120 aa, Artificial Sequence
  Description of Artificial Sequence: Synthetic scFv sequence
EVQLVESGGGLVQAGGSLRLSCAASGRTFSSGTMGWFRRAPGKEREFVASIPWSGGRTYYADSVKDRFTISRDNAQNTVFLQMNSLKPEDTAVYYCAFKERSTGWDFASWGQGIQVTVSS

SEQ ID NO: 205766 - protein, 119 aa, Artificial Sequence
  Description of Artificial Sequence: Synthetic scFv sequence
EVQLVESGGGLVQAGGSLRLSCAASGSTFSNYVSNYAMGWGRQAPGTQRELVASISNGDTTNYADSVKGRFTISRDNAKNTVYLQMNSLKPEDTAVYYCFEHQVAGLTWGQGTQVTVSS

SEQ ID NO: 205767 - protein, 118 aa, Artificial Sequence
  Description of Artificial Sequence: Synthetic scFv sequence
  MOD_RES (27)..(27): Any amino acid
  MOD_RES (32)..(32): Any amino acid
  MOD_RES (75)..(75): Any amino acid
EVQLVESGGGLVQAGGSLRLSCVASGXALKIXVMGWYRQAPGKQRELVAAITSGGRTNYSDSVKGRFTISGDNAXNTVYLQMNSLKSEDTAVYYCREWNSGYPPVDYWGQGTQVTVSS

SEQ ID NO: 205768 - protein, 113 aa, Artificial Sequence
  Description of Artificial Sequence: Synthetic scFv sequence
EVQLVESGGGLVQPGGSLRLSCAASGFTFSTYTMIWLRRAPGKGFEWVSTIDKDGNTNYVDSVKGRFAVSRDNTKNTLYLQMNSLKPEDTAMYYCTKHGSSARGQGTRVTVSS

SEQ ID NO: 205769 - protein, 127 aa, Artificial Sequence
  Description of Artificial Sequence: Synthetic scFv sequence
EVQLVESGGGLVQTGGSLRLSCAASGFTLDYYGIGWFRQAPGKEREGVSFISGSDGSTYYAESVKGRFTISRDKAKNTVYLQMNSLKPEDTAVYYCAADPWGPPSIATMTSYEYKHWGQGTQVTVSS

SEQ ID NO: 205770 - protein, 247 aa, Artificial Sequence
  Description of Artificial Sequence: Synthetic scFv sequence
DIQLTQSPSSLSASVGDRVTITCRASQSISSYLNWYQQKPGKAPKLLIYAASSLQSGVPSRFSGSGSGTDFTLTISSLQPEDFATYYCQQSYSTPRTFGQGTKVEIKRSRGGGGSGGGGSGGGGSLEMAQVQLVQSGAEVKKPGASVKVSCKASGYTFSSYGISWVRQAPGQGLEWMGWISPYNGNTNYAQNLQGRVTMTTDTSTTTAYMELRSLTSDDTAVYYCARYSGYYYVDYWGQGTLVTVSS

SEQ ID NO: 205771 - protein, 251 aa, Artificial Sequence
  Description of Artificial Sequence: Synthetic scFv sequence
KLLPVLTQPHSVSESPGKTVTISCTGSSGSIASNFVQWYQQRPGSAPTTVIYDDNQRPSGVPDRFSASIDRSSNSASLTISGLKTDDEADYYCQSYDGSNVIFGGGTKLTVLGSRGGGGSGGGGSGGGGSLEMAEVQLVESGAEVKKPGASVKVSCKASGYTFTSYYMHWVRQAPGQGLEWMGIINPSGGSTSYAQKFQGRVTMTRDTSTSTVYMELSSLRSEDTAVYYCAAGSYYSLDIWGQGTMVTVSS

SEQ ID NO: 205772 - protein, 251 aa, Artificial Sequence
  Description of Artificial Sequence: Synthetic scFv sequence
KLLPVLTQPPSVSVAPGKTARITCGGNNIGSKSVHWYQQKPGQAPVLVIYYDSDRPSGIPERFSGSNSGNTATLTISRVEAGDEADYYCQVWDSITDHYVFGTGTKVTVLGSRGGGGSGGGGSGGGGSLEMAEVQLVESGAEVKKPGSSVKVSCKASGGTFSSYAISWVRQAPGQGLEWMGRIIPILGIANYAQKFQGRVTITADKSTSTAYMELSSLRSEDTAVYYCARQGYVWSEMDFWGQGTLVTVSS

SEQ ID NO: 205773 - protein, 250 aa, Artificial Sequence
  Description of Artificial Sequence: Synthetic scFv sequence
QAVLTQPPSASGTPGQRVTISCSGSSSNIGSNTVNWYQQLPGTAPKLLIYSNNQRPSGVPDRFSGSKSGTSASLAISGLQSEDEADYYCAAWDDSLNGSYVFGTGTKVTVLGSRGGGGSGGGGSGGGGSLEMAQVQLVQSGAEVRKPGASVKVSCKASGGTFSSYAISWVRQAPGQGLEWMGRIIPILGIANYAQKFQGRVTITADKSTSTAYMELSSLRSEDTAVYYCARHYGQWWDYWGQGTLVTVSS

SEQ ID NO: 205774 - protein, 247 aa, Artificial Sequence
  Description of Artificial Sequence: Synthetic scFv sequence
QPVLTQPPSVSVAPGETASVSCGGNNFGSQSVHWYQQKSGQAPLLVIYYDQDRPSEIPARFSGSKSGNTATLTISRVEAGDEADYYCQVWDTYTDHVVFGGGTKLTVLGSRGGGGSGGGGSGGGGSLEMAEVQLVQSGAEVEKPGASVKVSCKASGYTFSSYYMDWVRQAPGQGLEWMGRINPTSGSTTYAQKFQGRVTMTRDTSTFTVYMDLSSLRSEDTAVYYCARSGGGYGDSWGQGTLVTVSS

SEQ ID NO: 205775 - protein, 249 aa, Artificial Sequence
  Description of Artificial Sequence: Synthetic scFv sequence
QSVLTQPPSVSGAPGQRVTISCTGSSSNIGAGFDVHWYQQLPGTAPKLLIFGNSNRPSGVPDRFSGSKSGTSASLAITGLQAEDEADYYCQSYDSSLSGYVFGSGTKVTVLGSRGGGGSGGGGSGGGGSLEMAEVQLVESGAEVKKPGSSVKVSCKASGGTFSSYAISWVRQAPGQGLEWMGRIIPIFGIANYAQKFQGRVTITADKSTSTAYMELSSLRSEDTAVYYCARSMWYMDSWGQGTLVTVSS

SEQ ID NO: 205776 - protein, 249 aa, Artificial Sequence
  Description of Artificial Sequence: Synthetic scFv sequence
QSVVTQPPAVSGALGQRVTISCTGTTSNIGAGFDVHWYQQRPGAAPKLLISGNTHRPSGVPDRISGSKSGTLASLAITGLQAEDEADYYCQSYDRSLSTILFGGGTKLTVLGSRGGGGSGGGGSGGGGSLEMAQVQLVQSGAEVKKPGSSVKVSCKASGGTFSSHPISWVRQAPGQGLEWMGRIIPMLDIPNNAQKFQGRVTITADKSTDTAYLELSSLTSEDTAVYYCARGLYYYDYWGQGTLVTVSS

SEQ ID NO: 205777 - protein, 253 aa, Artificial Sequence
  Description of Artificial Sequence: Synthetic scFv sequence
METDTLLLWVLLLWVPGSTGDIVMTQSPSSLSASVGDRVTITCKASQDVGTAVDWYQQKPGKAPKLLIYWASTRHTGVPDRFTGSGSGTDFTLTISSLQPEDFADYFCQQYNSYPLTFGGGTKLEIKGGGSGGGGEVQLVQSGAEVKKPGASVKISCKTSGYTFTEYTIHWVKQASGKGLEWIGNINPNNGGTTYNQKFEDRATLTVDKSTSTAYMELSSLRSEDTAVYYCAAGWNFDYWGQGTTVTVSSGGC

SEQ ID NO: 205778 - protein, 250 aa, Artificial Sequence
  Description of Artificial Sequence: Synthetic scFv sequence
METDTLLLWVLLLWVPGSTGDIVMTQSPSSLSASVGDRVTITCKASQDVGTAVDWYQQKPGKAPKLLIYWASTRHTGVPDRFTGSGSGTDFTLTISSLQPEDFADYFCQQYNSYPLTFGGGTKLEIKSGGGGEVQLVQSGAEVKKPGASVKISCKTSGYTFTEYTIHWVKQASGKGLEWIGNINPNNGGTTYNQKFEDRATLTVDKSTSTAYMELSSLRSEDTAVYYCAAGWNFDYWGQGTTVTVSSGGC

SEQ ID NO: 205779 - protein, 253 aa, Artificial Sequence
  Description of Artificial Sequence: Synthetic scFv sequence
METDTLLLWVLLLWVPGSTGEVQLVQSGAEVKKPGASVKISCKTSGYTFTEYTIHWVKQASGKGLEWIGNINPNNGGTTYNQKFEDRATLTVDKSTSTAYMELSSLRSEDTAVYYCAAGWNFDYWGQGTTVTVSSGGGSGGGGDIVMTQSPSSLSASVGDRVTITCKASQDVGTAVDWYQQKPGKAPKLLIYWASTRHTGVPDRFTGSGSGTDFTLTISSLQPEDFADYFCQQYNSYPLTFGGGTKLEIKGGC

SEQ ID NO: 205780 - protein, 250 aa, Artificial Sequence
  Description of Artificial Sequence: Synthetic scFv sequence
METDTLLLWVLLLWVPGSTGEVQLVQSGAEVKKPGASVKISCKTSGYTFTEYTIHWVKQASGKGLEWIGNINPNNGGTTYNQKFEDRATLTVDKSTSTAYMELSSLRSEDTAVYYCAAGWNFDYWGQGTTVTVSSSGGGGDIVMTQSPSSLSASVGDRVTITCKASQDVGTAVDWYQQKPGKAPKLLIYWASTRHTGVPDRFTGSGSGTDFTLTISSLQPEDFADYFCQQYNSYPLTFGGGTKLEIKGGC

SEQ ID NO: 205781 - protein, 242 aa, Artificial Sequence
  Description of Artificial Sequence: Synthetic scFv sequence
DIQMTQSPSAMSASVGDRVTITCRASKSISKYLAWFQQKPGKVPKLRIHSGSTLQSGVPSRFSGSGSGTEFTLTISSLQPEDFATYYCQQHIEYPWTFGQGTKVEIKRGGGGSGGGGSGGGGSEVQLVQSGAEVKKPGATVKISCKASGYTFTDYYMHWVQQAPGKGLEWMGYFNPYNDYTRYAEKFQGRVTITADTSTDTAYMELSSLRSEDTAVYYCARSDGYYDAMDYWGQGTTVTVSS

SEQ ID NO: 205782 - protein, 242 aa, Artificial Sequence
  Description of Artificial Sequence: Synthetic scFv sequence
DIQMTQSPSAMSASVGDRVTITCRASKSISKYLAWFQQKPGKVPKLRIHSGSTLQSGVPSRFSGSGSGTEFTLTISSLQPEDFATYYCQQHIEYPWTFGQGTKVEIKRGGGGSGGGGSGGGGSQVQLVQSGAEVKKPGASVKVSCKASGYTFTDYYMHWVRQAPGQGLEWMGYFNPYNDYTRYAQKFQGRVTMTRDTSISTAYMELSSLRSDDTAVYYCARSDGYYDAMDYWGQGTTVTVSS

SEQ ID NO: 205783 - protein, 244 aa, Artificial Sequence
  Description of Artificial Sequence: Synthetic scFv sequence
DVQITQSPSYLAASPGETITINCRASKSISKYLAWYQEKPGKANKLLIHSGSTLQSGIPSRFSGSGSGTDFTLTISSLEPEDFAMYYCQQHIEYPWTFGGGTKLEIKRAGGGGSGGGGSSGGGGSEIQLQQSGPELVKPGASVKMSCKASGYTFTDYYMHWVKQNNGESLEWIGYFNPYNDYTRYNQNFNGKATLTVDKSSSTAYMQLNSLTSEDSAFYYCARSDGYYDAMDYWGQGTSVTVSS

SEQ ID NO: 205784 - protein, 245 aa, Artificial Sequence
  Description of Artificial Sequence: Synthetic scFv sequence
EIQLQQSGPELVKPGASVKMSCKASGYTFTDYYMHWVKQNNGESLEWIGYFNPYNDYTRYNQNFNGKATLTVDKSSSTAYMQLNSLTSEDSAFYYCARSDGYYDAMDYWGQGTSVTVSSGGGGSGGGGSSGGGGSDVQITQSPSYLAASPGETITINCRASKSISKYLAWYQEKPGKANKLLIHSGSTLQSGIPSRFSGSGSGTDFTLTISSLEPEDFAMYYCQQHIEYPWTFGGGTKLEIKRAS

SEQ ID NO: 205785 - protein, 244 aa, Artificial Sequence
  Description of Artificial Sequence: Synthetic scFv sequence
EVQLVQSGAEVKKPGATVKISCKASGYTFTDYYMHWVQQAPGKGLEWMGYFNPYNDYTRYAEKFQGRVTITADTSTDTAYMELSSLRSEDTAVYYCARSDGYYDAMDYWGQGTTVTVSSGGGGSGGGGSGGGGSDIQMTQSPSAMSASVGDRVTITCRASKSISKYLAWFQQKPGKVPKLRIHSGSTLQSGVPSRFSGSGSGTEFTLTISSLQPEDFATYYCQQHIEYPWTFGQGTKVEIKRAS

SEQ ID NO: 205786 - protein, 244 aa, Artificial Sequence
  Description of Artificial Sequence: Synthetic scFv sequence
QVQLVQSGAEVKKPGASVKVSCKASGYTFTDYYMHWVRQAPGQGLEWMGYFNPYNDYTRYAQKFQGRVTMTRDTSISTAYMELSSLRSDDTAVYYCARSDGYYDAMDYWGQGTTVTVSSGGGGSGGGGSGGGGSDIQMTQSPSAMSASVGDRVTITCRASKSISKYLAWFQQKPGKVPKLRIHSGSTLQSGVPSRFSGSGSGTEFTLTISSLQPEDFATYYCQQHIEYPWTFGQGTKVEIKRAS

SEQ ID NO: 205787 - protein, 261 aa, Artificial Sequence
  Description of Artificial Sequence: Synthetic scFv sequence
MAQVKLQQSGPELVKPGASVKMSCKASGYTFTSYVMHWVKQSNGKSLEWIGTIDPYYGGTSYNQKFKGKATLTVDKSSTTAYIQLKSLTSEDSAVYYCARWDGYYGGFSYWGQGTMVTVSSGGGGSGGGGSGGGGSDIELTQSPAIMSATLGEKVTMSCRASSNVKYMYWYQQKSGASPKLWIYYTSNLASGVPARFSGSGSGTSYSLTISSVEAEDAATYYCQQFTSSPYTFGSGTKLEIKRAAAGAPVPYPDPLEPRAA

SEQ ID NO: 205788 - protein, 265 aa, Artificial Sequence
  Description of Artificial Sequence: Synthetic scFv sequence
MAQVQLQESGPGLVKPSQSLSLTCSVTGYSITSNYWGWIRKFPGNKMEWMGYISYSGSTSYNPSLKSRISITRDTSKNQLFLQLNSVTTEDTATYYCARYSLFNYGRRDYVMDAWGQGTTVTVSSGGGGSGGGGSGGGGSDIELTQSPATMAASPGEKVTITCRASSTVSYMHWFQQKPGASPKPWIYDTSKLASGVPDRFSGSGSGTDFTLTIDPVQADDIATYYCQQSKDDPRTFGGGTKLELKRRPQVRRCRIRIRWNRVPH

SEQ ID NO: 205789 - protein, 260 aa, Artificial Sequence
  Description of Artificial Sequence: Synthetic scFv sequence
DIQLTQSPSSLSASVGDRVTITCSASQDISNYLNWYQQKPGKAPKVLIYFTSSLHSGVPSRFSGSGSGTDFTLTISSLQPEDFATYYCQQYSTVPWTFGQGTKVEIKRGSTSGSGKPGSGEGSTKGEVQLVESGGGLVQPGGSLRLSCAASGYDFTHYGMNWVRQAPGKGLEWVGWINTYTGEPTYAADFKRRFTFSLDTSKSTAYLQMNSLRAEDTAVYYCAKYPYYYGTSHWYFDVWGQGTLVTVSSGGGGSGGGGSC

SEQ ID NO: 205790 - protein, 251 aa, Artificial Sequence
  Description of Artificial Sequence: Synthetic scFv sequence
QSVLTQPPSVSGAPGQRVTISCTGSSSNIGAGYDVHWYQQLPGTAPKLLIYGNSNRPSGVPDRFSGSKSGTSASLAITGLQAEDEADYYCQSYDSSLSGYVFGTGTKVTVLGSRGGGGSGGGGSGGGGSLEMAQVQLVQSGAEVKKPGSSVKVSCKASGGTFSSYAISWVRQAPGQGLEWMGGIIPIFGKGNYPQKFQGRVTITADESTGTAYMELSSLRSEDTAVYYCARHIPTFSFDYWGQGTLVTVSS

SEQ ID NO: 205791 - protein, 257 aa, Artificial Sequence
  Description of Artificial Sequence: Synthetic scFv sequence
QIVLSQSPAILSASPGEKVTMTCRASSSVSYIHWFQQKPGSSPKPWIYATSNLASGVPVRFSGSGSGTSYSLTISRVEAEDAATYYCQQWTSNPPTFGGGTKLEIKRGSTSGSGKPGSGEGSTKGQVQLQQPGAELVKPGASVKMSCKASGYTFTSYNMHWVKQTPGRGLEWIGAIYPGNGDTSYNQKFKGKATLTADKSSSTAYMQLSSLTSEDSAVYYCARSTYYGGDWYFNVWGAGTTVTVSAGGGGSGGGGSC

SEQ ID NO: 205792 - protein, 244 aa, Artificial Sequence
  Description of Artificial Sequence: Synthetic scFv sequence
DIKMTQSPSSMYASLGERVTITCKASPDINSYLSWFQQKPGKSPKTLIYRANRLVDGVPSRFSGGGSGQDYSLTINSLEYEDMGIYYCLQYDEFPYTFGGGTKLEMKGSTSGSGKPGSGEGSTKGEVKLVESGGGLVKPGGSLKLSCAASGFTFSSYAMSWVRQIPEKRLEWVASISRGGTTYYPDSVKGRFTISRDNVRNILYLQMSSLRSEDTAMYYCGRYDYDGYYAMDYWGQGTSVTVSS

SEQ ID NO: 205793 - protein, 269 aa, Artificial Sequence
  Description of Artificial Sequence: Synthetic scFv sequence
EFGSATMGWSCIILFLVATATGVHSDIKMTQSPSSMYASLGERVTITCKASPDINSYLSWFQQKPGKSPKTLIYRANRLVDGVPSRFSGGGSGQDYSLTINSLEYEDMGIYYCLQYDEFPYTFGGGTKLEMKGSTSGSGKPGSGEGSTKGEVKLVESGGGLVKPGGSLKLSCAASGFTFSSYAMSWVRQIPEKRLEWVASISRGGTTYYPDSVKGRFTISRDNVRNILYLQMSSLRSEDTAMYYCGRYDYDGYYAMDYWGQGTSVTVSS

SEQ ID NO: 205794 - protein, 229 aa, Artificial Sequence
  Description of Artificial Sequence: Synthetic scFv sequence
EVQLVESGGGLVKPGGSLRLSCAASGFTFSNAWMSWVRQAPGKGLEWVGRIKSKTDGGTTDYAAPVKGRFTISRDDSKNTLYLQMNSLKTEDTAVYYCARDFGRWSYYFDYWSQGTLVTVSSNIQMTQSPSSLSASVGDRVTITCRASQSINKWLAWYQQKPGKAPKLLIHDASTLESGVPSRFSGSGSGTEFTLTISSLHPDDSATYYCQQLKSPPAQFGEGTKLEIK

SEQ ID NO: 205795 - protein, 229 aa, Artificial Sequence
  Description of Artificial Sequence: Synthetic scFv sequence
EVQLVESGGGLVKPGGSLRLSCAASGFTFSNAWMSWVRQAPGKGLEWVGRIKSKTDGGTTDYAAPVKGRFTISRDDSKNTLYLQMNSLKTEDTAVYYCARDFGRWSYYFDYWSQGTLVTVSSNIQMTQSPSSLSASVGDRVTITCRASQSINKWLAWYQQKPGKAPKLLIHDASTLESGVPSRFSGSGSGTEFTLTISSLHPDDSATYYCQQLKSRPLSFGEGTKLEIK

SEQ ID NO: 205796 - protein, 232 aa, Artificial Sequence
  Description of Artificial Sequence: Synthetic scFv sequence
EVQLVESGGGLVKPGGSLRLSCAASGFTFSNAWMSWVRQAPGKGLEWVGRIKSKTDGGTTDYAAPVKGRFTISRDDSKNTLYLQMNSLKTEDTAVYYCARDFGRWSYYFDYWSQGTLVTVSSQSVLTQPSSVSGTPGQRVTISCSGSSSNIGSNYVYWYQQLPGTAPKLLIYRNNQRPSGVPDRFSGSKSGTSASLGHQWAPGPRMRLIITAAWDDSLSGVVFGGGTKLTVL

SEQ ID NO: 205797 - protein, 232 aa, Artificial Sequence
  Description of Artificial Sequence: Synthetic scFv sequence
EVQLVESGGGLVKPGGSLRLSCAASGFTFSNAWMSWVRQAPGKGLEWVGRIKSKTDGGTTDYAAPVKGRFTISRDDSKNTLYLQMNSLRTEDTAVYYCARDFGRWSYYFDYWSQGTLVTVSSQPVLTQPHSVSESPGKTVTISCTRSSGNIASNFVQWYQRRPDGATTNVIYEDTQRPSGVSGRFSGSIDRSSNSASLTISGLRAEDEADYYCQSYDGRNLMFGGGTKVTVL

SEQ ID NO: 205798 - protein, 234 aa, Artificial Sequence
  Description of Artificial Sequence: Synthetic scFv sequence
  MOD_RES (194)..(194): Any amino acid
EVQLVESGGGLVKPGRSLRLSCTASGFTFGDYAMSWFRQAPGKGLEWVGFIRSKAYGGTTEYAASVKGRFTISRDDSKSIAYLQMNSLKTEDTAVYYCAKDFEVREAHLSYFDYWGQGTLVTVSSQSVLTQPPSVSVAPGQTARITCGGNRIGTKAVHWYQQKSGQAPVLVVRDDTDRPSGSLRDSLAPTLGTXAAATLTISGVEAGDEADYYQVWDSSSDHRVFGGGTKLTVL

SEQ ID NO: 205799 - protein, 229 aa, Artificial Sequence
  Description of Artificial Sequence: Synthetic scFv sequence
EVQLVESGGGLVQPGRSLRLSCTASGFTFGDYAMSWVRQAPGKGLEWVSSISGSGRSTDHADYVKGRFTISRDNSKNTVYLQMNRLRAEDTAVYYCAKVSNYEYYFDYWAQGTLVTVSSQPVLTQPHSVSESPGKTVTISCTRSSGSIASNYVQWYQQRPGSAPTTVIYEDNQRPSGVPDRFSGSIDSSSNSASLTISGLKTEDEADYYCQSYDSSNHVFGTGTKLTVL

SEQ ID NO: 205800 - protein, 229 aa, Artificial Sequence
  Description of Artificial Sequence: Synthetic scFv sequence
EVQLVESGGGLVQPGRSLRLSCTASGFTFGDYAMSWVRQAPGKGLEWVSSISGSGRSTDHADYVKGRFTISRDNSKNTVYLQMNRLRAEDTAVYYCAKVSNYEYYFDYWAQGTLVTVSSQSVLTQPPSVPGTPGQRVTITCSGSRFNIGSNTVNWYQQLPGTAPKLLIYSNNQRPSGVPDRFSGSKSGTSASLAISGLQSEDEADYYCAAWDDSLNGYVFGTGTKLTVL

SEQ ID NO: 205801 - protein, 227 aa, Artificial Sequence
  Description of Artificial Sequence: Synthetic scFv sequence
EVQLVESGGGLVQPGRSLRLSCTASGFTFGDYAMSWVRQAPGKGLEWVSSISGSGRSTDHADYVKGRFTISRDNSKNTVYLQMNRLRAEDTAVYYCAKVSNYEYYFDYWAQGTLVTVSSQSVLTQPPSVSVAPGQTARITCGGNNIGSTSVHWFQQKPGQAPVLVVYDDSDRPSGIPERFSGSNSGNTATLTISRVEAGDEADYYCQVWDNDSDHRVFGGGTKLTVL

SEQ ID NO: 205802 - protein, 265 aa, Artificial Sequence
  Description of Artificial Sequence: Synthetic scFv sequence
MALPVTALLLPLALLLHAARPQVQLQQSGAELVRPGASVTLSCKASGYTFSDYEMHWVIQTPVHGLEWIGAIDPETGGTAYNQKFKGKAILTADKSSSTAYMELRSLTSEDSAVYYCTGYYDYDSFTYWGQGTLVTVSAGGGGSGGGGSGGGGSDIVMTQSQKIMSTTVGDRVSITCKASQNVDAAVAWYQQKPGQSPKLLIYSASNRYTGVPDRFTGSGSGTDFTLTISNMQSEDLADYFCQQYDIYPYTFGGGTKLEIKRSDP

SEQ ID NO: 205803 - protein, 247 aa, Artificial Sequence
  Description of Artificial Sequence: Synthetic scFv sequence
QEQLVESGGRLVTPGGSLTLSCKASGFDFSAYYMSWVRQAPGKGLEWIATIYPSSGKTYYATWVNGRFTISSDNAQNTVDLQMNSLTAADRATYFCARDSYADDGALFNIWGPGTLVTISSGGGGSGGGGSGGGGSELVLTQSPSVSAALGSPAKITCTLSSAHKTDTIDWYQQLQGEAPRYLMQVQSDGSYTKRPGVPDRFSGSSSGADRYLIIPSVQADDEADYYCGADYIGGYVFGGGTQLTVT

SEQ ID NO: 205804 - protein, 234 aa, Artificial Sequence
  Description of Artificial Sequence: Synthetic scFv sequence
  MOD_RES (187)..(187): Any amino acid
  MOD_RES (209)..(209): Any amino acid
QITLKESGGGLVKPGGSLRLSCAASGFTFSNAWMSWVRQAPGKGLEWVGRIKSKTDGGTTDYAAPVKGRFTISRDDSKNTLYLQMNSLKTEDTAVYYCARDFGRWSYYFDYWSQGTLVTVSSQSVLTQPPSVSVAPGQTARITCGGNNIGTKSVHWYQQKPGQAPVLVLYDESDRPSGIPERFSGSXAASGNTATLTISRVEAGDEADXAALLQVWDSSSDHYVFGSGTKLTVL

SEQ ID NO: 205805 - protein, 242 aa, Artificial Sequence
  Description of Artificial Sequence: Synthetic scFv sequence
  MOD_RES (187)..(187): Any amino acid
  MOD_RES (209)..(209): Any amino acid
  MOD_RES (218)..(218): Any amino acid
  MOD_RES (221)..(221): Any amino acid
  MOD_RES (224)..(224): Any amino acid
  MOD_RES (227)..(227): Any amino acid
QITLKESGGGLVKPGGSLRLSCAASGFTFSNAWMSWVRQAPGKGLEWVGRIKSKTDGGTTDYAAPVKGRFTISRDDSKNTLYLQMNSLKTEDTAVYYCARDFGRWSYYFDYWSQGTLVTVSSQSVLTQPPSVSVAPGQTARITCGGNNIGTKSVHWYQQKPGQAPVLVLYDESDRPSGIPERFSGSXAASGNTATLTISRVEAGDEADXAALLSGVGXAAXAAXAAXAASLCFGSGTKLTVL

SEQ ID NO: 205806 - protein, 232 aa, Artificial Sequence
  Description of Artificial Sequence: Synthetic scFv sequence
  MOD_RES (208)..(208): Any amino acid
  MOD_RES (211)..(211): Any amino acid
QITLKESGGGLVKPGGSLRLSCAASGFTFSNAWMSWVRQAPGKGLEWVGRIRSKTDGGTTDYAALVKGRFTISRDDSENTLYLQMNSLKTEDTAVYYCARDFGRWSYYFDYWSQGTLVTVSSSYELTQPPSVSVSPGQTASITCSGDKLGDKYACWYQQKPGQSPVLVIYQDSKRPSGIPERFSGSNSGNTATLTISGTQAMDEADYXAAXAAQAWDSSTVVFGGGTKLTVL

SEQ ID NO: 205807 - protein, 234 aa, Artificial Sequence
  Description of Artificial Sequence: Synthetic scFv sequence
  MOD_RES (208)..(208): Any amino acid
  MOD_RES (211)..(211): Any amino acid
  MOD_RES (214)..(214): Any amino acid
QITLKESGGGLVKPGGSLRLSCAASGFTFSNAWMSWVRQAPGKGLEWVGRIRSKTDGGTTDYAALVKGRFTISRDDSENTLYLQMNSLKTEDTAVYYCARDFGRWSYYFDYWSQGTLVTVSSSYELTQPPSVSVSPGQTASITCSGDKLGDKYACWYQQKPGQSPVLVIYQDSKRPSGIPERFSGSNSGNTATLTISGTQAMDEADYXAAXAAXAAAWDSSTVVFGGGTKLTVL

SEQ ID NO: 205808 - protein, 228 aa, Artificial Sequence
  Description of Artificial Sequence: Synthetic scFv sequence
QVQLVESGGGLVKPGGSLRLSCAASGFTFSNAWMSWVRQAPGKGLEWVGRIKSKTDGGTTDYAAPVKGRFTISRDDSKNSLYLQMNSLKTEDTAVYYCARDFGRWSYYFDYWGQGTLVTVSSVLTQPPSVSVAPGKTARITCGGNNLGSKNVHWYQQKPGQAPVLVIYDDDNRPSGIPERFSGSNSGNTATLTISRVEAGDEADYYCQVWDSSSRHVVFGGGTKLTVL

SEQ ID NO: 205809 - protein, 234 aa, Artificial Sequence
  Description of Artificial Sequence: Synthetic scFv sequence
  MOD_RES (194)..(194): Any amino acid
QVQLVESGGGLVKPGRSLRLSCTASGFTFGDYAMSWFRQAPGKGLEWVGFIRSKAYGGTTEYAASVKGRFTISRDDSKSIAYLQMNSLKTEDTAVYYCAKDFEVREAHLSYFDYWGQGTLVTVSSQSVLTQPPSVSVAPGQTARITCGGNRIGTKAVHWYQQKSGQAPVLVVRDDTDRPSGSLRDSLAPTLGTXAAATLTISGVEAGDEADYYQVWDSSSDHRVFGGGTKLTVL

SEQ ID NO: 205810 - protein, 210 aa, Artificial Sequence
  Description of Artificial Sequence: Synthetic scFv sequence
  MOD_RES (208)..(208): Any amino acid
QVTLKESGGGLVKPGGSLRLSCAASGFTFQRLDEWVRQAPGKGLEWVGRIKSKTDGGTTDYAAPVKGRFTISRDDSKNTLYLQMNSLKTEDTAVYYCARDFGRWSYYFDYWSQGTLVTVSSQSALTQDPAVSVALGTDSQDHMPRRQPQKTIMQWYQQKPGQAPALVIYGKNDRPSGIPDRFSGSTSGNTASLTITGAQAEDEADYYXAA

SEQ ID NO: 205811 - protein, 229 aa, Artificial Sequence
  Description of Artificial Sequence: Synthetic scFv sequence
QVTLKESGGGLVKPGGSLRLSCAASGFTFSNAWMSWVRQAPGKGLEWVGRIKSKTDGGTTDYAAPVKGRFTISRDDSKNTLYLQMNSLKTEDTAVYYCARDFGRWSYYFDYWSQGTLVTVSSNIQMTQSPSSLSASVGDRVTITCRASQSINKWLAWYQQKPGKAPKLLIHDASTLESGVPSRFSGSGSGTEFTLTISSLHPDDSATYYCQQLKSPPAQFGEGTKLEIK

SEQ ID NO: 205812 - protein, 229 aa, Artificial Sequence
  Description of Artificial Sequence: Synthetic scFv sequence
QVTLKESGGGLVKPGGSLRLSCAASGFTFSNAWMSWVRQAPGKGLEWVGRIKSKTDGGTTDYAAPVKGRFTISRDDSKNTLYLQMNSLKTEDTAVYYCARDFGRWSYYFDYWSQGTLVTVSSNIQMTQSPSSLSASVGDRVTITCRASQSINKWLAWYQQKPGKAPKLLIHDASTLESGVPSRFSGSGSGTEFTLTISSLHPDDSATYYCQQLKSRPLSFGEGTKLEIK

SEQ ID NO: 205813 - protein, 232 aa, Artificial Sequence
  Description of Artificial Sequence: Synthetic scFv sequence
QVTLKESGGGLVKPGGSLRLSCAASGFTFSNAWMSWVRQAPGKGLEWVGRIKSKTDGGTTDYAAPVKGRFTISRDDSKNTLYLQMNSLKTEDTAVYYCARDFGRWSYYFDYWSQGTLVTVSSQSVLTQPSSVSGTPGQRVTISCSGSSSNIGSNYVYWYQQLPGTAPKLLIYRNNQRPSGVPDRFSGSKSGTSASLGHQWAPGPRMRLIITAAWDDSLSGVVFGGGTKLTVL

SEQ ID NO: 205814 - protein, 232 aa, Artificial Sequence
  Description of Artificial Sequence: Synthetic scFv sequence
QVTLKESGGGLVKPGGSLRLSCAASGFTFSNAWMSWVRQAPGKGLEWVGRIKSKTDGGTTDYAAPVKGRFTISRDDSKNTLYLQMNSLRTEDTAVYYCARDFGRWSYYFDYWSQGTLVTVSSQPVLTQPHSVSESPGKTVTISCTRSSGNIASNFVQWYQRRPDGATTNVIYEDTQRPSGVSGRFSGSIDRSSNSASLTISGLRAEDEADYYCQSYDGRNLMFGGGTKVTVL

SEQ ID NO: 205815 - protein, 214 aa, Artificial Sequence
  Description of Artificial Sequence: Synthetic scFv sequence
  MOD_RES (4)..(4): Any amino acid
  MOD_RES (13)..(13): Any amino acid
RSPXAARSLGEAXAAVKPGGSLRLSCAASGFTFSNAWMSGSAQAPGKGLEWVGRIKSKTDGGTTDYAAPVKGRFTISRDDSKNTLYLQMNSLKTEDTAVYYCARDFGRWSYYFDYWSQGTLVTVSSEIVMTQSPSFLSASVGDRVTITCRASQGISSYLAWYQQKPGKAPKLLIYAASTLQSGSHQGFSGSGSGTEFTLTISSLQPEDFATYYC

SEQ ID NO: 205816 - protein, 255 aa, Artificial Sequence
  Description of Artificial Sequence: Synthetic scFv sequence
DIQMTQSPSSLSASVGDRVTITCSASSSVSYMNWYQQTPGKAPKRWIYDTSKLASGVPSRFSGSGSGTDYTFTISSLQPEDIATYYCQQWSSNPFTFGQGTKLQITRGSTSGSGKPGSGEGSTKGQVQLVQSGGGVVQPGRSLRLSCKASGYTFTRYTMHWVRQAPGKGLEWIGYINPSRGYTNYNQKVKDRFTISRDNSKNTAFLQMDSLRPEDTGVYFCARYYDDHYSLDYWGQGTPVTVSSGGGGSGGGGSC

SEQ ID NO: 205817 - protein, 246 aa, Artificial Sequence
  Description of Artificial Sequence: Synthetic scFv sequence
EVQLVETGGGLVQPGKSLELTCATSGFTFNTAWMHWVRQSPDKRLEWIARIKDTSNNYATDYVESMKGRFTISRDDSKGSVNLQMNSLKEEDTATYYCTTDFYDGTYYWNYWGQGVMVTVSSGGGGSGGGGSGGGGSSYELIQPPSAAVTLGNTVSLTCVGDELPKRYAYWYQQKPDQSIVRVIYEDSVRPPGISDRFSGSSSGTTATLTIRDAQNEDEADYYCQSTYGDDKLYIFGGGTKLTVLG

SEQ ID NO: 205818 - protein, 257 aa, Artificial Sequence
  Description of Artificial Sequence: Synthetic scFv sequence
DIQMTQSPSSLSASVGDRVTITCRASQDVNTAVAWYQQKPGKAPKLLIYSASFLYSGVPSRFSGSRSGTDFTLTISSLQPEDFATYYCQQHYTTPPTFGQGTKVEIKRGSTSGSGKPGSGEGSTKGEVQLVESGGGLVQPGGSLRLSCAASGFNIKDTYIHWVRQAPGKGLEWVARIYPTNGYTRYADSVKGRFTISADTSKNTAYLQMNSLRAEDTAVYYCSRWGGDGFYAMDYWGQGTLVTVSSGGGGSGGGGSC

SEQ ID NO: 205819 - protein, 246 aa, Artificial Sequence
  Description of Artificial Sequence: Synthetic scFv sequence
EVQLLESGGGAVQPGRSLRLSCAASGFTFSSYAMHWVRQAPGKGLEWVAVISYDGSNKYYADSVKGRFTISRDNSKNTLYLQMNSLRAEDTAVYYCASGYSSSWYLDYWGQGTLVTVSSGGGGSGGGGSGGGASDIQMTQSPSSVSASVGDRVTITCQASQDISNYLNWYQQKPGKAPKLLIYDASNLETGVPSRFSGSGSGTDFTFTISSLQPEDIATYYCQQYDNLPLTFGGGTKVEIKRTAAA

SEQ ID NO: 205820 - protein, 246 aa, Artificial Sequence
  Description of Artificial Sequence: Synthetic scFv sequence
EVQLLESGGGVVQPGRSLRLSCAASGFTFSSYAMHWVRQAPGKGLEWVAVISYDGSNKYYADSVKGRFTISRDNSKNTLYLQMNSLRAEDTAVYYCAKGGDTYGFLDNWGQGTMVTVSSGGGGSGGGGSGGGASDIQMTQSPSTLSASVGDRVTITCRASQSISSWLAWYQQKPGKAPKLLIYKASSLESGVPSRFSGSGSGTDFTLTISSLQPEDFATYYCQQFNAYPLTFGGGTKVEIKRTAAA

SEQ ID NO: 205821 - protein, 249 aa, Artificial Sequence
  Description of Artificial Sequence: Synthetic scFv sequence
EVQLLESGGGVVQPGRSLRLSCAASGFTFSSYGMHWVRQAPGKGLEWVAVISYDGSNKYYADSVKGRFTISRDNSKNTLYLQMNSLRAEDTAVYYCAKDDGAMRYWGQGTMVTVSSGGGGSGGGGSGGGASDIQMTQSPDSLAVSLGERATINCKSSQSVLYSSNNKNYLAWYQQKPGQPPKLLIYWASTRESGVPDRFSGSGSGTDFTLTISSLQAEDVAVYYCQQYYDSPYTFGQGTKVDIKRTAAA

SEQ ID NO: 205822 - protein, 247 aa, Artificial Sequence
  Description of Artificial Sequence: Synthetic scFv sequence
  MOD_RES (101)..(101): Any amino acid
EVQLVESGGGVVQPGRSLRLSCAASGFTFSSYAMHWVRQAPGKGLEWVAVISYDGSNKYYADSVKGRFTISRDNSKNTLYLQMNSLRAEDTAVYYCARGYXASSWSQGLWGQGTLVTVSSGGGGSGGGGSGGGASDIQMTQSPSSLSASVRDRVTITCQASQDISNYLNWYQQKPGKAPKLLIYDASNLETGVPSRFSGSGSGTDFTFTISSLQPEDIATYYCQQYDNLPPTFGGGTKVEIKRTAAA

SEQ ID NO: 205823 - protein, 252 aa, Artificial Sequence
  Description of Artificial Sequence: Synthetic scFv sequence
EVRLQQSGPDLIKPGASVKMSCKASGYTFTGYVMHWVKQRPGQGLEWIGFINPYNDDIQSNERFRGKATLTSDKSSTTAYMELSSLTSEDSAVYYCARGAGYNFDGAYRFFDFWGQGTTLTVSSGGGGSGGGGSGGGGSDVVMTQSPLSLPVSLGDQASISCRSSQRLVHSNGNTYLHWYLQKPGQSPKLLIYRVSNRFPGVPDRFSGSGSGTDFTLKISRVEAEDLGIYFCSQSTHVPYTFGGGTKLEIKR

SEQ ID NO: 205824 - protein, 245 aa, Artificial Sequence
  Description of Artificial Sequence: Synthetic scFv sequence
QVQLVESGAEVKKPGASVKVSCKASGYTFTGYYMHWVRQAPGQGLEWMGRINPNSGGTNYAQKFQGRVTMTRDTSISTAYMELSRLRSDDTAVYYCASGGAGWNWGQGTMVTVSSGGGGSGGGGSGGGASNFMLTQPHSVSESPGKTATISCTRSSGSIASNYVQWYQQRPGSAPTTVIYEDNQRPFGVPDRFSGSIDSSSNSASLTISGLKTEDEADYYCQSHDSSNVVFGGGTQLTVLGQPAA

SEQ ID NO: 205825 - protein, 246 aa, Artificial Sequence
  Description of Artificial Sequence: Synthetic scFv sequence
QVQLVESGGGLVQPGRSLRLSCAASGFTFSSYAMHWVRQAPGKGLEWVAVISYDGSSKYYADSVKGRFTISRDNSKNTLYLQMNSLRAEDTAVYYCAKGGGSFGAFDIWGQGTLVTVSSGGGGSGGGGSGGGASDIQMTQSPSSLSASVGDRVTITCRASQSISRYLNWYQQKPGKAPNLLIYAASSLQSGVPSRFSGSGSGTDFTLTISSLQPEDFATYYCQQYNSYPLTFGGGTKLEIKRTAAA

SEQ ID NO: 205826 - protein, 244 aa, Artificial Sequence
  Description of Artificial Sequence: Synthetic scFv sequence
QVQLVESGGGVVQPGRPLRLSCAASGFTFSSYAMHWVRQAPGKGLEWVAVISYDGSNKYYADSVKGRFTISRDNSKNTLYLQMNSLRAEDTAVYYCARAGYSYADYWGQGTMVTVSSGGGGSGGGGSGGGASDIQMTQSPSSLSASVGDRVTITCRASQGIRNDLGWYQQKPGKAPKRLIYAASSLQSGVPSRFSGSGSGTEFTLTISSLQPEDFATYYCLQHNSYPLTFGGGTKVDIKRTAAA

SEQ ID NO: 205827 - protein, 244 aa, Artificial Sequence
  Description of Artificial Sequence: Synthetic scFv sequence
QVQLVESGGGVVQPGRSLRLSCAAPGFTFSSYGMHWVRQAPGKGLEWVAVISYDGSNKYYADSVKGRFTISRDNSKNTLYLQMNSLRAEDTAVYYCARNKQYGMDVWGQGTLVTVSSGGGGSGGGGSGGGASDIVMTQSPATLSLAPGERATLSCRASQSVGSNLAWYQQKPGQAPSLLIYDASTRATGIPARFSGSGSGTDFTLTISSLQSEDIAVYYCQQYHRWPLTFGGGTKVEIKRTAAA

SEQ ID NO: 205828 - protein, 247 aa, Artificial Sequence
  Description of Artificial Sequence: Synthetic scFv sequence
QVQLVESGGGVVQPGRSLRLSCAASGFTFSSYAMHWVRQAPGKGLEWVAVISYDGSNKYYADSVKGRFTISRDNSKNTLYLQMNSLRAEDTAVYYCARAHNSSSWSFDYWGQGTLVTVSSGGGGSGGGGSGGGASDIQMTQSPSSLSASVGDRVTITCRASQSISSYLNWYQQKPGKAPKLLIYDASNLETGVPSRFSGSGSGTDFTFTISSLQPEDIATYYCQQYDNLPLTFGGGTKVDIKRTAAA

SEQ ID NO: 205829 - protein, 251 aa, Artificial Sequence
  Description of Artificial Sequence: Synthetic scFv sequence
QVQLVESGGGVVQPGRSLRLSCAASGFTFSSYGMHWVRQAPGKGLEWVAVISYDGSNKYYADSVKGRFTISRDNSKNTLYLQMNSLRAEDTAVYYCAKDLGGSGGAFDIWGQGTLVTVSSGGGGSGGGGSGGGASDIVMTQTPHSLSVTPGQPASISCKSSQSLLYSDGKTYLYWYLQKPGQPPQLLIYEVSNRFSGVPDRFSGSGSGTDFTLKISRVEAEDVGVYYCMQSIQLYTFGQGTKVDIKRTAAA

SEQ ID NO: 205830 - protein, 247 aa, Artificial Sequence
  Description of Artificial Sequence: Synthetic scFv sequence
EVQLVESGAEVKKPGASVKVSCKASGYTFTGYYMHWVRQAPGQGLEWMGRINPNSGGTNYAQKFQGRVTMTRDTSISTAYMELSSLRSEDTAVYYCARFGERYAFDIWGQGTLVTVSSGGGGSGGGGSGGGASQSELTQPPSASGSPGQSVTISCTGTSTDVGAFHFVSWYQHTPGKAPKLLISEVRKRASGVPDRFSGSRSGNTASLTVSGLQSEDEADYFCSAYTGSNYVFGSGTKLTVLGQPAA

SEQ ID NO: 205831 - protein, 249 aa, Artificial Sequence
  Description of Artificial Sequence: Synthetic scFv sequence
EVQLVESGGGVVQPGGSLRLSCAASGFTFSSYAMSWVRQAPGKGLEWVSAISGSGGSTYYADSVKGRFSISRDNSKNTLYLQMNSLRAEDTAVYYCARTRSSGAFDIWGQGTLVTVSSGGGGSGGGGSGGGASNFMLTQPHSVSESPGKTVTISCTRSSGSIASKYVQWYQQRPGSSPTTVIYEDNQRPSGVPDRFSGSIDTSSNSASLTISGLRTEDEADYYCHSYDSNNHSVFGGGTKVTVLGQPAA

SEQ ID NO: 205832 - protein, 251 aa, Artificial Sequence
  Description of Artificial Sequence: Synthetic scFv sequence
EVQLVESGGGVVQPGRSLRLSCAASGFTFSSYAMHWVRQAPGKGLEWVAVISYDGSNKYYADSVKGRFTISRDNSKNTLYLQMNSLRAEDTAVYYCARGGFTVPGGAFDIWGQGTLVTVSSGGGGSGGGGSGGGASNFMLTQPHSVSDSPGKTVTISCTRSSGRIGSNFVQWYQQRPGSSPTTVIYEDDQRPSGVPARFSGSIDSSSNSASLTISGLTTADEAGYYCQSYDASNVIFGGGTKLTVLGQPAA

SEQ ID NO: 205833 - protein, 248 aa, Artificial Sequence
  Description of Artificial Sequence: Synthetic scFv sequence
EVQLVQSGAEVKKPGASVKVSCKASGYTFTGYYMHWVRQAPGQGLEWMGWINPNSGGTNYAQKFQGRVTMTRDTSISTAYMELSSLRSEDTAVYYCARDTGPIDYWGQGTMVTVSSGGGGSGGGGSGGGASDIVMTQTPLSLSVTPGQPASISCKSSQSLLHSDGKTYLYWYLQKPGQPPQLLVYEVSNRFSGVPDKFSGSGSGTDFTLKISRVEAEDVGVYYCMQGIQLPPTFGGGTKVDIKRTAAA

SEQ ID NO: 205834 - protein, 249 aa, Artificial Sequence
  Description of Artificial Sequence: Synthetic scFv sequence
EVQLVQSGAEVKKPGSSVKVSCEASGYTFTSYAISWVRQAPGQGLEWMGWMNPNSGNTGYAQKFQGRVTMTRNTSISTAYMELSSLRSEDTAVYYCARVSSYYGMDVWGQGTLVTVSSGGGGSGGGGSGGGASNFMLTQPLSVSESPGKTVTISCTRSSGSIASNYVQWYQQRPGSAPTTVIYEDNQRPSGVPDRFSGSIDSSSNSASLTISGLKTEDEADYYCQSYNSSNHWVFGGGTKVTVLGQPAA

SEQ ID NO: 205835 - protein, 249 aa, Artificial Sequence
  Description of Artificial Sequence: Synthetic scFv sequence
EVQLVQSGAEVKKPGSSVKVSCKASGGTFSSYAISWVRQAPGQGLEWMGIINPSGGSTSYAQKFQGRVTMTRDTSTSIVYMELSSLRSEDTAVYYCARGVWNSGSYLGFDYWGQGTLVTVSSGGGGSGGGGSGGGASDIQMTQSPSSLSASVGDRVTITCQASQDISNYLNWYQQKPGKAPKLLIYAASSLQSGVPSRFSGSGSGTDFTLTISSLQPEDFATYYCQQSYSTPLTFGGGTKLEIKRTAAA

SEQ ID NO: 205836 - protein, 252 aa, Artificial Sequence
  Description of Artificial Sequence: Synthetic scFv sequence
QMQLVQSGAEVKKPGASVKVSCKASGYTFASYYMHWVRQAPGQGLEWMGIINPSGGSTSYAQKFQGRVTMTRDTSTSTVYMELSRLRSDDTAVYYCASNRGGSYKSVGMDVWGQGTTVTVSSGGGGSGGGGSGGGASNFMLTQPQSVSESPGKTVTISCTRSSGNFASKYVQWYQQRPGSSPTTVIYENYQRPSGVPDRFSGSIDSSSNSATLTISGLKTEDEADYYCQSYDEVSVVFGGGTQLTVLGQPAA

SEQ ID NO: 205837 - protein, 252 aa, Artificial Sequence
  Description of Artificial Sequence: Synthetic scFv sequence
QVQLQQSGPGLVKPSQTLSLTCAISGDSVSSNSAAWNWIRQSPSRGLEWLGRTYYRSKWYNDYAVSVKSRITINPDTSKNQFSLQLNSVTPEDTAVYYCARDQWLANYYYYGMDVWGQGTLVTVSSGGGGSGGGGSGGGASSYELTQPLSVSVALGQTARITCGGNNIGSKNVHWYQQKPGQAPVLVIYRDNNRPSGIPERFSGSNSGNTATLTISKAQAGDEADYYCQVWDSNSWVFGGGTKLTVLGQPAA

SEQ ID NO: 205838 - protein, 246 aa, Artificial Sequence
  Description of Artificial Sequence: Synthetic scFv sequence
QVQLVESGAEVKKPGASVKVSCKASGYTFTGYYMHWVRQAPGQGLEWMGRINPNSGGTNYAQKFQGRVTMTRDTSISTAYMELSRLRSDDTAVYYCASPRGRGSAFDIWGQGTLVTVSSGGGGSGGGGSGGGASSYELTQPPSVSVSPGQTATISCSGDQLGGKYGHWYQKKPGQSPVLVLYQDRKRPAGIPERFSGSSSGNTITLTISGTQAVDEADYYCQAWDTNLGGVFGGGTKVTVLGQPAA

SEQ ID NO: 205839 - protein, 249 aa, Artificial Sequence
  Description of Artificial Sequence: Synthetic scFv sequence
QVQLVESGGGLVKPGGSLRLSCAASGFTFSDYYMSWIRQAPGKGLEWVSYISSSGSTIYYADSVEGRFTISRDNAKNSLYLQMNSLRTEDTAVYYCARARVGGMDVWGQGTMVTVSSGGGGSGGGGSGGGASNFMLTQPHSVSESPGKTVTISCTRSSGSIASNYVQWYQQRPGSSPTTVIYEDNQRPSGVPDRFSGSIDSSSNSASLTISGLKTEDEADYYCQSFDADNLHVVFGGGTKLTVLGQPAA

SEQ ID NO: 205840 - protein, 240 aa, Artificial Sequence
  Description of Artificial Sequence: Synthetic scFv sequence
QVTLESGPGILPSQTLSLTCSFSGFSLSTSGMGVGWIRQPSGKGLEWLAHIWWDDDKYYNPSLKSQLTISDTSRNQVFLKITSVDTADTATYYCSRRPRGTMDAMDYWGQGTSVTVSSGGGGSGGGGSGGGGSDIVMTQAASSLSASLGDRVTISCRASQDISKYLNWYQQKPDGTVKLLIYYTSRLHSGVPSRFSGSGSGTDYSLTIRNLEQEDIATYFCQQVYTLPWTFGGGTKLEIK

SEQ ID NO: 205841 - protein, 245 aa, Artificial Sequence
  Description of Artificial Sequence: Synthetic scFv sequence
QVTLKESGPGILKPSQTLSLTCSFSGFSLNTSGMGVGWIRQPSGKGLEWLAHIWWDDDKYYNPSLKSQLTISKDTSRNQVFLKITSVDTADSATYYCARRASHVSTVDSFDFWGQGTTLTVSSGGGGSGGGGSGGGGSDIQMTQTTSSLSASLGDRVTISCRASQDISNYLNWFQQKPDGTVKLLIYYTSRLHSGVPSKFSGSGSGTDYSLTISNLEQEDIATYFCQQGYTLPWTFGGGTKLEIK

SEQ ID NO: 205842 - protein, 242 aa, Artificial Sequence
  Description of Artificial Sequence: Synthetic scFv sequence
QVTLKESGPGILKPSQTLSLTCSFSGFSLNTSGMGVGWIRQPSGKGLEWLAHIWWDDDKYYNPSLKSQLTISKDTSRNQVFLKITSVDTADSATYYCARRASHVSTVDSFDFWGQGTTLTVSSGGGGSGGGGSGGGGSDIQMTQTTSSLSASLGDRVTISCRASQDISNYLNWFQQPDGTVLLIYYTSRLHSGVPSFSGSGSGTDYSLTISNLEQEDIATYFCQQGYTLPWTFGGGTKLEIK

SEQ ID NO: 205843 - protein, 243 aa, Artificial Sequence
  Description of Artificial Sequence: Synthetic scFv sequence
QVTLKESGPGILKPSQTLSLTCSFSGFSLSTSGMGVGWIRQPSGKGLEWLAHIWWDDDKYYNPSLKSQLTISKDTSRNQVFLKITSVDTADTATYYCSRRPRGTMDAMDYWGQGTSVTVSSGGGGSGGGGSGGGGSDIVMTQAASSLSASLGDRVTISCRASQDISKYLNWYQQKPDGTVKLLIYYTSRLHSGVPSRFSGSGSGTDYSLTIRNLEQEDIATYFCQQVYTLPWTFGGGTKLEIK

SEQ ID NO: 205844 - protein, 247 aa, Artificial Sequence
  Description of Artificial Sequence: Synthetic scFv sequence
EVQLLESGGGLVQPGGSLRLSCAASGFTFSDYYMSWVRQAPGKGLEWVSAIYSGGGSIYYADSVKGRFTISRDNSKNTLYLQMNSLRAEDTAVYYCARDVQWNKAPRFDYWGQGTLVTVSSGGGGSGGGGSGGGGSQSVLTQPPSASGAPGQRVTISCSGSSSNIGSNDVSWYQQLPGTAPKLLIYADSNRPSGVPDRFSGSKSGTSASLAISGLRSEDEADYYCGSWDYSLSGYVFGGGTKLTVLG

SEQ ID NO: 205845 - protein, 247 aa, Artificial Sequence
  Description of Artificial Sequence: Synthetic scFv sequence
EVQLLESGGGLVQPGGSLRLSCAASGFTFSGYAMSWVRQAPGKGLEWVSGISHDGGNTYYADSVKGRFTISRDNSKNTLYLQMNSLRAEDTAVYYCARDRRKGPSTEFDYWGQGTLVTVSSGGGGSGGGGSGGGGSQSVLTQPPSLSGTPGQRVTISCTGSSSNIGSNSVSWYQQLPGTAPKLLIYDDNNRPSGVPDRFSGSKSGTSASLAISGLRSEDEADYYCGAWDYSLSAYVFGGGTKLTVLG

SEQ ID NO: 205846 - protein, 253 aa, Artificial Sequence
  Description of Artificial Sequence: Synthetic scFv sequence
EVQLLESGGGLVQPGGSLRLSCAASGFTFSGYAMSWVRQAPGKGLEWVSSIYSSSGSKYYADSVKGRFTISRDNSKNTLYLQMNSLRAEDTAVYYCARASSTCTRTWCSYDDAMDVWGQGTLVTVSSGGGGSGGGGSGGGGSQSVLTQPPSASGTPGQRVTISCTGSSSNIGNNAVTWYQQLPGTAPKLLIYDDSHRPSGVPDRFSGSKSGTSASLAISGLRSEDEADYYCGTWDYSLSGYVFGGGTKLTVLG

SEQ ID NO: 205847 - protein, 253 aa, Artificial Sequence
  Description of Artificial Sequence: Synthetic scFv sequence
EVQLLESGGGLVQPGGSLRLSCAASGFTFSNYDMSWVRQAPGKGLEWVSGIYPNGGSKYYADSVKGRFTISRDNSKNTLYLQMNSLRAEDTAVYYCARALRQCQRYWCSYADGMDVWGQGTLVTVSSGGGGSGGGGSGGGGSQSVLTQPPSASGTPGQRVTISCTGSSSNIGSNYVSWYQQLPGTAPKLLIYADSQRPSGVPDRFSGSKSGTSASLAISGLRSEDEADYYCGTWDYSLSGYVLGGGTKLTVLG

SEQ ID NO: 205848 - protein, 253 aa, Artificial Sequence
  Description of Artificial Sequence: Synthetic scFv sequence
EVQLLESGGGLVQPGGSLRLSCAASGFTFSNYDMSWVRQAPGKGLEWVSLISHGGGNIYYADSVKGRFTISRDNSKNTLYLQMNSLRAEDTAVYYCARVPVMCTNHWCSYANGMDVWGQGTLVTVSSGGGGSGGGGSGGGGSQSVLTQPPSASGTPGQRVIISCSASSSNIGSNAVYWYQQLPGTAPKLLIYSDNQRPSGVPDRFSGSKSGTSASLAISGLRSEDEADYYCGSWDYSLSAYVFGGGTKLTVLG

SEQ ID NO: 205849 - protein, 247 aa, Artificial Sequence
  Description of Artificial Sequence: Synthetic scFv sequence
EVQLLESGGGLVQPGGSLRLSCAASGFTFSSYSMSWVRQAPGKGLEWVSGISHGGGNKYYADSVKGRFTISRDNSKNTLYLQMNSLRAEDTAVYYCARDLRANNDTGFDYWGQGTLVTVSSGGGGSGGGGSGGGGTQSVLTQPPSSSGTPGQRVTISCTGSSSNIGSNAVTWYQQLPGTAPKLLIYDDNHRPSGVPDRFSGSKSGTSASLAISGLRSEDEADYYCGAWDYSLNAYVFGGGTKLTVLG

SEQ ID NO: 205850 - protein, 247 aa, Artificial Sequence
  Description of Artificial Sequence: Synthetic scFv sequence
EVQLLESGGGLVQTGGSLRLSCAASGFTFSDYAMSWVRQAPGKGLEWVSSIYPGSGSKYYADSVKGRFAISRDNSKNTLYLQMNSLRAEDTAVYYCARDAWFRGHNVFDYWGQGTLVTVSSGGGGSGGGGSGGGGSQSVLTQPPSASGTPGQRVTISCTGSSSNIGSNNVTWYQQLPGTAPKLLIYSDSHRPSGVPDRFSGSKSGTSASLAISGLQSEDEADYYCGSWDYSLSAYVFGGGTKLTVLG

SEQ ID NO: 205851 - protein, 253 aa, Artificial Sequence
  Description of Artificial Sequence: Synthetic scFv sequence
EVQLLESGGGLVQTGGSLRLSCAASGFTFSDYAMSWVRQAPGKGLEWVSWIYPGDSSIYYADSVKGRFTISRDNSKNTLYLQMNSLRAEDTAVYYCARLLSIDQAQLHYYYDAMDVWGQGTLVTVSSGGGGSGGGGSGGGGSQSVLTQPPSPSGTPGQRVTISCTGSSSNIGNYYVYWYQQLPGTAPKLLIYANSHRPSGVPDRFSGSKSGTSASLAISGLRSEDEADYYCGSWDDSLSAYVFGGGTKLTVLG

SEQ ID NO: 205852 - protein, 251 aa, Artificial Sequence
  Description of Artificial Sequence: Synthetic scFv sequence
AIQMTQSPSSLSASVGDRVTITCRASQSISSYLNWYQQKPGKAPKLLIHAASNLQSGVPSRFSGSGSGTDFTLTISSLQPEDFATYYCQQSYSTPLTFGGGTKVEIKLGSGGSGGGGSGGGGSGGGGSGGSGGEVQLLESGGGLVQPGGSLRLSCAASGFTFSHYEMGWVRQAPGKGLEWVSYISSSGGWTAYADSVKGRFTISRDNSKNTLYLQMNSLRAEDTAVYYCARIGYADAFDIWGQGTTVTVSS

SEQ ID NO: 205853 - protein, 248 aa, Artificial Sequence
  Description of Artificial Sequence: Synthetic scFv sequence
EVQLLESGGGLVQPGGSLRLSCAASGFTFSGYIMWWVRQAPGKGLEWVSVISPSGGDTWYADSVKGRFTISRDNSKNTLYLQMNSLRAEDTAVYYCATAGDYWGQGTLVTVSSVGSGGSGGGGSGGGGSGGGGSGGSGGQSELTQPPSASGTPGQRVTISCSGSSSNIGRNPVNWYQHLPGTAPKLLIYGDNQRPSGVPDRFSGSRSGTSASLAISGLQSEDEADYYCAAWDDSLNGVVFGGGTKLTV

SEQ ID NO: 205854 - protein, 254 aa, Artificial Sequence
  Description of Artificial Sequence: Synthetic scFv sequence
EVQLLESGGGLVQPGGSLRLSCAASGFTFSKYDMHWVRQAPGKGLEWVSVISPSGGWTSYADSVKGRFTISRDNSKNTLYLQMNSLRAEDTAMYYCARDDYSKGRDAFDIWGQGTLVTVSSVGSGGSGGGGSGGGGSGGGGSGGSGGDIQLTQSPSSLSASVGDRVTITCRASQSISSYLNWYQQKPGKAPKLLIYAASSLQSGVPSRFSGSGSGTDFTLTISSLQPEDFATYYCQQSYSTPYTFGQGTKLEIK

SEQ ID NO: 205855 - protein, 252 aa, Artificial Sequence
  Description of Artificial Sequence: Synthetic scFv sequence
EVQLLESGGGLVQPGGSLRLSCAASGFTFSTYDMHWVRQAPGKGLEWVSVISPSGGWTAYADSVKGRFTISRDNSKNTLYLQMNSLRAEDTAVYYCARAAAGYDAFDIWGQGTMVTVSSVGSGGSGGGGSGGGGSGGGGSGGSGGEIVLTQSPSPLSASVGDRVTITCRASHNINKYLNWYQQKPGKAPKLLIFGASSLRSGVPSRFSGSGSGTDFTLTISSLEPEDLATYFCQQTYNTPLTFGGGTKLEIK

SEQ ID NO: 205856 - protein, 255 aa, Artificial Sequence
  Description of Artificial Sequence: Synthetic scFv sequence
EVQLLESGGGLVQPGGSLRLSCAASGFTFSWYDMDWVRQAPGKGLEWVSVISPSGGWTAYADSVKGRFTISRDNSKNTLYLQMNSLRAEDTAVYYCARDSSGYYSPDAFDIWGQGTLVTVSSVGSGGSGGGGSGGGGSGGGGSGGSGGNIQMTQSPSSLSASVGDRVTITCRASQSISSYLNWYQQKPGKAPKLLIYDASSLQSGVPLRFSGSGSGTDFTLTISSLQPEDFATYYCQQSYSTPLTFGGGTKVDIK

SEQ ID NO: 205857 - protein, 254 aa, Artificial Sequence
  Description of Artificial Sequence: Synthetic scFv sequence
EVQLLESGGGLVQPGGSLRLSCAASGFTFSWYDMVWVRQAPGKGLEWVSVISPSGGWTSYADSVKGRFTISRDNSKNTLYLQMNSLRAEDTAVYYCARDHSGYDSEYFDYWGQGTLVTVSSVGSGGSGGGGSGGGGSGGGGSGGSGGNIQMTQSPSSLSASVGDRVTITCRASQSISSYLNWYQQKPGKAPKLLIYAASSLQSGVPSRFSGSGSGTDFTLTISSLQPEDFATYYCQQSYSTPYTFGQGTKLEIK

SEQ ID NO: 205858 - protein, 260 aa, Artificial Sequence
  Description of Artificial Sequence: Synthetic scFv sequence
MDFQVQIFSFLLISASVIMSRGDIQMTQSPSSVSASIGDRVTITCRASQGIDNWLGWYQQKPGKAPKLLIYDASNLDTGVPSRFSGSGSGTYFTLTISSLQAEDFAVYFCQQAKAFPPTFGGGTKVDIKGSTSGSGKPGSGEGSEVQLVQSGGGLVKPGGSLRLSCAASGFTFSSYSMNWVRQAPGKGLEWVSSISSSSSYIYYADSVKGRFTISRDNAKNSLYLQMNSLRAEDTAVYYCARVTDAFDIWGQGTMVTVSS

SEQ ID NO: 205859 - protein, 265 aa, Artificial Sequence
  Description of Artificial Sequence: Synthetic scFv sequence
MGWSCIILFLVATATGVHSEVQLVETGGGLVQPGNSLKLSCATSGFIFSTTWMNWIRQTPGKRLEWLAQIEDKSNNYFISYSESVKGRFTISRDDSKSSVYLQMNNLKEEDTAIYYCSWKYRSNYYFDYWGQGVMVTVSSGSTSGSGKPGSGEGSDIVLTQSPALAVSLEQRATISCKTSQNVDYYGISYLHWYQQKPGQQPKLLIYEGSNLASGIPARFSGSGSGTDFTLTIDPVEADDIVTYYCQQSKDYPYTFGAGTKLELK

SEQ ID NO: 205860 - protein, 250 aa, Artificial Sequence
  Description of Artificial Sequence: Synthetic scFv sequence
DIQMTQSPSSLSASVGDRVTITCRASQSISSYLNWYQQKPGKAPKLLIYAASSLQSGVPSRFSGSGSGTDFTLTISSLQPEDFATYYCQQSYSTPLTFGGGTKVDIKRSRGGGGSGGGGSGGGGSLEMAQVQLQQSGPGLVKPSQTLSLTCAISGDSVSSNSAAWNWIRQSPSRGLEWLGRTYYGSKWYNDYAVSVKSRITINPDTSKNQFSLQLNSVTPEDTAVYYCARGRLGDAFDIWGQGTMVTVSS

SEQ ID NO: 205861 - protein, 246 aa, Artificial Sequence
  Description of Artificial Sequence: Synthetic scFv sequence
DIQMTQSPSTLSASVGDRVTITCRASQNINKWLAWYQQRPGKAPQLLIYKASSLESGVPSRFSGSGSGTEYTLTISSLQPDDFATYYCQQYNSYATFGQGTKVEIKRSRGGGGSGGGGSGGGGSLEMAQVQLVQSGAEVKKPGESLKISCKGSGYNFSNKWIGWVRQLPGRGLEWIAIIYPGYSDITYSPSFQGRVTISADTSINTAYLHWHSLKASDTAMYYCVRHTALAGFDYWGLGTLVTVSS

SEQ ID NO: 205862 - protein, 243 aa, Artificial Sequence
  Description of Artificial Sequence: Synthetic scFv sequence
DVQLVQSGAEVKKPGASVKVSCKASGYTFTRYTMHWVRQAPGQGLEWIGYINPSRGYTNYADSVKGRFTITTDKSTSTAYMELSSLRSEDTATYYCARYYDDHYCLDYWGQGTTVTVSSGEGTSTGSGGSGGSGGADDIVLTQSPATLSLSPGERATLSCRASQSVSYMNWYQQKPGKAPKRWIYDTSKVASGVPARFSGSGSGTDYSLTINSLEAEDAATYYCQQWSSNPLTFGGGTKVEIK

SEQ ID NO: 205863 - protein, 253 aa, Artificial Sequence
  Description of Artificial Sequence: Synthetic scFv sequence
QAVVTQPPSASGTPGQRVTISCSGSSSNIGSNTVNWYQQVPGTAPKLLIYSNNQRPSGVPDRFSGSKSGTSASLAISGLQSEDEADYYCAAWDDSLNGWVFGGGTKLTVLGSRGGGGSGGGGSGGGGSLEMAQMQLVQSGAEVKEPGESLRISCKGSGYSFTNFWISWVRQMPGKGLEWMGRVDPGYSYSTYSPSFQGHVTISADKSTSTAYLQWNSLKASDTAMYYCARVQYSGYYDWFDPWGQGTLVTVSS

SEQ ID NO: 205864 - protein, 251 aa, Artificial Sequence
  Description of Artificial Sequence: Synthetic scFv sequence
QSVLTQPPSVSGAPGQRVTISCTGSSSNIGAGYDVHWYQQLPGTAPKLLIYGNSNRPSGVPDRFSGSKSGTSASLAISGLQSEDEADYYCAAWDDSLNGYVFGTGTKLTVLGSRGGGGSGGGGSGGGGSLEMAEVQLVETGGGLLQPGGSLRLSCAASGFSVSGTYMGWVRQAPGKGLEWVALLYSGGGTYHPASLQGRFIVSRDSSKNMVYLQMNSLKAEDTAVYYCAKGGAGGGHFDSWGQGTLVTVSS

SEQ ID NO: 205865 - protein, 249 aa, Artificial Sequence
  Description of Artificial Sequence: Synthetic scFv sequence
QSVVTQPPSVSVAPGKTARITCGRNNIGSKSVHWYQQKPGQAPVLVVYDDSDRPSGIPERFSGSNSGNTATLTISRVEAGDEADYYCQVWDSSSDHVVFGGGTKLTVLGSRGGGGSGGGGSGGSLEMAEVQLVQSGGGVVRPGGSLRLSCAASGFTFDDYGMSWVRQAPGKGLEWVSGINWNGGSTGYADSVRGRFTISRDNAKNSLYLQMNSLRAEDTALYYCARERGYGYHDPHDYWGQGTLVTVSS

SEQ ID NO: 205866 - protein, 250 aa, Artificial Sequence
  Description of Artificial Sequence: Synthetic scFv sequence
QTVVTQPPSASGTPGQRVTISCSGSSSNIGSNYVYWYQQLPGTAPKLLIYRSNQRPSGVPDRFSGSKSGTSASLAISGPRSVDEADYYCAAWDDSLNGVVFGGGTKLTVLGSRGGGGSGGGGSGGGSLEMAQVQLVQSGAEVKKPGSSVKVSCKASGGTFSSYAISWVRQAPGQGLEWMGGIIPIFGTANYAQKFQGRVTITADESTSTAYMELSSLRSEDTAVYYCARRIPPYYGMDVWGQGTTVTVSS

SEQ ID NO: 205867 - protein, 243 aa, Artificial Sequence
  Description of Artificial Sequence: Synthetic scFv sequence
QLVESGGGLVQPGRSLRLSCTTSGFTFGDYAMIWARQAPGKGLEWVSSISSSSSYIYYADSVKGRFTISRDNAKNSLYLQMNSLRAEDTAVYYCARERYDFWSGMDVWGKGTTVTVSSGGGGSGGGGSGGSAQSALTQPASVSGSPGQSITISCTGTSSDVGSYNLVSWYQQHPGKAPKLMIYEGSKRPSGVSNRFSGSKSGNAASLTISGLQAEDEADYYCQSYDSSLSVVFGGGTKLTVLG

SEQ ID NO: 205868 - protein, 258 aa, Artificial Sequence
  Description of Artificial Sequence: Synthetic scFv sequence
SRAAQPAMAQVQLQQSGAELVKPGASVKISCKASGYSFTGYFMNWVKQSHGKSLEWIGRIHPYDGDTFYNQNFKDKATLTVDKSSNTAHMELLSLTSEDFAVYYCTRYDGSRAMDYWGQGTTVTVSSGGGGSGGGGSETGGGGSDIELTQSPASLAVSLGQRAIISCKASQSVSFAGTSLMHWYHQKPGQQPKLLIYRASNLEAGVPTRFSGSGSKTDFTLNIHPVEEEDAATYYCQQSREYPYTFGGGTKLEIKRAA

SEQ ID NO: 205869 - protein, 243 aa, Artificial Sequence
  Description of Artificial Sequence: Synthetic scFv sequence
DIQMTQSPSSLSASVGDRVTITCRASQDVNTAVAWYQQKPGKAPKLLIYSASFLYSGVPSRFSGSRSGTDFTLTISSLQPEDFATYYCQQHYTTPPTFGQGTKVEIKGSTSGSGKPGSGEGSGEVQLVESGGGLVQPGGSLRLSCAASGFNIKDTYIHWVRQAPGKGLEWVARIYPTNGYTRYADSVKGRFTISADTSKNTAYLQMNSLRAEDTAVYYCSRWGGDGFYAMDVWGQGTLVTVSS

SEQ ID NO: 205870 - DNA, 729 bp, Artificial Sequence
  Description of Artificial Sequence: Synthetic scFv sequence
gatatccagatgacccagtccccgagctccctgtccgcctctgtgggcgatagggtcaccatcacctgccgtgccagtcaggatgtgaatactgctgtagcctggtatcaacagaaaccaggaaaagctccgaaactactgatttactcggcatccttcctttattctggagtcccttctcgcttctctggatctagatctgggacggatttcactctgaccatcagcagtctgcagccggaagacttcgcaacttattactgtcagcaacattatactactcctcccacgttcggacagggtaccaaggtggagatcaaagggtctacatctggatctgggaagccgggttctggtgagggttctggtgaggttcagctggtggagtctggcggtggcctggtgcagccagggggctcactccgtttgtcctgtgcagcttctggcttcaacattaaagacacctatatacactgggtgcgtcaggccccgggtaagggcctggaatgggttgcaaggatttatcctacgaatggttatactagatatgccgatagcgtcaagggccgtttcactataagcgcagacacatccaaaaacacagcctacctgcagatgaacagcctgcgtgctgaggacactgccgtctattattgttctagatggggaggggacggcttctatgctatggacgtgtggggtcaaggaaccctggtcaccgtctcctcg

SEQ ID NO: 205871 - protein, 120 aa, Homo sapiens
WRRKRKEKQSETSPKEFLTIYEDVKDLKTRRNHEQEQTFPGGGSTIYSMIQSQSSAPTSQEPAYTLYSLIQPSRKSGSRKRNHSPSFNSTIYEVIGKSQPKAQNPARLSRKELENFDVYS

SEQ ID NO: 205872 - protein, 220 aa, Homo sapiens; identical to SEQ ID NO: 13057

SEQ ID NO: 205873 - protein, 187 aa, Homo sapiens
RRACRKRIRQKLHLCYPVQTSQPKLELVDSRPRRSSTQLRSGASVTEPVAEERGLMSQPLMETCHSVGAAYLESLPLQDASPAGGPSSPRDLPEPRVSTEHTNNKIEKIYIMKADTVIVGTVKAELPEGRGLAGPAEPELEEELEADHTPHYPEQETEPPLGSCSDVMLSVEEEGKEDPLPTAASGK

SEQ ID NO: 205874 - protein, 187 aa, Homo sapiens; identical to SEQ ID NO: 205873

SEQ ID NO: 205875 - protein, 54 aa, Homo sapiens
HIWQLRSQCMWPRETQLLLEVPPSTEDARSCQFPEEERGERSAEEKGRLGDLWV

SEQ ID NO: 205876 - protein, 60 aa, Homo sapiens
CVKRRKPRGDVVKVIVSVQRKRQEAEGEATVIEALQAPPDVTTVAVEETIPSFTGRSPNH

SEQ ID NO: 205877 - protein, 38 aa, Homo sapiens
CWLTKKKYSSSVHDPNGEYMFMRAVNTAKKSRLTDVTL

SEQ ID NO: 205878 - protein, 54 aa, Homo sapiens
HLWRRQWRPRRFSALEQGIHPPQAQSKIEELEQEPEPEPEPEPEPEPEPEPEQL

SEQ ID NO: 205879 - protein, 42 aa, Homo sapiens
ALYLLRRDQRLPPDAHKPPGGGSFRTPIQEEQADAHSTLAKI

SEQ ID NO: 205880 - protein, 37 aa, Homo sapiens
RRDQRLPPDAHKPPGGGSFRTPIQEEQADAHSTLAKI

SEQ ID NO: 205881 - protein, 49 aa, Homo sapiens
HQRRKYRSNKGESPVEPAEPCRYSCPREEEGSTIPIQEDYRKPEPACSP

SEQ ID NO: 205882 - protein, 111 aa, Homo sapiens
RRHQGKQNELSDTAGREINLVDAKLKSEQTEASTRQNSQVLLSETGIYDNDPDLCFRMQEGSEVYSNPCLEENKPGIVYASLNHSVIGPNSRLARNVKEAPTEYASICVRS

SEQ ID NO: 205883 - protein, 111 aa, Homo sapiens
RRHQGKQNELSDTAGREINLVDAHLKSEQTEASTRQNSQVLLSETGIYDNDPDLCFRMQEGSEVYSNPCLEENKPGIVYASLNHSVIGPNSRLARNVKEAPTEYASICVRS

SEQ ID NO: 205884 - protein, 114 aa, Homo sapiens
CCLRRHQGKQNELSDTAGREINLVDAHLKSEQTEASTRQNSQVLLSETGIYDNDPDLCFRMQEGSEVYSNPCLEENKPGIVYASLNHSVIGPNSRLARNVKEAPTEYASICVRS

SEQ ID NO: 205885 - protein, 44 aa, Homo sapiens
FWVRSKRSRLLHSDYMNMTPRRPGPTRKHYQPYAPPRDFAAYRS

SEQ ID NO: 205886 - protein, 41 aa, Homo sapiens
RSKRSRGGHSDYMNMTPRRPGPTRKHYQPYAPPRDFAAYRS

SEQ ID NO: 205887 - protein, 43 aa, Homo sapiens
RSKRSRGGHSDYIVINMTPRRPGPTRKHYQPYAPPRDFAAYRS

SEQ ID NO: 205888 - protein, 5 aa, Homo sapiens
DKTHT

SEQ ID NO: 205889 - protein, 4 aa, Homo sapiens
CPPC

SEQ ID NO: 205890 - protein, 15 aa, Homo sapiens
CPEPKSCDTPPPCPR

SEQ ID NO: 205891 - protein, 12 aa, Homo sapiens
ELKTPLGDTTHT

SEQ ID NO: 205892 - protein, 10 aa, Homo sapiens
KSCDKTHTCP

SEQ ID NO: 205893 - protein, 7 aa, Homo sapiens
KCCVDCP

SEQ ID NO: 205894 - protein, 7 aa, Homo sapiens
KYGPPCP

SEQ ID NO: 205895 - protein, 16 aa, Homo sapiens
VEPKSPDKTHTCPPCP

SEQ ID NO: 205896 - protein, 16 aa, Homo sapiens
LDPKSSDKTHTCPPCP

SEQ ID NO: 205897 - protein, 39 aa, Homo sapiens
IEVMYPPPYLDNEKSNGTIIHVKGKHLCPSPLFPGPSKP

SEQ ID NO: 205898 - protein, 12 aa, Homo sapiens
GGAVHTRGLDFA

SEQ ID NO: 205899 - protein, 45 aa, Homo sapiens
TTTPAPRPPTPAPTIASQPLSLRPEACRPAAGGAVHTRGLDFACD

SEQ ID NO: 205900 - DNA, 135 bp, Artificial Sequence
  Description of Artificial Sequence: Synthetic Construct
accacaaccccagcacctcgcccaccaacaccagcaccaaccatcgcatcccagccactgtctctgaggcccgaggcatgtaggcctgcagcaggaggcgccgtgcacaccaggggcctggactttgcctgcgat

SEQ ID NO: 205901 - DNA, 135 bp, Artificial Sequence
  Description of Artificial Sequence: Synthetic Construct
acaacaaccccagcacccagacctccaacacctgcaccaaccatcgcaagccagcctctgtccctgaggcccgaggcatgtaggccagcagcaggaggcgccgtgcacacccggggcctggactttgcctgcgat

SEQ ID NO: 205902 - DNA, 135 bp, Artificial Sequence
  Description of Artificial Sequence: Synthetic Construct
accacaaccccagcaccccgcccaccaacacctgcaccaaccatcgcctcccagccactgtctctgaggcccgaggcatgtaggcctgcagcaggaggcgccgtgcacaccaggggcctggactttgcctgcgat

SEQ ID NO: 205903 - DNA, 135 bp, Artificial Sequence
  Description of Artificial Sequence: Synthetic Construct
accacaaccccagcacccagaccaccaacacctgcaccaaccatcgcaagccagcctctgtccctgcgcccagaggcatgcaggccagcagcaggaggagcagtgcacacccggggcctggacttcgcatgtgat

SEQ ID NO: 205904 - DNA, 135 bp, Artificial Sequence
  Description of Artificial Sequence: Synthetic Construct
accacaaccccagcacctcgcccaccaacaccagcaccaaccatcgcatcccagccactgtctctgcgccccgaggcatgcaggcctgcagcaggcggcgccgtgcacaccaggggcctggacttcgcctgtgat

SEQ ID NO: 205905 - DNA, 135 bp, Artificial Sequence
  Description of Artificial Sequence: Synthetic Construct
accacgacgccagcgccgcgaccaccaacaccggcgcccaccatcgcgtcgcagcccctgtccctgcgcccagaggcgtgccggccagcggcggggggcgcagtgcacacgagggggctggacttcgcctgtgat

SEQ ID NO: 205906 - protein, 48 aa, Homo sapiens
AKPTTTPAPRPPTPAPTIASQPLSLRPEACRPAAGGAVHTRGLDFACD

SEQ ID NO: 205907 - protein, 79 aa, Homo sapiens
TTTPAPRPPTPAPTIASQPLSLRPEACRPAAGGAVHTRGLDFACDEPKSPDKTHTCPPCPAPPVAGPSVFLFPPKPKDT

SEQ ID NO: 205908 - protein, 51 aa, Homo sapiens
PAKPTTTPAPRPPTPAPTIASQPLSLRPEACRPAAGGAVHTRGLDFACDIY

SEQ ID NO: 205909 - protein, 69 aa, Homo sapiens
TTTPAPRPPTPAPTIASQPLSLRPEACRPAAGGAVHTRGLDFACDIYIWAPLAGTCGVLLLSLVITLYC

SEQ ID NO: 205910 - DNA, 207 bp, Homo sapiens
accacaaccccagcacctcgcccaccaacaccagcaccaaccatcgcatcccagccactgtctctgaggcccgaggcatgtaggcctgcagcaggaggcgccgtgcacaccaggggcctggactttgcctgcgatatctatatctgggcaccactggcaggaacatgtggcgtgctgctgctgtccctggtcatcaccctgtattgc

SEQ ID NO: 205911 - DNA, 207 bp, Homo sapiens
accacgacgccagcgccgcgaccaccaacaccggcgcccaccatcgcgtcgcagcccctgtccctgcgcccagaggcgtgccggccagcggcggggggcgcagtgcacacgagggggctggacttcgcctgtgatatctacatctgggcgcccttggccgggacttgtggggtccttctcctgtcactggttatcaccctttactgc

SEQ ID NO: 205912 - DNA, 207 bp, Homo sapiens
accacgacgccagcgccgcgaccaccaacaccggcgcccaccatcgcgtcgcagcccctgtccctgcgcccagaggcgtgccggccagcggcggggggcgcagtgcacacgagggggctggacttcgcctgtgatatctacatctgggcgcccttggccgggacttgtggggtccttctcctgtcactggttatcactttactgccc

SEQ ID NO: 205913 - DNA, 207 bp, Homo sapiens
acaacaaccccagcacccagacctccaacacctgcaccaaccatcgcaagccagcctctgtccctgaggcccgaggcatgtaggccagcagcaggaggcgccgtgcacacccggggcctggactttgcctgcgatatctatatctgggcaccactggcaggaacatgtggcgtgctgctgctgtccctggtcatcaccctgtattgc

SEQ ID NO: 205914 - DNA, 207 bp, Homo sapiens
accacaaccccagcaccccgcccaccaacacctgcaccaaccatcgcctcccagccactgtctctgaggcccgaggcatgtaggcctgcagcaggaggcgccgtgcacaccaggggcctggactttgcctgcgatatctacatctgggcacctctggcaggaacatgtggcgtgctgctgctgtccctggtcatcaccctgtattgc

SEQ ID NO: 205915 - DNA, 207 bp, Homo sapiens
accacaaccccagcacccagaccaccaacacctgcaccaaccatcgcaagccagcctctgtccctgcgcccagaggcatgcaggccagcagcaggaggagcagtgcacacccggggcctggacttcgcatgtgatatctacatctgggcaccactggcaggaacatgcggcgtgctgctgctgtccctggtcatcaccctgtattgt

SEQ ID NO: 205916 - DNA, 207 bp, Homo sapiens
accacaaccccagcacctcgcccaccaacaccagcaccaaccatcgcatcccagccactgtctctgcgccccgaggcatgcaggcctgcagcaggcggcgccgtgcacaccaggggcctggacttcgcctgtgatatctacatctgggcacctctggcaggaacatgcggcgtgctgctgctgtctctggtcatcaccctgtattgt

SEQ ID NO: 205917 - DNA, 207 bp, Homo sapiens
accacaaccccagcacctagaccaccaacaccagcacccaccatcgcctctcagccactgagcctgcgccccgaggcatgtaggcctgcagcaggcggcgccgtgcacaccaggggcctggactttgcctgcgatatctacatctgggcaccactggcaggaacatgtggcgtgctgctgctgtccctggtcatcaccctgtactgc

SEQ ID NO: 205918 - protein, 44 aa, Homo sapiens
TTPAPRPPTPAPTIASQPLSLRPEACRPAAGGAVHTRGLDFACD

SEQ ID NO: 205919 - protein, 47 aa, Homo sapiens
TTTPAPRPPTPAPTIASQPLSLRPEACRPAAGGAVHTRGLDFACDIY

SEQ ID NO: 205920 - protein, 11 aa, Homo sapiens
LDKTHTCPPCP

SEQ ID NO: 205921 - protein, 16 aa, Homo sapiens
GLAVSTISSFFPPGYQ

SEQ ID NO: 205922 - protein, 282 aa, Homo sapiens
RWPESPKAQASSVPTAQPQAEGSLAKATTAPATTRNTGRGGEEKKKEKEKEEQEERETKTPECPSHTQPLGVYLLTPAVQDLWLRDKATFTCFVVGSDLKDAHLTWEVAGKVPTGGVEEGLLERHSNGSQSQHSRLTLPRSLWNAGTSVTCTLNHPSLPPQRLMALREPAAQAPVKLSLNLLASSDPPEAASWLLCEVSGFSPPNILLMWLEDQREVNTSGFAPARPPPQPGSTTFWAWSVLRVPAPPSPQPATYTCVVSHEDSRTLLNASRSLEVSYVTDH

SEQ ID NO: 205923 - protein, 246 aa, Homo sapiens
YVTVSSQDPAEPKSPDKTHTCPPCPAPELLGGPSVFLFPPKPKDTLMISRTPEVTCVVVDVSHEDPEVKFNWYVDGVEVHNAKTKPREEQYNSTYRVVSVLTVLHQDWLNGKEYKCKVSNKALPAPIEKTISKAKGQPREPQVYTLPPSRDELTKNQVSLTCLVKGFYPSDIAVEWESNGQPENNYKTTPPVLDSDGSFFLYSKLTVDKSRWQQGNVFSCSVMHEALHNHYTQKSLSLSPGKKDPK

SEQ ID NO: 205924 - protein, 45 aa, Homo sapiens
KPTTTPAPRPPTPAPTIASQPLSLRPEACRPAAGGAVHTRGLDFA

SEQ ID NO: 205925 - protein, 16 aa, Homo sapiens
LEPKSCDKTHTCPPCP

SEQ ID NO: 205926 - protein, 43 aa, Homo sapiens
KPTTTPAPRPPTPAPTIASQPLSLRPEACRPAAGGAVHTRGLD

SEQ ID NO: 205927 - protein, 15 aa, Homo sapiens
EPKSCDKTHTCPPCP

SEQ ID NO: 205928 - protein, 16 aa, Homo sapiens
ELKTPLGDTHTCPRCP

SEQ ID NO: 205929 - protein, 15 aa, Homo sapiens
EPKSCDTPPPCPRCP

SEQ ID NO: 205930 - protein, 12 aa, Homo sapiens
ESKYGPPCPSCP

SEQ ID NO: 205931 - protein, 12 aa, Homo sapiens
ERKCCVECPPCP

SEQ ID NO: 205932 - protein, 229 aa, Homo sapiens
ESKYGPPCPPCPAPEFLGGPSVFLFPPKPKDTLMISRTPEVTCVVVDVSQEDPEVQFNWYVDGVEVHNAKTKPREEQFNSTYRVVSVLTVLHQDWLNGKEYKCKVSNKGLPSSIEKTISKAKGQPREPQVYTLPPSQEEMTKNQVSLTCLVKGFYPSDIAVEWESNGQPENNYKTTPPVLDSDGSFFLYSRLTVDKSRWQEGNVFSCSVMHEALHNHYTQKSLSLSLGK

SEQ ID NO: 205933 - protein, 119 aa, Homo sapiens
ESKYGPPCPPCPGQPREPQVYTLPPSQEEMTKNQVSLTCLVKGFYPSDIAVEWESNGQPENNYKTTPPVLDSDGSFFLYSRLTVDKSRWQEGNVFSCSVMHEALHNHYTQKSLSLSLGK

SEQ ID NO: 205934 - protein, 281 aa, Homo sapiens
RWPESPKAQASSVPTAQPQAEGSLAKATTAPATTRNTGRGGEEKKKEKEKEEQEERETKTPECPSHTQPLGVYLLTPAVQDLWLRDKATFTCFVVGSDLKDAHLTWEVAGKVPTGGVEEGLLERHSNGSQSQHSRLTLPRSLWNAGTSVTCTLHPSLPPQRLMALREPAAQAPVKLSLNLLASSDPPEAASWLLCEVSGFSPPNILLMWLEDQREVNTSGFAPARPPPQPGSTTFWAWSVLRVPAPPSPQPATYTCVVSHEDSRTLLNASRSLEVSYVTDH

SEQ ID NO: 205935 - protein, 283 aa, Homo sapiens
RWPESPKAQASSVPTAQPQAEGSLAKATTAPATTRNTGRGGEEKKKEKEKEEQEERETKTPECPSHTQPLGVYLLTPAVQDLWLRDKATFTCFVVGSDLKDAHLTWEVAGKVPTGGVEEGLLERHSNGSQSQHSRLTLPRSLWNAGTSVTCTLNHPSLPPQRLMALREPAAQAPVKLSLNLLASSDPPEAASWLLCEVSGFSPPNILLMVVLEDQREVNTSGFAPARPPPQPGSTTFWAWSVLRVPAPPSPQPATYTCVVSHEDSRTLLNASRSLEVSYVTDH

SEQ ID NO: 205936 - protein, 58 aa, Homo sapiens
ESPKAQASSVPTAQPQAEGSLAKATTAPATTRNTGRGGEEKKKEKEKEEQEERETKTP

SEQ ID NO: 205937 - protein, 234 aa, Homo sapiens
AEPKSPDKTHTCPPCPAPPVAGPSVFLFPPKPKDTLMIARTPEVTCVVVDVSHEDPEVKFNWYVDGVEVHNAKTKPREEQYNSTYRVVSVLTVLHQDWLNGKEYKCKVSNKALPAPIEKTISKAKGQPREPQVYTLPPSRDELTKNQVSLTCLVKGFYPSDIAVEWESNGQPENNYKTTPPVLDSDGSFFLYSKLTVDKSRWQQGNVFSCSVMHEALHNHYTQKSLSLSPGKKD

SEQ ID NO: 205938 - protein, 234 aa, Homo sapiens; identical to SEQ ID NO: 205937

SEQ ID NO: 205939 - protein, 20 aa, Homo sapiens
AEPKSPDKTHTCPPCPKDPK

SEQ ID NO: 205940 - protein, 233 aa, Homo sapiens
EPKSPDKTHTCPPCPAPPVAGPSVFLFPPKPKDTLMIARTPEVTCVVVDVSHEDPEVKFNWYVDGVEVHNAKTKPREEQYNSTYRVVSVLTVLHQDWLNGKEVKCKVSNKALPAPIEKTISKAKGQPREPQVYTLPPSRDELTKNQVSLTCLVKGFYPSDIAVEWESNGQPENNYKTTPPVLDSDGSFFLVSKLTVDKSRWQQGNVFSCSVMHEALHNHYTQKSLSLSPGKKD

SEQ ID NO: 205941 - protein, 13 aa, Homo sapiens
SVFLFPPKPKDTL

SEQ ID NO: 205942 - protein, 231 aa, Homo sapiens
EPKSPDKTHTCPPCPAPPVAGPSVFLFPPKPKDTLMIARTPEVTCVVVDVSHEDPEVKFNWYVDGVEVHNAKTKPREEQYNSTYRVVSVLTVLHQDWLNGKEYKCKVSNKALPAPIEKTISKAKGQPREPQVYTLPPSRDELTKNQVSLTCLVKGFYPSDIAVEWESNGQPENNYKTTPPVLDSDGSFFLYSKLTVDKSRWQQGNVFSCSVMHEALHNHYTQKSLSLSPGK

SEQ ID NO: 205943 - protein, 235 aa, Homo sapiens
EPKSPDKTHTCPPCPAPPVAGPSVFLFPPKPKDTLMIARTPEVTCVVVDVSHEDPEVKFNWYVDGVEVHNAKTKPREEQYNSTYRVVSVLTVLHQDWLNGKEYKCKVSNKALPAPIEKTISKAKGQPREPQVYTLPPSRDELTKNQVSLTCLVKGFYPSDIAVEWESNGQPENNYKTTPPVLDSDGSFFLYSKLTVDKSRWQQGNVFSCSVMHEALHNHYTQKSLSLSPGKKDPK

SEQ ID NO: 205944 - protein, 223 aa, Homo sapiens
VECPPCPAPPVAGPSVFLFPPKPKDTLMISRTPEVTCVVVDVSHEDPEVKFNWYVDGVEVHNAKTKPREEQYNSTYRVVSVLTVLHQDWLNGKEYKCKVSNKGLPSSIEKTISKAKGQPREPQVYTLPPSREEMTKNQVSLTCLVKGFYPSDIAVEWESNGQPENNYKTTPPVLDSDGSFFLYSKLTVDKSRWQQGNVFSCSVMHEALHNHYTQKSLSLSPGK

SEQ ID NO: 205945 - protein, 235 aa, Homo sapiens
DPAEPKSPDKTHTCPPCPAPPVAGPSVFLFPPKPKDTLMIARTPEVTCVVVDVSHEDPEVKFNWYVDGVEVHNAKTKPREEQYNSTYRVVSVLTVLHQDWLNGKEYKCKVSNKALPAPIEKTISKAKGQPREPQVYTLPPSRDELTKNQVSLTCLVKGFYPSDIAVEWESNGQPENNYKTTPPVLDSDGSFFLYSKLTVDKSRWQQGNVFSCSVMHEALHNHYTQKSLSLSPGKK

SEQ ID NO: 205946 - protein, 17 aa, Homo sapiens
ELKTPLGDTTHTCPRCP

SEQ ID NO: 205947 - protein, 61 aa, Homo sapiens
ELKTPLGDTHTCPRCPEPKSCDTPPPCPRCPEPKSCDTPPPCPRCPEPKSCDTPPPCPRCP

SEQ ID NO: 205948 - protein, 230 aa, Homo sapiens
ESKYGPPCPPCPAPEFLGGPSVFLFPPKPKDTLMISRTPEVTCVVVDVSQEDPEVQFNWYVDGVEVHNAKTKPREEQFNSTYRVVSVLTVLHQDWLNGKEYKCKVSNKGLPSSIEKTISKAKGQPREPQVYTLPPSQEEMTKNQVSLTCLVKGFYPSDIAVEWESNGQPENNYKTTPPVLDSDGSFFLYSRLTVDKSRWQEGNVFSCSVMHEALHNHYTQKSLSLSLGKM

SEQ ID NO: 205949 - protein, 230 aa, Homo sapiens
ESKYGPPCPPCPAPEFEGGPSVFLFPPKPKDTLMISRTPEVTCVVVDVSQEDPEVQFNWYVDGVEVHNAKTKPREEQFQSTYRVVSVLTVLHQDWLNGKEYKCKVSNKGLPSSIEKTISKAKGQPREPQVYTLPPSQEEMTKNQVSLTCLVKGFYPSDIAVEWESNGQPENNYKTTPPVLDSDGSFFLYSRLTVDKSRWQEGNVFSCSVMHEALHNHYTQKSLSLSLGKM

SEQ ID NO: 205950 - protein, 12 aa, Homo sapiens
SPNMVPHAHHAQ

SEQ ID NO: 205951 - protein, 107 aa, Homo sapiens
GQPREPQVYTLPPSQEEMTKNQVSLTCLVKGFYPSDIAVEWESNGQPENNYKTTPPVLDSDGSFFLYSRLTVDKSRWQEGNVFSCSVMHEALHNHYTQKSLSLSLGK

SEQ ID NO: 205952 - protein, 129 aa, Homo sapiens
ESKYGPPCPPCPGGGSSGGGSGGQPREPQVYTLPPSQEEMTKNQVSLTCLVKGFYPSDIAVEWESNGQPENNYKTTPPVLDSDGSFFLYSRLTVDKSRWQEGNVFSCSVMHEALHNHYTQKSLSLSLGK

SEQ ID NO: 205953 - protein, 229 aa, Homo sapiens
ESKYGPPCPSCPAPEFEGGPSVFLFPPKPKDTLMISRTPEVTCVVVDVSQEDPEVQFNWYVDGVEVHQAKTKPREEQFNSTYRVVSVLTVLHQDWLNGKEYKCKVSNKGLPSSIEKTISKAKGQPREPQVYTLPPSQEEMTKNQVSLTCLVKGFVPSDIAVEWESNGQPENNYKTTPPVLDSDGSFFLYSRLTVDKSRWQEGNVFSCSVMHEALHNHYTQKSLSLSLGK

SEQ ID NO: 205954 - protein, 229 aa, Homo sapiens
ESKYGPPCPPCPAPEFEGGPSVFLFPPKPKDTLMISRTPEVTCVVVDVSQEDPEVQFNWYVDGVEVHQAKTKPREEQFNSTYRVVSVLTVLHQDWLNGKEYKCKVSNKGLPSSIEKTISKAKGQPREPQVYTLPPSQEEMTKNQVSLTCLVKGFVPSDIAVEWESNGQPENNYKTTPPVLDSDGSFFLYSRLTVDKSRWQEGNVFSCSVMHEALHNHYTQKSLSLSLGK

SEQ ID NO: 205955 - DNA, 36 bp, Homo sapiens
gaatctaagtacggaccgccctgccccccttgccct

SEQ ID NO: 205956 - protein, 12 aa, Homo sapiens
ESKYGPPCPPCP

SEQ ID NO: 205957 - protein, 9 aa, Homo sapiens
YGPPCPPCP

SEQ ID NO: 205958 - protein, 10 aa, Homo sapiens
KYGPPCPPCP

SEQ ID NO: 205959 - protein, 13 aa, Homo sapiens
EVVKYGPPCPPCP

SEQ ID NO: 205960 - protein, 229 aa, Homo sapiens
ESKYGPPCPSCPAPEFLGGPSVFLFPPKPKDTLMISRTPEVTCVVVDVSQEDPEVQFNWYVDGVEVHNAKTKPREEQFNSTYRVVSVLTVLHQDWLNGKEYKCKVSNKGLPSSIEKTISKAKGQPREPQVYTLPPSQEEMTKNQVSLTCLVKGFYPSDIAVEWESNGQPENNYKTTPPVLDSDGSFFLYSRLTVDLSRWQEGNVFSCSVMHEALHNHYTQKSLSLSLGK

SEQ ID NO: 205961 - protein, 22 aa, Homo sapiens
ESKYGPPCPPCPGGGSSGGGSG

SEQ ID NO: 205962 - protein, 231 aa, Homo sapiens
EPKSPDKTHTCPPCPAPPVAGPSVFLFPPKPKDTLMIARTPEVTCVVVDVSHEDPEVKFNWYVDGVEVHNAKTKPREEQYNSTYRVVSVLTVLHQDWLNGKEYKCKVSNKALPAPIEKTISKAKGQPREPQVYTLPPSRDELTKNQVSLTCLVKGFYPSDIAVEWESNGQPENNYKTIPPVLDSDGSFFLYSKLTVDKSRWQQGNVFSCSVMHEALHNHYTQKSLSLSPGK

SEQ ID NO: 205963 - protein, 231 aa, Homo sapiens
EPKSPDKTHTCPPCPAPPVAGPSVFLFPPKPKDTLMIARTPEVTCVVVDVSHEDPEVKFNWYVDGVEVHNAKTKPREEQYNSTYRVVSVLTVLHQDWLNGKEYKCKVSNKALPAPLEKTISKAKGQPREPQVYTLPPSRDELTKNQVSLTCLVKGFYPSDIAVEWESNGQPENNYKTIPPVLDSDGSFFLYSKLTVDKSRWQQGNVFSCSVMHEALHNHYTQKSLSLSPGK

SEQ ID NO: 205964 - protein, 236 aa, Homo sapiens
EPKSCDKTHTCPPCPAPELLGGPSVFLFPPKPKDTLMISRTPEVTCVVVDVSHEDPEVKFNWYVDGVEVHNAKTKPREEQYNSTYRVVSVLTVLHQDWLNGKEYKCKVSNKALPAPIEKTISKAKGQPREPQVYTLPPSRDELTKNQVSLTCLVKGFYPSDIAVEWESNGQPENNYKTTPPVLDSDGSFFLYSKLTVDKSRWQQGNVFSCSVMHEALHNHYTQKSLSLSPGKKDPK

SEQ ID NO: 205965 - DNA, 135 bp, Artificial Sequence; identical to SEQ ID NO: 205905
  Description of Artificial Sequence: Synthetic polynucleotide

SEQ ID NO: 205966 - DNA, 690 bp, Artificial Sequence
  Description of Artificial Sequence: Synthetic polynucleotide
gagagcaagtacggccctccctgccccccttgccctgcccccgagttcctgggcggacccagcgtgttcctgttcccccccaagcccaaggacaccctgatgatcagccggacccccgaggtgacctgtgtggtggtggacgtgtcccaggaggaccccgaggtccagttcaactggtacgtggacggcgtggaggtgcacaacgccaagaccaagccccgggaggagcagttcaatagcacctaccgggtggtgtccgtgctgaccgtgctgcaccaggactggctgaacggcaaggaatacaagtgtaaggtgtccaacaagggcctgcccagcagcatcgagaaaaccatcagcaaggccaagggccagcctcgggagccccaggtgtacaccctgccccctagccaagaggagatgaccaagaaccaggtgtccctgacctgcctggtgaagggcttctaccccagcgacatcgccgtggagtgggagagcaacggccagcccgagaacaactacaagaccaccccccctgtgctggacagcgacggcagcttcttcctgtacagccggctgaccgtggacaagagccggtggcaggagggcaacgtctttagctgctccgtgatgcacgaggccctgcacaaccactacacccagaagagcctgagcctgtccctgggcaagatg

SEQ ID NO: 205967 - DNA, 847 bp, Artificial Sequence
  Description of Artificial Sequence: Synthetic polynucleotide
aggtggcccgaaagtcccaaggcccaggcatctagtgttcctactgcacagccccaggcagaaggcagcctagccaaagctactactgcacctgccactacgcgcaatactggccgtggcggggaggagaagaaaaaggagaaagagaaagaagaacaggaagagagggagaccaagacccctgaatgtccatcccatacccagccgctgggcgtctatctcttgactcccgcagtacaggacttgtggcttagagataaggccacctttacatgtttcgtcgtgggctctgacctgaaggatgcccatttgacttgggaggttgccggaaaggtacccacagggggggttgaggaagggttgctggagcgccattccaatggctctcagagccagcactcaagactcacccttccgagatccctgtggaacgccgggacctctgtcacatgtactctaaatcatcctagcctgcccccacagcgtctgatggcccttagagagccagccgcccaggcaccagttaagcttagcctgaatctgctcgccagtagtgatcccccagaggccgccagctggctcttatgcgaagtgtccggctttagcccgcccaacatcttgctcatgtggctggaggaccagcgagaagtgaacaccagcggcttcgctccagcccggcccccaccccagccgggttctaccacattctgggcctggagtgtcttaagggtcccagcaccacctagcccccagccagccacatacacctgtgttgtgtcccatgaagatagcaggaccctgctaaatgcttctaggagtctggaggtttcctacgtgactgaccatt

SEQ ID NO: 205968 - protein, 619 aa, Homo sapiens; identical to SEQ ID NO: 98324

SEQ ID NO: 205969 - protein, 180 aa, Homo sapiens
MLRLLLALNLFPSIQVTGNKILVKQSPMLVAYDNAVNLSCKYSYNLFSREFRASLHKGLDSAVEVCVVYGNYSQQLQVYSKTGFNCDGKLGNESVTFYLQNLYVNQTDIYFCKIEVMYPPPYLDNEKSNGTIIHVKGKHLCPSPLFPGPSKPFWVLVVVGGVLACYSLLVTVAFIIFWVR

SEQ ID NO: 205970 - protein, 240 aa, Homo sapiens
MGNSCYNIVATLLLVLNFERTRSLQDPCSNCPAGTFCDNNRNQICSPCPPNSFSSAGGQRTCDICRQCKGVFRTRKECSSTSNAECDCTPGFHCLGAGCSMCEQDCKQGQELTKKGCKDCCFGTFNDQKRGICRPWTNCSLDGKSVLVNGTKERDVVCGPSPADLSPGASSVTPPAPAREPGHSPQIISFFLALTSTALLFLLFFLTLRFSVVKRGRKKLLYIFKQPFMRPVQTTQEEDG

SEQ ID NO: 205971 - protein, 21 aa, Homo sapiens
DGVYTGLSTRNQETYETLKHE

SEQ ID NO: 205972 - protein, 66 aa, Homo sapiens
DPKLCYILDAILFLYGIVLTLLYCRLKIQVRKAAITSYEKSDGVYTGLSTRNQETYETLKHEKPPQ

SEQ ID NO: 205973 - protein, 21 aa, Homo sapiens
DGVYTGLSTRNQETYETLKHE

SEQ ID NO: 205974 - protein, 67 aa, Homo sapiens
IEVMYPPPYLDNEKSNGTIIHVKGKHLCPSPLFPGPSKPFWVLVVVGGVLACYSLLVTVAFIIFWVR

SEQ ID NO: 205975 - protein, 219 aa, Homo sapiens
IEVMYPPPYLDNEKSNGTIIHVKGKHLCPSPLFPGPSKPFWVLVVVGGVLACYSLLVTVAFIIFWVRSKRSRLLHSDYMNMTPRRPGPTRKHYQPYAPPRDFAAYRSRVKFSRSADAPAYQQGQNQLYNELNLGRREEYDVLDKRRGRDPEMGGKPRRKNPQEGLYNELQKDKMAEAYSEIGMKGERRRGKGHDGLYQGLSTATKDTYDALHMQALPPR

SEQ ID NO: 205976 - protein, 283 aa, Homo sapiens
FVPVFLPAKPTTTPAPRPPTPAPTIASQPLSLRPEACRPAAGGAVHTRGLDFACDIYIWAPLAGTCGVLLLSLVITLYCNHRNRSKRSRLLHSDYMNMTPRRPGPTRKHYQPYAPPRDFAAYRSRFSVVKRGRKKLLYIFKQPFMRPVQTTQEEDGCSCRFPEEEEGGCELRVKFSRSADAPAYQQGQNQLYNELNLGRREEYDVLDKRRGRDPEMGGKPRRKNPQEGLYNELQKDKMAEAYSEIGMKGERRRGKGHDGLYQGLSTATKDTYDALHMQALPPR

SEQ ID NO: 205977 - protein, 48 aa, Artificial Sequence
  Description of Artificial Sequence: Synthetic polypeptide
QRRKYRSNKGESPVEPAEPCRYSCPREEEGSTIPIQEDYRKPEPACSP

SEQ ID NO: 205978 - DNA, 123 bp, Artificial Sequence
  Description of Artificial Sequence: Synthetic polynucleotide
aggagtaagaggagcaggctcctgcacagtgactacatgaacatgactccccgccgccccgggcccacccgcaagcattaccagccctatgccccaccacgcgacttcgcagcctatcgctcc

SEQ ID NO: 205979 - DNA, 336 bp, Artificial Sequence
  Description of Artificial Sequence: Synthetic polynucleotide
cgcgtgaaattcagccgcagcgcagatgctccagcctacaagcaggggcagaaccagctctacaacgaactcaatcttggtcggagagaggagtacgacgtgctggacaagcggagaggacgggacccagaaatgggcgggaagccgcgcagaaagaatccccaagagggcctgtacaacgagctccaaaaggataagatggcagaagcctatagcgagattggtatgaaaggggaacgcagaagaggcaaaggccacgacggactgtaccagggactcagcaccgccaccaaggacacctatgacgctcttcacatgcaggccctgccgcctcgg

SEQ ID NO: 205980 - DNA, 336 bp, Artificial Sequence
  Description of Artificial Sequence: Synthetic polynucleotide
agagtgaagttcagcaggagcgcagacgcccccgcgtaccagcagggccagaaccagctctataacgagctcaatctaggacgaagagaggagtacgatgttttggacaagagacgtggccgggaccctgagatggggggaaagccgagaaggaagaaccctcaggaaggcctgtacaatgaactgcagaaagataagatggcggaggcctacagtgagattgggatgaaaggcgagcgccggaggggcaaggggcacgatggcctttaccagggtctcagtacagccaccaaggacacctacgacgcccttcacatgcaggccctgccccctcgc

SEQ ID NO: 205981 - DNA, 105 bp, Artificial Sequence
  Description of Artificial Sequence: Synthetic polynucleotide
acaaaaaagaagtattcatccagtgtgcacgaccctaacggtgaatacatgttcatgagagcagtgaacacagccaaaaaatccagactcacagatgtgacccta

SEQ ID NO: 205982 - protein, 42 aa, Homo sapiens
KRGRKKLLYIFKQPFMRPVQTIQEEDGCSCRFPEEEEGGCEL

SEQ ID NO: 205983 - protein, 42 aa, Homo sapiens
KRGRKKLLYIFKQPFMRPVQTTQEEDGCSCRFPEEEEGGYEL

SEQ ID NO: 205984 - protein, 225 aa, Homo sapiens
TGTTTPAPRPPTPAPTIASQPLSLRPEACRPAAGGAVHTRGLDFACDIYIWAPLAGTCGVLLLSLVITLYCKRGRKKLLYIFKQPFMRPVQTTQEEDGCSCRFPEEEEGGCELRVKFSRSADAPAYQQGQNQLYNELNLGRREEYDVLDKRRGRDPEMGGKPRRKNPQEGLYNELQKDKMAEAYSEIGMKGERRRGKGHDGLYQGLSTATKDTYDALHMQALPPR

SEQ ID NO: 205985 - protein, 154 aa, Homo sapiens
KRGRKKLLYIFKQPFMRPVQTTQEEDGCSCRFPEEEEGGCELRVKFSRSADAPAYQQGQNQLYNELNLGRREEYDVLDKRRGRDPEMGGKPRRKNPQEGLYNELQKDKMAEAYSEIGMKGERRRGKGHDGLYQGLSTATKDTYDALHMQALPPR

SEQ ID NO: 205986 - protein, 194 aa, Homo sapiens
KRIKPIVWPSLPDHKKTLEHLCKKPRKNLNVSFNPESFLDCQIHRVDDIQARDEVEGFLQDTFPQQLEESEKQRLGGDVQSPNCPSEDVVITPESFGRDSSLTCLAGNVSACDAPILSSSRSLDCRESGKNGPHVYQDLLLSLGTTNSTLPPPFSLQSGILTLNPVAQGQPILTSLGSNQEEAYVTMSSFYQNQ

SEQ ID NO: 205987 - protein, 47 aa, Homo sapiens
RFSVVKRGRKKLLYIFKQPFMRPVQTTQEEDGCSCRFPEEEEGGCEL

SEQ ID NO: 205988 - protein, 341 aa, Homo sapiens
RKKRKDAKNNEVSFSQIKPKKSKLIRVENFEAYFKKQQADSNCGFAEEYEDLKLVGISQPKYAAELAENRGKNRYNNVLPYDISRVKLSVQTHSTDDYINANYMPGYHSKKDFIATQGPLPNTLKDFWRMVWEKNVYAIIMLTKCVEQGRTKCEEYWPSKQAQDYGDITVAMTSEIVLPEWTIRDFTVKNIQTSESHPLRQFHFTSWPDHGVPDTTDLLINFRYLVRDYMKQSPPESPILVHCSAGVGRTGTFIAIDRLIYQIENENTVDVYGIVYDLRMHRPLMVQTEDQYVFLNQCVLDIVRSQKDSKVDLIYQNTTAMTIYENLAPVTTFGKTNGYIA

SEQ ID NO: 205989 - protein, 48 aa, Homo sapiens
QRRKYRSNKGESPVEPAEPCHYSCPREEEGSTIPIQEDYRKPEPACSP

SEQ ID NO: 205990 - protein, 6 aa, Homo sapiens
FAAYRS

SEQ ID NO: 205991 - protein, 68 aa, Homo sapiens; identical to SEQ ID NO: 205269

SEQ ID NO: 205992 - protein, 41 aa, Homo sapiens
RSKRSRLLHSDYMNMTPRRPGPTRKHYQPYAPPRDFAAYRS

SEQ ID NO: 205993 - protein, 40 aa, Homo sapiens
SKRSRLLHSDYMNMTPRRPGPTRKHYQPYAPPRDFAAYRS

SEQ ID NO: 205994 - protein, 106 aa, Homo sapiens
IEVMYPPPYLDNEKSNGTIIHVKGKHLCPSPLFPGPSKPFWVLVVVGGVLACYSLLVTVAFIIFWRSKRSRLLHSDYMNMTPRRPGPTRKHYQPYAPPRDFAAYRS

SEQ ID NO: 205995 - protein, 200 aa, Homo sapiens
RSKRSRLLHSDYMNMTPRRPGPTRKHYQPYAPPRDFAAYRSRFSVVKRGRKKLLYIFKQPFMRPVQTTQEEDGCSCRFPEEEEGGCELRVKFSRSADAPAYQQGQNQLYNELNLGRREEYDVLDKRRGRDPEMGGKPRRKNPQEGLYNELQKDKMAEAYSEIGMKGERRRGKGHDGLYQGLSTATKDTYDALHMQALPPR

SEQ ID NO: 205996 - protein, 188 aa, Homo sapiens
RSKRSRLLHSDYNMTPRRPGPTRKHYQPYAPPRDFAAYRSRDQRLPPDAHKPPGGGSFRTPIQEEQADAHSTLAKIRVKFSRSADAPAYQQGQNQLYNELNLGRREEYDVLDKRRGRDPEMGGKPRRKNPQEGLYNELQKDKMAEAYSEIGMKGERRRGKGHDGLYQGLSTATKDTYDALHMQALPPR

SEQ ID NO: 205997 - protein, 70 aa, Homo sapiens
MFWVLVVVGGVLACYSLLVTVAFIIFWVKRGRKKLLYIFKQPFMRPVQTTQEEDGCSCRFPEEEEGGCEL

SEQ ID NO: 205998 - protein, 108 aa, Homo sapiens
IEVMYPPPYLDNEKSNGTIIHVKGKHLCPSPLFPGPSKPFWVLVVVGGVLACYSLLVTVAFIIFWVKRGRKKLLYIFKQPFMRPVQTTQEEDGCSCRFPEEEEGGCEL

SEQ ID NO: 205999 - protein, 153 aa, Homo sapiens
RSKRSRLLHSDYMNMTPRRPGPTRKHYQPYAPPRDFAAYRSRVKFSRSADAPAYQQGQNQLYNELNLGRREEYDVLDKRRGRDPEMGGKPRRKNPQEGLYNELQKDKMAEAYSEIGMKGERRRGKGHDGLYQGLSTATKDTYDALHMQALPPR

SEQ ID NO: 206000 - protein, 151 aa, Homo sapiens
KRSRLLHSDYMNMTPRRPGPTRKHYQPYAPPRDFAAYRSRVKFSRSADAPAYQQGQNQLYNELNLGRREEYDVLDKRRGRDPEMGGKPRRKNPQEGLYNELQKDKMAEAYSEIGMKGERRRGKGHDGLYQGLSTATKDTYDALHMQALPPR

SEQ ID NO: 206001 - protein, 171 aa, Homo sapiens; identical to SEQ ID NO: 13131

SEQ ID NO: 206002 - protein, 127 aa, Homo sapiens; identical to SEQ ID NO: 13132

SEQ ID NO: 206003 - protein, 21 aa, Homo sapiens
DQVYQPLRDRDDAQYSHLGGN

SEQ ID NO: 206004 - protein, 171 aa, Homo sapiens; identical to SEQ ID NO: 13131

SEQ ID NO: 206005 - protein, 127 aa, Homo sapiens; identical to SEQ ID NO: 13132

SEQ ID NO: 206006 - protein, 21 aa, Homo sapiens
DQVYQPLRDRDDAQYSHLGGN

SEQ ID NO: 206007 - protein, 207 aa, Homo sapiens; identical to SEQ ID NO: 13135

SEQ ID NO: 206008 - protein, 21 aa, Homo sapiens
NPDYEPIRKGQRDLYSGLNQR

SEQ ID NO: 206009 - protein, 182 aa, Homo sapiens; identical to SEQ ID NO: 13143

SEQ ID NO: 206010 - protein, 21 aa, Homo sapiens
DQLYQPLKDREDDQYSHLQGN

SEQ ID NO: 206011 - protein, 21 aa, Homo sapiens
DQLYQPLKDREDDQYSHLQGN

SEQ ID NO: 206012 - protein, 182 aa, Homo sapiens; identical to SEQ ID NO: 13143

SEQ ID NO: 206013 - protein, 163 aa, Homo sapiens; identical to SEQ ID NO: 13036

SEQ ID NO: 206014 - protein, 164 aa, Homo sapiens; identical to SEQ ID NO: 13035

SEQ ID NO: 206015 - protein, 164 aa, Homo sapiens; identical to SEQ ID NO: 13035

SEQ ID NO: 206016 - protein, 21 aa, Homo sapiens
NQLYNELNLGRREEYDVLDKR

SEQ ID NO: 206017 - protein, 112 aa, Homo sapiens
RVKFSRSADAPAYQQGQNQLYNELNLGRREEYDVLDKRRGRDPEMGGKPRRKNPQEGLYNELQKDKMAEAYSEIGMKGERRRGKGHDGLYQGLSTATKDTYDALHMQALPPR

SEQ ID NO: 206018 - protein, 21 aa, Homo sapiens
DGLYQGLSTATKDTYDALHMQ

SEQ ID NO: 206019 - protein, 112 aa, Homo sapiens
RVKFSRSAEPPAYQQGQNQLYNELNLGRREEYDVLDKRRGRDPEMGGKPRRKNPQEGLYNELQKDKMAEAYSEIGMKGERRRGKGHDGLYQGLSTATKDTYDALHMQALPPR

SEQ ID NO: 206020 - protein, 113 aa, Homo sapiens
RVKFSRSADAPAYQQGQNQLYNELNLGRREEYDVLDKRRGRDPEMGGKPQRRKNPQEGLYNELQKDKMAEAYSEIGMKGERRRGKGHDGLYQGLSTATKDTYDALHMQALPPR

SEQ ID NO: 206021 - protein, 114 aa, Homo sapiens
RSRVKFSRSADAPAYQQGQNQLYNELNLGRREEYDVLDKRRGRDPEMGGKPRRKNPQEGLYNELQKDKMAEAYSEIGMKGERRRGKGHDGLYQGLSTATKDTYDALHMQALPPR

SEQ ID NO: 206022 - protein, 98 aa, Homo sapiens
RVKFSRSADAPAYQQGEYDVLDKRRGRDPEMGGKPRRKNPQEGLYNELQKDKMAEAYSEIGMKGERRRGKGHDGLYQGLSTATKDTYDALHMQALPPR

SEQ ID NO: 206023 - protein, 112 aa, Homo sapiens
RVKFSRSADAPAYQQGQNQLYNELNLGRREEVDVLDKRRGRDPEMGGKPRRKNPQEGLYNELQKDKMAEAYSEIGMKGERRRGKGHDGLYQGLSTATKDTYDALHMQALPPR

SEQ ID NO: 206024 - protein, 173 aa, Homo sapiens
MIPAVVLLLLLLVEQAAALGEPQLCYILDAILFLVGIVLTLLVCRLKIQVRKAAITSYEKSRVKFSRSADAPAYQQGQNQLYNELNLGRREEYDVLDKRRGRDPEMGGKPRRKNPQEGLYNELQKDKMAEAVSEIGMKGERRRGKGHDGLYQGLSTATKDTYDALHMQALPPR

SEQ ID NO: 206025 - protein, 113 aa, Homo sapiens
LRVKFSRSADAPAYQQGQNQLYNELNLGRREEYDVLDKRRGRDPEMGGKPRRKNPQEGLYNELQKDKMAEAYSEIGMKGERRRGKGHDGLYQGLSTATKDTYDALHMQALPPR

SEQ ID NO: 206026 - protein, 60 aa, Homo sapiens
RVKFSRSADAPAYQQGQNQLYNELNLGRREEYDVLDKRRGRDPEMGGKPQRRKNPQEGLY

SEQ ID NO: 206027 - protein, 114 aa, Homo sapiens
LRVKFSRSADAPAYQQGQNQLYNELNLGRREEYDVLDKRRGRDPEMGGKPQRRKNPQEGLYNELQKDKMAEAYSEIGMKGERRRGKGHDGLYQGLSTATKDTYDALHMQALPPR

SEQ ID NO: 206028 - protein, 113 aa, Homo sapiens
RRVKFSRSADAPAYQQGQNQLYNELNLGRREEYDVLDKRRGRDPEMGGKPRRKNPQEGLYNELQKDKMAEAYSEIGMKGERRRGKGHDGLYQGLSTATKDTYDALHMQALPPR

SEQ ID NO: 206029 - protein, 21 aa, Homo sapiens
NQLYNELNLGRREEYDVLDKR

SEQ ID NO: 206030 - protein, 22 aa, Homo sapiens
EGLYNELQKDKMAEAYSEIGMK

SEQ ID NO: 206031 - protein, 21 aa, Homo sapiens
DGLYQGLSTATKDTYDALHMQ

SEQ ID NO: 206032 - protein, 112 aa, Homo sapiens; identical to SEQ ID NO: 206017

SEQ ID NO: 206033 - protein, 112 aa, Homo sapiens
RVKFSRSADAPAYKQGQNQLYNELNLGRREEYDVLDKRRGRDPEMGGKPRRKNPQEGLYNELQKDKMAEAYSEIGMKGERRRGKGHDGLYQGLSTATKDTYDALHMQALPPR

SEQ ID NO: 206034 - DNA, 338 bp, Artificial Sequence
  Description of Artificial Sequence: Synthetic Construct
agggtgaagttttctaggagcgccgatgcaccagcatataagcagggacagaaccagctgtacaacgagctgaatctgggcaggagagaggagtacgacgtgctggataagaggaggggaagggaccccgagatgggaggcaagccaaggagaaagaacccccaggagggcctgtataatgagctgcagaaggacaagatggccgaggcctactccgagatcggcatgaagggagagcggcgcaggggcaagggacacgatggcctgtatcagggcctgtctacagccaccaaggacacctacgatgcactgcacatgcaggccctgcctccaaggtg

SEQ ID NO: 206035 - DNA, 338 bp, Artificial Sequence
  Description of Artificial Sequence: Synthetic Construct
agggtgaagttttccaggtctgccgatgcccccgcctataagcagggccagaatcagctgtacaacgagctgaatctgggcaggagagaggagtacgacgtgctggataagaggaggggacgcgaccccgagatgggaggcaagcctaggagaaagaacccacaggagggcctgtataatgagctgcagaaggacaagatggccgaggcctactctgagatcggcatgaagggagagcggcgcaggggcaagggacacgatggcctgtatcagggcctgagcacagccaccaaggacacctacgatgcactgcacatgcaggccctgccacctaggtg

SEQ ID NO: 206036 - DNA, 338 bp, Artificial Sequence
  Description of Artificial Sequence: Synthetic Construct
agggtgaagtttagcaggtccgccgatgccccagcctataagcagggccagaaccagctgtacaacgagctgaatctgggcaggagggaagagtacgacgtgctggataagaggagaggaagggaccccgagatgggaggcaagccaaggaggaagaacccacaggagggcctgtataatgagctgcagaaggacaagatggccgaggcctacagcgagatcggcatgaagggagagaggagacggggcaagggacacgatggcctgtatcagggcctgtccacagccaccaaggacacctacgatgcactgcacatgcaggccctgcctccaaggtg

SEQ ID NO: 206037 - DNA, 338 bp, Artificial Sequence
  Description of Artificial Sequence: Synthetic Construct
agggtgaagttttccaggtctgccgatgccccagcctataagcagggccagaatcagctgtacaacgagctgaatctgggcaggagagaggagtacgacgtgctggataagaggaggggacgcgaccccgagatgggaggcaagcctaggagaaagaacccacaggagggcctgtataatgagctgcagaaggacaagatggccgaggcctactctgagatcggcatgaagggagagcggcgcaggggcaagggacacgatggcctgtatcagggcctgagcacagccaccaaggacacctacgatgcactgcacatgcaggccctgccacctaggtg

SEQ ID NO: 206038 - DNA, 338 bp, Artificial Sequence
  Description of Artificial Sequence: Synthetic Construct
agggtgaagtttagcaggtccgccgatgccccagcctataagcagggccagaaccagctgtacaacgagctgaatctgggcaggagggaagagtacgacgtgctggataagaggagaggaagggaccccgagatgggaggcaagccaaggaggaagaacccacaggagggcctgtataatgagctgcagaaggacaagatggccgaggcctactccgagatcggcatgaagggagagaggagacggggcaagggacacgatggcctgtatcagggcctgtctacagccaccaaggacacctacgatgcactgcacatgcaggccctgcctccaaggtg

SEQ ID NO: 206039 - DNA, 336 bp, Artificial Sequence
  Description of Artificial Sequence: Synthetic polynucleotide
agagtgaagttcagcaggagcgcagacgcccccgcgtacaagcagggccagaaccagctctataacgagctcaatctaggacgaagagaggagtacgatgttttggacaagagacgtggccgggaccctgagatggggggaaagccgagaaggaagaaccctcaggaaggcctgtacaatgaactgcagaaagataagatggcggaggcctacagtgagattgggatgaaaggcgagcgccggaggggcaaggggcacgatggcctttaccagggtctcagtacagccaccaaggacacctacgacgcccttcacatgcaggccctgccccctcgc

SEQ ID NO: 206040 - DNA, 336 bp, Artificial Sequence
  Description of Artificial Sequence: Synthetic Construct
agagtgaagttttccaggtctgccgatgccccagcctacaagcagggccagaatcagctgtataacgagctgaatctgggccggagagaggagtacgacgtgctggataagaggaggggacgggaccccgagatgggaggcaagccacggagaaagaacccccaggagggcctgtacaatgagctgcagaaggacaagatggccgaggcctattctgagatcggcatgaagggagagaggcgccggggcaagggacacgatggcctgtaccagggcctgagcacagccaccaaggacacctatgatgcactgcacatgcaggccctgcctccaagg

SEQ ID NO: 206041 - DNA, 336 bp, Artificial Sequence
  Description of Artificial Sequence: Synthetic Construct
agggtgaagttttctaggagcgccgatgcaccagcatataagcagggacagaaccagctgtacaacgagctgaatctgggcaggagagaggagtacgacgtgctggataagaggaggggaagggaccccgagatgggaggcaagccaaggagaaagaacccccaggagggcctgtataatgagctgcagaaggacaagatggccgaggcctactccgagatcggcatgaagggagagcggcgcaggggcaagggacacgatggcctgtatcagggcctgtctacagccaccaaggacacctacgatgcactgcacatgcaggccctgcctccaagg

SEQ ID NO: 206042 - DNA, 336 bp, Artificial Sequence
  Description of Artificial Sequence: Synthetic Construct
agggtgaagttttccaggtctgccgatgcccccgcctataagcagggccagaatcagctgtacaacgagctgaatctgggcaggagagaggagtacgacgtgctggataagaggaggggacgcgaccccgagatgggaggcaagcctaggagaaagaacccacaggagggcctgtataatgagctgcagaaggacaagatggccgaggcctactctgagatcggcatgaagggagagcggcgcaggggcaagggacacgatggcctgtatcagggcctgagcacagccaccaaggacacctacgatgcactgcacatgcaggccctgccacctagg

SEQ ID NO: 206043 - DNA, 336 bp, Artificial Sequence
  Description of Artificial Sequence: Synthetic Construct
agggtgaagtttagcaggtccgccgatgccccagcctataagcagggccagaaccagctgtacaacgagctgaatctgggcaggagggaagagtacgacgtgctggataagaggagaggaagggaccccgagatgggaggcaagccaaggaggaagaacccacaggagggcctgtataatgagctgcagaaggacaagatggccgaggcctacagcgagatcggcatgaagggagagaggagacggggcaagggacacgatggcctgtatcagggcctgtccacagccaccaaggacacctacgatgcactgcacatgcaggccctgcctccaagg

SEQ ID NO: 206044 - DNA, 336 bp, Artificial Sequence
  Description of Artificial Sequence: Synthetic Construct
agggtgaagttttccaggtctgccgatgccccagcctataagcagggccagaatcagctgtacaacgagctgaatctgggcaggagagaggagtacgacgtgctggataagaggaggggacgcgaccccgagatgggaggcaagcctaggagaaagaacccacaggagggcctgtataatgagctgcagaaggacaagatggccgaggcctactctgagatcggcatgaagggagagcggcgcaggggcaagggacacgatggcctgtatcagggcctgagcacagccaccaaggacacctacgatgcactgcacatgcaggccctgccacctagg

SEQ ID NO: 206045 - DNA, 336 bp, Artificial Sequence
  Description of Artificial Sequence: Synthetic Construct
agggtgaagtttagcaggtccgccgatgccccagcctataagcagggccagaaccagctgtacaacgagctgaatctgggcaggagggaagagtacgacgtgctggataagaggagaggaagggaccccgagatgggaggcaagccaaggaggaagaacccacaggagggcctgtataatgagctgcagaaggacaagatggccgaggcctactccgagatcggcatgaagggagagaggagacggggcaagggacacgatggcctgtatcagggcctgtctacagccaccaaggacacctacgatgcactgcacatgcaggccctgcctccaagg

SEQ ID NO: 206046 - protein, 110 aa, Homo sapiens
RVKFSRSADAPAYQQGQNQLYNELNLGRREEYDVLDKRRGRDPEMGGKPRRKNPQEGLYNELQKDKMAEAYSEIGMKGERRRGKGHDGLYQGLSTATKDTYDALHMQALP

SEQ ID NO: 206047 - protein, 137 aa, Homo sapiens
DPKLCYLLDGILFIYGVILTALFLRVKFSRSADAPAYQQGQNQLYNELNLGRREEYDVLDKRRGRDPEMGGKPQRRKNPQEGLYNELQKDKMAEAYSEIGMKGERRRGKGHDGLYQGLSTATKDTYDALHMQALPPR

SEQ ID NO: 206048 - protein, 163 aa, Homo sapiens; identical to SEQ ID NO: 13036

SEQ ID NO: 206049 - protein, 38 aa, Homo sapiens
RSRDQRLPPDAHKPPGGGSFRTPIQEEQADAHSTLAKI

SEQ ID NO: 206050 - protein, 226 aa, Homo sapiens; identical to SEQ ID NO: 13276

SEQ ID NO: 206051 - protein, 188 aa, Homo sapiens; identical to SEQ ID NO: 13277

SEQ ID NO: 206052 - protein, 226 aa, Homo sapiens; identical to SEQ ID NO: 13276

SEQ ID NO: 206053 - protein, 21 aa, Homo sapiens
ENLYEGLNLDDCSMYEDISRG

SEQ ID NO: 206054 - protein, 84 aa, Homo sapiens
FVPVFLPAKPTTTPAPRPPTPAPTIASQPLSLRPEACRPAAGGAVHTRGLDFACDIYIWAPLAGTCGVLLLSLVITLYCNHRNR

SEQ ID NO: 206055 - protein, 84 aa, Homo sapiens
FVPVFLPAKPITTPAPRPPTPAPTIASQPLSLRPEACRPAAGGAVHTRGLDFACDIYIWAPLAGTCGVLLLSLVITLYCNHRNR

SEQ ID NO: 206056 - protein, 47 aa, Homo sapiens
PTTTPAPRPPTPAPTIASQPLSLRPEACRPAAGGAVHTRGLDFACDI

SEQ ID NO: 206057 - protein, 41 aa, Homo sapiens
AVSLSKMLKKRSPLTTGVFVKMAPTEAECEKQFQPYFIPIN

SEQ ID NO: 206058 - protein, 47 aa, Homo sapiens
AVSLSKMLKKRSPLTTGVYMNMTPRRPECEKQFQPYAPPRDFAAYRS

SEQ ID NO: 206059 - protein, 20 aa, Homo sapiens
RPRRSPAQDGKVYINMPGRG

SEQ ID NO: 206060 - protein, 113 aa, Homo sapiens; identical to SEQ ID NO: 94215

SEQ ID NO: 206061 - protein, 112 aa, Homo sapiens; identical to SEQ ID NO: 94220

SEQ ID NO: 206062 - protein, 102 aa, Homo sapiens; identical to SEQ ID NO: 94217

SEQ ID NO: 206063 - protein, 101 aa, Homo sapiens; identical to SEQ ID NO: 94216

SEQ ID NO: 206064 - protein, 113 aa, Homo sapiens; identical to SEQ ID NO: 94215

SEQ ID NO: 206065 - protein, 112 aa, Homo sapiens; identical to SEQ ID NO: 94220

SEQ ID NO: 206066 - protein, 102 aa, Homo sapiens; identical to SEQ ID NO: 94217

SEQ ID NO: 206067 - protein, 101 aa, Homo sapiens; identical to SEQ ID NO: 94216

SEQ ID NO: 206068 - protein, 21 aa, Homo sapiens
ESPYQELQGQRSDVYSDLNTQ

SEQ ID NO: 206069 - protein, 21 aa, Homo sapiens
ESPYQELQGQRSDVYSDLNTQ

SEQ ID NO: 206070 - protein, 49 aa, Homo sapiens
RSQCMWPRETQLLLEVPPSTEDARSCQFPEEERGERSAEEKGRLGDLWV

SEQ ID NO: 206071 - protein, 35 aa, Homo sapiens
TKKKYSSSVHDPNGEFMFMRAVNTAKKSRLTDVTL

SEQ ID NO: 206072 - protein, 39 aa, Homo sapiens
KSRQTPPLASVEMEAMEALPVTWGTSSRDEDLENCSHHL

SEQ ID NO: 206073 - protein, 149 aa, Homo sapiens
RRDQRLPPDAHKPPGGGSFRTPIQEEQADAHSTLAKIRVKFSRSADAPAYQQGQNQLYNELNLGRREEYDVLDKRRGRDPEMGGKPRRKNPQEGLYNELQKDKMAEAYSEIGMKGERRRGKGHDGLYQGLSTATKDTYDALHMQALPPR

SEQ ID NO: 206074 - protein, 69 aa, Artificial Sequence
  Description of Artificial Sequence: Synthetic polypeptide
TTTPAPRPPTPAPTIASQPLSLRPEACRPAAGGAVHTRGLDFACDFWLPIGCAAFVVVCILGCILICWL

SEQ ID NO: 206075 - DNA, 207 bp, Artificial Sequence
  Description of Artificial Sequence: Synthetic polynucleotide
accacgacgccagcgccgcgaccaccaacaccggcgcccaccatcgcgtcgcagcccctgtccctgcgcccagaggcgtgccggccagcggcggggggcgcagtgcacacgagggggctggacttcgcctgtgatttctggttacccataggatgtgcagcctttgttgtagtctgcattttgggatgcatacttatttgttggctt

SEQ ID NO: 206076 - protein, 46 aa, Homo sapiens
TTTPAPRPPTPAPTIASQPLSLRPEACRPAAGGAVHTRGLDFACDI

SEQ ID NO: 206077 - protein, 21 aa, Homo sapiens
FLVIIVILSALFLGTLACFCV

SEQ ID NO: 206078 - protein, 31 aa, Homo sapiens
IISFFLALTSTALLFLLFFLTLRFSVVKRGR

SEQ ID NO: 206079 - protein, 27 aa, Homo sapiens
IISFFLALTSTALLFLLFFLTLRFSVV

SEQ ID NO: 206080 - protein, 26 aa, Homo sapiens
VAAILGLGLVLGLLGPLAILLALYLL

SEQ ID NO: 206081 - protein, 363 aa, Homo sapiens
AVFGCIFGALVIVTVGGFIFWRKKRKDAKNNEVSFSQIKPKKSKLIRVENFEAYFKKQQADSNCGFAEEYEDLKLVGISQPKYAAELAENRGKNRYNNVLPYDISRVKLSVQTHSTDDYINANYMPGYHSKKDFIATQGPLPNTLKDFWRMVWEKNVYAIIMLTKCVEQGRTKCEEYWPSKQAQDYGDITVAMTSEIVLPEVVTIRDFTVKNIQTSESHPLRQFHFTSWPDHGVPDTTDLLINFRYLVRDYMKQSPPESPILVHCSAGVGRTGTFIAIDRLIYQIENENTVDVYGIVYDLRMHRPLMVQTEDQYVFLNQCVLDIVRSQKDSKVDLIYQNTTAMTIYENLAPVTTFGKTNGYIA

SEQ ID NO: 206082 - protein, 21 aa, Homo sapiens
AVFGCIFGALVIVTVGGFIFW

SEQ ID NO: 206083 - protein, 185 aa, Homo sapiens
KEITNALETWGALGQDINLDIPSFQMSDDIDDIKWEKTSDKKKIAQFRKEKETFKEKDTYKLFKNGTLKIKHLKTDDQDIYKVSIYDTKGKNVLEKIFDLKIQERVSKPKISWTCINTTLTCEVMNGTDPELNLYQDGKHLKLSQRVITHKWTTSLSAKFKCTAGNKVSKESSVEPVSCPEKGLD

SEQ ID NO: 206084 - protein, 106 aa, Homo sapiens
IEVMYPPPYLDNEKSNGTITHVKGKHLCPSPLFPGPSKPFWVLVVVGGVLACYSLLVTVAHIFWVRSKRSRLLHSDYMNMTPRRPGPTRKHYQPYAPPRDFAAYRS

SEQ ID NO: 206085 - protein, 66 aa, Homo sapiens
IEVMYPPPYLDNEKSNGTIIHVKGKHLCPSPLFPGPSKPFWVLVVVGGVLACYSLLVTVAFIIFWV

SEQ ID NO: 206086 - protein, 33 aa, Homo sapiens
IFWVLVVVGGVLACYSLLVTVAFIIFWVRSKRR

SEQ ID NO: 206087 - protein, 68 aa, Homo sapiens; identical to SEQ ID NO: 205269

SEQ ID NO: 206088 - protein, 28 aa, Homo sapiens
MFWVLVVVGGVLACYSLLVTVAFIIFWV

SEQ ID NO: 206089 - protein, 26 aa, Homo sapiens
FWVLVVVGGVLACYSLLVTVAFHFWV

SEQ ID NO: 206090 - protein, 68 aa, Homo sapiens
FWVLVVVGGVLACYSLLVTVAFIIFWVRSKRSRLLHSDYMNMTPRRPGPTRKHYQAYAAARDFAAYRS

SEQ ID NO: 206091 - protein, 106 aa, Homo sapiens
IEVMYPPPYLDNEKSNGTIIHVKGKHLCPSPLFPGPSKPFWVLWVGGVLACYSLLVTVAFIIFWVRSKRSRLLHSDYMNMTPRRPGPTRKHYQPYAPPRDFAAYRS

SEQ ID NO: 206092 - protein, 28 aa, Homo sapiens
MFWVLVVVGGVLACYSGGVTVAFIIFWV

SEQ ID NO: 206093 - protein, 26 aa, Homo sapiens
WVLVVVGGVLACYSLLVTVAFIIFWV

SEQ ID NO: 206094 - protein, 28 aa, Homo sapiens
FWVLVVVGGVLACYSLLVTVAFIIFWVR

SEQ ID NO: 206095 - protein, 69 aa, Homo sapiens
PFWVLVVVGGVLACYSLLVTVAFIIFWVRSKRSRLLHSDYMNMTPRRPGPTRKHYQPYAPPRDFAAYRS

SEQ ID NO: 206096 - protein, 180 aa, Homo sapiens
FWVLVVVGGVLACYSLLVTVAFIIFWVRSKRSRLLHSDYMNMTPRRPGPTRKHYQPYAPPRDFAAYRSRVKFSRSADAPAYQQGQNQLYNELNLGRREEYDVLDKRRGRDPEMGGKPRRKNPQEGLYNELQKDKMAEAYSEIGMKGERRRGKGHDGLYQGLSTATKDTYDALHMQALPPR

SEQ ID NO: 206097 - protein, 216 aa, Homo sapiens
FWVLVVVGGVLACYSLLVTVAFIIFWVRSKRSRLLHSDYMNMTPRRPGPTRKHYQPYAPPRDFAAYRSRDQRLPPDAHKPPGGGSFRTPIQEEQADAHSTLAKIRVKFSRSADAPAYQQGQNQLYNELNLGRREEYDVLDKRRGRDPEMGGKPRRKNPQEGLYNELQKDKMAEAYSEIGMKGERRRGKGHDGLYQGLSTATKDTYDALHMQALPPR

SEQ ID NO: 206098 - protein, 140 aa, Homo sapiens
FWVLVVVGGVLACYSLLVTVAFIIFWVRRVKFSRSADAPAYQQGQNQLYNELNLGRREEYDVLDKRRGRDPEMGGKPRRKNPQEGLYNELQKDKMAEAYSEIGMKGERRRGKGHDGLYQGLSTATKDTYDALHMQALPPR

SEQ ID NO: 206099 - protein, 23 aa, Homo sapiens
LCYLLDGILFIYGVILTALFLRV

SEQ ID NO: 206100 - protein, 51 aa, Homo sapiens
MKWKALFTAAILQAQLPITEAQSFGLLDPKLCYLLDGILFIYGVILTALFL

SEQ ID NO: 206101 - protein, 21 aa, Homo sapiens
LCYLLDGILFIYGVILTALFL

SEQ ID NO: 206102 - protein, 25 aa, Homo sapiens
ALIVLGGVAGLLLFIGLGIFFCVRC

SEQ ID NO: 206103 - protein, 22 aa, Homo sapiens
MALIVLGGVAGLLLFIGLGIFF

SEQ ID NO: 206104 - protein, 725 aa, Homo sapiens
ALIAFLAFLIIVTSIALLVVLYKIYDLHKKRSCNLDEQQELVERDDEKQLMNVEPIHADILLETYKRKIADEGRLFLAEFQSIPRVFSKFPIKEARKPFNQNKNRYVDILPYDYNRVELSEINGDAGSNYINASYIDGFKEPRKYIAAQGPRDETVDDFWRMIWEQKATVIVMVTRCEEGNRNKCAEYWPSMEEGTRAFGDVVVKINQHKRCPDYIIQKLNIVNKKEKATGREVTHIQFTSWPDHGVPEDPHLLLKLRRRVNAFSNFFSGPIWHCSAGVGRTGTYIGIDAMLEGLEAENKVDVYGYVVKLRRQRCLMVQVEAQYILIHQALVEYNQFGETEVNLSELHPYLHNMKKRDPPSEPSPLEAEFQRLPSYRSWRTQHIGNQEENKSKNRNSNVIPYDYNRVPLKHELEMSKESEHDSDESSDDDSDSEEPSKYINASFIMSYWKPEVMIAAQGPLKETIGDFWQMIFQRKVKVIVMLTELKHGDQEICAQYWGEGKQTYGDIEVDLKDTDKSSTYTLRVFELRHSKRKDSRTVYQYQYTNWSVEQLPAEPKELISMIQWKQKLPQKNSSEGNKHHKSTPLLIHCRDGSQQTGIFCALLNLLESAETEEWDIFQWKALRKARPGMVSTFEQYQFLYDVIASTYPAQNGQVKKNNHQEDKIEFDNEVDKVKQDANCVNPLGAPEKLPEAKEQAEGSEPTSGTEGPEHSVNGPASPALNQGS

SEQ ID NO: 206105 - protein, 23 aa, Homo sapiens
PLFIPVAVMVTAFSGLAFIIWLA

SEQ ID NO: 206106 - protein, 24 aa, Homo sapiens
ALPAALAVISFLLGLGLGVACVLA

SEQ ID NO: 206107 - protein, 21 aa, Homo sapiens
MALPVTALLLPLALLLHAARP

SEQ ID NO: 206108 - protein, 286 aa, Homo sapiens
AAAFVPVFLPAKPTTTPAPRPPTPAPTIASQPLSLRPEACRPAAGGAVHTRGLDFACDIYIWAPLAGTCGVLLLSLVITLYCNHRNRSKRSRLLHSDYMNMTPRRPGPTRKHYQPYAPPRDFAAYRSRFSVVKRGRKKLLYIFKQPFMRPVQTTQEEDGCSCRFPEEEEGGCELRVKFSRSADAPAYQQGQNQLYNELNLGRREEYDVLDKRRGRDPEMGGKPRRKNPQEGLYNELQKDKMAEAYSEIGMKGERRRGKGHDGLYQGLSTATKDTYDALHMQALPPR

SEQ ID NO: 206109 - protein, 226 aa, Homo sapiens
AAATTTPAPRPPTPAPTIASQPLSLRPEACRPAAGGAVHTRGLDFACDIYIWAPLAGTCGVLLLSLVITLYCKRGRKKLLYIFKQPFMRPVQTTQEEDGCSCRFPEEEEGGCELRVKFSRSADAPAYKQGQNQLYNELNLGRREEYDVLDKRRGRDPEMGGKPRRKNPQEGLYNELQKDKMAEAYSEIGMKGERRRGKGHDGLYQGLSTATKDTYDALHMQALPPR

SEQ ID NO: 206110 - protein, 83 aa, Homo sapiens
FVPVFLPAKPTTTPAPRPPTPAPTIASQPLSLRPEACRPAAGGAVHTRGLDFACDIYIWAPLAGTCGVLLLSLVITLYCNHRN

SEQ ID NO: 206111 - protein, 22 aa, Homo sapiens
IWAPLAGTCGVLLLSLVITLYC

SEQ ID NO: 206112 - protein, 24 aa, Homo sapiens
IYIWAPLAGTCGVLLLSLVITLYC

SEQ ID NO: 206113 - DNA, 72 bp, Artificial Sequence
  Description of Artificial Sequence: Synthetic Construct
atctatatctgggcaccactggcaggaacatgtggcgtgctgctgctgtccctggtcatcaccctgtattgc

SEQ ID NO: 206114 - DNA, 72 bp, Artificial Sequence
  Description of Artificial Sequence: Synthetic Construct
atctacatctgggcaccactggcaggaacatgcggcgtgctgctgctgtccctggtcatcaccctgtattgt

SEQ ID NO: 206115 - DNA, 72 bp, Artificial Sequence
  Description of Artificial Sequence: Synthetic Construct
atctacatctgggcacctctggcaggaacatgcggcgtgctgctgctgtctctggtcatcaccctgtattgt

SEQ ID NO: 206116 - DNA, 72 bp, Artificial Sequence
  Description of Artificial Sequence: Synthetic oligonucleotide
atctacatctgggcgcccttggccgggacttgtggggtccttctcctgtcactggttatcaccctttactgc

SEQ ID NO: 206117 - DNA, 72 bp, Artificial Sequence
  Description of Artificial Sequence: Synthetic oligonucleotide
atctacatttgggcccctctggctggtacttgcggggtcctgctgctttcactcgtgatcactctttactgt

SEQ ID NO: 206118 - protein, 25 aa, Homo sapiens
IYIWAPLAGTCGVLLLSLVITLYCR

SEQ ID NO: 206119 - protein, 71 aa, Homo sapiens
PTTTPAPRPPTPAPTIASQPLSLRPEACRPAAGGAVHTRGLDFACDIYIWAPLAGTCGVLLLSLVITLYCN

SEQ ID NO: 206120 - protein, 25 aa, Homo sapiens
IYIWAPLAGTCGVLLLSLVITLVCR

SEQ ID NO: 206121 - protein, 21 aa, Homo sapiens
IYIWAPLAGTCGVLLLSLVIT

SEQ ID NO: 206122 - protein, 23 aa, Homo sapiens
IYIWAPLAGTCGVLLLSLVITLY

SEQ ID NO: 206123 - protein, 23 aa, Homo sapiens
LGLLVAGVLVLLVSLGVAIHLCC

SEQ ID NO: 206124 - protein, 73 aa, Homo sapiens
TPAPRPPTPAPTIASQPLSLRPEACRPAAGGAWTRGLDFACDIYIWAPLAGTCGVLLLSLVITLYCNHRNRRR

SEQ ID NO: 206125 - protein, 27 aa, Homo sapiens
ILLAGLVAADAVASLLIVGAVFLCARR

SEQ ID NO: 206126 - protein, 52 aa, Homo sapiens
FFIPLLVVILFAVDTGLFISTQQQVTFLLKIKRTRKGFRLLNPHPKPNPKNN

SEQ ID NO: 206127 - protein, 257 aa, Homo sapiens; identical to SEQ ID NO: 31353

SEQ ID NO: 206128 - protein, 54 aa, Homo sapiens
DIFIPLLVVILFAVDTGLFISTQQQVTFLLKIKRTRKGFRLLNPHPKPNPKNNR

SEQ ID NO: 206129 - protein, 31 aa, Homo sapiens
PLGWLTVVLLAVAACVLLLTSAQLGLHIWQL

SEQ ID NO: 206130 - protein, 24 aa, Homo sapiens
SIISAVVGILLVVVLGVVFGILII

SEQ ID NO: 206131 - protein, 113 aa, Homo sapiens
CHPECQPQNGSVTCFGPEADQCVACAHYKDPPFCVARCPSGVKPDLSYMPIWKFPDEEGACQPCPINCTHSCVDLDDKGCPAEQRASPLTSIISAVVGILLVVVLGVVFGILI

SEQ ID NO: 206132 - protein, 21 aa, Homo sapiens
FWLPIGCAAFVVVCILGCILI

SEQ ID NO: 206133 - protein, 233 aa, Homo sapiens
EPKSPDKTHTCPPCPAPPVAGPSVFLFPPKPKDTLMIARTPEVTCVVVDVSHEDPEVKFNWYVDGVEVHNAKTKPREEQYNSTYRVVSVLTVLHQDWLNGKEYKCKVSNKALPAPIEKTISKAKGQPREPQVYTLPPSRDELTKNQVSLTCLVKGFYPSDIAVEWESNGQPENNYKTTPPVLDSDGSFFLYSKLTVDKSRWQQGNVFSCSVMHEALHNHYTQKSLSLSPGKKD

SEQ ID NO: 206134 - protein, 21 aa, Homo sapiens
VAAILGLGLVLGLLGPLAILL

SEQ ID NO: 206135 - protein, 244 aa, Homo sapiens; identical to SEQ ID NO: 50458

SEQ ID NO: 206136 - protein, 21 aa, Homo sapiens
LLFLILGVLSLLLLVTGAFGF

SEQ ID NO: 206137 - protein, 20 aa, Homo sapiens
VGWGGLLGSLVLLVWVLAVI

SEQ ID NO: 206138 - protein, 27 aa, Homo sapiens
FWALVVVAGVLFCYGLLVTVALCVIWT

SEQ ID NO: 206139 - protein, 107 aa, Homo sapiens
IEVMYPPPYLDNEKSNGTIIHVKGKHLCPSPLFPGPSKPFWVLVVVGGVLACYSLLVTVAFIIFWVRSKRSRLLHSDYMNMTPRRPGPTRKHYQPYAPPRDFAAYRS

SEQ ID NO: 206140 - protein, 65 aa, Homo sapiens
VMYPPPYLDNEKSNGTIIHVKGKHLCPSPLFPGPSKPFWVLVVVGGVLACYSLLVTVAFIIFWVR

SEQ ID NO: 206141 - protein, 101 aa, Homo sapiens
APVGLVARLADESGHVVLRWLPPPETPMTSHIRYEVDVSAGNGAGSVQRVEILEGRTECVLSNLRGRTRYTFAVRARMAEPSFGGFWSAWSEPVSLLTPSD

SEQ ID NO: 206142 - protein, 68 aa, Homo sapiens
TTPAPRPPTPAPTIASQPLSLRPEACRPAAGGAVHTRGLDFACDIYIWAPLAGTCGVLLLSLVITLYC

SEQ ID NO: 206143 - protein, 243 aa, Homo sapiens
DIQMTQSSSYLSVSLGGRVTITCKASDHINNWLAWYQQKPGNAPRLLISGATSLETGVPSRFSGSGSGKDYTLSITSLQTEDVATYYCQQYWSTPFTFGSGTKLEIKGGGGSGGGGSGGGGSQVQLKESGPGLVAPSQSLSITSTVSGFSLSRYSVHWVRQPPGKGLEWLGMIWGGGSTDYNSALKSRLSISKDNSKSQVFLKMNSLQTDDTAMYYCARNEGDTTAGTWFAYWGQGTLVTVSS

SEQ ID NO: 206144 - protein, 62 aa, Homo sapiens
ALSNSIMYFSHFVPVFLPAKPTTTPAPRPPTPAPTIASQPLSLRPEACRPAAGGAVHTRGLD

SEQ ID NO: 206145 - protein, 68 aa, Homo sapiens
TTTPAPRPPTPAPTIASQPLSLRPEACRPAAGGAVHTRGLDFACDIYIWAPLAGTCGVLLLSLVITLY

SEQ ID NO: 206146 - protein, 70 aa, Homo sapiens
KPTTTPAPRPPTPAPTIASQPLSLRPEACRPAAGGAVHTRGLDFACDIYIWAPLAGTCGVLLLSLVITLY

SEQ ID NO: 206147 - protein, 42 aa, Homo sapiens
KRGRKKLLYIFKQPFMRPVQTTQEEDGCSCRFPEEEEGGCEL

SEQ ID NO: 206148 - DNA, 126 bp, Artificial Sequence
  Description of Artificial Sequence: Synthetic Domain sequence
aagagaggccggaagaagctgctgtacatcttcaagcagcccttcatgaggcccgtgcagacaacccaggaggaggacggctgcagctgtcggttcccagaggaggaggagggaggatgtgagctg

SEQ ID NO: 206149 - DNA, 126 bp, Artificial Sequence
  Description of Artificial Sequence: Synthetic Domain sequence
aagcgcggcaggaagaagctgctgtacatcttcaagcagccctttatgcgccctgtgcagacaacccaggaggaggacggctgcagctgtaggttcccagaggaggaggagggaggatgtgagctg

SEQ ID NO: 206150 - DNA, 126 bp, Artificial Sequence
  Description of Artificial Sequence: Synthetic Domain sequence
aagcgcggcaggaagaagctgctgtacatcttcaagcagccttttatgcgcccagtgcagacaacccaggaggaggacggctgcagctgtaggttccctgaggaggaggagggaggatgtgagctg

SEQ ID NO: 206151 - DNA, 126 bp, Artificial Sequence
  Description of Artificial Sequence: Synthetic Domain sequence
aagcgcggcaggaagaagctgctgtacatcttcaagcagccctttatgcgccctgtgcagacaacccaggaggaggacggctgcagctgtaggttccctgaggaggaggagggaggatgtgagctg

SEQ ID NO: 206152 - DNA, 126 bp, Artificial Sequence
  Description of Artificial Sequence: Synthetic Domain sequence
aagcgcggcaggaagaagctgctgtacatcttcaagcagccttttatgcgcccagtgcagacaacccaggaggaggacggctgcagctgtaggttccctgaggaggaggagggaggatgcgagctg

SEQ ID NO: 206153 - DNA, 126 bp, Artificial Sequence
  Description of Artificial Sequence: Synthetic Domain sequence
aagcgcggccggaagaagctgctgtatatcttcaagcagcccttcatgcggcccgtgcagacaacccaggaggaggacggctgcagctgtaggttccctgaggaggaggagggcggctgtgagctg

SEQ ID NO: 206154 - DNA, 126 bp, Artificial Sequence
  Description of Artificial Sequence: Synthetic polynucleotide
aaacggggcagaaagaaactcctgtatatattcaaacaaccatttatgagaccagtacaaactactcaagaggaagatggctgtagctgccgatttccagaagaagaagaaggaggatgtgaactg

SEQ ID NO: 206155 - DNA, 126 bp, Artificial Sequence
  Description of Artificial Sequence: Synthetic polynucleotide
aagcgcggtcggaagaagctgctgtacatctttaagcaacccttcatgaggcctgtgcagactactcaagaggaggacggctgttcatgccggttcccagaggaggaggaaggcggctgcgaactg

SEQ ID NO: 206156 - protein, 35 aa, Homo sapiens
TKKKYSSSVHDPNGEYMFMRAVNTAKKSRLTDVTL

SEQ ID NO: 206157 - protein, 27 aa, Homo sapiens
FWVLVVVGGVLACYSLLVTVAFIIFWV

SEQ ID NO: 206158 - protein, 86 aa, Homo sapiens; identical to SEQ ID NO: 31354

SEQ ID NO: 206159 - protein, 222 aa, Homo sapiens
AAAIEVMYPPPYLDNEKSNGTIIHVKGKHLCPSPLFPGPSKPFWVLVVVGGVLACYSLLVTVAFIIFWVRSKRSRLLHSDYMNMTPRRPGPTRKHYQPYAPPRDFAAYRSRVKFSRSADAPAYQQGQNQLYNELNLGRREEYDVLDKRRGRDPEMGGKPRRKNPQEGLYNELQKDKMAEAYSEIGMKGERRRGKGHDGLYQGLSTATKDTYDALHMQALPPR

SEQ ID NO: 206160 - protein, 705 aa, Artificial Sequence
  Description of Artificial Sequence: Synthetic Chimeric Antigen Receptor
ADAPAYQQGQNQLYNELNLGRREEYDVLDKRRGRDPEMGGKPRRKNPQEGLYNELQKDKMAEAYSEIGMKGERRRGKGHDGLYQGLSTATKDTYDALHMQALPPRRAEGRGSLLTCGDVEENPGPMAVPTQVLGLLLLWLTDARCDIQMTQSPSSLSASVGDRVTITCRASEDIYFNLVWYQQKPGKAPKLLIYDTNRLADGVPSRFSGSGSGTQYTLTISSLQPEDFATYYCQHYKNYPLTFGQGTKLEIKRSGGGGSGGGGSGGGGSRSEVQLVESGGGLVQPGGSLRLSCAASGFTLSNYGMHWIRQAPGKGLEWVSSISLNGGSTYYRDSVKGRFTISRDNAKSTLYLQMNSLRAEDTAVYYCAAQDAYTGGYFDYWGQGTLVTVSSMPCPAPPVAGPSVFLFPPKPKDTLMIARTPEVTCVVVDVSHEDPEVKFNWYVDGVEVHNAKTKPREEQYNSTYRVVSVLTVLHQDWLNGKEYKCKVSNKALPAPIEKTISKAKPCPAPPVAGPSVFLFPPKPKDTLMIARTPEVTCVVVDVSHEDPEVKFNWYVDGVEVHNAKTKPREEQYNSTYRVVSVLTVLHQDWLNGKEYKCKVSNKALPAPIEKTISKAKMALIVLGGVAGLLLFIGLGIFFMALIVLGGVAGLLLFIGLGIFFCVRCRHRRRSGGGGSAQLEKKLQALKKKNAQLKWKLQALKKKLAQ

SEQ ID NO: 206161 - protein, 482 aa, Artificial Sequence
  Description of Artificial Sequence: Synthetic Chimeric Antigen Receptor
MALPVTALLLPLALLLHAARPEVQLLETGGGLVQPGGSLRLSCAVSGFALSNHGMSWVRRAPGKGLEWVSGIVYSGSTYYAASVKGRFTISRDNSRNTLYLQMNSLRPEDTAIYYCSAHGGESDVWGQGTTVTVSSASGGGGSGGRASGGGGSEIVLTQSPATLSVSPGESATLSCRASQSVSSNLAWYQQKPGQAPRLLIYGASTRASGIPDRFSGSGSGTDFTLTISSLQAEDVAVYYCQQYGSSLTFGGGTKVEIKTTTPAPRPPTPAPTIASQPLSLRPEACRPAAGGAVHTRGLDFACDIYIWAPLAGTCGVLLLSLVITLYCKRGRKKLLYIFKQPFMRPVQTTQEEDGCSCRFPEEEEGGCELRVKFSRSADAPAYKQGQNQLYNELNLGRREEYDVLDKRRGRDPEMGGKPRRKNPQEGLYNELQKDKMAEAYSEIGMKGERRRGKGHDGLYQGLSTATKDTYDALHMQALPPR

SEQ ID NO: 206162 - protein, 222 aa, Artificial Sequence; identical to SEQ ID NO: 206159
  Description of Artificial Sequence: Synthetic Chimeric Antigen Receptor

SEQ ID NO: 206163 - protein, 226 aa, Artificial Sequence; identical to SEQ ID NO: 206109
  Description of Artificial Sequence: Synthetic Chimeric Antigen Receptor

SEQ ID NO: 206164 - protein, 286 aa, Artificial Sequence; identical to SEQ ID NO: 206108
  Description of Artificial Sequence: Synthetic Chimeric Antigen Receptor

SEQ ID NO: 206165 - protein, 487 aa, Artificial Sequence
  Description of Artificial Sequence: Synthetic Chimeric Antigen Receptor
LLVTSLLLCELPHPAFLLIPDTALQLQQSGAELVRPGASVTLSCKASGYTFTDYEMHWVKQTPVHGLEWIGAIDPETGGTAYNQKFEGKAILTADKSSSTAYMELRSLTSEDSPVYYCARRRYYGSSSFDYWGQGTTLTVSSGGGGSGGGGSGGGGSDVQMIQTPSSLSASLGDRVTISCRASQDIGNYLNWYQQKPDGTVKLLIYYTSRLHSGVPSRFSGSGSGTEYSLTISNLEQEDIATYFCQQGSALPPTFGGGTKLEINRAAAIEVMYPPPYLDNEKSNGTIIHVKGKHLCPSPLFPGPSKPFWVLVVVGGVLACYSLLVTVAFIIFWVRSKRSRLLHSDYMNMTPRRPGPTRKHYQPYAPPRDFAAYRSRVKFSRSADAPAYQQGQNQLYNELNLGRREEYDVLDKRRGRDPEMGGKPRRKNPQEGLYNELQKDKMAEAYSEIGMKGERRRGKGHDGLYQGLSTATKDTYDALHMQALPPR

SEQ ID NO: 206166 - protein, 487 aa, Artificial Sequence
  Description of Artificial Sequence: Synthetic Chimeric Antigen Receptor
LLVTSLLLCELPHPAFLLIPDTQVQLQQSGAEVKKPGSSVKVSCKASGYTFTDYEISWVRQAPGQGLEWMGGIDPETGGTNYAQKFQGRVTITADESTSTAYMELSSLRSEDTAVYYCARRRYYGSSSFDYWWGQGTMVTVSSGGGGSGGGGSGGGGSEIVLTQSPATLSLSPGERATLSCRASQDIGNYAWYQQKPGQAPRLLIYYTSRATGIPARFSGSGSGTDFTLTISSLEPEDFAVYYCQQGSALPPTFFGQGTKLEIKRAAAIEVMYPPPYLDNEKSNGTIIHVKGKHLCPSPLFPGPSKPFWVLVVVGGVLACYSLLVTVAFIIFWVRSKRSRLLHSDYMNMTPRRPGPTRKHYQPYAPPRDFAAYRSRVKFSRSADAPAYQQGQNQLYNELNLGRREEYDVLDKRRGRDPEMGGKPRRKNPQEGLYNELQKDKMAEAYSEIGMKGERRRGKGHDGLYQGLSTATKDTYDALHMQALPPR

SEQ ID NO: 206167 - protein, 489 aa, Artificial Sequence
  Description of Artificial Sequence: Synthetic Chimeric Antigen Receptor
LLVTSLLLCELPHPAFLLIPDTDVQLQESGPVLVKTGASVKMSCTASGYTFTDHFMDWVKQSHGKSLEWIGSLNPYSGGTSYNQKFKGKATLTVDKSSSTAYMELNSLTSVDSAVYYCARHNWGAYFDYWGQGTTLTVSSGGGGSGGGGSGGGGSDIVMTQAAPSVPVTPGESVSISCRSSKSLLHSNGNTYLYWFLQRPGQSPQRLIYYMSNLASGVPDRFSGRGSGTDFTLRISRVEAEDVGVYYCMQGLEDPYTFGGGTKLEIKAAAIEVMYPPPYLDNEKSNGTIIHVKGKHLCPSPLFPGPSKPFWVLVVVGGVLACYSLLVTVAFIIFWVRSKRSRLLHSDYMNMTPRRPGPTRKHYQPYAPPRDFAAYRSRVKFSRSADAPAYQQGQNQLYNELNLGRREEYDVLDKRRGRDPEMGGKPRRKNPQEGLYNELQKDKMAEAYSEIGMKGERRRGKGHDGLYQGLSTATKDTYDALHMQALPPR

SEQ ID NO: 206168 - protein, 490 aa, Artificial Sequence
  Description of Artificial Sequence: Synthetic Chimeric Antigen Receptor
LLVTSLLLCELPHPAFLLIPDTDVKLQESGPGLVAPSQSLSITCTVSGFSLTSYAVSWVRQPPGKGLEWLGIIWSGGATNYNSALKSRLSISKDNSKSQVFLKMNGLQTDDTARYYCAREHYYGSSAMDYWGQGASITVSSGGGGSGGGGSGGGGSGIVMTQSPLSLPVSLGDQASISCRSSQSIVHSYGNTYLFWYLQKPGQSPKLLIYRVSNRFSGVPDRFSGSGSGTNFTLKISRVEAEDMGVYYCFQGTHVPYTFGGGTKLEIKAAAIEVMYPPPYLDNEKSNGTIIHVKGKHLCPSPLFPGPSKPFWVLVVVGGVLACYSLLVTVAFIIFWVRSKRSRLLHSDYMNMTPRRPGPTRKHYQPYAPPRDFAAYRSRVKFSRSADAPAYQQGQNQLYNELNLGRREEYDVLDKRRGRDPEMGGKPRRKNPQEGLYNELQKDKMAEAYSEIGMKGERRRGKGHDGLYQGLSTATKDTYDALHMQALPPR

SEQ ID NO: 206169 - protein, 490 aa, Artificial Sequence
  Description of Artificial Sequence: Synthetic Chimeric Antigen Receptor
LLVTSLLLCELPHPAFLLIPDTQVQLQQSGAEVKKPGSSVKVSCKASGYTFTDHFISWVRQAPGQGLEWMGGLNPYSGGTNYAQKFQGRVTITADESTSTAYMELSSLRSEDTAVYYCARHNWGAYFDYWWGQGTMVTVSSGGGGSGGGGSGGGGSEIVLTQSPATLSLSPGERATLSCRASKSLLHSNGNTYAWYQQKPGQAPRLLIYYMSRATGIPARFSGSGSGTDFTLTISSLEPEDFAVYYCMQGLEDPYTFFGQGTKLEIKRAAAIEVMYPPPYLDNEKSNGTIIHVKGKHLCPSPLFPGPSKPFWVLVVVGGVLACYSLLVTVAFIIFWVRSKRSRLLHSDYMNMTPRRPGPTRKHYQPYAPPRDFAAYRSRVKFSRSADAPAYQQGQNQLYNELNLGRREEYDVLDKRRGRDPEMGGKPRRKNPQEGLYNELQKDKMAEAYSEIGMKGERRRGKGHDGLYQGLSTATKDTYDALHMQALPPR

SEQ ID NO: 206170 - protein, 491 aa, Artificial Sequence
  Description of Artificial Sequence: Synthetic Chimeric Antigen Receptor
LLVTSLLLCELPHPAFLLIPDTALQLQQSGAELVRPGASVTLSCKASGYTFTDYEMHWVKQTPVHGLEWIGAIDPETGGTAYNQKFEGKAILTADKSSSTAYMELRSLTSEDSPVYYCARRRYYGSSSFDYWGQGTTLTVSSGGGGSGGGGSGGGGSDVQMIQTPSSLSASLGDRVTISCRASQDIGNYLNWYQQKPDGTVKLLIYYTSRLHSGVPSRFSGSGSGTEYSLTISNLEQEDIATYFCQQGSALPPTFGGGTKLEINRAAATTTPAPRPPTPAPTIASQPLSLRPEACRPAAGGAVHTRGLDFACDIYIWAPLAGTCGVLLLSLVITLYCKRGRKKLLYIFKQPFMRPVQTTQEEDGCSCRFPEEEEGGCELRVKFSRSADAPAYKQGQNQLYNELNLGRREEYDVLDKRRGRDPEMGGKPRRKNPQEGLYNELQKDKMAEAYSEIGMKGERRRGKGHDGLYQGLSTATKDTYDALHMQALPPR

SEQ ID NO: 206171 - protein, 491 aa, Artificial Sequence
  Description of Artificial Sequence: Synthetic Chimeric Antigen Receptor
LLVTSLLLCELPHPAFLLIPDTQVQLQQSGAELVKPGASVKISCKASGYAFSSYWMNWVKQRPGKGLEWIGQIYPGDGDTTYNGKFKGKATLTADKSSSTVYMQLNSLTSEDSAVYFCVRYYYGSSGYFDYWGQGTTLTVSSGGGGSGGGGSGGGGSDVQMIQTPDSLAVSLGQRATISCRASESVDNYGISFMHWYQQKPGQSPKLLIYRASNLESGIPARFSGSGSRTDFTLTINPVETDDVATYYCQQNNKDPPTFGGGTKLEIKRAAAIEVMYPPPYLDNEKSNGTIIHVKGKHLCPSPLFPGPSKPFWVLVVVGGVLACYSLLVTVAFIIFWVRSKRSRLLHSDYMNMTPRRPGPTRKHYQPYAPPRDFAAYRSRVKFSRSADAPAYQQGQNQLYNELNLGRREEYDVLDKRRGRDPEMGGKPRRKNPQEGLYNELQKDKMAEAYSEIGMKGERRRGKGHDGLYQGLSTATKDTYDALHMQALPPR

SEQ ID NO: 206172 - protein, 491 aa, Artificial Sequence
  Description of Artificial Sequence: Synthetic Chimeric Antigen Receptor
LLVTSLLLCELPHPAFLLIPDTQVQLQQSGAEVKKPGSSVKVSCKASGYAFSSYISWVRQAPGQGLEWMGGQIYPGDGDTNYAQKFQGRVTITADESTSTAYMELSSLRSEDTAVYYCVRYYYGSSGYFDYWWGQGTMVTVSSGGGGSGGGGSGGGGSEIVLTQSPATLSLSPGERATLSCRASESVDNYGISFAWYQQKPGQAPRLLIYRASRATGIPARFSGSGSGTDFTLTISSLEPEDFAVYYCQQNNKDPPTFFGQGTKLEIKRAAAIEVMYPPPYLDNEKSNGTIIHVKGKHLCPSPLFPGPSKPFWVLVVVGGVLACYSLLVTVAFIIFWVRSKRSRLLHSDYMNMTPRRPGPTRKHYQPYAPPRDFAAYRSRVKFSRSADAPAYQQGQNQLYNELNLGRREEYDVLDKRRGRDPEMGGKPRRKNPQEGLYNELQKDKMAEAYSEIGMKGERRRGKGHDGLYQGLSTATKDTYDALHMQALPPR

SEQ ID NO: 206173 - protein, 491 aa, Artificial Sequence
  Description of Artificial Sequence: Synthetic Chimeric Antigen Receptor
LLVTSLLLCELPHPAFLLIPDTQVQLQQSGAEVKKPGSSVKVSCKASGYTFTDYEISWVRQAPGQGLEWMGGIDPETGGTNYAQKFQGRVTITADESTSTAYMELSSLRSEDTAVYYCARRRYYGSSSFDYWWGQGTMVTVSSGGGGSGGGGSGGGGSEIVLTQSPATLSLSPGERATLSCRASQDIGNYAWYQQKPGQAPRLLIYYTSRATGIPARFSGSGSGTDFTLTISSLEPEDFAVYYCQQGSALPPTFFGQGTKLEIKRAAATTTPAPRPPTPAPTIASQPLSLRPEACRPAAGGAVHTRGLDFACDIYIWAPLAGTCGVLLLSLVITLYCKRGRKKLLYIFKQPFMRPVQTTQEEDGCSCRFPEEEEGGCELRVKFSRSADAPAYKQGQNQLYNELNLGRREEYDVLDKRRGRDPEMGGKPRRKNPQEGLYNELQKDKMAEAYSEIGMKGERRRGKGHDGLYQGLSTATKDTYDALHMQALPPR

SEQ ID NO: 206174 - protein, 492 aa, Artificial Sequence
  Description of Artificial Sequence: Synthetic Chimeric Antigen Receptor
LLVTSLLLCELPHPAFLLIPDTQVQLQQSGAEVKKPGSSVKVSCKASGFSLTSYAISWVRQAPGQGLEWMGGIIWSGGATNYAQKFQGRVTITADESTSTAYMELSSLRSEDTAVYYCAREHYYGSSAMDYWWGQGTMVTVSSGGGGSGGGGSGGGGSEIVLTQSPATLSLSPGERATLSCRASQSIVHSYGNTYAWYQQKPGQAPRLLIYRVSRATGIPARFSGSGSGTDFTLTISSLEPEDFAVYYCFQGTHVPYTFFGQGTKLEIKRAAAIEVMYPPPYLDNEKSNGTIIHVKGKHLCPSPLFPGPSKPFWVLVVVGGVLACYSLLVTVAFIIFWVRSKRSRLLHSDYMNMTPRRPGPTRKHYQPYAPPRDFAAYRSRVKFSRSADAPAYQQGQNQLYNELNLGRREEYDVLDKRRGRDPEMGGKPRRKNPQEGLYNELQKDKMAEAYSEIGMKGERRRGKGHDGLYQGLSTATKDTYDALHMQALPPR

SEQ ID NO: 206175 - protein, 493 aa, Artificial Sequence
  Description of Artificial Sequence: Synthetic Chimeric Antigen Receptor
LLVTSLLLCELPHPAFLLIPDTDVQLQESGPVLVKTGASVKMSCTASGYTFTDHFMDWVKQSHGKSLEWIGSLNPYSGGTSYNQKFKGKATLTVDKSSSTAYMELNSLTSVDSAVYYCARHNWGAYFDYWGQGTTLTVSSGGGGSGGGGSGGGGSDIVMTQAAPSVPVTPGESVSISCRSSKSLLHSNGNTYLYWFLQRPGQSPQRLIYYMSNLASGVPDRFSGRGSGTDFTLRISRVEAEDVGVYYCMQGLEDPYTFGGGTKLEIKAAATTTPAPRPPTPAPTIASQPLSLRPEACRPAAGGAVHTRGLDFACDIYIWAPLAGTCGVLLLSLVITLYCKRGRKKLLYIFKQPFMRPVQTTQEEDGCSCRFPEEEEGGCELRVKFSRSADAPAYKQGQNQLYNELNLGRREEYDVLDKRRGRDPEMGGKPRRKNPQEGLYNELQKDKMAEAYSEIGMKGERRRGKGHDGLYQGLSTATKDTYDALHMQALPPR

SEQ ID NO: 206176 - protein, 493 aa, Artificial Sequence
  Description of Artificial Sequence: Synthetic Chimeric Antigen Receptor
MALPVTALLLPLALLLHAARPDIVLTQSPPSLAMSLGKRATISCRASESVTILGSHLIHWYQQKPGQPPTLLIQLASNVQTGVPARFSGSGSRTDFTLTIDPVEEDDVAVYYCLQSRTIPRTFGGGTKLEIKGSTSGSGKPGSGEGSTKGQIQLVQSGPELKKPGETVKISCKASGYTFTDYSINWVKRAPGKGLKWMGWINTETREPAYAYDFRGRFAFSLETSASTAYLQINNLKYEDTATYFCALDYSYAMDYWGQGTSVTVSSAAATTTPAPRPPTPAPTIASQPLSLRPEACRPAAGGAVHTRGLDFACDIYIWAPLAGTCGVLLLSLVITLYCKRGRKKLLYIFKQPFMRPVQTTQEEDGCSCRFPEEEEGGCELRVKFSRSADAPAYQQGQNQLYNELNLGRREEYDVLDKRRGRDPEMGGKPRRKNPQEGLYNELQKDKMAEAYSEIGMKGERRRGKGHDGLYQGLSTATKDTYDALHMQALPPR

SEQ ID NO: 206177 - protein, 494 aa, Artificial Sequence
  Description of Artificial Sequence: Synthetic Chimeric Antigen Receptor
LLVTSLLLCELPHPAFLLIPDTDVKLQESGPGLVAPSQSLSITCTVSGFSLTSYAVSWVRQPPGKGLEWLGIIWSGGATNYNSALKSRLSISKDNSKSQVFLKMNGLQTDDTARYYCAREHYYGSSAMDYWGQGASITVSSGGGGSGGGGSGGGGSGIVMTQSPLSLPVSLGDQASISCRSSQSIVHSYGNTYLFWYLQKPGQSPKLLIYRVSNRFSGVPDRFSGSGSGTNFTLKISRVEAEDMGVYYCFQGTHVPYTFGGGTKLEIKAAATTTPAPRPPTPAPTIASQPLSLRPEACRPAAGGAVHTRGLDFACDIYIWAPLAGTCGVLLLSLVITLYCKRGRKKLLYIFKQPFMRPVQTTQEEDGCSCRFPEEEEGGCELRVKFSRSADAPAYKQGQNQLYNELNLGRREEYDVLDKRRGRDPEMGGKPRRKNPQEGLYNELQKDKMAEAYSEIGMKGERRRGKGHDGLYQGLSTATKDTYDALHMQALPPR

SEQ ID NO: 206178 - protein, 494 aa, Artificial Sequence
  Description of Artificial Sequence: Synthetic Chimeric Antigen Receptor
LLVTSLLLCELPHPAFLLIPDTQVQLQQSGAEVKKPGSSVKVSCKASGYTFTDHFISWVRQAPGQGLEWMGGLNPYSGGTNYAQKFQGRVTITADESTSTAYMELSSLRSEDTAVYYCARHNWGAYFDYWWGQGTMVTVSSGGGGSGGGGSGGGGSEIVLTQSPATLSLSPGERATLSCRASKSLLHSNGNTYAWYQQKPGQAPRLLIYYMSRATGIPARFSGSGSGTDFTLTISSLEPEDFAVYYCMQGLEDPYTFFGQGTKLEIKRAAATTTPAPRPPTPAPTIASQPLSLRPEACRPAAGGAVHTRGLDFACDIYIWAPLAGTCGVLLLSLVITLYCKRGRKKLLYIFKQPFMRPVQTTQEEDGCSCRFPEEEEGGCELRVKFSRSADAPAYKQGQNQLYNELNLGRREEYDVLDKRRGRDPEMGGKPRRKNPQEGLYNELQKDKMAEAYSEIGMKGERRRGKGHDGLYQGLSTATKDTYDALHMQALPPR

SEQ ID NO: 206179 - protein, 495 aa, Artificial Sequence
  Description of Artificial Sequence: Synthetic Chimeric Antigen Receptor
LLVTSLLLCELPHPAFLLIPDTQVQLQQSGAELVKPGASVKISCKASGYAFSSYWMNWVKQRPGKGLEWIGQIYPGDGDTTYNGKFKGKATLTADKSSSTVYMQLNSLTSEDSAVYFCVRYYYGSSGYFDYWGQGTTLTVSSGGGGSGGGGSGGGGSDVQMIQTPDSLAVSLGQRATISCRASESVDNYGISFMHWYQQKPGQSPKLLIYRASNLESGIPARFSGSGSRTDFTLTINPVETDDVATYYCQQNNKDPPTFGGGTKLEIKRAAATTTPAPRPPTPAPTIASQPLSLRPEACRPAAGGAVHTRGLDFACDIYIWAPLAGTCGVLLLSLVITLYCKRGRKKLLYIFKQPFMRPVQTTQEEDGCSCRFPEEEEGGCELRVKFSRSADAPAYKQGQNQLYNELNLGRREEYDVLDKRRGRDPEMGGKPRRKNPQEGLYNELQKDKMAEAYSEIGMKGERRRGKGHDGLYQGLSTATKDTYDALHMQALPPR

SEQ ID NO: 206180 - protein, 495 aa, Artificial Sequence
  Description of Artificial Sequence: Synthetic Chimeric Antigen Receptor
LLVTSLLLCELPHPAFLLIPDTQVQLQQSGAEVKKPGSSVKVSCKASGYAFSSYISWVRQAPGQGLEWMGGQIYPGDGDTNYAQKFQGRVTITADESTSTAYMELSSLRSEDTAVYYCVRYYYGSSGYFDYWWGQGTMVTVSSGGGGSGGGGSGGGGSEIVLTQSPATLSLSPGERATLSCRASESVDNYGISFAWYQQKPGQAPRLLIYRASRATGIPARFSGSGSGTDFTLTISSLEPEDFAVYYCQQNNKDPPTFFGQGTKLEIKRAAATTTPAPRPPTPAPTIASQPLSLRPEACRPAAGGAVHTRGLDFACDIYIWAPLAGTCGVLLLSLVITLYCKRGRKKLLYIFKQPFMRPVQTTQEEDGCSCRFPEEEEGGCELRVKFSRSADAPAYKQGQNQLYNELNLGRREEYDVLDKRRGRDPEMGGKPRRKNPQEGLYNELQKDKMAEAYSEIGMKGERRRGKGHDGLYQGLSTATKDTYDALHMQALPPR

SEQ ID NO: 206181 - protein, 496 aa, Artificial Sequence
  Description of Artificial Sequence: Synthetic Chimeric Antigen Receptor
LLVTSLLLCELPHPAFLLIPDTQVQLQQSGAEVKKPGSSVKVSCKASGFSLTSYAISWVRQAPGQGLEWMGGIIWSGGATNYAQKFQGRVTITADESTSTAYMELSSLRSEDTAVYYCAREHYYGSSAMDYWWGQGTMVTVSSGGGGSGGGGSGGGGSEIVLTQSPATLSLSPGERATLSCRASQSIVHSYGNTYAWYQQKPGQAPRLLIYRVSRATGIPARFSGSGSGTDFTLTISSLEPEDFAVYYCFQGTHVPYTFFGQGTKLEIKRAAATTTPAPRPPTPAPTIASQPLSLRPEACRPAAGGAVHTRGLDFACDIYIWAPLAGTCGVLLLSLVITLYCKRGRKKLLYIFKQPFMRPVQTTQEEDGCSCRFPEEEEGGCELRVKFSRSADAPAYKQGQNQLYNELNLGRREEYDVLDKRRGRDPEMGGKPRRKNPQEGLYNELQKDKMAEAYSEIGMKGERRRGKGHDGLYQGLSTATKDTYDALHMQALPPR

SEQ ID NO: 206182 - protein, 551 aa, Artificial Sequence
  Description of Artificial Sequence: Synthetic Chimeric Antigen Receptor
LLVTSLLLCELPHPAFLLIPDTALQLQQSGAELVRPGASVTLSCKASGYTFTDYEMHWVKQTPVHGLEWIGAIDPETGGTAYNQKFEGKAILTADKSSSTAYMELRSLTSEDSPVYYCARRRYYGSSSFDYWGQGTTLTVSSGGGGSGGGGSGGGGSDVQMIQTPSSLSASLGDRVTISCRASQDIGNYLNWYQQKPDGTVKLLIYYTSRLHSGVPSRFSGSGSGTEYSLTISNLEQEDIATYFCQQGSALPPTFGGGTKLEINRAAAFVPVFLPAKPTTTPAPRPPTPAPTIASQPLSLRPEACRPAAGGAVHTRGLDFACDIYIWAPLAGTCGVLLLSLVITLYCNHRNRSKRSRLLHSDYMNMTPRRPGPTRKHYQPYAPPRDFAAYRSRFSVVKRGRKKLLYIFKQPFMRPVQTTQEEDGCSCRFPEEEEGGCELRVKFSRSADAPAYQQGQNQLYNELNLGRREEYDVLDKRRGRDPEMGGKPRRKNPQEGLYNELQKDKMAEAYSEIGMKGERRRGKGHDGLYQGLSTATKDTYDALHMQALPPR

SEQ ID NO: 206183 - protein, 551 aa, Artificial Sequence
  Description of Artificial Sequence: Synthetic Chimeric Antigen Receptor
LLVTSLLLCELPHPAFLLIPDTQVQLQQSGAEVKKPGSSVKVSCKASGYTFTDYEISWVRQAPGQGLEWMGGIDPETGGTNYAQKFQGRVTITADESTSTAYMELSSLRSEDTAVYYCARRRYYGSSSFDYWWGQGTMVTVSSGGGGSGGGGSGGGGSEIVLTQSPATLSLSPGERATLSCRASQDIGNYAWYQQKPGQAPRLLIYYTSRATGIPARFSGSGSGTDFTLTISSLEPEDFAVYYCQQGSALPPTFFGQGTKLEIKRAAAFVPVFLPAKPTTTPAPRPPTPAPTIASQPLSLRPEACRPAAGGAVHTRGLDFACDIYIWAPLAGTCGVLLLSLVITLYCNHRNRSKRSRLLHSDYMNMTPRRPGPTRKHYQPYAPPRDFAAYRSRFSVVKRGRKKLLYIFKQPFMRPVQTTQEEDGCSCRFPEEEEGGCELRVKFSRSADAPAYQQGQNQLYNELNLGRREEYDVLDKRRGRDPEMGGKPRRKNPQEGLYNELQKDKMAEAYSEIGMKGERRRGKGHDGLYQGLSTATKDTYDALHMQALPPR

SEQ ID NO: 206184 - protein, 553 aa, Artificial Sequence
  Description of Artificial Sequence: Synthetic Chimeric Antigen Receptor
LLVTSLLLCELPHPAFLLIPDTDVQLQESGPVLVKTGASVKMSCTASGYTFTDHFMDWVKQSHGKSLEWIGSLNPYSGGTSYNQKFKGKATLTVDKSSSTAYMELNSLTSVDSAVYYCARHNWGAYFDYWGQGTTLTVSSGGGGSGGGGSGGGGSDIVMTQAAPSVPVTPGESVSISCRSSKSLLHSNGNTYLYWFLQRPGQSPQRLIYYMSNLASGVPDRFSGRGSGTDFTLRISRVEAEDVGVYYCMQGLEDPYTFGGGTKLEIKAAAFVPVFLPAKPTTTPAPRPPTPAPTIASQPLSLRPEACRPAAGGAVHTRGLDFACDIYIWAPLAGTCGVLLLSLVITLYCNHRNRSKRSRLLHSDYMNMTPRRPGPTRKHYQPYAPPRDFAAYRSRFSVVKRGRKKLLYIFKQPFMRPVQTTQEEDGCSCRFPEEEEGGCELRVKFSRSADAPAYQQGQNQLYNELNLGRREEYDVLDKRRGRDPEMGGKPRRKNPQEGLYNELQKDKMAEAYSEIGMKGERRRGKGHDGLYQGLSTATKDTYDALHMQALPPR

SEQ ID NO: 206185 - protein, 554 aa, Artificial Sequence
  Description of Artificial Sequence: Synthetic Chimeric Antigen Receptor
LLVTSLLLCELPHPAFLLIPDTDVKLQESGPGLVAPSQSLSITCTVSGFSLTSYAVSWVRQPPGKGLEWLGIIWSGGATNYNSALKSRLSISKDNSKSQVFLKMNGLQTDDTARYYCAREHYYGSSAMDYWGQGASITVSSGGGGSGGGGSGGGGSGIVMTQSPLSLPVSLGDQASISCRSSQSIVHSYGNTYLFWYLQKPGQSPKLLIYRVSNRFSGVPDRFSGSGSGTNFTLKISRVEAEDMGVYYCFQGTHVPYTFGGGTKLEIKAAAFVPVFLPAKPTTTPAPRPPTPAPTIASQPLSLRPEACRPAAGGAVHTRGLDFACDIYIWAPLAGTCGVLLLSLVITLYCNHRNRSKRSRLLHSDYMNMTPRRPGPTRKHYQPYAPPRDFAAYRSRFSVVKRGRKKLLYIFKQPFMRPVQTTQEEDGCSCRFPEEEEGGCELRVKFSRSADAPAYQQGQNQLYNELNLGRREEYDVLDKRRGRDPEMGGKPRRKNPQEGLYNELQKDKMAEAYSEIGMKGERRRGKGHDGLYQGLSTATKDTYDALHMQALPPR

SEQ ID NO: 206186 - protein, 554 aa, Artificial Sequence
  Description of Artificial Sequence: Synthetic Chimeric Antigen Receptor
LLVTSLLLCELPHPAFLLIPDTQVQLQQSGAEVKKPGSSVKVSCKASGYTFTDHFISWVRQAPGQGLEWMGGLNPYSGGTNYAQKFQGRVTITADESTSTAYMELSSLRSEDTAVYYCARHNWGAYFDYWWGQGTMVTVSSGGGGSGGGGSGGGGSEIVLTQSPATLSLSPGERATLSCRASKSLLHSNGNTYAWYQQKPGQAPRLLIYYMSRATGIPARFSGSGSGTDFTLTISSLEPEDFAVYYCMQGLEDPYTFFGQGTKLEIKRAAAFVPVFLPAKPTTTPAPRPPTPAPTIASQPLSLRPEACRPAAGGAVHTRGLDFACDIYIWAPLAGTCGVLLLSLVITLYCNHRNRSKRSRLLHSDYMNMTPRRPGPTRKHYQPYAPPRDFAAYRSRFSVVKRGRKKLLYIFKQPFMRPVQTTQEEDGCSCRFPEEEEGGCELRVKFSRSADAPAYQQGQNQLYNELNLGRREEYDVLDKRRGRDPEMGGKPRRKNPQEGLYNELQKDKMAEAYSEIGMKGERRRGKGHDGLYQGLSTATKDTYDALHMQALPPR

SEQ ID NO: 206187 - protein, 555 aa, Artificial Sequence
  Description of Artificial Sequence: Synthetic Chimeric Antigen Receptor
LLVTSLLLCELPHPAFLLIPDTQVQLQQSGAELVKPGASVKISCKASGYAFSSYWMNWVKQRPGKGLEWIGQIYPGDGDTTYNGKFKGKATLTADKSSSTVYMQLNSLTSEDSAVYFCVRYYYGSSGYFDYWGQGTTLTVSSGGGGSGGGGSGGGGSDVQMIQTPDSLAVSLGQRATISCRASESVDNYGISFMHWYQQKPGQSPKLLIYRASNLESGIPARFSGSGSRTDFTLTINPVETDDVATYYCQQNNKDPPTFGGGTKLEIKRAAAFVPVFLPAKPTTTPAPRPPTPAPTIASQPLSLRPEACRPAAGGAVHTRGLDFACDIYIWAPLAGTCGVLLLSLVITLYCNHRNRSKRSRLLHSDYMNMTPRRPGPTRKHYQPYAPPRDFAAYRSRFSVVKRGRKKLLYIFKQPFMRPVQTTQEEDGCSCRFPEEEEGGCELRVKFSRSADAPAYQQGQNQLYNELNLGRREEYDVLDKRRGRDPEMGGKPRRKNPQEGLYNELQKDKMAEAYSEIGMKGERRRGKGHDGLYQGLSTATKDTYDALHMQALPPR

SEQ ID NO: 206188 - protein, 555 aa, Artificial Sequence
  Description of Artificial Sequence: Synthetic Chimeric Antigen Receptor
LLVTSLLLCELPHPAFLLIPDTQVQLQQSGAEVKKPGSSVKVSCKASGYAFSSYISWVRQAPGQGLEWMGGQIYPGDGDTNYAQKFQGRVTITADESTSTAYMELSSLRSEDTAVYYCVRYYYGSSGYFDYWWGQGTMVTVSSGGGGSGGGGSGGGGSEIVLTQSPATLSLSPGERATLSCRASESVDNYGISFAWYQQKPGQAPRLLIYRASRATGIPARFSGSGSGTDFTLTISSLEPEDFAVYYCQQNNKDPPTFFGQGTKLEIKRAAAFVPVFLPAKPTTTPAPRPPTPAPTIASQPLSLRPEACRPAAGGAVHTRGLDFACDIYIWAPLAGTCGVLLLSLVITLYCNHRNRSKRSRLLHSDYMNMTPRRPGPTRKHYQPYAPPRDFAAYRSRFSVVKRGRKKLLYIFKQPFMRPVQTTQEEDGCSCRFPEEEEGGCELRVKFSRSADAPAYQQGQNQLYNELNLGRREEYDVLDKRRGRDPEMGGKPRRKNPQEGLYNELQKDKMAEAYSEIGMKGERRRGKGHDGLYQGLSTATKDTYDALHMQALPPR

SEQ ID NO: 206189 - protein, 556 aa, Artificial Sequence
  Description of Artificial Sequence: Synthetic Chimeric Antigen Receptor
LLVTSLLLCELPHPAFLLIPDTQVQLQQSGAEVKKPGSSVKVSCKASGFSLTSYAISWVRQAPGQGLEWMGGIIWSGGATNYAQKFQGRVTITADESTSTAYMELSSLRSEDTAVYYCAREHYYGSSAMDYWWGQGTMVTVSSGGGGSGGGGSGGGGSEIVLTQSPATLSLSPGERATLSCRASQSIVHSYGNTYAWYQQKPGQAPRLLIYRVSRATGIPARFSGSGSGTDFTLTISSLEPEDFAVYYCFQGTHVPYTFFGQGTKLEIKRAAAFVPVFLPAKPTTTPAPRPPTPAPTIASQPLSLRPEACRPAAGGAVHTRGLDFACDIYIWAPLAGTCGVLLLSLVITLYCNHRNRSKRSRLLHSDYMNMTPRRPGPTRKHYQPYAPPRDFAAYRSRFSVVKRGRKKLLYIFKQPFMRPVQTTQEEDGCSCRFPEEEEGGCELRVKFSRSADAPAYQQGQNQLYNELNLGRREEYDVLDKRRGRDPEMGGKPRRKNPQEGLYNELQKDKMAEAYSEIGMKGERRRGKGHDGLYQGLSTATKDTYDALHMQALPPR

SEQ ID NO: 206190 - protein, 724 aa, Artificial Sequence
  Description of Artificial Sequence: Synthetic Chimeric Antigen Receptor
LLVTSLLLCELPHPAFLLIPDTALQLQQSGAELVRPGASVTLSCKASGYTFTDYEMHWVKQTPVHGLEWIGAIDPETGGTAYNQKFEGKAILTADKSSSTAYMELRSLTSEDSPVYYCARRRYYGSSSFDYWGQGTTLTVSSGGGGSGGGGSGGGGSDVQMIQTPSSLSASLGDRVTISCRASQDIGNYLNWYQQKPDGTVKLLIYYTSRLHSGVPSRFSGSGSGTEYSLTISNLEQEDIATYFCQQGSALPPTFGGGTKLEINRAEPKSCDKTHTCPPCPAPELLGGPSVFLFPPKPKDTLMISRTPEVTCVVVDVSHEDPEVKFNWYVDGVEVHNAKTKPREEQYNSTYRVVSVLTVLHQDWLNGKEYKCKVSNKALPAPIEKTISKAKGQPREPQVYTLPPSRDELTKNQVSLTCLVKGFYPSDIAVEWESNGQPENNYKTTPPVLDSDGSFFLYSKLTVDKSRWQQGNVFSCSVMHEALHNHYTQKSLSLSPGKKDPKAAAIEVMYPPPYLDNEKSNGTIIHVKGKHLCPSPLFPGPSKPFWVLVVVGGVLACYSLLVTVAFIIFWVRSKRSRLLHSDYMNMTPRRPGPTRKHYQPYAPPRDFAAYRSRVKFSRSADAPAYQQGQNQLYNELNLGRREEYDVLDKRRGRDPEMGGKPRRKNPQEGLYNELQKDKMAEAYSEIGMKGERRRGKGHDGLYQGLSTATKDTYDALHMQALPPR

SEQ ID NO: 206191 - protein, 724 aa, Artificial Sequence
  Description of Artificial Sequence: Synthetic Chimeric Antigen Receptor
LLVTSLLLCELPHPAFLLIPDTQVQLQQSGAEVKKPGSSVKVSCKASGYTFTDYEISWVRQAPGQGLEWMGGIDPETGGTNYAQKFQGRVTITADESTSTAYMELSSLRSEDTAVYYCARRRYYGSSSFDYWWGQGTMVTVSSGGGGSGGGGSGGGGSEIVLTQSPATLSLSPGERATLSCRASQDIGNYAWYQQKPGQAPRLLIYYTSRATGIPARFSGSGSGTDFTLTISSLEPEDFAVYYCQQGSALPPTFFGQGTKLEIKRAEPKSCDKTHTCPPCPAPELLGGPSVFLFPPKPKDTLMISRTPEVTCVVVDVSHEDPEVKFNWYVDGVEVHNAKTKPREEQYNSTYRVVSVLTVLHQDWLNGKEYKCKVSNKALPAPIEKTISKAKGQPREPQVYTLPPSRDELTKNQVSLTCLVKGFYPSDIAVEWESNGQPENNYKTTPPVLDSDGSFFLYSKLTVDKSRWQQGNVFSCSVMHEALHNHYTQKSLSLSPGKKDPKAAAIEVMYPPPYLDNEKSNGTIIHVKGKHLCPSPLFPGPSKPFWVLVVVGGVLACYSLLVTVAFIIFWVRSKRSRLLHSDYMNMTPRRPGPTRKHYQPYAPPRDFAAYRSRVKFSRSADAPAYQQGQNQLYNELNLGRREEYDVLDKRRGRDPEMGGKPRRKNPQEGLYNELQKDKMAEAYSEIGMKGERRRGKGHDGLYQGLSTATKDTYDALHMQALPPR

SEQ ID NO: 206192 - protein, 725 aa, Artificial Sequence
  Description of Artificial Sequence: Synthetic Chimeric Antigen Receptor
LLVTSLLLCELPHPAFLLIPDTDVQLQESGPVLVKTGASVKMSCTASGYTFTDHFMDWVKQSHGKSLEWIGSLNPYSGGTSYNQKFKGKATLTVDKSSSTAYMELNSLTSVDSAVYYCARHNWGAYFDYWGQGTTLTVSSGGGGSGGGGSGGGGSDIVMTQAAPSVPVTPGESVSISCRSSKSLLHSNGNTYLYWFLQRPGQSPQRLIYYMSNLASGVPDRFSGRGSGTDFTLRISRVEAEDVGVYYCMQGLEDPYTFGGGTKLEIKEPKSCDKTHTCPPCPAPELLGGPSVFLFPPKPKDTLMISRTPEVTCVVVDVSHEDPEVKFNWYVDGVEVHNAKTKPREEQYNSTYRVVSVLTVLHQDWLNGKEYKCKVSNKALPAPIEKTISKAKGQPREPQVYTLPPSRDELTKNQVSLTCLVKGFYPSDIAVEWESNGQPENNYKTTPPVLDSDGSFFLYSKLTVDKSRWQQGNVFSCSVMHEALHNHYTQKSLSLSPGKKDPKAAAIEVMYPPPYLDNEKSNGTIIHVKGKHLCPSPLFPGPSKPFWVLVVVGGVLACYSLLVTVAFIIFWVRSKRSRLLHSDYMNMTPRRPGPTRKHYQPYAPPRDFAAYRSRVKFSRSADAPAYQQGQNQLYNELNLGRREEYDVLDKRRGRDPEMGGKPRRKNPQEGLYNELQKDKMAEAYSEIGMKGERRRGKGHDGLYQGLSTATKDTYDALHMQALPPR

SEQ ID NO: 206193 - protein, 726 aa, Artificial Sequence
  Description of Artificial Sequence: Synthetic Chimeric Antigen Receptor
LLVTSLLLCELPHPAFLLIPDTQVQLQQSGAEVKKPGSSVKVSCKASGYTFTDHFISWVRQAPGQGLEWMGGLNPYSGGTNYAQKFQGRVTITADESTSTAYMELSSLRSEDTAVYYCARHNWGAYFDYWWGQGTMVTVSSGGGGSGGGGSGGGGSEIVLTQSPATLSLSPGERATLSCRASKSLLHSNGNTYAWYQQKPGQAPRLLIYYMSRATGIPARFSGSGSGTDFTLTISSLEPEDFAVYYCMQGLEDPYTFFGQGTKLEIKREPKSCDKTHTCPPCPAPELLGGPSVFLFPPKPKDTLMISRTPEVTCVVVDVSHEDPEVKFNWYVDGVEVHNAKTKPREEQYNSTYRVVSVLTVLHQDWLNGKEYKCKVSNKALPAPIEKTISKAKGQPREPQVYTLPPSRDELTKNQVSLTCLVKGFYPSDIAVEWESNGQPENNYKTTPPVLDSDGSFFLYSKLTVDKSRWQQGNVFSCSVMHEALHNHYTQKSLSLSPGKKDPKAAAIEVMYPPPYLDNEKSNGTIIHVKGKHLCPSPLFPGPSKPFWVLVVVGGVLACYSLLVTVAFIIFWVRSKRSRLLHSDYMNMTPRRPGPTRKHYQPYAPPRDFAAYRSRVKFSRSADAPAYQQGQNQLYNELNLGRREEYDVLDKRRGRDPEMGGKPRRKNPQEGLYNELQKDKMAEAYSEIGMKGERRRGKGHDGLYQGLSTATKDTYDALHMQALPPR

SEQ ID NO: 206194 - protein, 728 aa, Artificial Sequence
  Description of Artificial Sequence: Synthetic Chimeric Antigen Receptor
LLVTSLLLCELPHPAFLLIPDTALQLQQSGAELVRPGASVTLSCKASGYTFTDYEMHWVKQTPVHGLEWIGAIDPETGGTAYNQKFEGKAILTADKSSSTAYMELRSLTSEDSPVYYCARRRYYGSSSFDYWGQGTTLTVSSGGGGSGGGGSGGGGSDVQMIQTPSSLSASLGDRVTISCRASQDIGNYLNWYQQKPDGTVKLLIYYTSRLHSGVPSRFSGSGSGTEYSLTISNLEQEDIATYFCQQGSALPPTFGGGTKLEINRAEPKSCDKTHTCPPCPAPELLGGPSVFLFPPKPKDTLMISRTPEVTCVVVDVSHEDPEVKFNWYVDGVEVHNAKTKPREEQYNSTYRVVSVLTVLHQDWLNGKEYKCKVSNKALPAPIEKTISKAKGQPREPQVYTLPPSRDELTKNQVSLTCLVKGFYPSDIAVEWESNGQPENNYKTTPPVLDSDGSFFLYSKLTVDKSRWQQGNVFSCSVMHEALHNHYTQKSLSLSPGKKDPKAAATTTPAPRPPTPAPTIASQPLSLRPEACRPAAGGAVHTRGLDFACDIYIWAPLAGTCGVLLLSLVITLYCKRGRKKLLYIFKQPFMRPVQTTQEEDGCSCRFPEEEEGGCELRVKFSRSADAPAYKQGQNQLYNELNLGRREEYDVLDKRRGRDPEMGGKPRRKNPQEGLYNELQKDKMAEAYSEIGMKGERRRGKGHDGLYQGLSTATKDTYDALHMQALPPR

SEQ ID NO: 206195 - protein, 728 aa, Artificial Sequence
  Description of Artificial Sequence: Synthetic Chimeric Antigen Receptor
LLVTSLLLCELPHPAFLLIPDTQVQLQQSGAELVKPGASVKISCKASGYAFSSYWMNWVKQRPGKGLEWIGQIYPGDGDTTYNGKFKGKATLTADKSSSTVYMQLNSLTSEDSAVYFCVRYYYGSSGYFDYWGQGTTLTVSSGGGGSGGGGSGGGGSDVQMIQTPDSLAVSLGQRATISCRASESVDNYGISFMHWYQQKPGQSPKLLIYRASNLESGIPARFSGSGSRTDFTLTINPVETDDVATYYCQQNNKDPPTFGGGTKLEIKRAEPKSCDKTHTCPPCPAPELLGGPSVFLFPPKPKDTLMISRTPEVTCVVVDVSHEDPEVKFNWYVDGVEVHNAKTKPREEQYNSTYRVVSVLTVLHQDWLNGKEYKCKVSNKALPAPIEKTISKAKGQPREPQVYTLPPSRDELTKNQVSLTCLVKGFYPSDIAVEWESNGQPENNYKTTPPVLDSDGSFFLYSKLTVDKSRWQQGNVFSCSVMHEALHNHYTQKSLSLSPGKKDPKAAAIEVMYPPPYLDNEKSNGTIIHVKGKHLCPSPLFPGPSKPFWVLVVVGGVLACYSLLVTVAFIIFWVRSKRSRLLHSDYMNMTPRRPGPTRKHYQPYAPPRDFAAYRSRVKFSRSADAPAYQQGQNQLYNELNLGRREEYDVLDKRRGRDPEMGGKPRRKNPQEGLYNELQKDKMAEAYSEIGMKGERRRGKGHDGLYQGLSTATKDTYDALHMQALPPR

SEQ ID NO: 206196 - protein, 728 aa, Artificial Sequence
  Description of Artificial Sequence: Synthetic Chimeric Antigen Receptor
LLVTSLLLCELPHPAFLLIPDTQVQLQQSGAEVKKPGSSVKVSCKASGFSLTSYAISWVRQAPGQGLEWMGGIIWSGGATNYAQKFQGRVTITADESTSTAYMELSSLRSEDTAVYYCAREHYYGSSAMDYWWGQGTMVTVSSGGGGSGGGGSGGGGSEIVLTQSPATLSLSPGERATLSCRASQSIVHSYGNTYAWYQQKPGQAPRLLIYRVSRATGIPARFSGSGSGTDFTLTISSLEPEDFAVYYCFQGTHVPYTFFGQGTKLEIKREPKSCDKTHTCPPCPAPELLGGPSVFLFPPKPKDTLMISRTPEVTCVVVDVSHEDPEVKFNWYVDGVEVHNAKTKPREEQYNSTYRVVSVLTVLHQDWLNGKEYKCKVSNKALPAPIEKTISKAKGQPREPQVYTLPPSRDELTKNQVSLTCLVKGFYPSDIAVEWESNGQPENNYKTTPPVLDSDGSFFLYSKLTVDKSRWQQGNVFSCSVMHEALHNHYTQKSLSLSPGKKDPKAAAIEVMYPPPYLDNEKSNGTIIHVKGKHLCPSPLFPGPSKPFWVLVVVGGVLACYSLLVTVAFIIFWVRSKRSRLLHSDYMNMTPRRPGPTRKHYQPYAPPRDFAAYRSRVKFSRSADAPAYQQGQNQLYNELNLGRREEYDVLDKRRGRDPEMGGKPRRKNPQEGLYNELQKDKMAEAYSEIGMKGERRRGKGHDGLYQGLSTATKDTYDALHMQALPPR

SEQ ID NO: 206197 - protein, 728 aa, Artificial Sequence
  Description of Artificial Sequence: Synthetic Chimeric Antigen Receptor
LLVTSLLLCELPHPAFLLIPDTQVQLQQSGAEVKKPGSSVKVSCKASGYAFSSYISWVRQAPGQGLEWMGGQIYPGDGDTNYAQKFQGRVTITADESTSTAYMELSSLRSEDTAVYYCVRYYYGSSGYFDYWWGQGTMVTVSSGGGGSGGGGSGGGGSEIVLTQSPATLSLSPGERATLSCRASESVDNYGISFAWYQQKPGQAPRLLIYRASRATGIPARFSGSGSGTDFTLTISSLEPEDFAVYYCQQNNKDPPTFFGQGTKLEIKRAEPKSCDKTHTCPPCPAPELLGGPSVFLFPPKPKDTLMISRTPEVTCVVVDVSHEDPEVKFNWYVDGVEVHNAKTKPREEQYNSTYRVVSVLTVLHQDWLNGKEYKCKVSNKALPAPIEKTISKAKGQPREPQVYTLPPSRDELTKNQVSLTCLVKGFYPSDIAVEWESNGQPENNYKTTPPVLDSDGSFFLYSKLTVDKSRWQQGNVFSCSVMHEALHNHYTQKSLSLSPGKKDPKAAAIEVMYPPPYLDNEKSNGTIIHVKGKHLCPSPLFPGPSKPFWVLVVVGGVLACYSLLVTVAFIIFWVRSKRSRLLHSDYMNMTPRRPGPTRKHYQPYAPPRDFAAYRSRVKFSRSADAPAYQQGQNQLYNELNLGRREEYDVLDKRRGRDPEMGGKPRRKNPQEGLYNELQKDKMAEAYSEIGMKGERRRGKGHDGLYQGLSTATKDTYDALHMQALPPR

SEQ ID NO: 206198 - protein, 728 aa, Artificial Sequence
  Description of Artificial Sequence: Synthetic Chimeric Antigen Receptor
LLVTSLLLCELPHPAFLLIPDTQVQLQQSGAEVKKPGSSVKVSCKASGYTFTDYEISWVRQAPGQGLEWMGGIDPETGGTNYAQKFQGRVTITADESTSTAYMELSSLRSEDTAVYYCARRRYYGSSSFDYWWGQGTMVTVSSGGGGSGGGGSGGGGSEIVLTQSPATLSLSPGERATLSCRASQDIGNYAWYQQKPGQAPRLLIYYTSRATGIPARFSGSGSGTDFTLTISSLEPEDFAVYYCQQGSALPPTFFGQGTKLEIKRAEPKSCDKTHTCPPCPAPELLGGPSVFLFPPKPKDTLMISRTPEVTCVVVDVSHEDPEVKFNWYVDGVEVHNAKTKPREEQYNSTYRVVSVLTVLHQDWLNGKEYKCKVSNKALPAPIEKTISKAKGQPREPQVYTLPPSRDELTKNQVSLTCLVKGFYPSDIAVEWESNGQPENNYKTTPPVLDSDGSFFLYSKLTVDKSRWQQGNVFSCSVMHEALHNHYTQKSLSLSPGKKDPKAAATTTPAPRPPTPAPTIASQPLSLRPEACRPAAGGAVHTRGLDFACDIYIWAPLAGTCGVLLLSLVITLYCKRGRKKLLYIFKQPFMRPVQTTQEEDGCSCRFPEEEEGGCELRVKFSRSADAPAYKQGQNQLYNELNLGRREEYDVLDKRRGRDPEMGGKPRRKNPQEGLYNELQKDKMAEAYSEIGMKGERRRGKGHDGLYQGLSTATKDTYDALHMQALPPR

SEQ ID NO: 206199 - protein, 729 aa, Artificial Sequence
  Description of Artificial Sequence: Synthetic Chimeric Antigen Receptor
LLVTSLLLCELPHPAFLLIPDTDVQLQESGPVLVKTGASVKMSCTASGYTFTDHFMDWVKQSHGKSLEWIGSLNPYSGGTSYNQKFKGKATLTVDKSSSTAYMELNSLTSVDSAVYYCARHNWGAYFDYWGQGTTLTVSSGGGGSGGGGSGGGGSDIVMTQAAPSVPVTPGESVSISCRSSKSLLHSNGNTYLYWFLQRPGQSPQRLIYYMSNLASGVPDRFSGRGSGTDFTLRISRVEAEDVGVYYCMQGLEDPYTFGGGTKLEIKEPKSCDKTHTCPPCPAPELLGGPSVFLFPPKPKDTLMISRTPEVTCVVVDVSHEDPEVKFNWYVDGVEVHNAKTKPREEQYNSTYRVVSVLTVLHQDWLNGKEYKCKVSNKALPAPIEKTISKAKGQPREPQVYTLPPSRDELTKNQVSLTCLVKGFYPSDIAVEWESNGQPENNYKTTPPVLDSDGSFFLYSKLTVDKSRWQQGNVFSCSVMHEALHNHYTQKSLSLSPGKKDPKAAATTTPAPRPPTPAPTIASQPLSLRPEACRPAAGGAVHTRGLDFACDIYIWAPLAGTCGVLLLSLVITLYCKRGRKKLLYIFKQPFMRPVQTTQEEDGCSCRFPEEEEGGCELRVKFSRSADAPAYKQGQNQLYNELNLGRREEYDVLDKRRGRDPEMGGKPRRKNPQEGLYNELQKDKMAEAYSEIGMKGERRRGKGHDGLYQGLSTATKDTYDALHMQALPPR

SEQ ID NO: 206200 - protein, 730 aa, Artificial Sequence
  Description of Artificial Sequence: Synthetic Chimeric Antigen Receptor
LLVTSLLLCELPHPAFLLIPDTDVKLQESGPGLVAPSQSLSITCTVSGFSLTSYAVSWVRQPPGKGLEWLGIIWSGGATNYNSALKSRLSISKDNSKSQVFLKMNGLQTDDTARYYCAREHYYGSSAMDYWGQGASITVSSGGGGSGGGGSGGGGSGIVMTQSPLSLPVSLGDQASISCRSSQSIVHSYGNTYLFWYLQKPGQSPKLLIYRVSNRFSGVPDRFSGSGSGTNFTLKISRVEAEDMGVYYCFQGTHVPYTFGGGTKLEIKEPKSCDKTHTCPPCPAPELLGGPSVFLFPPKPKDTLMISRTPEVTCVVVDVSHEDPEVKFNWYVDGVEVHNAKTKPREEQYNSTYRVVSVLTVLHQDWLNGKEYKCKVSNKALPAPIEKTISKAKGQPREPQVYTLPPSRDELTKNQVSLTCLVKGFYPSDIAVEWESNGQPENNYKTTPPVLDSDGSFFLYSKLTVDKSRWQQGNVFSCSVMHEALHNHYTQKSLSLSPGKKDPKAAATTTPAPRPPTPAPTIASQPLSLRPEACRPAAGGAVHTRGLDFACDIYIWAPLAGTCGVLLLSLVITLYCKRGRKKLLYIFKQPFMRPVQTTQEEDGCSCRFPEEEEGGCELRVKFSRSADAPAYKQGQNQLYNELNLGRREEYDVLDKRRGRDPEMGGKPRRKNPQEGLYNELQKDKMAEAYSEIGMKGERRRGKGHDGLYQGLSTATKDTYDALHMQALPPR

SEQ ID NO: 206201 - protein, 730 aa, Artificial Sequence
  Description of Artificial Sequence: Synthetic Chimeric Antigen Receptor
LLVTSLLLCELPHPAFLLIPDTQVQLQQSGAEVKKPGSSVKVSCKASGYTFTDHFISWVRQAPGQGLEWMGGLNPYSGGTNYAQKFQGRVTITADESTSTAYMELSSLRSEDTAVYYCARHNWGAYFDYWWGQGTMVTVSSGGGGSGGGGSGGGGSEIVLTQSPATLSLSPGERATLSCRASKSLLHSNGNTYAWYQQKPGQAPRLLIYYMSRATGIPARFSGSGSGTDFTLTISSLEPEDFAVYYCMQGLEDPYTFFGQGTKLEIKREPKSCDKTHTCPPCPAPELLGGPSVFLFPPKPKDTLMISRTPEVTCVVVDVSHEDPEVKFNWYVDGVEVHNAKTKPREEQYNSTYRVVSVLTVLHQDWLNGKEYKCKVSNKALPAPIEKTISKAKGQPREPQVYTLPPSRDELTKNQVSLTCLVKGFYPSDIAVEWESNGQPENNYKTTPPVLDSDGSFFLYSKLTVDKSRWQQGNVFSCSVMHEALHNHYTQKSLSLSPGKKDPKAAATTTPAPRPPTPAPTIASQPLSLRPEACRPAAGGAVHTRGLDFACDIYIWAPLAGTCGVLLLSLVITLYCKRGRKKLLYIFKQPFMRPVQTTQEEDGCSCRFPEEEEGGCELRVKFSRSADAPAYKQGQNQLYNELNLGRREEYDVLDKRRGRDPEMGGKPRRKNPQEGLYNELQKDKMAEAYSEIGMKGERRRGKGHDGLYQGLSTATKDTYDALHMQALPPR

SEQ ID NO: 206202 - protein, 732 aa, Artificial Sequence
  Description of Artificial Sequence: Synthetic Chimeric Antigen Receptor
LLVTSLLLCELPHPAFLLIPDTQVQLQQSGAELVKPGASVKISCKASGYAFSSYWMNWVKQRPGKGLEWIGQIYPGDGDTTYNGKFKGKATLTADKSSSTVYMQLNSLTSEDSAVYFCVRYYYGSSGYFDYWGQGTTLTVSSGGGGSGGGGSGGGGSDVQMIQTPDSLAVSLGQRATISCRASESVDNYGISFMHWYQQKPGQSPKLLIYRASNLESGIPARFSGSGSRTDFTLTINPVETDDVATYYCQQNNKDPPTFGGGTKLEIKRAEPKSCDKTHTCPPCPAPELLGGPSVFLFPPKPKDTLMISRTPEVTCVVVDVSHEDPEVKFNWYVDGVEVHNAKTKPREEQYNSTYRVVSVLTVLHQDWLNGKEYKCKVSNKALPAPIEKTISKAKGQPREPQVYTLPPSRDELTKNQVSLTCLVKGFYPSDIAVEWESNGQPENNYKTTPPVLDSDGSFFLYSKLTVDKSRWQQGNVFSCSVMHEALHNHYTQKSLSLSPGKKDPKAAATTTPAPRPPTPAPTIASQPLSLRPEACRPAAGGAVHTRGLDFACDIYIWAPLAGTCGVLLLSLVITLYCKRGRKKLLYIFKQPFMRPVQTTQEEDGCSCRFPEEEEGGCELRVKFSRSADAPAYKQGQNQLYNELNLGRREEYDVLDKRRGRDPEMGGKPRRKNPQEGLYNELQKDKMAEAYSEIGMKGERRRGKGHDGLYQGLSTATKDTYDALHMQALPPR

SEQ ID NO: 206203 - protein, 732 aa, Artificial Sequence [sequence omitted]

SEQ ID NO: 206204 - protein, 732 aa, Artificial Sequence
  Description of Artificial Sequence: Synthetic Chimeric Antigen Receptor
LLVTSLLLCELPHPAFLLIPDTQVQLQQSGAEVKKPGSSVKVSCKASGYAFSSYISWVRQAPGQGLEWMGGQIYPGDGDTNYAQKFQGRVTITADESTSTAYMELSSLRSEDTAVYYCVRYYYGSSGYFDYWWGQGTMVTVSSGGGGSGGGGSGGGGSEIVLTQSPATLSLSPGERATLSCRASESVDNYGISFAWYQQKPGQAPRLLIYRASRATGIPARFSGSGSGTDFTLTISSLEPEDFAVYYCQQNNKDPPTFFGQGTKLEIKRAEPKSCDKTHTCPPCPAPELLGGPSVFLFPPKPKDTLMISRTPEVTCVVVDVSHEDPEVKFNWYVDGVEVHNAKTKPREEQYNSTYRVVSVLTVLHQDWLNGKEYKCKVSNKALPAPIEKTISKAKGQPREPQVYTLPPSRDELTKNQVSLTCLVKGFYPSDIAVEWESNGQPENNYKTTPPVLDSDGSFFLYSKLTVDKSRWQQGNVFSCSVMHEALHNHYTQKSLSLSPGKKDPKAAATTTPAPRPPTPAPTIASQPLSLRPEACRPAAGGAVHTRGLDFACDIYIWAPLAGTCGVLLLSLVITLYCKRGRKKLLYIFKQPFMRPVQTTQEEDGCSCRFPEEEEGGCELRVKFSRSADAPAYKQGQNQLYNELNLGRREEYDVLDKRRGRDPEMGGKPRRKNPQEGLYNELQKDKMAEAYSEIGMKGERRRGKGHDGLYQGLSTATKDTYDALHMQALPPR

SEQ ID NO: 206205 - protein, 788 aa, Artificial Sequence
  Description of Artificial Sequence: Synthetic Chimeric Antigen Receptor
LLVTSLLLCELPHPAFLLIPDTALQLQQSGAELVRPGASVTLSCKASGYTFTDYEMHWVKQTPVHGLEWIGAIDPETGGTAYNQKFEGKAILTADKSSSTAYMELRSLTSEDSPVYYCARRRYYGSSSFDYWGQGTTLTVSSGGGGSGGGGSGGGGSDVQMIQTPSSLSASLGDRVTISCRASQDIGNYLNWYQQKPDGTVKLLIYYTSRLHSGVPSRFSGSGSGTEYSLTISNLEQEDIATYFCQQGSALPPTFGGGTKLEINRAEPKSCDKTHTCPPCPAPELLGGPSVFLFPPKPKDTLMISRTPEVTCVVVDVSHEDPEVKFNWYVDGVEVHNAKTKPREEQYNSTYRVVSVLTVLHQDWLNGKEYKCKVSNKALPAPIEKTISKAKGQPREPQVYTLPPSRDELTKNQVSLTCLVKGFYPSDIAVEWESNGQPENNYKTTPPVLDSDGSFFLYSKLTVDKSRWQQGNVFSCSVMHEALHNHYTQKSLSLSPGKKDPKAAAFVPVFLPAKPTTTPAPRPPTPAPTIASQPLSLRPEACRPAAGGAVHTRGLDFACDIYIWAPLAGTCGVLLLSLVITLYCNHRNRSKRSRLLHSDYMNMTPRRPGPTRKHYQPYAPPRDFAAYRSRFSVVKRGRKKLLYIFKQPFMRPVQTTQEEDGCSCRFPEEEEGGCELRVKFSRSADAPAYQQGQNQLYNELNLGRREEYDVLDKRRGRDPEMGGKPRRKNPQEGLYNELQKDKMAEAYSEIGMKGERRRGKGHDGLYQGLSTATKDTYDALHMQALPPR

SEQ ID NO: 206206 - protein, 788 aa, Artificial Sequence [sequence omitted]

SEQ ID NO: 206207 - protein, 789 aa, Artificial Sequence [sequence omitted]

SEQ ID NO: 206208 - protein, 790 aa, Artificial Sequence
  Description of Artificial Sequence: Synthetic Chimeric Antigen Receptor
LLVTSLLLCELPHPAFLLIPDTDVKLQESGPGLVAPSQSLSITCTVSGFSLTSYAVSWVRQPPGKGLEWLGIIWSGGATNYNSALKSRLSISKDNSKSQVFLKMNGLQTDDTARYYCAREHYYGSSAMDYWGQGASITVSSGGGGSGGGGSGGGGSGIVMTQSPLSLPVSLGDQASISCRSSQSIVHSYGNTYLFWYLQKPGQSPKLLIYRVSNRFSGVPDRFSGSGSGTNFTLKISRVEAEDMGVYYCFQGTHVPYTFGGGTKLEIKEPKSCDKTHTCPPCPAPELLGGPSVFLFPPKPKDTLMISRTPEVTCVVVDVSHEDPEVKFNWYVDGVEVHNAKTKPREEQYNSTYRVVSVLTVLHQDWLNGKEYKCKVSNKALPAPIEKTISKAKGQPREPQVYTLPPSRDELTKNQVSLTCLVKGFYPSDIAVEWESNGQPENNYKTTPPVLDSDGSFFLYSKLTVDKSRWQQGNVFSCSVMHEALHNHYTQKSLSLSPGKKDPKAAAFVPVFLPAKPTTTPAPRPPTPAPTIASQPLSLRPEACRPAAGGAVHTRGLDFACDIYIWAPLAGTCGVLLLSLVITLYCNHRNRSKRSRLLHSDYMNMTPRRPGPTRKHYQPYAPPRDFAAYRSRFSVVKRGRKKLLYIFKQPFMRPVQTTQEEDGCSCRFPEEEEGGCELRVKFSRSADAPAYQQGQNQLYNELNLGRREEYDVLDKRRGRDPEMGGKPRRKNPQEGLYNELQKDKMAEAYSEIGMKGERRRGKGHDGLYQGLSTATKDTYDALHMQALPPR

SEQ ID NO: 206209 - protein, 790 aa, Artificial Sequence
  Description of Artificial Sequence: Synthetic Chimeric Antigen Receptor
LLVTSLLLCELPHPAFLLIPDTQVQLQQSGAEVKKPGSSVKVSCKASGYTFTDHFISWVRQAPGQGLEWMGGLNPYSGGTNYAQKFQGRVTITADESTSTAYMELSSLRSEDTAVYYCARHNWGAYFDYWWGQGTMVTVSSGGGGSGGGGSGGGGSEIVLTQSPATLSLSPGERATLSCRASKSLLHSNGNTYAWYQQKPGQAPRLLIYYMSRATGIPARFSGSGSGTDFTLTISSLEPEDFAVYYCMQGLEDPYTFFGQGTKLEIKREPKSCDKTHTCPPCPAPELLGGPSVFLFPPKPKDTLMISRTPEVTCVVVDVSHEDPEVKFNWYVDGVEVHNAKTKPREEQYNSTYRVVSVLTVLHQDWLNGKEYKCKVSNKALPAPIEKTISKAKGQPREPQVYTLPPSRDELTKNQVSLTCLVKGFYPSDIAVEWESNGQPENNYKTTPPVLDSDGSFFLYSKLTVDKSRWQQGNVFSCSVMHEALHNHYTQKSLSLSPGKKDPKAAAFVPVFLPAKPTTTPAPRPPTPAPTIASQPLSLRPEACRPAAGGAVHTRGLDFACDIYIWAPLAGTCGVLLLSLVITLYCNHRNRSKRSRLLHSDYMNMTPRRPGPTRKHYQPYAPPRDFAAYRSRFSVVKRGRKKLLYIFKQPFMRPVQTTQEEDGCSCRFPEEEEGGCELRVKFSRSADAPAYQQGQNQLYNELNLGRREEYDVLDKRRGRDPEMGGKPRRKNPQEGLYNELQKDKMAEAYSEIGMKGERRRGKGHDGLYQGLSTATKDTYDALHMQALPPR

SEQ ID NO: 206210 - protein, 792 aa, Artificial Sequence
  Description of Artificial Sequence: Synthetic Chimeric Antigen Receptor
LLVTSLLLCELPHPAFLLIPDTQVQLQQSGAELVKPGASVKISCKASGYAFSSYWMNWVKQRPGKGLEWIGQIYPGDGDTTYNGKFKGKATLTADKSSSTVYMQLNSLTSEDSAVYFCVRYYYGSSGYFDYWGQGTTLTVSSGGGGSGGGGSGGGGSDVQMIQTPDSLAVSLGQRATISCRASESVDNYGISFMHWYQQKPGQSPKLLIYRASNLESGIPARFSGSGSRTDFTLTINPVETDDVATYYCQQNNKDPPTFGGGTKLEIKRAEPKSCDKTHTCPPCPAPELLGGPSVFLFPPKPKDTLMISRTPEVTCVVVDVSHEDPEVKFNWYVDGVEVHNAKTKPREEQYNSTYRVVSVLTVLHQDWLNGKEYKCKVSNKALPAPIEKTISKAKGQPREPQVYTLPPSRDELTKNQVSLTCLVKGFYPSDIAVEWESNGQPENNYKTTPPVLDSDGSFFLYSKLTVDKSRWQQGNVFSCSVMHEALHNHYTQKSLSLSPGKKDPKAAAFVPVFLPAKPTTTPAPRPPTPAPTIASQPLSLRPEACRPAAGGAVHTRGLDFACDIYIWAPLAGTCGVLLLSLVITLYCNHRNRSKRSRLLHSDYMNMTPRRPGPTRKHYQPYAPPRDFAAYRSRFSVVKRGRKKLLYIFKQPFMRPVQTTQEEDGCSCRFPEEEEGGCELRVKFSRSADAPAYQQGQNQLYNELNLGRREEYDVLDKRRGRDPEMGGKPRRKNPQEGLYNELQKDKMAEAYSEIGMKGERRRGKGHDGLYQGLSTATKDTYDALHMQALPPR

SEQ ID NO: 206211 - protein, 792 aa, Artificial Sequence
  Description of Artificial Sequence: Synthetic Chimeric Antigen Receptor
LLVTSLLLCELPHPAFLLIPDTQVQLQQSGAEVKKPGSSVKVSCKASGFSLTSYAISWVRQAPGQGLEWMGGIIWSGGATNYAQKFQGRVTITADESTSTAYMELSSLRSEDTAVYYCAREHYYGSSAMDYWWGQGTMVTVSSGGGGSGGGGSGGGGSEIVLTQSPATLSLSPGERATLSCRASQSIVHSYGNTYAWYQQKPGQAPRLLIYRVSRATGIPARFSGSGSGTDFTLTISSLEPEDFAVYYCFQGTHVPYTFFGQGTKLEIKREPKSCDKTHTCPPCPAPELLGGPSVFLFPPKPKDTLMISRTPEVTCVVVDVSHEDPEVKFNWYVDGVEVHNAKTKPREEQYNSTYRVVSVLTVLHQDWLNGKEYKCKVSNKALPAPIEKTISKAKGQPREPQVYTLPPSRDELTKNQVSLTCLVKGFYPSDIAVEWESNGQPENNYKTTPPVLDSDGSFFLYSKLTVDKSRWQQGNVFSCSVMHEALHNHYTQKSLSLSPGKKDPKAAAFVPVFLPAKPTTTPAPRPPTPAPTIASQPLSLRPEACRPAAGGAVHTRGLDFACDIYIWAPLAGTCGVLLLSLVITLYCNHRNRSKRSRLLHSDYMNMTPRRPGPTRKHYQPYAPPRDFAAYRSRFSVVKRGRKKLLYIFKQPFMRPVQTTQEEDGCSCRFPEEEEGGCELRVKFSRSADAPAYQQGQNQLYNELNLGRREEYDVLDKRRGRDPEMGGKPRRKNPQEGLYNELQKDKMAEAYSEIGMKGERRRGKGHDGLYQGLSTATKDTYDALHMQALPPR

SEQ ID NO: 206212 - protein, 792 aa, Artificial Sequence
  Description of Artificial Sequence: Synthetic Chimeric Antigen Receptor
LLVTSLLLCELPHPAFLLIPDTQVQLQQSGAEVKKPGSSVKVSCKASGYAFSSYISWVRQAPGQGLEWMGGQIYPGDGDTNYAQKFQGRVTITADESTSTAYMELSSLRSEDTAVYYCVRYYYGSSGYFDYWWGQGTMVTVSSGGGGSGGGGSGGGGSEIVLTQSPATLSLSPGERATLSCRASESVDNYGISFAWYQQKPGQAPRLLIYRASRATGIPARFSGSGSGTDFTLTISSLEPEDFAVYYCQQNNKDPPTFFGQGTKLEIKRAEPKSCDKTHTCPPCPAPELLGGPSVFLFPPKPKDTLMISRTPEVTCVVVDVSHEDPEVKFNWYVDGVEVHNAKTKPREEQYNSTYRVVSVLTVLHQDWLNGKEYKCKVSNKALPAPIEKTISKAKGQPREPQVYTLPPSRDELTKNQVSLTCLVKGFYPSDIAVEWESNGQPENNYKTTPPVLDSDGSFFLYSKLTVDKSRWQQGNVFSCSVMHEALHNHYTQKSLSLSPGKKDPKAAAFVPVFLPAKPTTTPAPRPPTPAPTIASQPLSLRPEACRPAAGGAVHTRGLDFACDIYIWAPLAGTCGVLLLSLVITLYCNHRNRSKRSRLLHSDYMNMTPRRPGPTRKHYQPYAPPRDFAAYRSRFSVVKRGRKKLLYIFKQPFMRPVQTTQEEDGCSCRFPEEEEGGCELRVKFSRSADAPAYQQGQNQLYNELNLGRREEYDVLDKRRGRDPEMGGKPRRKNPQEGLYNELQKDKMAEAYSEIGMKGERRRGKGHDGLYQGLSTATKDTYDALHMQALPPR

SEQ ID NO: 206213 - protein, 614 aa, Artificial Sequence
  Description of Artificial Sequence: Synthetic Chimeric Antigen Receptor
METDTLLLWVLLLWVPGSTGSVLHLVPINATSKDDSDVTEVMWQPALRRGRGLQAQGYGVRIQDAGVYLLYSQVLFQDVTFTMGQVVSREGQGRQETLFRCIRSMPSHPDRAYNSCYSAGVFHLHQGDILSVIIPRARAKLNLSPHGTFLGFVKLSGGGSDPAEPKSPDKTHTCPPCPAPPVAGPSVFLFPPKPKDTLMIARTPEVTCVVVDVSHEDPEVKFNWYVDGVEVHNAKTKPREEQYNSTYRVVSVLTVLHQDWLNGKEYKCKVSNKALPAPIEKTISKAKGQPREPQVYTLPPSRDELTKNQVSLTCLVKGFYPSDIAVEWESNGQPENNYKTTPPVLDSDGSFFLYSKLTVDKSRWQQGNVFSCSVMHEALHNHYTQKSLSLSPGKKDPKFWVLVVVGGVLACYSLLVTVAFIIFWVRSKRSRLLHSDYMNMTPRRPGPTRKHYQPYAPPRDFAAYRSRDQRLPPDAHKPPGGGSFRTPIQEEQADAHSTLAKIRVKFSRSADAPAYQQGQNQLYNELNLGRREEYDVLDKRRGRDPEMGGKPRRKNPQEGLYNELQKDKMAEAYSEIGMKGERRRGKGHDGLYQGLSTATKDTYDALHMQALPPR

SEQ ID NO: 206214 - protein, 398 aa, Artificial Sequence
  Description of Artificial Sequence: Synthetic Chimeric Antigen Receptor
METDTLLLWVLLLWVPGSTGSVLHLVPINATSKDDSDVTEVMWQPALRRGRGLQAQGYGVRIQDAGVYLLYSQVLFQDVTFTMGQVVSREGQGRQETLFRCIRSMPSHPDRAYNSCYSAGVFHLHQGDILSVIIPRARAKLNLSPHGTFLGFVKLSGGGSDPAEPKSPDKTHTCPPCPKDPKFWVLVVVGGVLACYSLLVTVAFIIFWVRSKRSRLLHSDYMNMTPRRPGPTRKHYQPYAPPRDFAAYRSRDQRLPPDAHKPPGGGSFRTPIQEEQADAHSTLAKIRVKFSRSADAPAYQQGQNQLYNELNLGRREEYDVLDKRRGRDPEMGGKPRRKNPQEGLYNELQKDKMAEAYSEIGMKGERRRGKGHDGLYQGLSTATKDTYDALHMQALPPR

SEQ ID NO: 206215 - protein, 482 aa, Artificial Sequence; identical to SEQ ID NO: 206161
  Description of Artificial Sequence: Synthetic polypeptide

SEQ ID NO: 206216 - protein, 480 aa, Artificial Sequence
  Description of Artificial Sequence: Synthetic polypeptide
MALPVTALLLPLALLLHAARPEVQLVESGGGLVQPGGSLRLSCAVSGFALSNHGMSWVRRAPGKGLEWVSGIVYSGSTYYAASVKGRFTISRDNSRNTLYLQMNSLRPEDTAIYYCSAHGGESDVWGQGTTVTVSSASGGGGSGGRASGGGGSDIQLTQSPSSLSASVGDRVTITCRASQSISSYLNWYQQKPGKAPKLLIYAASSLQSGVPSRFSGSGSGTDFTLTISSLQPEDFATYYCQQSYSTPYTFGQGTKVEIKTTTPAPRPPTPAPTIASQPLSLRPEACRPAAGGAVHTRGLDFACDIYIWAPLAGTCGVLLLSLVITLYCKRGRKKLLYIFKQPFMRPVQTTQEEDGCSCRFPEEEEGGCELRVKFSRSADAPAYKQGQNQLYNELNLGRREEYDVLDKRRGRDPEMGGKPRRKNPQEGLYNELQKDKMAEAYSEIGMKGERRRGKGHDGLYQGLSTATKDTYDALHMQAL

SEQ ID NO: 206217 - protein, 136 aa, Artificial Sequence
  Description of Artificial Sequence: Synthetic Chimeric Antigen Receptor
CPYSNPSLCSGGGGSELPTQGTFSNVSTNVSPAKPTTTACPYSNPSLCSGGGGSPAPRPPTPAPTIASQPLSLRPEACRPAAGGAVHTRGLDFACDIYIWAPLAGTCGVLLLSLVITLYCNHRNRRRVCKCPRPVV

SEQ ID NO: 206218 - protein, 212 aa, Artificial Sequence
  Description of Artificial Sequence: Synthetic Chimeric Antigen Receptor
MALPVTALLLPLALLLHAARPEVQLVETGGGLVQPGGSLRLSCAASGFTFSSYAMSWVRQAPGKGLEWVSAISGSGGSTYYADSVKGRFTISRDNSKNTLYLQMNTLKAEDTAVYYCARATYKRELRYYYGMDVWGQGTTVTVSSGGGGSGGGGSGGGGSEIVLTQSPSTLSLSPGESATLSCRASQSVSTTFLAWYQQKPGQAPRLLIYGS

SEQ ID NO: 206219 - protein, 391 aa, Artificial Sequence
  Description of Artificial Sequence: Synthetic Chimeric Antigen Receptor
MALPVTALLLPLALLLHAARPGSGSGAQAAQVQLVQSGAEVKKPGASVKVSCKASGYSFPDYYINWVRQAPGQGLEWMGWIYFASGNSEYNQKFTGRVTMTRDTSSSTAYMELSSLRSEDTAVYFCASLYDYDWYFDVWGQGTMVTVSSGGGGSGGGGSGGGGSDIVMTQTPLSLSVTPGEPASISCKSSQSLVHSNGNTYLHWYLQKPGQSPQLLIYKVSNRFSGVPDRFSGSGSGADFTLKISRVEAEDVGVYYCAETSHVPWTFGQGTKLEIKRSDPASGAGSGSGSAIELLPVPGAKKSAKLYIPYIILTIIILTIVGFIWLLKVNGCRKYKLNKTESTPVVEEDEMQPYASYTEKNNPLYDTTNKVKASEALQSEVDTDLHTLSHG

SEQ ID NO: 206220 - protein, 394 aa, Artificial Sequence
  Description of Artificial Sequence: Synthetic Chimeric Antigen Receptor
METDTLLLWVLLLWVPGSTGSVLHLVPINATSKDDSDVTEVMWQPALRRGRGLQAQGYGVRIQDAGVYLLYSQVLFQDVTFTMGQVVSREGQGRQETLFRCIRSMPSHPDRAYNSCYSAGVFHLHQGDILSVIIPRARAKLNLSPHGTFLGFVLSGGGSDPAEPKSPDKTHTCPPCPDPFWVLWVGGVLACYSLLVTVAFIIFWVRSKRSRLLHSDYMNMTPRRPGPTRKHYQPYAPPRDFAAYRSRDQRLPPDAHKPPGGGSFRTPIQEEQADAHSTLAKIRVKFSRSADAPAYQQGQNQLYNELNLGRREEYDVLDKRRGRDPEMGGKPRRKNPQEGLYNELQKDKMAEAYSEIGMKGERRRGKGHDGLYQGLSTATKDTYDALHMQALPPR

SEQ ID NO: 206221 - protein, 416 aa, Artificial Sequence
  Description of Artificial Sequence: Synthetic Chimeric Antigen Receptor
MGTSLLCWMALCLLGADHADGKPIPNPLLGLDSTSGGGGSVLHLVPINATSKDDSDVTEVMWQPALRRGRGLQAQGYGVRIQDAGVYLLYSQVLFQDVTFTMGQVVSREGQGRQETLFRCIRSMPSHPDRAYNSCYSAGVFHLHQGDILSVIIPRARAKLNLSPHGTFLGFVKLSGGGSDPAEPKSPDKTHTCPPCPKDPKFWVLVVVGGVLACYSLLVTVAFIIFVRSKRSRLLHSDYMNMTPRRPGPTRKHYQPYAPPRDFAAYRSRDQRLPPDAHKPPGGGSFRTPIQEEQADAHSTLAKIRVKFSRSADAPAYQQGQNQLYNELNLGRREEYDVLDKRRGRDPEMGGKPRRKNPQEGLYNELQKDKMAEAYSEIGMKGERRRGKGHDGLYQGLSTATKDTYDALHMQALPPR

SEQ ID NO: 206222 - protein, 417 aa, Artificial Sequence
  Description of Artificial Sequence: Synthetic Chimeric Antigen Receptor
MGTSLLCWMALCLLGADHADGKPIPNPLLGLDSTSGGGGSVLHLVPINATSKDDSDVTEVMWQPALRRGRGLQAQGYGVRIQDAGVYLLYSQVLFQDVTFTMGQVVSREGQGRQETLFRCIRSMPSHPDRAYNSCYSAGVFHLHQGDILSVIIPRARAKLNLSPHGTFLGFVKLSGGGSDPAEPKSPDKTHTCPPCPKDPKFWVLVVVGGVLACYSLLVTVAFIIFWVRSKRSRLLHSDYMNMTPRRPGPTRKHYQPYAPPRDFAAYRSRDQRLPPDAHKPPGGGSFRTPIQEEQADAHSTLAKIRVKFSRSADAPAYQQGQNQLYNELNLGRREEYDVLDKRRGRDPEMGGKPRRKNPQEGLYNELQKDKMAEAYSEIGMKGERRRGKGHDGLYQGLSTATKDTYDALHMQALPPR

SEQ ID NO: 206223 - protein, 422 aa, Artificial Sequence
  Description of Artificial Sequence: Synthetic Chimeric Antigen Receptor
METDTLLLWVLLLWVPGSTGSVLHLVPINATSKDDSDVTEVMWQPALRRGRGLQAQGYGVRIQDAGVYLLYSQVLFQDVTFTMGQVVSREGQGRQETLFRCIRSMPSHPDRAYNSCYSAGVFHLHQGDILSVIIPRARAKLNLSPHGTFLGFVKLSGGGSDPTTTPAPRPPTPAPTIASQPLSLRPEACRPAAGGAVHTRGLDFACDIFWVLVVVGGVLACYSLLVTVAFIIFWVRSKRSRLLHSDYMNMTPRRPGPTRKHYQPYAPPRDFAAYRSRDQRLPPDAHKPPGGGSFRTPIQEEQADAHSTLAKIRVKFSRSADAPAYQQGQNQLYNELNLGRREEYDVLDKRRGRDPEMGGKPRRKNPQEGLYNELQKDKAEAYSEIGMKGERRRGKGHDGLYQGLSTATKDYDALHMQALPPR

SEQ ID NO: 206224 - protein, 438 aa, Artificial Sequence
  Description of Artificial Sequence: Synthetic Chimeric Antigen Receptor
MGTSLLCMALCLLGADHADGKPIPNPLLGLDSTSGGGGSVLHLVPINATSKDDSDVTEVMWQPALRRGRGLQAQGYGVRIQDAGVYLLYSQVLFQDVTFTMGQWSREGQGRQETLFRCIRSMPSHPDRAYNSCYSAGVFHLHQGDILSIIPRARAKLNLSPHGTFLGFVKLSGGGSDPTTTPAPRPPTPAPTIASQPLSLRPEACRPAAGGAVHTRGLDFACDIFWVLWVGGVLACYSLLVTVAFIIFWVRSKRSRLLHSDYMNMTPRRPGPTRKHYQPYAPPRDFAAYRSRDQRLPPDAHKPPGGGSFRTPIQEEQADAHSTLAKIRVKFSRSADAPAYQQGQNQLYNELNLGRREEYDVLDKRRGRDPEMGGKPRRKNPQEGLYNELQKDKMAEAYSEIGMKGERRRGKGHDGLYQGLSATKDTYDALHMQALPPR

SEQ ID NO: 206225 - protein, 443 aa, Artificial Sequence
  Description of Artificial Sequence: Synthetic Chimeric Antigen Receptor
MGTSLLCWMALCLLGADHADGKPIPNPLLGLDSTSGGGGSVLHLVPINATSKDDSDVTEVMWQPALRRGRGLQAQGYGVRIQDAGVYLLYSQVLFQDVTFTMGQVVSREGQGRQETLFRCIRSMPSHPDRAYNSCYSAGVFHLHQGDILSVIIPRARAKLNLSPHGTFLGFVKLSGGGSDPTTTPAPRPPTPAPTIASQPLSLRPEACRPAAGGAVHTRGLDFACDIFWVLVVVGGVLACYSLLVTVAFIIFWVRSKRSRLLHSDYMNMTPRRPGPTRKHYQPYAPPRDFAAYRSRDQRLPPDAHKPPGGGSFRTPIQEEQADAHSTLAKIRVKFSRSADAPAYQQGQNQLYNELNLGRREEYDVLDKRRGRDPEMGGKPRRKNPQEGLYNELQKDKMAEAYSEIGMKGERRRGKGHDGLYQGLSTATKDTYDALHMQALPPR

SEQ ID NO: 206226 - protein, 461 aa, Artificial Sequence
  Description of Artificial Sequence: Synthetic Chimeric Antigen Receptor
MALPVTALLLPLALLLHAARPQVQLVQSGAEVKKPGASVKVSCKASGYSFPDYYINWVRQAPGQGLEWMGWIYFASGNSEYNQKFTGRVTMTRDTSINTAYMELSSLTSEDTAVYFCASLYDYDWYFDVWGQGTMVTVSSGGGGSGGGGSGGGGSDIVMTQTPLSLSVTPGQPASISCKSSQSLVHSNGNTYLHWYLQKPGQSPQLLIYKVSNRFSGVPDRFSGSGSGTDFTLKISRVEAEDVGIYYCSQSSIYPWTFGQGTKLEIKGLAVSTISSFFPPGYQIYIWAPLAGTCGVLLLSLVITLYCKRGRKKLLYIFKQPFMRPVQTTQEEDGCSCRFPEEEEGGCELRVKFSRSADAPAYQQGQNQLYNELNLGRREEYDVLDKRRGRDPEMGGKPRRKNPQEGLYNELQKDKMAEAYSEIGMKGERRRGKGHDGLYQGLSTATKDTYDALHMQALPPR

SEQ ID NO: 206227 - protein, 461 aa, Artificial Sequence
  Description of Artificial Sequence: Synthetic Chimeric Antigen Receptor
MALPVTALLLPLALLLHAARPQVQLVQSGAEVKKPGASVKVSCKASGYSFPDYYINWVRQAPGQGLEWMGWIYFASGNSEYNQKFTGRVTMTRDTSSSTAYMELSSLRSEDTAVYFCASLYDYDWYFDVWGQGTMVTVSSGGGGSGGGGSGGGGSDIVMTQTPLSLSVTPGEPASISCKSSQSLVHSNGNTYLHWYLQKPGQSPQLLIYKVSNRFSGVPDRFSGSGSGADFTLKISRVEAEDVGVYYCAETSHVPWTFGQGTKLEIKGLAVSTISSFFPPGYQIYIWAPLAGTCGVLLLSLVITLYCKRGRKKLLYIFKQPFMRPVQTTQEEDGCSCRFPEEEEGGCELRVKFSRSADAPAYQQGQNQLYNELNLGRREEYDVLDKRRGRDPEMGGKPRRKNPQEGLYNELQKDKMAEAYSEIGMKGERRRGKGHDGLYQGLSTATKDTYDALHMQALPPR

SEQ ID NO: 206228 - protein, 464 aa, Artificial Sequence
  Description of Artificial Sequence: Synthetic Chimeric Antigen Receptor
EVQLLESGGGLVQPGGSLRLSCAASGFTFSSYAMNWVRQAPGKGLEWVSAILSSGGSTYYADSVKGRFTISRDNSKNTLYLQMNSLRAEDTAVYYCARYWPMDIWGQGTLVTVSSGGGGSGGGGSGGGGSEIVLTQSPGTLSLSPGERATLSCRGGQSVSSSYLAWYQQKPGQAPRLLMYDASIRATGIPDRFSGSGSGTDFTLTISRLEPEDFAVYYCQQYQSWPLTFGQGTKVEIKAPTTTPAPRPPTPAPTIASQPLSLRPEACRPAAGGAVHTRGLDFACDIYIWAPLAGTCGVLLLSLVITLYCRRGRKKLLYIFKQPFMRPVQTTQEEDGCSCRFPEEEEGGCELRVKFSRSADAPAYQQGQNQLYNELNLGRREEYDVLDKRRGRDPEMGGKPRRKNPQEGLYNELQKDKMAEAYSEIGMKGERRRGKGHDGLYQGLSTATKDTYDALHMQALPPRE

SEQ ID NO: 206229 - protein, 464 aa, Artificial Sequence
  Description of Artificial Sequence: Synthetic Chimeric Antigen Receptor
MALPVTALLLPLALLLHAARPQVQLVQSGAEVKKPGASVKVSCKASGYSFPDYYINWVRQAPGQGLEWMGWIYFASGNSEYNQKFTGRVTMTRDTSINTAYMELSSLTSEDTAVYFCASLYDYDWYFDVWGQGTMVTVSSGGGGSGGGGSGGGGSDIVMTQTPLSLSVTPGQPASISCKSSQSLVHSNGNTYLHWYLQKPGQSPQLLIYKVSNRFSGVPDRFSGSGSGTDFTLKISRVEAEDVGIYYCSQSSIYPWTFGQGTKLEIKGLAVSTISSFFPPGYQIISFFLALTSTALLFLLFFLTLRFSVVKRGRKKLLYIFKQPFMRPVQTTQEEDGCSCRFPEEEEGGCELRVKFSRSADAPAYQQGQNQLYNELNLGRREEYDVLDKRRGRDPEMGGKPRRKNPQEGLYNELQKDKMAEAYSEIGMKGERRRGKGHDGLYQGLSTATKDTYDALHMQALPPR

SEQ ID NO: 206230 - protein, 464 aa, Artificial Sequence
  Description of Artificial Sequence: Synthetic Chimeric Antigen Receptor
MALPVTALLLPLALLLHAARPQVQLVQSGAEVKKPGASVKVSCKASGYSFPDYYINWVRQAPGQGLEWMGWIYFASGNSEYNQKFTGRVTMTRDTSSSTAYMELSSLRSEDTAVYFCASLYDYDWYFDVWGQGTMVTVSSGGGGSGGGGSGGGGSDIVMTQTPLSLSVTPGEPASISCKSSQSLVHSNGNTYLHWYLQKPGQSPQLLIYKVSNRFSGVPDRFSGSGSGADFTLKISRVEAEDVGVYYCAETSHVPWTFGQGTKLEIKGLAVSTISSFFPPGYQIISFFLALTSTALLFLLFFLTLRFSVVKRGRKKLLYIFKQPFMRPVQTTQEEDGCSCRFPEEEEGGCELRVKFSRSADAPAYQQGQNQLYNELNLGRREEYDVLDKRRGRDPEMGGKPRRKNPQEGLYNELQKDKMAEAYSEIGMKGERRRGKGHDGLYQGLSTATKDTYDALHMQALPPR

SEQ ID NO: 206231 - protein, 466 aa, Artificial Sequence
  Description of Artificial Sequence: Synthetic Chimeric Antigen Receptor
EVQLLESGGGLVQPGGSLRLSCAASGFTFSSYAMNWVRQAPGKGLEWVSAILSSGGSTYYADSVKGRFTISRDNSKNTLYLQMNSLRAEDTAVYYCARYWPMDIWGQGTLVTVSSGGSCPYSNPSLCSGGSEIVLTQSPGTLSLSPGERATLSCRGGQSVSSSYLAWYQQKPGQAPRLLMYDASIRATGIPDRFSGSGSGTDFTLTISRLEPEDFAVYYCQQYQSWPLTFGQGTKVEIKSDPTTTPAPRPPTPAPTIASQPLSLRPEACRPAAGGAVHTRGLDFACDIYIWAPLAGTCGVLLLSLVITLYCRRGRKKLLYIFKQPFMRPVQTTQEEDGCSCRFPEEEEGGCELRVKFSRSADAPAYQQGQNQLYNELNLGRREEYDVLDKRRGRDPEMGGKPRRKNPQEGLYNELQKDKMAEAYSEIGMKGERRRGKGHDGLYQGLSTATKDTYDALHMQALPPRE

SEQ ID NO: 206232 - protein, 466 aa, Artificial Sequence
  Description of Artificial Sequence: Synthetic Chimeric Antigen Receptor
QIQLVQSGPELKKPGETVKISCKASGYTFRHYSMNWVKQAPGKGLKWMGRINTESGVPIYADDFKGRFAFSVETSASTAYLVINNLKDEDTASYFCSNDYLYSLDFWGQGTALTVSSGGGGSGGGGSGGGGSDIVLTQSPPSLAMSLGKRATISCRASESVTILGSHLIYWYQQKPGQPPTLLIQLASNVQTGVPARFSGSGSRTDFTLTIDPVEEDDVAVYYCLQSRTIPRTFGGGTKLEIKTTTPAPRPPTPAPTIASQPLSLRPEACRPAAGGAVHTRGLDFACDIYIWAPLAGTCGVLLLSLVITLYCKRGRKKLLYIFKQPFMRPVQTTQEEDGCSCRFPEEEEGGCELRVKFSRSADAPAYKQGQNQLYNELNLGRREEYDVLDKRRGRDPEMGGKPRRKNPQEGLYNELQKDKMAEAYSEIGMKGERRRGKGHDGLYQGLSTATKDTYDALHMQALPPR

SEQ ID NO: 206233 - protein, 466 aa, Artificial Sequence
  Description of Artificial Sequence: Synthetic Chimeric Antigen Receptor
QIQLVQSGPELKKPGETVKISCKASGYTFTHYSMNWVKQAPGKGLKWMGRINTETGEPLYADDFKGRFAFSLETSASTAYLVINNLKNEDTATFFCSNDYLYSCDYWGQGTTLTVSSGGGGSGGGGSGGGGSDIVLTQSPPSLAMSLGKRATISCRASESVTILGSHLIYWYQQKPGQPPTLLIQLASNVQTGVPARFSGSGSRTDFTLTIDPVEEDDVAVYYCLQSRTIPRTFGGGTKLEIKTTTPAPRPPTPAPTIASQPLSLRPEACRPAAGGAVHTRGLDFACDIYIWAPLAGTCGVLLLSLVITLYCKRGRKKLLYIFKQPFMRPVQTTQEEDGCSCRFPEEEEGGCELRVKFSRSADAPAYKQGQNQLYNELNLGRREEYDVLDKRRGRDPEMGGKPRRKNPQEGLYNELQKDKMAEAYSEIGMKGERRRGKGHDGLYQGLSTATKDTYDALHMQALPPR

SEQ ID NO: 206234 - protein, 467 aa, Artificial Sequence
  Description of Artificial Sequence: Synthetic Chimeric Antigen Receptor
QIQLVQSGPDLKKPGETVKLSCKASGYTFTNFGMNWVKQAPGKGFKWMAWINTYTGESYFADDFKGRFAFSVETSATTAYLQINNLKTEDTATYFCARGEIYYGYDGGFAYWGQGTLVTVSAGGGGSGGGGSGGGGSDVVMTQSHRFMSTSVGDRVSITCRASQDVNTAVSWYQQKPGQSPKLLIFSASYRYTGVPDRFTGSGSGADFTLTISSVQAEDLAVYYCQQHYSTPWTFGGGTKLDIKTTTPAPRPPTPAPTIASQPLSLRPEACRPAAGGAVHTRGLDFACDIYIWAPLAGTCGVLLLSLVITLYCKRGRKKLLYIFKQPFMRPVQTTQEEDGCSCRFPEEEEGGCELRVKFSRSADAPAYKQGQNQLYNELNLGRREEYDVLDKRRGRDPEMGGKPRRKNPQEGLYNELQKDKMAEAYSEIGMKGERRRGKGHDGLYQGLSTATKDTYDALHMQALPPR

SEQ ID NO: 206235 - protein, 469 aa, Artificial Sequence
  Description of Artificial Sequence: Synthetic Chimeric Antigen Receptor
QVQLVQSGAEVKKPGASVKVSCKASGYSFPDYYINWVRQAPGQGLEWMGWIYFASGNSEYNQKFTGRVTMTRDTSSSTAYMELSSLRSEDTAVYFCASLYDYDWYFDVWGQGTMVTVSSGGGGSGGGGSGGGGSDIVMTQTPLSLSVTPGEPASISCKSSQSLVHSNGNTYLHWYLQKPGQSPQLLIYKVSNRFSGVPDRFSGSGSGADFTLKISRVEAEDVGVYYCAETSHVPWTFGQGTKLEIKTTTPAPRPPTPAPTIASQPLSLRPEACRPAAGGAVHTRGLDFACDIYIWAPLAGTCGVLLLSLVITLYCKRGRKKLLYIFKQPFMRPVQTTQEEDGCSCRFPEEEEGGCELRVKFSRSADAPAYQQGQNQLYNELNLGRREEYDVLDKRRGRDPEMGGKPRRKNPQEGLYNELQKDKMAEAYSEIGMKGERRRGKGHDGLYQGLSTATKDTYDALHMQALPPR

SEQ ID NO: 206236 - protein, 472 aa, Artificial Sequence
  Description of Artificial Sequence: Synthetic Chimeric Antigen Receptor
EVQLLESGGGLVQPGGSLRLSCAASGFTFSSYAMNWVRQAPGKGLEWVSAILSSGGSTYYADSVKGRFTISRDNSKNTLYLQMNSLRAEDTAVYYCARYWPMDIWGQGTLVTVSSGGGGGSCPYSNPSLCSGGGGGSEIVLTQSPGTLSLSPGERATLSCRGGQSVSSSYLAWYQQKPGQAPRLLMYDASIRATGIPDRFSGSGSGTDFTLTISRLEPEDFAVYYCQQYQSWPLTFGQGTKVEIKSDPTTTPAPRPPTPAPTIASQPLSLRPEACRPAAGGAVHTRGLDFACDIYIWAPLAGTCGVLLLSLVITLYCRRGRKKLLYIFKQPFMRPVQTTQEEDGCSCRFPEEEEGGCELRVKFSRSADAPAYQQGQNQLYNELNLGRREEYDVLDKRRGRDPEMGGKPRRKNPQEGLYNELQKDKMAEAYSEIGMKGERRRGKGHDGLYQGLSTATKDTYDALHMQALPPRE

SEQ ID NO: 206237 - protein, 472 aa, Artificial Sequence
  Description of Artificial Sequence: Synthetic Chimeric Antigen Receptor
QIQLVQSGPELKKPGETVKISCKASGYTFTDYSINWVKRAPGKGLKWMGWINTETREPAYAYDFRGRFAFSLETSASTAYLQINNLKYEDTATYFCALDYSYAMDYWGQGTSVTVSSGGGGSGGGGSGGGGSQIQLVQSGPELKKPGETVKISCKASGYTFTDYSINWVKRAPGKGLKWMGWINTETREPAYAYDFRGRFAFSLETSASTAYLQINNLKYEDTATYFCALDYSYAMDYWGQGTSVTVSSTTTPAPRPPTPAPTIASQPLSLRPEACRPAAGGAVHTRGLDFACDIYIWAPLAGTCGVLLLSLVITLYCKRGRKKLLYIFKQPFMRPVQTTQEEDGCSCRFPEEEEGGCELRVKFSRSADAPAYKQGQNQLYNELNLGRREEYDVLDKRRGRDPEMGGKPRRKNPQEGLYNELQKDKMAEAYSEIGMKGERRRGKGHDGLYQGLSTATKDTYDALHMQALPPR

SEQ ID NO: 206238 - protein, 483 aa, Artificial Sequence
  Description of Artificial Sequence: Synthetic Chimeric Antigen Receptor
MALPVTALLLPLALLLHAARPEVQLVESGGGLVQPGGSLRLSCAVSGFALSNHGMSWVRRAPGKGLEWVSGIVYSGSTYYAASVKGRFTISRDNSRNTLYLQMNSLRPEDTAIYYCSAHGGESDVWGQGTTVTVSSASGGGGSGGRASGGGGSDIQLTQSPSSLSASVGDRVTITCRASQSISSYLNWYQQKPGKAPKLLIYAASSLQSGVPSRFSGSGSGTDFTLTISSLQPEDFATYYCQQSYSTPYTFGQGTKVEIKTTTPAPRPPTPAPTIASQPLSLRPEACRPAAGGAVHTRGLDFACDIYIWAPLAGTCGVLLLSLVITLYCKRGRKKLLYIFKQPFMRPVQTTQEEDGCSCRFPEEEEGGCELRVKFSRSADAPAYKQGQNQLYNELNLGRREEYDVLDKRRGRDPEMGGKPRRKNPQEGLYNELQKDKMAEAYSEIGMKGERRRGKGHDGLYQGLSTATKDTYDALHMQALPPR

SEQ ID NO: 206239 - protein, 483 aa, Artificial Sequence
  Description of Artificial Sequence: Synthetic Chimeric Antigen Receptor
MALPVTALLLPLALLLHAARPEVQLVETGGGLVQPGGSLRLSCAVSGFALSNHGMSWVRRAPGKGLEWVSGIVYSGSTYYAASVKGRFTISRDNSRNTLYLQMNSLRPEDTAIYYCSAHGGESDVWGQGTTVTVSSASGGGGSGGRASGGGGSEIVMTQSPATLSVSPGERATLSCRASQSVSSKLAWYQQKPGQAPRLLMYGASIRATGIPDRFSGSGSGTEFTLTISSLEPEDFAVYYCQQYGSSSWTFGQGTKVEIKTTTPAPRPPTPAPTIASQPLSLRPEACRPAAGGAVHTRGLDFACDIYIWAPLAGTCGVLLLSLVITLYCKRGRKKLLYIFKQPFMRPVQTTQEEDGCSCRFPEEEEGGCELRVKFSRSADAPAYKQGQNQLYNELNLGRREEYDVLDKRRGRDPEMGGKPRRKNPQEGLYNELQKDKMAEAYSEIGMKGERRRGKGHDGLYQGLSTATKDTYDALHMQALPPR

SEQ ID NO: 206240 - protein, 485 aa, Artificial Sequence
  Description of Artificial Sequence: Synthetic Chimeric Antigen Receptor
MALPVTALLLPLALLLHAARPDIVLTQSPASLAVSLGERATINCRASESVSVIGAHLIHWYQQKPGQPPKLLIYLASNLETGVPARFSGSGSGTDFTLTISSLQAEDAAIYYCLQSRIFPRTFGQGTKLEIKGSTSGSGKPGSGEGSTKGQVQLVQSGSELKKPGASVKVSCKASGYTFTDYSINWVRQAPGQGLEWMGWINTETREPAYAYDFRGRFVFSLDTSVSTAYLQISSLKAEDTAVYYCARDYSYAMDYWGQGTLVTVSSAAAQIKESLRAELRVTERRAEVPTAHPSPSPRPAGQFQTLVVGVVGGLLGSLVLLVWVLAVICSKRGRKKLLYIFKQPFMRPVQTTQEEDGCSCRFPEEEEGGCELRVKFSRSADAPAYQQGQNQLYNELNLGRREEYDVLDKRRGRDPEMGGKPRRKNPQEGLYNELQKDKMAEAYSEIGMKGERRRGKGHDGLYQGLSTATKDTYDALHMQALPPR

SEQ ID NO: 206241 - protein, 485 aa, Artificial Sequence
  Description of Artificial Sequence: Synthetic Chimeric Antigen Receptor
MALPVTALLLPLALLLHAARPEVQLVESGGGLVQPGGSLRLSCAASGFTFSSYAMSWVRQAPGKGLEWVSAISGSGGSTYYADSVKGRFTISRDNSKNTLYLQMNSLRAEDTAVYYCAKVVRDGMDVWGQGTTVTVSSGGGGSGGGGSGGGGSEIVLTQSPATLSLSPGERATLSCRASQSVSSSYLAWYQQKPGQAPRLLIYGASSRATGIPDRFSGNGSGTDFTLTISRLEPEDFAVYYCQQYGSPPRFTFGPGTKVDIKTTTPAPRPPTPAPTIASQPLSLRPEACRPAAGGAVHTRGLDFACDIYIWAPLAGTCGVLLLSLVITLYCKRGRKKLLYIFKQPFMRPVQTTQEEDGCSCRFPEEEEGGCELRVKFSRSADAPAYKQGQNQLYNELNLGRREEYDVLDKRRGRDPEMGGKPRRKNPQEGLYNELQKDKMAEAYSEIGMKGERRRGKGHDGLYQGLSTATKDTYDALHMQALPPR

SEQ ID NO: 206242 - protein, 485 aa, Artificial Sequence
  Description of Artificial Sequence: Synthetic Chimeric Antigen Receptor
MALPVTALLLPLALLLHAARPEVQLVETGGGLVQPGGSLRLSCAASGITFSRYPMSWVRQAPGKGLEWVSGISDSGVSTYYADSAKGRFTISRDNSKNTLFLQMSSLRDEDTAVYYCVTRAGSEASDIWGQGTMVTVSSGGGGSGGGGSGGGGSEIVLTQSPATLSLSPGERATLSCRASQSVSNSLAWYQQKPGQAPRLLIYDASSRATGIPDRFSGSGSGTDFTLTISRLEPEDFAIYYCQQFGTSSGLTFGGGTKLEIKTTTPAPRPPTPAPTIASQPLSLRPEACRPAAGGAVHTRGLDFACDIYIWAPLAGTCGVLLLSLVITLYCKRGRKKLLYIFKQPFMRPVQTTQEEDGCSCRFPEEEEGGCELRVKFSRSADAPAYKQGQNQLYNELNLGRREEYDVLDKRRGRDPEMGGKPRRKNPQEGLYNELQKDKMAEAYSEIGMKGERRRGKGHDGLYQGLSTATKDTYDALHMQALPPR

SEQ ID NO: 206243 - protein, 485 aa, Artificial Sequence
  Description of Artificial Sequence: Synthetic Chimeric Antigen Receptor
MALPVTALLLPLALLLHAARPEVQLVETGGGVVQPGGSLRLSCAVSGFALSNHGMSWVRRAPGKGLEWVSGIVYSGSTYYAASVKGRFTISRDNSRNTLYLQMNSLRPEDTAIYYCSAHGGESDVWGQGTTVTVSSASGGGGSGGRASGGGGSEIVLTQSPGTLSLSPGERATLSCRASQSVGSTNLAWYQQKPGQAPRLLIYDASNRATGIPDRFSGGGSGTDFTLTISRLEPEDFAVYYCQQYGSSPPWTFGQGTKVEIKTTTPAPRPPTPAPTIASQPLSLRPEACRPAAGGAVHTRGLDFACDIYIWAPLAGTCGVLLLSLVITLYCKRGRKKLLYIFKQPFMRPVQTTQEEDGCSCRFPEEEEGGCELRVKFSRSADAPAYKQGQNQLYNELNLGRREEYDVLDKRRGRDPEMGGKPRRKNPQEGLYNELQKDKMAEAYSEIGMKGERRRGKGHDGLYQGLSTATKDTYDALHMQALPPR

SEQ ID NO: 206244 - protein, 485 aa, Artificial Sequence
  Description of Artificial Sequence: Synthetic Chimeric Antigen Receptor
MALPVTALLLPLALLLHAARPQVQLVQSGAEVKKPGASVKVSCKPSGYTVTSHYIHWVRRAPGQGLEWMGMINPSGGVTAYSQTLQGRVTMTSDTSSSTVYMELSSLRSEDTAMYYCAREGSGSGWYFDFWGRGTLVTVSSGGGGSGGGGSGGGGSSYVLTQPPSVSVSPGQTASITCSGDGLSKKYVSWYQQKAGQSPVVLISRDKERPSGIPDRFSGSNSADTATLTISGTQAMDEADYYCQAWDDTTVVFGGGTKLTVLTTTPAPRPPTPAPTIASQPLSLRPEACRPAAGGAVHTRGLDFACDIYIWAPLAGTCGVLLLSLVITLYCKRGRKKLLYIFKQPFMRPVQTTQEEDGCSCRFPEEEEGGCELRVKFSRSADAPAYKQGQNQLYNELNLGRREEYDVLDKRRGRDPEMGGKPRRKNPQEGLYNELQKDKMAEAYSEIGMKGERRRGKGHDGLYQGLSTATKDTYDALHMQALPPR

SEQ ID NO: 206245 - protein, 485 aa, Artificial Sequence
  Description of Artificial Sequence: Synthetic Chimeric Antigen Receptor
QVQLVQSGAEVKKPGASVKVSCKASGYSFPDYYINWVRQAPGQGLEWMGWIYFASGNSEYNQKFTGRVTMTRDTSSSTAYMELSSLRSEDTAVYFCASLYDYDWYFDVWGQGTMVTVSSGGGGSGGGGSGGGGSDIVMTQTPLSLSVTPGEPASISCKSSQSLVHSNGNTYLHWYLQKPGQSPQLLIYKVSNRFSGVPDRFSGSGSGADFTLKISRVEAEDVGVYYCAETSHVPWTFGQGTKLEIKGSGGGGSCPYSNPSLCTTTPAPRPPTPAPTIASQPLSLRPEACRPAAGGAVHTRGLDFACDIYIWAPLAGTCGVLLLSLVITLYCKRGRKKLLYIFKQPFMRPVQTTQEEDGCSCRFPEEEEGGCELRVKFSRSADAPAYQQGQNQLYNELNLGRREEYDVLDKRRGRDPEMGGKPRRKNPQEGLYNELQKDKMAEAYSEIGMKGERRRGKGHDGLYQGLSTATKDTYDALHMQALPPR

SEQ ID NO: 206246 - protein, 487 aa, Artificial Sequence
  Description of Artificial Sequence: Synthetic Chimeric Antigen Receptor
MALPVTALLLPLALLLHAARPDIVLTQSPASLAVSLGERATINCRASESVSVIGAHLIHWYQQKPGQPPKLLIYLASNLETGVPARFSGSGSGTDFTLTISSLQAEDAAIYYCLQSRIFPRTFGQGTKLEIKGSTSGSGKPGSGEGSTKGQVQLVQSGSELKKPGASVKVSCKASGYTFTDYSINWVRQAPGQGLEWMGWINTETREPAYAYDFRGRFVFSLDTSVSTAYLQISSLKAEDTAVYYCARDYSYAMDYWGQGTLVTVSSAAADTGLYICKVELMYPPPYYLGIGNGTQIYVIDPEPCPDSDFLLWILAAVSSGLFFYSFLLTAVSKRGRKKLLYIFKQPFMRPVQTTQEEDGCSCRFPEEEEGGCELRVKFSRSADAPAYQQGQNQLYNELNLGRREEYDVLDKRRGRDPEMGGKPRRKNPQEGLYNELQKDKMAEAYSEIGMKGERRRGKGHDGLYQGLSTATKDTYDALHMQALPPR

SEQ ID NO: 206247 - protein, 488 aa, Artificial Sequence
  Description of Artificial Sequence: Synthetic Chimeric Antigen Receptor
MALPVTALLLPLALLLHAARPQVNLRESGPALVKPTQTLTLTCTFSGFSLRTSGMCVSWIRQPPGKALEWLARIDWDEDKFYSTSLKTRLTISKDTSDNQVVLRMTNMDPADTATYYCARSGAGGTSATAFDIWGPGTMVTVSSGGGGSGGGGSGGGGSDIQMTQSPSSLSASVGDRVTITCRASQDIYNNLWFQLKPGSAPRSLMYAANKSQSGVPSRFSGSASGTDFTLTISSLQPEDFATYYCQHYYRFPYSFGQGTKLEIKTTTPAPRPPTPAPTIASQPLSLRPEACRPAAGGAVHTRGLDFACDIYIWAPLAGTCGVLLLSLVITLYCKRGRKKLLYIFKQPFMRPVQTTQEEDGCSCRFPEEEEGGCELRVKFSRSADAPAYKQGQNQLYNELNLGRREEYDVLDKRRGRDPEMGGKPRRKNPQEGLYNELQKDKMAEAYSEIGMKGERRRGKGHDGLYQGLSTATKDTYDALHMQALPPR

SEQ ID NO: 206248 - protein, 488 aa, Artificial Sequence
  Description of Artificial Sequence: Synthetic Chimeric Antigen Receptor
MALPVTALLLPLALLLHAARPQVQLQESGPGLVKPSQTLSLTCTVSGGSISSGGYYWSWIRQHPGKGLEWIGYIYYSGSTYYNPSLKSRVTISVDTSKNQFSLKLSSVTAADTAVYYCARAGIAARLRGAFDIWGQGTMVTVSSGGGGSGGGGSGGGGSDIVMTQSPSSVSASVGDRVIITCRASQGIRNWLWYQQKPGKAPNLLIYAASNLQSGVPSRFSGSGSGADFTLTISSLQPEDVATYYCQKYNSAPFTFGPGTKVDIKTTTPAPRPPTPAPTIASQPLSLRPEACRPAAGGAVHTRGLDFACDIYIWAPLAGTCGVLLLSLVITLYCKRGRKKLLYIFKQPFMRPVQTTQEEDGCSCRFPEEEEGGCELRVKFSRSADAPAYKQGQNQLYNELNLGRREEYDVLDKRRGRDPEMGGKPRRKNPQEGLYNELQKDKMAEAYSEIGMKGERRRGKGHDGLYQGLSTATKDTYDALHMQALPPR

SEQ ID NO: 206249 - protein, 489 aa, Artificial Sequence
  Description of Artificial Sequence: Synthetic Chimeric Antigen Receptor
MALPVTALLLPLALLLHAARPEVQLVESGGGLVQPGGSLRLSCAASGFTFSSYAMSWVRQAPGKGLEWVSAISGSGGSTYYADSVKGRFTISRDNSKNTLYLQMNSLRAEDTAVYYCAKMGWSSGYLGAFDIWGQGTTVTVSSGGGGSGGGGSGGGGSEIVLTQSPGTLSLSPGERATLSCRASQSVASSFLWYQQKPGQAPRLLIYGASGRATGIPDRFSGSGSGTDFTLTISRLEPEDFAVYYCQHYGGSPRLIFGGGTKVDIKTTTPAPRPPTPAPTIASQPLSLRPEACRPAAGGAVHTRGLDFACDIYIWAPLAGTCGVLLLSLVITLYCKRGRKKLLYIFKQPFMRPVQTTQEEDGCSCRFPEEEEGGCELRVKFSRSADAPAYKQGQNQLYNELNLGRREEYDVLDKRRGRDPEMGGKPRRKNPQEGLYNELQKDKMAEAYSEIGMKGERRRGKGHDGLYQGLSTATKDTYDALHMQALPPR

SEQ ID NO: 206250 - protein, 489 aa, Artificial Sequence
  Description of Artificial Sequence: Synthetic Chimeric Antigen Receptor
MALPVTALLLPLALLLHAARPEVQLVESGGGLVQPGRSLRLSCTASGFTFDDYAMHWVRQRPGKGLEWVASINWKGNSLAYGDSVKGRFAISRDNAKNTVFLQMNSLRTEDTAVYYCASHQGVAYYNYAMDVWGRGTLVTVSSGGGGSGGGGSGGGGSEIVLTQSPGTLSLSPGERATLSCRATQSIGSSFLWYQQRPGQAPRLLIYGASQRATGIPDRFSGRGSGTDFTLTISRVEPEDSAVYYCQHYESSPSWIFGQGTKVEIKTTTPAPRPPTPAPTIASQPLSLRPEACRPAAGGAVHTRGLDFACDIYIWAPLAGTCGVLLLSLVITLYCKRGRKKLLYIFKQPFMRPVQTTQEEDGCSCRFPEEEEGGCELRVKFSRSADAPAYKQGQNQLYNELNLGRREEYDVLDKRRGRDPEMGGKPRRKNPQEGLYNELQKDKMAEAYSEIGMKGERRRGKGHDGLYQGLSTATKDTYDALHMQALPPR

SEQ ID NO: 206251 - protein, 489 aa, Artificial Sequence
  Description of Artificial Sequence: Synthetic Chimeric Antigen Receptor
MALPVTALLLPLALLLHAARPQVQLQESGGGLVQPGGSLRLSCAASGFTFSSDAMTWVRQAPGKGLEWVSVISGSGGTTYYADSVKGRFTISRDNSKNTLYLQMNSLRAEDTAVYYCAKLDSSGYYYARGPRYWGQGTLVTVSSASGGGGSGGRASGGGGSDIQLTQSPSSLSASVGDRVTITCRASQSISSYLNWYQQKPGKAPKLLIYGASTLASGVPARFSGSGSGTHFTLTINSLQSEDSATYYCQQSYKRAFGQGTKVEIKTTTPAPRPPTPAPTIASQPLSLRPEACRPAAGGAVHTRGLDFACDIYIWAPLAGTCGVLLLSLVITLYCKRGRKKLLYIFKQPFMRPVQTTQEEDGCSCRFPEEEEGGCELRVKFSRSADAPAYKQGQNQLYNELNLGRREEYDVLDKRRGRDPEMGGKPRRKNPQEGLYNELQKDKMAEAYSEIGMKGERRRGKGHDGLYQGLSTATKDTYDALHMQALPPR

SEQ ID NO: 206252 - protein, 489 aa, Artificial Sequence
  Description of Artificial Sequence: Synthetic Chimeric Antigen Receptor
MALPVTALLLPLALLLHAARPQVQLVESGGGLVQPGRSLRLSCAASGFTFSNYAMSWVRQAPGKGLGWVSGISRSGENTYYADSVKGRFTISRDNSKNTLYLQMNSLRDEDTAVYYCARSPAHYYGGMDVWGQGTTVTVSSASGGGGSGGRASGGGGSDIVLTQSPGTLSLSPGERATLSCRASQSISSSFLWYQQKPGQAPRLLIYGASRRATGIPDRFSGSGSGTDFTLTISRLEPEDSAVYYCQQYHSSPSWIFGQGTKLEIKTTTPAPRPPTPAPTIASQPLSLRPEACRPAAGGAVHTRGLDFACDIYIWAPLAGTCGVLLLSLVITLYCKRGRKKLLYIFKQPFMRPVQTTQEEDGCSCRFPEEEEGGCELRVKFSRSADAPAYKQGQNQLYNELNLGRREEYDVLDKRRGRDPEMGGKPRRKNPQEGLYNELQKDKMAEAYSEIGMKGERRRGKGHDGLYQGLSTATKDTYDALHMQALPPR

SEQ ID NO: 206253 - protein, 490 aa, Artificial Sequence
  Description of Artificial Sequence: Synthetic Chimeric Antigen Receptor
EVQLLESGGGLVQPGGSLRLSCAASGFTFSSYAMNWVRQAPGKGLEWVSAILSSGGSTYYADSVKGRFTISRDNSKNTLYLQMNSLRAEDTAVYYCARYWPMDIWGQGTLVTVSSGGSCPYSNPSLCSGGSEIVLTQSPGTLSLSPGERATLSCRGGQSVSSSYLAWYQQKPGQAPRLLMYDASIRATGIPDRFSGSGSGTDFTLTISRLEPEDFAVYYCQQYQSWPLTFGQGTKVEIKSDPGSGGGGSCPYSNPSLCSGGGGSAPTTTPAPRPPTPAPTIASQPLSLRPEACRPAAGGAVHTRGLDFACDIYIWAPLAGTCGVLLLSLVITLYCRRGRKKLLYIFKQPFMRPVQTTQEEDGCSCRFPEEEEGGCELRVKFSRSADAPAYQQGQNQLYNELNLGRREEYDVLDKRRGRDPEMGGKPRRKNPQEGLYNELQKDKMAEAYSEIGMKGERRRGKGHDGLYQGLSTATKDTYDALHMQALPPRE

SEQ ID NO: 206254 - protein, 490 aa, Artificial Sequence
  Description of Artificial Sequence: Synthetic Chimeric Antigen Receptor
MALPVTALLLPLALLLHAARPEVQLVESGGGLVKPGGSLRLSCAASGFTFSSYSMNWVRQAPGKGLEWVSSISSSSSYIYYADSVKGRFTISRDNAKNSLYLQMNSLRAEDTAVYYCAKTIAAVYAFDIWGQGTTVTVSSGGGGSGGGGSGGGGSEIVLTQSPLSLPVTPEEPASISCRSSQSLLHSNGYNYLDWYLQKPGQSPQLLIYLGSNRASGVPDRFSGSGSGTDFTLKISRVEAEDVGVYYCMQALQTPYIFGQGTKLEIKTTTPAPRPPTPAPTIASQPLSLRPEACRPAAGGAVHTRGLDFACDIYIWAPLAGTCGVLLLSLVITLYCKRGRKKLLYIFKQPFMRPVQTTQEEDGCSCRFPEEEEGGCELRVKFSRSADAPAYKQGQNQLYNELNLGRREEYDVLDKRRGRDPEMGGKPRRKNPQEGLYNELQKDKMAEAYSEIGMKGERRRGKGHDGLYQGLSTATKDTYDALHMQALPPR

SEQ ID NO: 206255 - protein, 490 aa, Artificial Sequence
  Description of Artificial Sequence: Synthetic Chimeric Antigen Receptor
MALPVTALLLPLALLLHAARPEVQLVESGGGLVQPGGSLRLSCAASGFTFSSYAMSWVRQAPGKGLEWVSAISGSGGSTYYADSVKGRFTISRDNSKNTLYLQMNSLRAEDTAVYYCAKVEGSGSLDYWGQGTLVTVSSGGGGSGGGGSGGGGSEIVMTQSPGTLSLSPGERATLSCRASQSVSSAYLAWYQQKPGQPPRLLISGASTRATGIPDRFGGSGSGTDFTLTISRLEPEDFAVYYCQHYGSSFNGSSLFIFGQGTRLEIKTTTPAPRPPTPAPTIASQPLSLRPEACRPAAGGAVHTRGLDFACDIYIWAPLAGTCGVLLLSLVITLYCKRGRKKLLYIFKQPFMRPVQTTQEEDGCSCRFPEEEEGGCELRVKFSRSADAPAYKQGQNQLYNELNLGRREEYDVLDKRRGRDPEMGGKPRRKNPQEGLYNELQKDKMAEAYSEIGMKGERRRGKGHDGLYQGLSTATKDTYDALHMQALPPR

SEQ ID NO: 206256 - protein, 490 aa, Artificial Sequence
  Description of Artificial Sequence: Synthetic Chimeric Antigen Receptor
MALPVTALLLPLALLLHAARPQVQLVQSGAEVKKPGASVKVSCKASGYSFPDYYINWVRQAPGQGLEWMGWIYFASGNSEYNQKFTGRVTMTRDTSINTAYMELSSLTSEDTAVYFCASLYDYDWYFDVWGQGTMVTVSSGGGGSGGGGSGGGGSDIVMTQTPLSLSVTPGQPASISCKSSQSLVHSNGNTYLHWYLQKPGQSPQLLIYKVSNRFSGVPDRFSGSGSGTDFTLKISRVEAEDVGIYYCSQSSIYPWTFGQGTKLEIKTTTPAPRPPTPAPTIASQPLSLRPEACRPAAGGAVHTRGLDFACDIYIWAPLAGTCGVLLLSLVITLYCKRGRKKLLYIFKQPFMRPVQTTQEEDGCSCRFPEEEEGGCELRVKFSRSADAPAYQQGQNQLYNELNLGRREEYDVLDKRRGRDPEMGGKPRRKNPQEGLYNELQKDKMAEAYSEIGMKGERRRGKGHDGLYQGLSTATKDTYDALHMQALPPR

SEQ ID NO: 206257 - protein, 490 aa, Artificial Sequence
  Description of Artificial Sequence: Synthetic Chimeric Antigen Receptor
MALPVTALLLPLALLLHAARPQVQLVQSGAEVKKPGASVKVSCKASGYSFPDYYINWVRQAPGQGLEWMGWIYFASGNSEYNQKFTGRVTMTRDTSSSTAYMELSSLRSEDTAVYFCASLYDYDWYFDVWGQGTMVTVSSGGGGSGGGGSGGGGSDIVMTQTPLSLSVTPGEPASISCKSSQSLVHSNGNTYLHWYLQKPGQSPQLLIYKVSNRFSGVPDRFSGSGSGADFTLKISRVEAEDVGVYYCAETSHVPWTFGQGTKLEIKTTTPAPRPPTPAPTIASQPLSLRPEACRPAAGGAVHTRGLDFACDIYIWAPLAGTCGVLLLSLVITLYCKRGRKKLLYIFKQPFMRPVQTTQEEDGCSCRFPEEEEGGCELRVKFSRSADAPAYQQGQNQLYNELNLGRREEYDVLDKRRGRDPEMGGKPRRKNPQEGLYNELQKDKMAEAYSEIGMKGERRRGKGHDGLYQGLSTATKDTYDALHMQALPPR

SEQ ID NO: 206258 - protein, 490 aa, Artificial Sequence
  Description of Artificial Sequence: Synthetic Chimeric Antigen Receptor
MALPVTALLLPLALLLHAARPQVQLVQSGGGLVKPGGSLRLSCAASGFTFSDYYMSWIRQAPGKGLEWVSYISSSGNTIYYADSVKGRFTISRDNAKNSLYLQMNSLRAEDTAVYYCARSTMVREDYWGQGTLVTVSSASGGGGSGGRASGGGGSDIVLTQSPLSLPVTLGQPASISCKSSESLVHNSGKTYLNWFHQRPGQSPRRLIYEVSNRDSGVPDRFTGSGSGTDFTLKISRVEAEDVGVYYCMQGTHWPGIFGQGTKLEIKTTTPAPRPPTPAPTIASQPLSLRPEACRPAAGGAVHTRGLDFACDIYIWAPLAGTCGVLLLSLVITLYCKRGRKKLLYIFKQPFMRPVQTTQEEDGCSCRFPEEEEGGCELRVKFSRSADAPAYKQGQNQLYNELNLGRREEYDVLDKRRGRDPEMGGKPRRKNPQEGLYNELQKDKMAEAYSEIGMKGERRRGKGHDGLYQGLSTATKDTYDALHMQALPPR

SEQ ID NO: 206259 - protein, 491 aa, Artificial Sequence
  Description of Artificial Sequence: Synthetic Chimeric Antigen Receptor
GGGGSCPYSNPSLCSGGGGSGGGGSEVQLLESGGGLVQPGGSLRLSCAASGFTFSSYAMNWVRQAPGKGLEWVSAILSSGGSTYYADSVKGRFTISRDNSKNTLYLQMNSLRAEDTAVYYCARYWPMDIWGQGTLVTVSSGGSCPYSNPSLCSGGSEIVLTQSPGTLSLSPGERATLSCRGGQSVSSSYLAWYQQKPGQAPRLLMYDASIRATGIPDRFSGSGSGTDFTLTISRLEPEDFAVYYCQQYQSWPLTFGQGTKVEIKSDPTTTPAPRPPTPAPTIASQPLSLRPEACRPAAGGAVHTRGLDFACDIYIWAPLAGTCGVLLLSLVITLYCRRGRKKLLYIFKQPFMRPVQTTQEEDGCSCRFPEEEEGGCELRVKFSRSADAPAYQQGQNQLYNELNLGRREEYDVLDKRRGRDPEMGGKPRRKNPQEGLYNELQKDKMAEAYSEIGMKGERRRGKGHDGLYQGLSTATKDTYDALHMQALPPRE

SEQ ID NO: 206260 - protein, 491 aa, Artificial Sequence
  Description of Artificial Sequence: Synthetic Chimeric Antigen Receptor
QVQLVQSGAEVKKPGASVKVSCKASGYSFPDYYINWVRQAPGQGLEWMGWIYFASGNSEYNQKFTGRVTMTRDTSSSTAYMELSSLRSEDTAVYFCASLYDYDWYFDVWGQGTMVTVSSGGGGSGGGGSGGGGSDIVMTQTPLSLSVTPGEPASISCKSSQSLVHSNGNTYLHWYLQKPGQSPQLLIYKVSNRFSGVPDRFSGSGSGADFTLKISRVEAEDVGVYYCAETSHVPWTFGQGTKLEIKGSGGGGSCPYSNPSLCSGGGGSTTTPAPRPPTPAPTIASQPLSLRPEACRPAAGGAVHTRGLDFACDIYIWAPLAGTCGVLLLSLVITLYCKRGRKKLLYIFKQPFMRPVQTTQEEDGCSCRFPEEEEGGCELRVKFSRSADAPAYQQGQNQLYNELNLGRREEYDVLDKRRGRDPEMGGKPRRKNPQEGLYNELQKDKMAEAYSEIGMKGERRRGKGHDGLYQGLSTATKDTYDALHMQALPPR

SEQ ID NO: 206261 - protein, 492 aa, Artificial Sequence
  Description of Artificial Sequence: Synthetic Chimeric Antigen Receptor
MALPVTALLLPLALLLHAARPEVQLVETGGGLVQPGGSLRLSCAASGFTFSSYAMSWVRQAPGKGLEWVSAISGSGGSTYYADSVKGRFTISRDNSKNTLYLQMNTLKAEDTAVYYCARATYKRELRYYYGMDVWGQGTTVTVSSGGGGSGGGGSGGGGSEIVLTQSPSTLSLSPGESATLSCRASQSVSTTFLAWYQQKPGQAPRLLIYGSSNRATGIPDRFSGSGSGTDFTLTIRRLEPEDFAVYYCQQYHSSPSWTFGQGTKVEIKTTTPAPRPPTPAPTIASQPLSLRPEACRPAAGGAVHTRGLDFACDIYIWAPLAGTCGVLLLSLVITLYCKRGRKKLLYIFKQPFMRPVQTTQEEDGCSCRFPEEEEGGCELRVKFSRSADAPAYKQGQNQLYNELNLGRREEYDVLDKRRGRDPEMGGKPRRKNPQEGLYNELQKDKMAEAYSEIGMKGERRRGKGHDGLYQGLSTATKDTYDALHMQALPPR

SEQ ID NO: 206262 - protein, 492 aa, Artificial Sequence
  Description of Artificial Sequence: Synthetic Chimeric Antigen Receptor
MALPVTALLLPLALLLHAARPEVQLVETGGGLVQPGGSLRLSCAASGFTFSSYAMSWVRQAPGKGLEWVSAISGSGGSTYYADSVKGRFTMSRENDKNSVFLQMNSLRVEDTGVYYCARANYKRELRYYYGMDVWGQGTMVTVSSGGGGSGGGGSGGGGSEIVMTQSPGTLSLSPGESATLSCRASQRVASNYLAWYQHKPGQAPSLLISGASSRATGVPDRFSGSGSGTDFTLAISRLEPEDSAVYYCQHYDSSPSWTFGQGTKVEIKTTTPAPRPPTPAPTIASQPLSLRPEACRPAAGGAVHTRGLDFACDIYIWAPLAGTCGVLLLSLVITLYCKRGRKKLLYIFKQPFMRPVQTTQEEDGCSCRFPEEEEGGCELRVKFSRSADAPAYKQGQNQLYNELNLGRREEYDVLDKRRGRDPEMGGKPRRKNPQEGLYNELQKDKMAEAYSEIGMKGERRRGKGHDGLYQGLSTATKDTYDALHMQALPPR

SEQ ID NO: 206263 - protein, 493 aa, Artificial Sequence
  Description of Artificial Sequence: Synthetic Chimeric Antigen Receptor
MALPVTALLLPLALLLHAARPDIVLTQSPASLAMSLGERATISCRASESVSVIGAHLIHWYQQKPGQPPKLLIYLASNLETGVPARFSGSGSGTDFTLTISRVQAEDAAIYSCLQSRIFPRTFGQGTKLEIKGSTSGSGKPGSGEGSTKGQIQLVQSGSELKKPGESVKISCKASGYTFTDYSINWVKQAPGQGLKWMGWINTETREPAYAYDFRGRFVFSLDTSASTAYLQISSLKAEDTAVYFCALDYSYAMDYWGQGTLVTVSSAAATTTPAPRPPTPAPTIASQPLSLRPEACRPAAGGAVHTRGLDFACDIYIWAPLAGTCGVLLLSLVITLYCKRGRKKLLYIFKQPFMRPVQTTQEEDGCSCRFPEEEEGGCELRVKFSRSADAPAYQQGQNQLYNELNLGRREEYDVLDKRRGRDPEMGGKPRRKNPQEGLYNELQKDKMAEAYSEIGMKGERRRGKGHDGLYQGLSTATKDTYDALHMQALPPR

SEQ ID NO: 206264 - protein, 493 aa, Artificial Sequence
  Description of Artificial Sequence: Synthetic Chimeric Antigen Receptor
MALPVTALLLPLALLLHAARPDIVLTQSPASLAMSLGERATISCRASESVSVIGAHLIHWYQQKPGQPPKLLIYLASNLETGVPARFSGSGSGTDFTLTISRVQAEDAAIYSCLQSRIFPRTFGQGTKLEIKGSTSGSGKPGSGEGSTKGQVQLVQSGSELKKPGASVKVSCKASGYTFTDYSINWVRQAPGQGLEWMGWINTETREPAYAYDFRGRFVFSLDTSVSTAYLQISSLKAEDTAVYYCARDYSYAMDYWGQGTLVTVSSAAATTTPAPRPPTPAPTIASQPLSLRPEACRPAAGGAVHTRGLDFACDIYIWAPLAGTCGVLLLSLVITLYCKRGRKKLLYIFKQPFMRPVQTTQEEDGCSCRFPEEEEGGCELRVKFSRSADAPAYQQGQNQLYNELNLGRREEYDVLDKRRGRDPEMGGKPRRKNPQEGLYNELQKDKMAEAYSEIGMKGERRRGKGHDGLYQGLSTATKDTYDALHMQALPPR

SEQ ID NO: 206265 - protein, 493 aa, Artificial Sequence
  Description of Artificial Sequence: Synthetic Chimeric Antigen Receptor
MALPVTALLLPLALLLHAARPDIVLTQSPASLAMSLGERATISCRASESVSVIGAHLIHWYQQKPGQPPKLLIYLASNLETGVPARFSGSGSGTDFTLTISRVQAEDAAIYSCLQSRIFPRTFGQGTKLEIKGSTSGSGKPGSGEGSTKGQVQLVQSGSELKKPGESVKISCKASGYTFTDYSINWVKQAPGQGLKWMGWINTETREPAYAYDFRGRFVFSLDTSASTAYLQISSLKAEDTAVYFCALDYSYAMDYWGQGTLVTVSSAAATTTPAPRPPTPAPTIASQPLSLRPEACRPAAGGAVHTRGLDFACDIYIWAPLAGTCGVLLLSLVITLYCKRGRKKLLYIFKQPFMRPVQTTQEEDGCSCRFPEEEEGGCELRVKFSRSADAPAYQQGQNQLYNELNLGRREEYDVLDKRRGRDPEMGGKPRRKNPQEGLYNELQKDKMAEAYSEIGMKGERRRGKGHDGLYQGLSTATKDTYDALHMQALPPR

SEQ ID NO: 206266 - protein, 493 aa, Artificial Sequence
  Description of Artificial Sequence: Synthetic Chimeric Antigen Receptor
MALPVTALLLPLALLLHAARPDIVLTQSPASLAMSLGERATISCRASESVSVIGAHLIHWYQQKPGQPPKLLIYLASNLETGVPARFSGSGSGTDFTLTISRVQAEDAAIYSCLQSRIFPRTFGQGTKLEIKGSTSGSGKPGSGEGSTKGQVQLVQSGSELKKPGESVKISCKASGYTFTDYSINWVRQAPGQGLEWMGWINTETREPAYAYDFRGRFVFSLDTSASTAYLQISSLKAEDTAVYFCALDYSYAMDYWGQGTLVTVSSAAATTTPAPRPPTPAPTIASQPLSLRPEACRPAAGGAVHTRGLDFACDIYIWAPLAGTCGVLLLSLVITLYCKRGRKKLLYIFKQPFMRPVQTTQEEDGCSCRFPEEEEGGCELRVKFSRSADAPAYQQGQNQLYNELNLGRREEYDVLDKRRGRDPEMGGKPRRKNPQEGLYNELQKDKMAEAYSEIGMKGERRRGKGHDGLYQGLSTATKDTYDALHMQALPPR

SEQ ID NO: 206267 - protein, 493 aa, Artificial Sequence
  Description of Artificial Sequence: Synthetic Chimeric Antigen Receptor
MALPVTALLLPLALLLHAARPDIVLTQSPASLAMSLGERATISCRASESVSVIGAHLIHWYQQKPGQPPKLLIYLASNLETGVPARFSGSGSGTDFTLTISRVQAEDAAIYSCLQSRIFPRTFGQGTKLEIKGSTSGSGKPGSGEGSTKGQVQLVQSGSELKKPGESVKVSCKASGYTFTDYSINWVRQAPGQGLEWMGWINTETREPAYAYDFRGRFVFSLDTSVSTAYLQISSLKAEDTAVYYCALDYSYAMDYWGQGTLVTVSSAAATTTPAPRPPTPAPTIASQPLSLRPEACRPAAGGAVHTRGLDFACDIYIWAPLAGTCGVLLLSLVITLYCKRGRKKLLYIFKQPFMRPVQTTQEEDGCSCRFPEEEEGGCELRVKFSRSADAPAYQQGQNQLYNELNLGRREEYDVLDKRRGRDPEMGGKPRRKNPQEGLYNELQKDKMAEAYSEIGMKGERRRGKGHDGLYQGLSTATKDTYDALHMQALPPR

SEQ ID NO: 206268 - protein, 493 aa, Artificial Sequence
  Description of Artificial Sequence: Synthetic Chimeric Antigen Receptor
MALPVTALLLPLALLLHAARPDIVLTQSPASLAVSLGERATINCRASESVSVIGAHLIHWYQQKPGQPPKLLIYLASNLETGVPARFSGSGSGTDFTLTISSLQAEDAAIYSCLQSRIFPRTFGQGTKLEIKGSTSGSGKPGSGEGSTKGQIQLVQSGSELKKPGESVKISCKASGYTFTDYSINWVKQAPGQGLKWMGWINTETREPAYAYDFRGRFVFSLDTSASTAYLQISSLKAEDTAVYFCALDYSYAMDYWGQGTLVTVSSAAATTTPAPRPPTPAPTIASQPLSLRPEACRPAAGGAVHTRGLDFACDIYIWAPLAGTCGVLLLSLVITLYCKRGRKKLLYIFKQPFMRPVQTTQEEDGCSCRFPEEEEGGCELRVKFSRSADAPAYQQGQNQLYNELNLGRREEYDVLDKRRGRDPEMGGKPRRKNPQEGLYNELQKDKMAEAYSEIGMKGERRRGKGHDGLYQGLSTATKDTYDALHMQALPPR

SEQ ID NO: 206269 - protein, 493 aa, Artificial Sequence
  Description of Artificial Sequence: Synthetic Chimeric Antigen Receptor
MALPVTALLLPLALLLHAARPDIVLTQSPASLAVSLGERATINCRASESVSVIGAHLIHWYQQKPGQPPKLLIYLASNLETGVPARFSGSGSGTDFTLTISSLQAEDAAIYSCLQSRIFPRTFGQGTKLEIKGSTSGSGKPGSGEGSTKGQVQLVQSGSELKKPGASVKVSCKASGYTFTDYSINWVRQAPGQGLEWMGWINTETREPAYAYDFRGRFVFSLDTSVSTAYLQISSLKAEDTAVYYCARDYSYAMDYWGQGTLVTVSSAAATTTPAPRPPTPAPTIASQPLSLRPEACRPAAGGAVHTRGLDFACDIYIWAPLAGTCGVLLLSLVITLYCKRGRKKLLYIFKQPFMRPVQTTQEEDGCSCRFPEEEEGGCELRVKFSRSADAPAYQQGQNQLYNELNLGRREEYDVLDKRRGRDPEMGGKPRRKNPQEGLYNELQKDKMAEAYSEIGMKGERRRGKGHDGLYQGLSTATKDTYDALHMQALPPR

SEQ ID NO: 206270 - protein, 493 aa, Artificial Sequence
  Description of Artificial Sequence: Synthetic Chimeric Antigen Receptor
MALPVTALLLPLALLLHAARPDIVLTQSPASLAVSLGERATINCRASESVSVIGAHLIHWYQQKPGQPPKLLIYLASNLETGVPARFSGSGSGTDFTLTISSLQAEDAAIYSCLQSRIFPRTFGQGTKLEIKGSTSGSGKPGSGEGSTKGQVQLVQSGSELKKPGESVKISCKASGYTFTDYSINWVKQAPGQGLKWMGWINTETREPAYAYDFRGRFVFSLDTSASTAYLQISSLKAEDTAVYFCALDYSYAMDYWGQGTLVTVSSAAATTTPAPRPPTPAPTIASQPLSLRPEACRPAAGGAVHTRGLDFACDIYIWAPLAGTCGVLLLSLVITLYCKRGRKKLLYIFKQPFMRPVQTTQEEDGCSCRFPEEEEGGCELRVKFSRSADAPAYQQGQNQLYNELNLGRREEYDVLDKRRGRDPEMGGKPRRKNPQEGLYNELQKDKMAEAYSEIGMKGERRRGKGHDGLYQGLSTATKDTYDALHMQALPPR

SEQ ID NO: 206271 - protein, 493 aa, Artificial Sequence
  Description of Artificial Sequence: Synthetic Chimeric Antigen Receptor
MALPVTALLLPLALLLHAARPDIVLTQSPASLAVSLGERATINCRASESVSVIGAHLIHWYQQKPGQPPKLLIYLASNLETGVPARFSGSGSGTDFTLTISSLQAEDAAIYSCLQSRIFPRTFGQGTKLEIKGSTSGSGKPGSGEGSTKGQVQLVQSGSELKKPGESVKISCKASGYTFTDYSINWVRQAPGQGLEWMGWINTETREPAYAYDFRGRFVFSLDTSASTAYLQISSLKAEDTAVYFCALDYSYAMDYWGQGTLVTVSSAAATTTPAPRPPTPAPTIASQPLSLRPEACRPAAGGAVHTRGLDFACDIYIWAPLAGTCGVLLLSLVITLYCKRGRKKLLYIFKQPFMRPVQTTQEEDGCSCRFPEEEEGGCELRVKFSRSADAPAYQQGQNQLYNELNLGRREEYDVLDKRRGRDPEMGGKPRRKNPQEGLYNELQKDKMAEAYSEIGMKGERRRGKGHDGLYQGLSTATKDTYDALHMQALPPR

SEQ ID NO: 206272 - protein, 493 aa, Artificial Sequence
  Description of Artificial Sequence: Synthetic Chimeric Antigen Receptor
MALPVTALLLPLALLLHAARPDIVLTQSPASLAVSLGERATINCRASESVSVIGAHLIHWYQQKPGQPPKLLIYLASNLETGVPARFSGSGSGTDFTLTISSLQAEDAAIYSCLQSRIFPRTFGQGTKLEIKGSTSGSGKPGSGEGSTKGQVQLVQSGSELKKPGESVKVSCKASGYTFTDYSINWVRQAPGQGLEWMGWINTETREPAYAYDFRGRFVFSLDTSVSTAYLQISSLKAEDTAVYYCALDYSYAMDYWGQGTLVTVSSAAATTTPAPRPPTPAPTIASQPLSLRPEACRPAAGGAVHTRGLDFACDIYIWAPLAGTCGVLLLSLVITLYCKRGRKKLLYIFKQPFMRPVQTTQEEDGCSCRFPEEEEGGCELRVKFSRSADAPAYQQGQNQLYNELNLGRREEYDVLDKRRGRDPEMGGKPRRKNPQEGLYNELQKDKMAEAYSEIGMKGERRRGKGHDGLYQGLSTATKDTYDALHMQALPPR

SEQ ID NO: 206273 - protein, 493 aa, Artificial Sequence
  Description of Artificial Sequence: Synthetic Chimeric Antigen Receptor
MALPVTALLLPLALLLHAARPDIVLTQSPASLAVSLGERATINCRASESVSVIGAHLIHWYQQKPGQPPKLLIYLASNLETGVPARFSGSGSGTDFTLTISSLQAEDAAIYYCLQSRIFPRTFGQGTKLEIKGSTSGSGKPGSGEGSTKGQIQLVQSGSELKKPGESVKISCKASGYTFTDYSINWVKQAPGQGLKWMGWINTETREPAYAYDFRGRFVFSLDTSASTAYLQISSLKAEDTAVYFCALDYSYAMDYWGQGTLVTVSSAAATTTPAPRPPTPAPTIASQPLSLRPEACRPAAGGAVHTRGLDFACDIYIWAPLAGTCGVLLLSLVITLYCKRGRKKLLYIFKQPFMRPVQTTQEEDGCSCRFPEEEEGGCELRVKFSRSADAPAYQQGQNQLYNELNLGRREEYDVLDKRRGRDPEMGGKPRRKNPQEGLYNELQKDKMAEAYSEIGMKGERRRGKGHDGLYQGLSTATKDTYDALHMQALPPR

SEQ ID NO: 206274 - protein, 493 aa, Artificial Sequence
  Description of Artificial Sequence: Synthetic Chimeric Antigen Receptor
MALPVTALLLPLALLLHAARPDIVLTQSPASLAVSLGERATINCRASESVSVIGAHLIHWYQQKPGQPPKLLIYLASNLETGVPARFSGSGSGTDFTLTISSLQAEDAAIYYCLQSRIFPRTFGQGTKLEIKGSTSGSGKPGSGEGSTKGQVQLVQSGSELKKPGASVKVSCKASGYTFTDYSINWVRQAPGQGLEWMGWINTETREPAYAYDFRGRFVFSLDTSVSTAYLQISSLKAEDTAVYYCARDYSYAMDYWGQGTLVTVSSAAATTTPAPRPPTPAPTIASQPLSLRPEACRPAAGGAVHTRGLDFACDIYIWAPLAGTCGVLLLSLVITLYCKRGRKKLLYIFKQPFMRPVQTTQEEDGCSCRFPEEEEGGCELRVKFSRSADAPAYQQGQNQLYNELNLGRREEYDVLDKRRGRDPEMGGKPRRKNPQEGLYNELQKDKMAEAYSEIGMKGERRRGKGHDGLYQGLSTATKDTYDALHMQALPPR

SEQ ID NO: 206275 - protein, 493 aa, Artificial Sequence
  Description of Artificial Sequence: Synthetic Chimeric Antigen Receptor
MALPVTALLLPLALLLHAARPDIVLTQSPASLAVSLGERATINCRASESVSVIGAHLIHWYQQKPGQPPKLLIYLASNLETGVPARFSGSGSGTDFTLTISSLQAEDAAIYYCLQSRIFPRTFGQGTKLEIKGSTSGSGKPGSGEGSTKGQVQLVQSGSELKKPGESVKISCKASGYTFTDYSINWVKQAPGQGLKWMGWINTETREPAYAYDFRGRFVFSLDTSASTAYLQISSLKAEDTAVYFCALDYSYAMDYWGQGTLVTVSSAAATTTPAPRPPTPAPTIASQPLSLRPEACRPAAGGAVHTRGLDFACDIYIWAPLAGTCGVLLLSLVITLYCKRGRKKLLYIFKQPFMRPVQTTQEEDGCSCRFPEEEEGGCELRVKFSRSADAPAYQQGQNQLYNELNLGRREEYDVLDKRRGRDPEMGGKPRRKNPQEGLYNELQKDKMAEAYSEIGMKGERRRGKGHDGLYQGLSTATKDTYDALHMQALPPR

SEQ ID NO: 206276 - protein, 493 aa, Artificial Sequence
  Description of Artificial Sequence: Synthetic Chimeric Antigen Receptor
MALPVTALLLPLALLLHAARPDIVLTQSPASLAVSLGERATINCRASESVSVIGAHLIHWYQQKPGQPPKLLIYLASNLETGVPARFSGSGSGTDFTLTISSLQAEDAAIYYCLQSRIFPRTFGQGTKLEIKGSTSGSGKPGSGEGSTKGQVQLVQSGSELKKPGESVKISCKASGYTFTDYSINWVRQAPGQGLEWMGWINTETREPAYAYDFRGRFVFSLDTSASTAYLQISSLKAEDTAVYFCALDYSYAMDYWGQGTLVTVSSAAATTTPAPRPPTPAPTIASQPLSLRPEACRPAAGGAVHTRGLDFACDIYIWAPLAGTCGVLLLSLVITLYCKRGRKKLLYIFKQPFMRPVQTTQEEDGCSCRFPEEEEGGCELRVKFSRSADAPAYQQGQNQLYNELNLGRREEYDVLDKRRGRDPEMGGKPRRKNPQEGLYNELQKDKMAEAYSEIGMKGERRRGKGHDGLYQGLSTATKDTYDALHMQALPPR

SEQ ID NO: 206277 - protein, 493 aa, Artificial Sequence
  Description of Artificial Sequence: Synthetic Chimeric Antigen Receptor
MALPVTALLLPLALLLHAARPDIVLTQSPASLAVSLGERATINCRASESVSVIGAHLIHWYQQKPGQPPKLLIYLASNLETGVPARFSGSGSGTDFTLTISSLQAEDAAIYYCLQSRIFPRTFGQGTKLEIKGSTSGSGKPGSGEGSTKGQVQLVQSGSELKKPGESVKVSCKASGYTFTDYSINWVRQAPGQGLEWMGWINTETREPAYAYDFRGRFVFSLDTSVSTAYLQISSLKAEDTAVYYCALDYSYAMDYWGQGTLVTVSSAAATTTPAPRPPTPAPTIASQPLSLRPEACRPAAGGAVHTRGLDFACDIYIWAPLAGTCGVLLLSLVITLYCKRGRKKLLYIFKQPFMRPVQTTQEEDGCSCRFPEEEEGGCELRVKFSRSADAPAYQQGQNQLYNELNLGRREEYDVLDKRRGRDPEMGGKPRRKNPQEGLYNELQKDKMAEAYSEIGMKGERRRGKGHDGLYQGLSTATKDTYDALHMQALPPR

SEQ ID NO: 206278 - protein, 493 aa, Artificial Sequence
  Description of Artificial Sequence: Synthetic Chimeric Antigen Receptor
MALPVTALLLPLALLLHAARPQVQLVQSGAEVKKPGASVKVSCKASGYSFPDYYINWVRQAPGQGLEWMGWIYFASGNSEYNQKFTGRVTMTRDTSINTAYMELSSLTSEDTAVYFCASLYDYDWYFDVWGQGTMVTVSSGGGGSGGGGSGGGGSDIVMTQTPLSLSVTPGQPASISCKSSQSLVHSNGNTYLHWYLQKPGQSPQLLIYKVSNRFSGVPDRFSGSGSGTDFTLKISRVEAEDVGIYYCSQSSIYPWTFGQGTKLEIKTTTPAPRPPTPAPTIASQPLSLRPEACRPAAGGAVHTRGLDFACDIISFFLALTSTALLFLLFFLTLRFSVVKRGRKKLLYIFKQPFMRPVQTTQEEDGCSCRFPEEEEGGCELRVKFSRSADAPAYQQGQNQLYNELNLGRREEYDVLDKRRGRDPEMGGKPRRKNPQEGLYNELQKDKMAEAYSEIGMKGERRRGKGHDGLYQGLSTATKDTYDALHMQALPPR

SEQ ID NO: 206279 - protein, 493 aa, Artificial Sequence
  Description of Artificial Sequence: Synthetic Chimeric Antigen Receptor
MALPVTALLLPLALLLHAARPQVQLVQSGAEVKKPGASVKVSCKASGYSFPDYYINWVRQAPGQGLEWMGWIYFASGNSEYNQKFTGRVTMTRDTSSSTAYMELSSLRSEDTAVYFCASLYDYDWYFDVWGQGTMVTVSSGGGGSGGGGSGGGGSDIVMTQTPLSLSVTPGEPASISCKSSQSLVHSNGNTYLHWYLQKPGQSPQLLIYKVSNRFSGVPDRFSGSGSGADFTLKISRVEAEDVGVYYCAETSHVPWTFGQGTKLEIKTTTPAPRPPTPAPTIASQPLSLRPEACRPAAGGAVHTRGLDFACDIISFFLALTSTALLFLLFFLTLRFSVVKRGRKKLLYIFKQPFMRPVQTTQEEDGCSCRFPEEEEGGCELRVKFSRSADAPAYQQGQNQLYNELNLGRREEYDVLDKRRGRDPEMGGKPRRKNPQEGLYNELQKDKMAEAYSEIGMKGERRRGKGHDGLYQGLSTATKDTYDALHMQALPPR

SEQ ID NO: 206280 - protein, 496 aa, Artificial Sequence
  Description of Artificial Sequence: Synthetic Chimeric Antigen Receptor
EVQLLESGGGLVQPGGSLRLSCAASGFTFSSYAMNWVRQAPGKGLEWVSAILSSGGSTYYADSVKGRFTISRDNSKNTLYLQMNSLRAEDTAVYYCARYWPMDIWGQGTLVTVSSGGGGGSCPYSNPSLCSGGGGGSEIVLTQSPGTLSLSPGERATLSCRGGQSVSSSYLAWYQQKPGQAPRLLMYDASIRATGIPDRFSGSGSGTDFTLTISRLEPEDFAVYYCQQYQSWPLTFGQGTKVEIKSDPGSGGGGSCPYSNPSLCSGGGGSAPTTTPAPRPPTPAPTIASQPLSLRPEACRPAAGGAVHTRGLDFACDIYIWAPLAGTCGVLLLSLVITLYCRRGRKKLLYIFKQPFMRPVQTTQEEDGCSCRFPEEEEGGCELRVKFSRSADAPAYQQGQNQLYNELNLGRREEYDVLDKRRGRDPEMGGKPRRKNPQEGLYNELQKDKMAEAYSEIGMKGERRRGKGHDGLYQGLSTATKDTYDALHMQALPPRE

SEQ ID NO: 206281 - protein, 497 aa, Artificial Sequence
  Description of Artificial Sequence: Synthetic Chimeric Antigen Receptor
GGGGSCPYSNPSLCSGGGGSGGGGSEVQLLESGGGLVQPGGSLRLSCAASGFTFSSYAMNWVRQAPGKGLEWVSAILSSGGSTYYADSVKGRFTISRDNSKNTLYLQMNSLRAEDTAVYYCARYWPMDIWGQGTLVTVSSGGGGGSCPYSNPSLCSGGGGGSEIVLTQSPGTLSLSPGERATLSCRGGQSVSSSYLAWYQQKPGQAPRLLMYDASIRATGIPDRFSGSGSGTDFTLTISRLEPEDFAVYYCQQYQSWPLTFGQGTKVEIKSDPTTTPAPRPPTPAPTIASQPLSLRPEACRPAAGGAVHTRGLDFACDIYIWAPLAGTCGVLLLSLVITLYCRRGRKKLLYIFKQPFMRPVQTTQEEDGCSCRFPEEEEGGCELRVKFSRSADAPAYQQGQNQLYNELNLGRREEYDVLDKRRGRDPEMGGKPRRKNPQEGLYNELQKDKMAEAYSEIGMKGERRRGKGHDGLYQGLSTATKDTYDALHMQALPPRE

SEQ ID NO: 206282 - protein, 498 aa, Artificial Sequence
  Description of Artificial Sequence: Synthetic Chimeric Antigen Receptor
EVQLLESGGGLVQPGGSLRLSCAASGFTFSSYAMNWVRQAPGKGLEWVSAILSSGGSTYYADSVKGRFTISRDNSKNTLYLQMNSLRAEDTAVYYCARYWPMDIWGQGTLVTVSSGGGGSGGGGSGGGGSEIVLTQSPGTLSLSPGERATLSCRGGQSVSSSYLAWYQQKPGQAPRLLMYDASIRATGIPDRFSGSGSGTDFTLTISRLEPEDFAVYYCQQYQSWPLTFGQGTKVEIKSDPGSGGGGSCPYSNPSLCSGGGGSCPYSNPSLCAPTTTPAPRPPTPAPTIASQPLSLRPEACRPAAGGAVHTRGLDFACDIYIWAPLAGTCGVLLLSLVITLYCRRGRKKLLYIFKQPFMRPVQTTQEEDGCSCRFPEEEEGGCELRVKFSRSADAPAYQQGQNQLYNELNLGRREEYDVLDKRRGRDPEMGGKPRRKNPQEGLYNELQKDKMAEAYSEIGMKGERRRGKGHDGLYQGLSTATKDTYDALHMQALPPRE

SEQ ID NO: 206283 - protein, 500 aa, Artificial Sequence
  Description of Artificial Sequence: Synthetic Chimeric Antigen Receptor
GGGGSCPYSNPSLCSGGGGSCPYSNPSLCSGGGGSEVQLLESGGGLVQPGGSLRLSCAASGFTFSSYAMNWVRQAPGKGLEWVSAILSSGGSTYYADSVKGRFTISRDNSKNTLYLQMNSLRAEDTAVYYCARYWPMDIWGQGTLVTVSSGGGGSGGGGSGGGGSEIVLTQSPGTLSLSPGERATLSCRGGQSVSSSYLAWYQQKPGQAPRLLMYDASIRATGIPDRFSGSGSGTDFTLTISRLEPEDFAVYYCQQYQSWPLTFGQGTKVEIKSDPTTTPAPRPPTPAPTIASQPLSLRPEACRPAAGGAVHTRGLDFACDIYIWAPLAGTCGVLLLSLVITLYCRRGRKKLLYIFKQPFMRPVQTTQEEDGCSCRFPEEEEGGCELRVKFSRSADAPAYQQGQNQLYNELNLGRREEYDVLDKRRGRDPEMGGKPRRKNPQEGLYNELQKDKMAEAYSEIGMKGERRRGKGHDGLYQGLSTATKDTYDALHMQALPPRE

SEQ ID NO: 206284 - protein, 500 aa, Artificial Sequence
  Description of Artificial Sequence: Synthetic Chimeric Antigen Receptor
QVQLVQSGAEVKKPGASVKVSCKASGYSFPDYYINWVRQAPGQGLEWMGWIYFASGNSEYNQKFTGRVTMTRDTSSSTAYMELSSLRSEDTAVYFCASLYDYDWYFDVWGQGTMVTVSSGGGGSGGGGSGGGGSDIVMTQTPLSLSVTPGEPASISCKSSQSLVHSNGNTYLHWYLQKPGQSPQLLIYKVSNRFSGVPDRFSGSGSGADFTLKISRVEAEDVGVYYCAETSHVPWTFGQGTKLEIKGSGGGGSCPYSNPSLCSGGGGSCPYSNPSLCTTTPAPRPPTPAPTIASQPLSLRPEACRPAAGGAVHTRGLDFACDIYIWAPLAGTCGVLLLSLVITLYCKRGRKKLLYIFKQPFMRPVQTTQEEDGCSCRFPEEEEGGCELRVKFSRSADAPAYQQGQNQLYNELNLGRREEYDVLDKRRGRDPEMGGKPRRKNPQEGLYNELQKDKMAEAYSEIGMKGERRRGKGHDGLYQGLSTATKDTYDALHMQALPPR

SEQ ID NO: 206285 - protein, 502 aa, Artificial Sequence
  Description of Artificial Sequence: Synthetic Chimeric Antigen Receptor
MALPVTALLLPLALLLHAARPDIVLTQSPPSLAMSLGKRATISCRASESVTILGSHLIHWYQQKPGQPPTLLIQLASNVQTGVPARFSGSGSRTDFTLTIDPVEEDDVAVYYCLQSRTIPRTFGGGTKLEIKGSTSGSGKPGSGEGSTKGQIQLVQSGPELKKPGETVKISCKASGYTFTDYSINWVKRAPGKGLKWMGWINTETREPAYAYDFRGRFAFSLETSASTAYLQINNLKYEDTATYFCALDYSYAMDYWGQGTSVTVSSAAAFVPVFLPAKPTTTPAPRPPTPAPTIASQPLSLRPEACRPAAGGAVHTRGLDFACDIYIWAPLAGTCGVLLLSLVITLYCNHRNRRDQRLPPDAHKPPGGGSFRTPIQEEQADAHSTLAKIRVKFSRSADAPAYQQGQNQLYNELNLGRREEYDVLDKRRGRDPEMGGKPRRKNPQEGLYNELQKDKMAEAYSEIGMKGERRRGKGHDGLYQGLSTATKDTYDALHMQALPPR

SEQ ID NO: 206286 - protein, 503 aa, Artificial Sequence
  Description of Artificial Sequence: Synthetic Chimeric Antigen Receptor
MALPVTALLLPLALLLHAARPDIVLTQSPPSLAMSLGKRATISCRASESVTILGSHLIHWYQQKPGQPPTLLIQLASNVQTGVPARFSGSGSRTDFTLTIDPVEEDDVAVYYCLQSRTIPRTFGGGTKLEIKGSTSGSGKPGSGEGSTKGQIQLVQSGPELKKPGETVKISCKASGYTFTDYSINWVKRAPGKGLKWMGWINTETREPAYAYDFRGRFAFSLETSASTAYLQINNLKYEDTATYFCALDYSYAMDYWGQGTSVTVSSFVPVFLPAKPTTTPAPRPPTPAPTIASQPLSLRPEACRPAAGGAVHTRGLDFACDIYIWAPLAGTCGVLLLSLVITLYCNHRNRSKRSRLLHSDYMNMTPRRPGPTRKHYQPYAPPRDFAAYRSRVKFSRSADAPAYQQGQNQLYNELNLGRREEYDVLDKRRGRDPEMGGKPRRKNPQEGLYNELQKDKMAEAYSEIGMKGERRRGKGHDGLYQGLSTATKDTYDALHMQALPPR

SEQ ID NO: 206287 - protein, 503 aa, Artificial Sequence
  Description of Artificial Sequence: Synthetic Chimeric Antigen Receptor
MALPVTALLLPLALLLHAARPDIVLTQSPPSLAMSLGKRATISCRASESVTILGSHLIYWYQQKPGQPPTLLIQLASNVQTGVPARFSGSGSRTDFTLTIDPVEEDDVAVYYCLQSRTIPRTFGGGTKLEIKGSTSGSGKPGSGEGSTKGQIQLVQSGPELKKPGETVKISCKASGYTFRHYSMNWVKQAPGKGLKWMGRINTESGVPIYADDFKGRFAFSVETSASTAYLVINNLKDEDTASYFCSNDYLYSLDFWGQGTALTVSSFVPVFLPAKPTTTPAPRPPTPAPTIASQPLSLRPEACRPAAGGAVHTRGLDFACDIYIWAPLAGTCGVLLLSLVITLYCNHRNRSKRSRLLHSDYMNMTPRRPGPTRKHYQPYAPPRDFAAYRSRVKFSRSADAPAYQQGQNQLYNELNLGRREEYDVLDKRRGRDPEMGGKPRRKNPQEGLYNELQKDKMAEAYSEIGMKGERRRGKGHDGLYQGLSTATKDTYDALHMQALPPR

SEQ ID NO: 206288 - protein, 503 aa, Artificial Sequence
  Description of Artificial Sequence: Synthetic Chimeric Antigen Receptor
MALPVTALLLPLALLLHAARPDIVLTQSPPSLAMSLGKRATISCRASESVTILGSHLIYWYQQKPGQPPTLLIQLASNVQTGVPARFSGSGSRTDFTLTIDPVEEDDVAVYYCLQSRTIPRTFGGGTKLEIKGSTSGSGKPGSGEGSTKGQIQLVQSGPELKKPGETVKISCKASGYTFTHYSMNWVKQAPGKGLKWMGRINTETGEPLYADDFKGRFAFSLETSASTAYLVINNLKNEDTATFFCSNDYLYSCDYWGQGTTLTVSSFVPVFLPAKPTTTPAPRPPTPAPTIASQPLSLRPEACRPAAGGAVHTRGLDFACDIYIWAPLAGTCGVLLLSLVITLYCNHRNRSKRSRLLHSDYMNMTPRRPGPTRKHYQPYAPPRDFAAYRSRVKFSRSADAPAYQQGQNQLYNELNLGRREEYDVLDKRRGRDPEMGGKPRRKNPQEGLYNELQKDKMAEAYSEIGMKGERRRGKGHDGLYQGLSTATKDTYDALHMQALPPR

SEQ ID NO: 206289 - protein, 504 aa, Artificial Sequence
  Description of Artificial Sequence: Synthetic Chimeric Antigen Receptor
EVQLLESGGGLVQPGGSLRLSCAASGFTFSSYAMNWVRQAPGKGLEWVSAILSSGGSTYYADSVKGRFTISRDNSKNTLYLQMNSLRAEDTAVYYCARYWPMDIWGQGTLVTVSSGGGGSGGGGSGGGGSEIVLTQSPGTLSLSPGERATLSCRGGQSVSSSYLAWYQQKPGQAPRLLMYDASIRATGIPDRFSGSGSGTDFTLTISRLEPEDFAVYYCQQYQSWPLTFGQGTKVEIKSDPGSGGGGSCPYSNPSLCSGGGGSCPYSNPSLCSGGGGSAPTTTPAPRPPTPAPTIASQPLSLRPEACRPAAGGAVHTRGLDFACDIYIWAPLAGTCGVLLLSLVITLYCRRGRKKLLYIFKQPFMRPVQTTQEEDGCSCRFPEEEEGGCELRVKFSRSADAPAYQQGQNQLYNELNLGRREEYDVLDKRRGRDPEMGGKPRRKNPQEGLYNELQKDKMAEAYSEIGMKGERRRGKGHDGLYQGLSTATKDTYDALHMQALPPRE

SEQ ID NO: 206290 - protein, 506 aa, Artificial Sequence
  Description of Artificial Sequence: Synthetic Chimeric Antigen Receptor
MALPVTALLLPLALLLHAARPDIVLTQSPPSLAMSLGKRATISCRASESVTILGSHLIHWYQQKPGQPPTLLIQLASNVQTGVPARFSGSGSRTDFTLTIDPVEEDDVAVYYCLQSRTIPRTFGGGTKLEIKGSTSGSGKPGSGEGSTKGQIQLVQSGPELKKPGETVKISCKASGYTFTDYSINWVKRAPGKGLKWMGWINTETREPAYAYDFRGRFAFSLETSASTAYLQINNLKYEDTATYFCALDYSYAMDYWGQGTSVTVSSAAAFVPVFLPAKPTTTPAPRPPTPAPTIASQPLSLRPEACRPAAGGAVHTRGLDFACDIYIWAPLAGTCGVLLLSLVITLYCNHRNRSKRSRLLHSDYMNMTPRRPGPTRKHYQPYAPPRDFAAYRSRVKFSRSADAPAYQQGQNQLYNELNLGRREEYDVLDKRRGRDPEMGGKPRRKNPQEGLYNELQKDKMAEAYSEIGMKGERRRGKGHDGLYQGLSTATKDTYDALHMQALPPR

SEQ ID NO: 206291 - protein, 506 aa, Artificial Sequence
  Description of Artificial Sequence: Synthetic Chimeric Antigen Receptor
QVQLVQSGAEVKKPGASVKVSCKASGYSFPDYYINWVRQAPGQGLEWMGWIYFASGNSEYNQKFTGRVTMTRDTSSSTAYMELSSLRSEDTAVYFCASLYDYDWYFDVWGQGTMVTVSSGGGGSGGGGSGGGGSDIVMTQTPLSLSVTPGEPASISCKSSQSLVHSNGNTYLHWYLQKPGQSPQLLIYKVSNRFSGVPDRFSGSGSGADFTLKISRVEAEDVGVYYCAETSHVPWTFGQGTKLEIKGSGGGGSCPYSNPSLCSGGGGSCPYSNPSLCSGGGGSTTTPAPRPPTPAPTIASQPLSLRPEACRPAAGGAVHTRGLDFACDIYIWAPLAGTCGVLLLSLVITLYCKRGRKKLLYIFKQPFMRPVQTTQEEDGCSCRFPEEEEGGCELRVKFSRSADAPAYQQGQNQLYNELNLGRREEYDVLDKRRGRDPEMGGKPRRKNPQEGLYNELQKDKMAEAYSEIGMKGERRRGKGHDGLYQGLSTATKDTYDALHMQALPPR

SEQ ID NO: 206292 - protein, 507 aa, Artificial Sequence
  Description of Artificial Sequence: Synthetic Chimeric Antigen Receptor
MLLLVTSLLLCELPHPAFLLIPDIVLTQSPPSLAMSLGKRATISCRASESVTILGSHLIHWYQQKPGQPPTLLIQLASNVQTGVPARFSGSGSRTDFTLTIDPVEEDDVAVYYCLQSRTIPRTFGGGTKLEIKGSTSGSGKPGSGEGSTKGQIQLVQSGPELKKPGETVKISCKASGYTFTDYSINWVKRAPGKGLKWMGWINTETREPAYAYDFRGRFAFSLETSASTAYLQINNLKYEDTATYFCALDYSYAMDYWGQGTSVTVSSAAAFVPVFLPAKPTTTPAPRPPTPAPTIASQPLSLRPEACRPAAGGAVHTRGLDFACDIYIWAPLAGTCGVLLLSLVITLYCNHRNRSKRSRLLHSDYMNMTPRRPGPTRKHYQPYAPPRDFAAYRSRVKFSRSADAPAYQQGQNQLYNELNLGRREEYDVLDKRRGRDPEMGGKPRRKNPQEGLYNELQKDKMAEAYSEIGMKGERRRGKGHDGLYQGLSTATKDTYDALHMQALPPR

SEQ ID NO: 206293 - protein, 512 aa, Artificial Sequence
  Description of Artificial Sequence: Synthetic Chimeric Antigen Receptor
MALPVTALLLPLALLLHAARPDIVLTQSPPSLAMSLGKRATISCRASESVTILGSHLIHWYQQKPGQPPTLLIQLASNVQTGVPARFSGSGSRTDFTLTIDPVEEDDVAVYYCLQSRTIPRTFGGGTKLEIKGSTSGSGKPGSGEGSTKGQIQLVQSGPELKKPGETVKISCKASGYTFTDYSINWVKRAPGKGLKWMGWINTETREPAYAYDFRGRFAFSLETSASTAYLQINNLKYEDTATYFCALDYSYAMDYWGQGTSVTVSSAAAFVPVFLPAKPTTTPAPRPPTPAPTIASQPLSLRPEACRPAAGGAVHTRGLDFACDIYIWAPLAGTCGVLLLSLVITLYCNHRNRFSVVKRGRKKLLYIFKQPFMRPVQTTQEEDGCSCRFPEEEEGGCELRVKFSRSADAPAYQQGQNQLYNELNLGRREEYDVLDKRRGRDPEMGGKPRRKNPQEGLYNELQKDKMAEAYSEIGMKGERRRGKGHDGLYQGLSTATKDTYDALHMQALPPR

SEQ ID NO: 206294 - protein, 513 aa, Artificial Sequence
  Description of Artificial Sequence: Synthetic Chimeric Antigen Receptor
EVQLLESGGGLVQPGGSLRLSCAASGFTFSSYAMNWVRQAPGKGLEWVSAILSSGGSTYYADSVKGRFTISRDNSKNTLYLQMNSLRAEDTAVYYCARYWPMDIWGQGTLVTVSSGGGGSGGGGSGGGGSEIVLTQSPGTLSLSPGERATLSCRGGQSVSSSYLAWYQQKPGQAPRLLMYDASIRATGIPDRFSGSGSGTDFTLTISRLEPEDFAVYYCQQYQSWPLTFGQGTKVEIKSDPGSGGGGSCPYSNPSLCSGGGGSCPYSNPSLCSGGGGSCPYSNPSLCAPTTTPAPRPPTPAPTIASQPLSLRPEACRPAAGGAVHTRGLDFACDIYIWAPLAGTCGVLLLSLVITLYCRRGRKKLLYIFKQPFMRPVQTTQEEDGCSCRFPEEEEGGCELRVKFSRSADAPAYQQGQNQLYNELNLGRREEYDVLDKRRGRDPEMGGKPRRKNPQEGLYNELQKDKMAEAYSEIGMKGERRRGKGHDGLYQGLSTATKDTYDALHMQALPPRE

SEQ ID NO: 206295 - protein, 514 aa, Artificial Sequence
  Description of Artificial Sequence: Synthetic Chimeric Antigen Receptor
GGGGSCPYSNPSLCSGGGGSGGGGSEVQLLESGGGLVQPGGSLRLSCAASGFTFSSYAMNWVRQAPGKGLEWVSAILSSGGSTYYADSVKGRFTISRDNSKNTLYLQMNSLRAEDTAVYYCARYWPMDIWGQGTLVTVSSGGGGSGGGGSGGGGSEIVLTQSPGTLSLSPGERATLSCRGGQSVSSSYLAWYQQKPGQAPRLLMYDASIRATGIPDRFSGSGSGTDFTLTISRLEPEDFAVYYCQQYQSWPLTFGQGTKVEIKSDPGSGGGGSCPYSNPSLCSGGGGSAPTTTPAPRPPTPAPTIASQPLSLRPEACRPAAGGAVHTRGLDFACDIYIWAPLAGTCGVLLLSLVITLYCRRGRKKLLYIFKQPFMRPVQTTQEEDGCSCRFPEEEEGGCELRVKFSRSADAPAYQQGQNQLYNELNLGRREEYDVLDKRRGRDPEMGGKPRRKNPQEGLYNELQKDKMAEAYSEIGMKGERRRGKGHDGLYQGLSTATKDTYDALHMQALPPRE

SEQ ID NO: 206296 - protein, 515 aa, Artificial Sequence
  Description of Artificial Sequence: Synthetic Chimeric Antigen Receptor
GGGGSCPYSNPSLCSGGGGSGGGGSEVQLLESGGGLVQPGGSLRLSCAASGFTFSSYAMNWVRQAPGKGLEWVSAILSSGGSTYYADSVKGRFTISRDNSKNTLYLQMNSLRAEDTAVYYCARYWPMDIWGQGTLVTVSSGGSCPYSNPSLCSGGSEIVLTQSPGTLSLSPGERATLSCRGGQSVSSSYLAWYQQKPGQAPRLLMYDASIRATGIPDRFSGSGSGTDFTLTISRLEPEDFAVYYCQQYQSWPLTFGQGTKVEIKSDPGSGGGGSCPYSNPSLCSGGGGSAPTTTPAPRPPTPAPTIASQPLSLRPEACRPAAGGAVHTRGLDFACDIYIWAPLAGTCGVLLLSLVITLYCRRGRKKLLYIFKQPFMRPVQTTQEEDGCSCRFPEEEEGGCELRVKFSRSADAPAYQQGQNQLYNELNLGRREEYDVLDKRRGRDPEMGGKPRRKNPQEGLYNELQKDKMAEAYSEIGMKGERRRGKGHDGLYQGLSTATKDTYDALHMQALPPRE

SEQ ID NO: 206297 - protein, 521 aa, Artificial Sequence
  Description of Artificial Sequence: Synthetic Chimeric Antigen Receptor
GGGGSCPYSNPSLCSGGGGSGGGGSEVQLLESGGGLVQPGGSLRLSCAASGFTFSSYAMNWVRQAPGKGLEWVSAILSSGGSTYYADSVKGRFTISRDNSKNTLYLQMNSLRAEDTAVYYCARYWPMDIWGQGTLVTVSSGGGGGSCPYSNPSLCSGGGGGSEIVLTQSPGTLSLSPGERATLSCRGGQSVSSSYLAWYQQKPGQAPRLLMYDASIRATGIPDRFSGSGSGTDFTLTISRLEPEDFAVYYCQQYQSWPLTFGQGTKVEIKSDPGSGGGGSCPYSNPSLCSGGGGSAPTTTPAPRPPTPAPTIASQPLSLRPEACRPAAGGAVHTRGLDFACDIYIWAPLAGTCGVLLLSLVITLYCRRGRKKLLYIFKQPFMRPVQTTQEEDGCSCRFPEEEEGGCELRVKFSRSADAPAYQQGQNQLYNELNLGRREEYDVLDKRRGRDPEMGGKPRRKNPQEGLYNELQKDKMAEAYSEIGMKGERRRGKGHDGLYQGLSTATKDTYDALHMQALPPRE

SEQ ID NO: 206298 - protein, 522 aa, Artificial Sequence
  Description of Artificial Sequence: Synthetic Chimeric Antigen Receptor
EVQLLESGGGLVQPGGSLRLSCAASGFTFSSYAMNWVRQAPGKGLEWVSAILSSGGSTYYADSVKGRFTISRDNSKNTLYLQMNSLRAEDTAVYYCARYWPMDIWGQGTLVTVSSGGGGSGGGGSGGGGSEIVLTQSPGTLSLSPGERATLSCRGGQSVSSSYLAWYQQKPGQAPRLLMYDASIRATGIPDRFSGSGSGTDFTLTISRLEPEDFAVYYCQQYQSWPLTFGQGTKVEIKSDPGSGGGGSCPYSNPSLCSGGGGSELPTQGTFSNVSTNVSPAKPTTTACPYSNPSLCAPTTTPAPRPPTPAPTIASQPLSLRPEACRPAAGGAVHTRGLDFACDIYIWAPLAGTCGVLLLSLVITLYCRRGRKKLLYIFKQPFMRPVQTTQEEDGCSCRFPEEEEGGCELRVKFSRSADAPAYQQGQNQLYNELNLGRREEYDVLDKRRGRDPEMGGKPRRKNPQEGLYNELQKDKMAEAYSEIGMKGERRRGKGHDGLYQGLSTATKDTYDALHMQALPPRE

SEQ ID NO: 206299 - protein, 523 aa, Artificial Sequence
  Description of Artificial Sequence: Synthetic Chimeric Antigen Receptor
EVQLLESGGGLVQPGGSLRLSCAASGFTFSSYAMNWVRQAPGKGLEWVSAILSSGGSTYYADSVKGRFTISRDNSKNTLYLQMNSLRAEDTAVYYCARYWPMDIWGQGTLVTVSSGGSCPYSNPSLCSGGSEIVLTQSPGTLSLSPGERATLSCRGGQSVSSSYLAWYQQKPGQAPRLLMYDASIRATGIPDRFSGSGSGTDFTLTISRLEPEDFAVYYCQQYQSWPLTFGQGTKVEIKSDPGSGGGGSCPYSNPSLCSGGGGSELPTQGTFSNVSTNVSPAKPTTTACPYSNPSLCAPTTTPAPRPPTPAPTIASQPLSLRPEACRPAAGGAVHTRGLDFACDIYIWAPLAGTCGVLLLSLVITLYCRRGRKKLLYIFKQPFMRPVQTTQEEDGCSCRFPEEEEGGCELRVKFSRSADAPAYQQGQNQLYNELNLGRREEYDVLDKRRGRDPEMGGKPRRKNPQEGLYNELQKDKMAEAYSEIGMKGERRRGKGHDGLYQGLSTATKDTYDALHMQALPPRE

SEQ ID NO: 206300 - protein, 547 aa, Artificial Sequence
  Description of Artificial Sequence: Synthetic Chimeric Antigen Receptor
GGGGSCPYSNPSLCSGGGGSGGGGSEVQLLESGGGLVQPGGSLRLSCAASGFTFSSYAMNWVRQAPGKGLEWVSAILSSGGSTYYADSVKGRFTISRDNSKNTLYLQMNSLRAEDTAVYYCARYWPMDIWGQGTLVTVSSGGGGSGGGGSGGGGSEIVLTQSPGTLSLSPGERATLSCRGGQSVSSSYLAWYQQKPGQAPRLLMYDASIRATGIPDRFSGSGSGTDFTLTISRLEPEDFAVYYCQQYQSWPLTFGQGTKVEIKSDPGSGGGGSCPYSNPSLCSGGGGSELPTQGTFSNVSTNVSPAKPTTTACPYSNPSLCAPTTTPAPRPPTPAPTIASQPLSLRPEACRPAAGGAVHTRGLDFACDIYIWAPLAGTCGVLLLSLVITLYCRRGRKKLLYIFKQPFMRPVQTTQEEDGCSCRFPEEEEGGCELRVKFSRSADAPAYQQGQNQLYNELNLGRREEYDVLDKRRGRDPEMGGKPRRKNPQEGLYNELQKDKMAEAYSEIGMKGERRRGKGHDGLYQGLSTATKDTYDALHMQALPPRE

SEQ ID NO: 206301 - protein, 549 aa, Artificial Sequence
  Description of Artificial Sequence: Synthetic Chimeric Antigen Receptor
MALPVTALLLPLALLLHAARPDIVLTQSPPSLAMSLGKRATISCRASESVTILGSHLIHWYQQKPGQPPTLLIQLASNVQTGVPARFSGSGSRTDFTLTIDPVEEDDVAVYYCLQSRTIPRTFGGGTKLEIKGSTSGSGKPGSGEGSTKGQIQLVQSGPELKKPGETVKISCKASGYTFTDYSINWVKRAPGKGLKWMGWINTETREPAYAYDFRGRFAFSLETSASTAYLQINNLKYEDTATYFCALDYSYAMDYWGQGTSVTVSSAAAFVPVFLPAKPTTTPAPRPPTPAPTIASQPLSLRPEACRPAAGGAVHTRGLDFACDIYIWAPLAGTCGVLLLSLVITLYCNHRNRFSVVKRGRKKLLYIFKQPFMRPVQTTQEEDGCSCRFPEEEEGGCELRRDQRLPPDAHKPPGGGSFRTPIQEEQADAHSTLAKIRVKFSRSADAPAYQQGQNQLYNELNLGRREEYDVLDKRRGRDPEMGGKPRRKNPQEGLYNELQKDKMAEAYSEIGMKGERRRGKGHDGLYQGLSTATKDTYDALHMQALPPR

SEQ ID NO: 206302 - protein, 610 aa, Artificial Sequence
  Description of Artificial Sequence: Synthetic Chimeric Antigen Receptor
METDTLLLWVLLLWVPGSTGSVLHLVPINATSKDDSDVTEVMWQPALRRGRGLQAQGYGVRIQDAGVYLLYSQVLFQDVTFTMGQWSREGQGRQETLFRCIRSMPSHPDRAYNSCYSAGVFHLHQGDILSVIIPRARAKLNLSPHGTFLGFVKLSGGGSDPAEPKSPDKTHTCPPCPAPPVAGPSVFLFPPKPKDTLMIARTPEVTCVWDVSHEDPEVKFNWYVDGVEVHNAKTKPREEQYNSTYRWSVLTVLHQDWLNGKEYKCKVSNKALPAPIEKTISKAKGQPREPQVYTLPPSRDELTKNQVSLTCLVKGFYPSDIAVEWESNGQPENNYKTTPPVLDSDGSFFLYSKLTVDKSRWQQGNVFSCSVMHEALHNHYTQKSLSLSPGKKDPKFWVLVVVGGVLACYSLLVTVAFIIFVRSKRSRLLHSDYMNMTPRRPGPTRKHYQPYAPPRDFAAYRSRDQRLPPDAHKPPGGGSFRTPIQEEQADAHSTLAKIRVKFSRSADAPAYQQGQNQLYNELNLGRREEYDVLDKRRGRDPEMGGKPRRKNPQEGLYNELQKDKMAEAYSEIGMKGERRRGKGHDGLYQGLSTATKDTYDALHMQALPPR

SEQ ID NO: 206303 - protein, 630 aa, Artificial Sequence
  Description of Artificial Sequence: Synthetic Chimeric Antigen Receptor
MGTSLLCWMALCLLGADHADGKPIPNPLLGLDSTSGGGGSVLHLVPINATSKDDSDVTEVMWQPALRRGRGLQAQGYGVRIQDAGVYLLYSQVLFQDVTFTMGQVVSREGQGRQETLFRCIRSMPSHPDRAYNSCYSAGVFHLHQGDILSVIIPRARAKLNLSPHGTFLGFVKLSGGGSDPAEPKSPDKTHTCPPCPAPPVAGPSVFLFPPKPKDTLMIARTPEVTCVVVDVSHEDPEVKFNWYVDGVEVHNAKTKPREEQYNSTYRVVSVLTVLHQDWLNGKEYKCKVSNKALPAPIEKTISKAKGQPREPQVYTLPPSRDELTKNQVSLTCLVKGFYPSDIAVEWESNGQPENNYKTTPPVLDSDGSFFLYSKLTVDKSRWQQGNVFSCSVHEALHNHYTQKSLSLSPGKKDPKFWVLWVGGVLACYSLLVTVAFIIFWVRSKRSRLLHSDYMNMTPRRPGPTRKHYQPYAPPRDFAAYRSRDQRLPPDAHKPPGGGSFRTPIQEEQADAHSTLAKIRVKFSRSADAPAYQQGQNQLYNELNLGRREEYDVLDKRRGRDPEGGKPRRKNPQEGLYNELQKDKMAEAYSEIGMKGERRRGKGHDGLYQGLSTATKDTYDALHMQALPPR

SEQ ID NO: 206304 - protein, 633 aa, Artificial Sequence
  Description of Artificial Sequence: Synthetic Chimeric Antigen Receptor
MGTSLLCWMALCLLGADHADGKPIPNPLLGLDSTSGGGGSVLHLVPINATSKDDSDVTEVMWQPALRRGRGLQAQGYGVRIQDAGVYLLYSQVLFQDVTFTMGQVVSREGQGRQETLFRCIRSMPSHPDRAYNSCYSAGVEHLHQGDILSVIIPRARAKLNLSPHGTFLGFVKLSGGGSDPAEPKSPDKTHTCPPCPAPPVAGPSVFLFPPKPKDTLMIARTPEVTCVVVDVSHEDPEVKFNWYVDGVEVHNAKTKPREEQYNSTYRVVSVLTVLHQDWLNGKEYKCKVSNKALPAPIEKTISKAKGQPREPQVYTLPPSRDELTKNQVSLTCLVKGFYPSDIAVEWESNGQPENNYKTTPPVLDSDGSFFLYSKLTVDKSRWQQGNVFSCSVMHEALHNHYTQKSLSLSPGKKDPKFWVLVVVGGVLACYSLLVTVAFIIFWVRSKRSRLLHSDYMNMTPRRPGPTRKHYQPYAPPRDFAAYRSRDQRLPPDAHKPPGGGSFRTPIQEEQADAHSTLAKIRVKFSRSADAPAYQQGQNQLYNELNLGRREEYDVLDKRRGRDPEMGGKPRRKNPQEGLYNELQKDKMAEAYSEIGMKGERRRGKGHDGLYQGLSTATKDTYDALHMQALPPR

SEQ ID NO: 206305 - protein, 650 aa, Artificial Sequence
  Description of Artificial Sequence: Synthetic Chimeric Antigen Receptor
QVQLQQSGPELVRPGTFVKISCKASGYTFTNYDINWVNQRPGQGLEWIGWIYPGDGSTKYNEKFKAKATLTADKSSSTAYLQLNNLTSENSAVYFCASGYEDAMDYWGQGTSVTVSSGGGGSGGGGSGGGGSDIKMTQSPSSMYASLGERVIINCKASQDINSYLSWFQQKPGKSPKTLIYRANRLVDGVPSRFSGSGSGQDYSLTISSLEYEDMGIYYCLQYDEFPLTFGAGTKLELKREPKSPDKTHTCPPCPAPPVAGPSVFLFPPKPKDTLMIARTPEVTCVVVDVSHEDPEVKFNWYVDGVEVHNAKTKPREEQYNSTYRVVSVLTVLHQDWLNGKEYKCKVSNKALPAPIEKTISKAKGQPREPQVYTLPPSRDELTKNQVSLTCLVKGFYPSDIAVEWESNGQPENNYKTTPPVLDSDGSFFLYSKLTVDKSRWQQGNVFSCSVMHEALHNHYTQKSLSLSPGKIISFFLALTSTALLFLLFFLTLRFSVVKRGRKKLLYIFKQPFMRPVQTTQEEDGCSCRFPEEEEGGCELRVKFSRSADAPAYQQGQNQLYNELNLGRREEYDVLDKRRGRDPEMGGKPRRKNPQEGLYNELQKDKMAEAYSEIGMKGERRRGKGHDGLYQGLSTATKDTYDALHMQALP

SEQ ID NO: 206306 - protein, 676 aa, Artificial Sequence
  Description of Artificial Sequence: Synthetic Chimeric Antigen Receptor
MALPVTALLLPLALLLHAARPQVQLVQSGAEVKKPGASVKVSCKASGYSFPDYYINWVRQAPGQGLEWMGWIYFASGNSEYNQKFTGRVTMTRDTSINTAYMELSSLTSEDTAVYFCASLYDYDWYFDVWGQGTMVTVSSGGGGSGGGGSGGGGSDIVMTQTPLSLSVTPGQPASISCKSSQSLVHSNGNTYLHWYLQKPGQSPQLLIYKVSNRFSGVPDRFSGSGSGTDFTLKISRVEAEDVGIYYCSQSSIYPWTFGQGTKLEIKEPKSPDKTHTCPPCPAPPVAGPSVFLFPPKPKDTLMIARTPEVTCVVVDVSHEDPEVKFNWYVDGVEVHNAKTKPREEQYNSTYRVVSVLTVLHQDWLNGKEYKCKVSNKALPAPIEKTISKAKGQPREPQVYTLPPSRDELTKNQVSLTCLVKGFYPSDIAVEWESNGQPENNYKTTPPVLDSDGSFFLYSKLTVDKSRWQQGNVFSCSVMHEALHNHYTQKSLSLSPGKIYIWAPLAGTCGVLLLSLVITLYCKRGRKKLLYIFKQPFMRPVQTTQEEDGCSCRFPEEEEGGCELRVKFSRSADAPAYQQGQNQLYNELNLGRREEYDVLDKRRGRDPEMGGKPRRKNPQEGLYNELQKDKMAEAYSEIGMKGERRRGKGHDGLYQGLSTATKDTYDALHMQALPPR

SEQ ID NO: 206307 - protein, 676 aa, Artificial Sequence
  Description of Artificial Sequence: Synthetic Chimeric Antigen Receptor
MALPVTALLLPLALLLHAARPQVQLVQSGAEVKKPGASVKVSCKASGYSFPDYYINWVRQAPGQGLEWMGWIYFASGNSEYNQKFTGRVTMTRDTSSSTAYMELSSLRSEDTAVYFCASLYDYDWYFDVWGQGTMVTVSSGGGGSGGGGSGGGGSDIVMTQTPLSLSVTPGEPASISCKSSQSLVHSNGNTYLHWYLQKPGQSPQLLIYKVSNRFSGVPDRFSGSGSGADFTLKISRVEAEDVGVYYCAETSHVPWTFGQGTKLEIKEPKSPDKTHTCPPCPAPPVAGPSVFLFPPKPKDTLMIARTPEVTCVVVDVSHEDPEVKFNWYVDGVEVHNAKTKPREEQYNSTYRVVSVLTVLHQDWLNGKEYKCKVSNKALPAPIEKTISKAKGQPREPQVYTLPPSRDELTKNQVSLTCLVKGFYPSDIAVEWESNGQPENNYKTTPPVLDSDGSFFLYSKLTVDKSRWQQGNVFSCSVMHEALHNHYTQKSLSLSPGKIYIWAPLAGTCGVLLLSLVITLYCKRGRKKLLYIFKQPFMRPVQTTQEEDGCSCRFPEEEEGGCELRVKFSRSADAPAYQQGQNQLYNELNLGRREEYDVLDKRRGRDPEMGGKPRRKNPQEGLYNELQKDKMAEAYSEIGMKGERRRGKGHDGLYQGLSTATKDTYDALHMQALPPR

SEQ ID NO: 206308 - protein, 679 aa, Artificial Sequence
  Description of Artificial Sequence: Synthetic Chimeric Antigen Receptor
MALPVTALLLPLALLLHAARPQVQLVQSGAEVKKPGASVKVSCKASGYSFPDYYINWVRQAPGQGLEWMGWIYFASGNSEYNQKFTGRVTMTRDTSINTAYMELSSLTSEDTAVYFCASLYDYDWYFDVWGQGTMVTVSSGGGGSGGGGSGGGGSDIVMTQTPLSLSVTPGQPASISCKSSQSLVHSNGNTYLHWYLQKPGQSPQLLIYKVSNRFSGVPDRFSGSGSGTDFTLKISRVEAEDVGIYYCSQSSIYPWTFGQGTKLEIKEPKSPDKTHTCPPCPAPPVAGPSVFLFPPKPKDTLMIARTPEVTCVVVDVSHEDPEVKFNWYVDGVEVHNAKTKPREEQYNSTYRVVSVLTVLHQDWLNGKEYKCKVSNKALPAPIEKTISKAKGQPREPQVYTLPPSRDELTKNQVSLTCLVKGFYPSDIAVEWESNGQPENNYKTTPPVLDSDGSFFLYSKLTVDKSRWQQGNVFSCSVMHEALHNHYTQKSLSLSPGKIISFFLALTSTALLFLLFFLTLRFSVVKRGRKKLLYIFKQPFMRPVQTTQEEDGCSCRFPEEEEGGCELRVKFSRSADAPAYQQGQNQLYNELNLGRREEYDVLDKRRGRDPEMGGKPRRKNPQEGLYNELQKDKMAEAYSEIGMKGERRRGKGHDGLYQGLSTATKDTYDALHMQALPPR

SEQ ID NO: 206309 - protein, 679 aa, Artificial Sequence
  Description of Artificial Sequence: Synthetic Chimeric Antigen Receptor
MALPVTALLLPLALLLHAARPQVQLVQSGAEVKKPGASVKVSCKASGYSFPDYYINWVRQAPGQGLEWMGWIYFASGNSEYNQKFTGRVTMTRDTSSSTAYMELSSLRSEDTAVYFCASLYDYDWYFDVWGQGTMVTVSSGGGGSGGGGSGGGGSDIVMTQTPLSLSVTPGEPASISCKSSQSLVHSNGNTYLHWYLQKPGQSPQLLIYKVSNRFSGVPDRFSGSGSGADFTLKISRVEAEDVGVYYCAETSHVPWTFGQGTKLEIKEPKSPDKTHTCPPCPAPPVAGPSVFLFPPKPKDTLMIARTPEVTCVVVDVSHEDPEVKFNWYVDGVEVHNAKTKPREEQYNSTYRVVSVLTVLHQDWLNGKEYKCKVSNKALPAPIEKTISKAKGQPREPQVYTLPPSRDELTKNQVSLTCLVKGFYPSDIAVEWESNGQPENNYKTTPPVLDSDGSFFLYSKLTVDKSRWQQGNVFSCSVMHEALHNHYTQKSLSLSPGKIISFFLALTSTALLFLLFFLTLRFSVVKRGRKKLLYIFKQPFMRPVQTTQEEDGCSCRFPEEEEGGCELRVKFSRSADAPAYQQGQNQLYNELNLGRREEYDVLDKRRGRDPEMGGKPRRKNPQEGLYNELQKDKMAEAYSEIGMKGERRRGKGHDGLYQGLSTATKDTYDALHMQALPPR

SEQ ID NO: 206310 - protein, 493 aa, Artificial Sequence
  Description of Artificial Sequence: Synthetic Chimeric Antigen Receptor
MALPVTALLLPLALLLHAARPQVQLVQSGAEVRKTGASVKVSCKASGYIFDNFGINWVRQAPGQGLEWMGWINPKNNNTNYAQKFQGRVTITADESTNTAYMEVSSLRSEDTAVYYCARGPYYYQSYMDVWGQGTMVTVSSASGGGGSGGRASGGGGSDIVMTQTPLSLPVTPGEPASISCRSSQSLLHSNGYNYLNWYLQKPGQSPQLLIYLGSKRASGVPDRFSGSGSGTDFTLHITRVGAEDVGVYYCMQALQTPYTFGQGTKLEIKTTTPAPRPPTPAPTIASQPLSLRPEACRPAAGGAVHTRGLDFACDIYIWAPLAGTCGVLLLSLVITLYCKRGRKKLLYIFKQPFMRPVQTTQEEDGCSCRFPEEEEGGCELRVKFSRSADAPAYKQGQNQLYNELNLGRREEYDVLDKRRGRDPEMGGKPRRKNPQEGLYNELQKDKMAEAYSEIGMKGERRRGKGHDGLYQGLSTATKDTYDALHMQALPPR

SEQ ID NO: 206311 - protein, 490 aa, Artificial Sequence
  Description of Artificial Sequence: Synthetic Chimeric Antigen Receptor
MALPVTALLLPLALLLHAARPQVQLQESGGGLVQPGGSLRLSCAASGFTFSSDAMTWVRQAPGKGLEWVSVISGSGGTTYYADSVKGRFTISRDNSKNTLYLQMNSLRAEDTAVYYCAKLDSSGYYYARGPRYWGQGTLVTVSSASGGGGSGGRASGGGGSDIQLTQSPSSLSASVGDRVTITCRASQSISSYLNWYQQKPGKAPKLLIYGASTLASGVPARFSGSGSGTHFTLTINSLQSEDSATYYCQQSYKRASFGQGTKVEIKTTTPAPRPPTPAPTIASQPLSLRPEACRPAAGGAVHTRGLDFACDIYIWAPLAGTCGVLLLSLVITLYCKRGRKKLLYIFKQPFMRPVQTTQEEDGCSCRFPEEEEGGCELRVKFSRSADAPAYKQGQNQLYNELNLGRREEYDVLDKRRGRDPEMGGKPRRKNPQEGLYNELQKDKMAEAYSEIGMKGERRRGKGHDGLYQGLSTATKDTYDALHMQALPPR

SEQ ID NO: 206312 - protein, 491 aa, Artificial Sequence
  Description of Artificial Sequence: Synthetic Chimeric Antigen Receptor
MALPVTALLLPLALLLHAARPQVQLVQSGAEVKKPGASVKVSCKASGYTFSNYGITWVRQAPGQGLEWMGWISAYNGNTNYAQKFQGRVTMTRNTSISTAYMELSSLRSEDTAVYYCARGPYYYYMDVWGKGTMVTVSSASGGGGSGGRASGGGGSEIVMTQSPLSLPVTPGEPASISCRSSQSLLYSNGYNYVDWYLQKPGQSPQLLIYLGSNRASGVPDRFSGSGSGTDFKLQISRVEAEDVGIYYCMQGRQFPYSFGQGTKVEIKTTTPAPRPPTPAPTIASQPLSLRPEACRPAAGGAVHTRGLDFACDIYIWAPLAGTCGVLLLSLVITLYCKRGRKKLLYIFKQPFMRPVQTTQEEDGCSCRFPEEEEGGCELRVKFSRSADAPAYKQGQNQLYNELNLGRREEYDVLDKRRGRDPEMGGKPRRKNPQEGLYNELQKDKMAEAYSEIGMKGERRRGKGHDGLYQGLSTATKDTYDALHMQALPPR

SEQ ID NO: 206313 - protein, 490 aa, Artificial Sequence
  Description of Artificial Sequence: Synthetic Chimeric Antigen Receptor
MALPVTALLLPLALLLHAARPQVQLVESGGGLVQPGRSLRLSCAASGFTFSNYAMSWVRQAPGKGLGWVSGISRSGENTYYADSVKGRFTISRDNSKNTLYLQMNSLRDEDTAVYYCARSPAHYYGGMDVWGQGTTVTVSSASGGGGSGGRASGGGGSDIVLTQSPGTLSLSPGERATLSCRASQSISSSFLAWYQQKPGQAPRLLIYGASRRATGIPDRFSGSGSGTDFTLTISRLEPEDSAVYYCQQYHSSPSWTFGQGTKLEIKTTTPAPRPPTPAPTIASQPLSLRPEACRPAAGGAVHTRGLDFACDIYIWAPLAGTCGVLLLSLVITLYCKRGRKKLLYIFKQPFMRPVQTTQEEDGCSCRFPEEEEGGCELRVKFSRSADAPAYKQGQNQLYNELNLGRREEYDVLDKRRGRDPEMGGKPRRKNPQEGLYNELQKDKMAEAYSEIGMKGERRRGKGHDGLYQGLSTATKDTYDALHMQALPPR

SEQ ID NO: 206314 - protein, 488 aa, Artificial Sequence
  Description of Artificial Sequence: Synthetic Chimeric Antigen Receptor
MALPVTALLLPLALLLHAARPQVQLVESGGGLVQPGRSLRLSCAASGFTFDDYAMHWVRQAPGKGLEWVSGISWNSGSIGYADSVKGRFTISRDNAKNSLYLQMNSLRAEDTALYYCSVHSFLAYWGQGTLVTVSSASGGGGSGGRASGGGGSDIVMTQTPLSLPVTPGEPASISCRSSQSLLHSNGYNYLDWYLQKPGQSPQLLIYLGSNRASGVPDRFSGSGSGTDFTLKISRVEAEDVGVYYCMQALQTPYTFGQGTKVEIKTTTPAPRPPTPAPTIASQPLSLRPEACRPAAGGAVHTRGLDFACDIYIWAPLAGTCGVLLLSLVITLYCKRGRKKLLYIFKQPFMRPVQTTQEEDGCSCRFPEEEEGGCELRVKFSRSADAPAYKQGQNQLYNELNLGRREEYDVLDKRRGRDPEMGGKPRRKNPQEGLYNELQKDKMAEAYSEIGMKGERRRGKGHDGLYQGLSTATKDTYDALHMQALPPR

SEQ ID NO: 206315 - protein, 483 aa, Artificial Sequence; identical to SEQ ID NO: 206239
  Description of Artificial Sequence: Synthetic Chimeric Antigen Receptor

SEQ ID NO: 206316 - protein, 485 aa, Artificial Sequence; identical to SEQ ID NO: 206243
  Description of Artificial Sequence: Synthetic Chimeric Antigen Receptor

SEQ ID NO: 206317 - protein, 483 aa, Artificial Sequence
  Description of Artificial Sequence: Synthetic Chimeric Antigen Receptor
MALPVTALLLPLALLLHAARPQVQLVESGGGLVKPGGSLRLSCAASGFTFSDYYMSWIRQAPGKGLEWVSYISSSGSTIYYADSVKGRFTISRDNAKNSLYLQMNSLRAEDTAVYYCARESGDGMDVWGQGTTVTVSSASGGGGSGGRASGGGGSDIQMTQSPSSLSASVGDRVTITCRASQSISSYLNWYQQKPGKAPKLLIYAASSLQSGVPSRFSGSGSGTDFTLTISSLQPEDFATYYCQQSYTLAFGQGTKVDIKTTTPAPRPPTPAPTIASQPLSLRPEACRPAAGGAVHTRGLDFACDIYIWAPLAGTCGVLLLSLVITLYCKRGRKKLLYIFKQPFMRPVQTTQEEDGCSCRFPEEEEGGCELRVKFSRSADAPAYKQGQNQLYNELNLGRREEYDVLDKRRGRDPEMGGKPRRKNPQEGLYNELQKDKMAEAYSEIGMKGERRRGKGHDGLYQGLSTATKDTYDALHMQALPPR

SEQ ID NO: 206318 - protein, 490 aa, Artificial Sequence
  Description of Artificial Sequence: Synthetic Chimeric Antigen Receptor
MALPVTALLLPLALLLHAARPQVQLVQSGGGLVKPGGSLRLSCAASGFTFSDYYMSWIRQAPGKGLEWVSYISSSGNTIYYADSVKGRFTISRDNAKNSLYLQMNSLRAEDTAVYYCARSTMVREDYWGQGTLVTVSSASGGGGSGGRASGGGGSDIVLTQSPLSLPVTLGQPASISCKSSESLVHNSGKTYLNWFHQRPGQSPRRLIYEVSNRDSGVPDRFTGSGSGTDFTLKISRVEAEDVGVYYCMQGTHWPGTFGQGTKLEIKTTTPAPRPPTPAPTIASQPLSLRPEACRPAAGGAVHTRGLDFACDIYIWAPLAGTCGVLLLSLVITLYCKRGRKKLLYIFKQPFMRPVQTTQEEDGCSCRFPEEEEGGCELRVKFSRSADAPAYKQGQNQLYNELNLGRREEYDVLDKRRGRDPEMGGKPRRKNPQEGLYNELQKDKMAEAYSEIGMKGERRRGKGHDGLYQGLSTATKDTYDALHMQALPPR

SEQ ID NO: 206319 - protein, 487 aa, Artificial Sequence
  Description of Artificial Sequence: Synthetic Chimeric Antigen Receptor
MALPVTALLLPLALLLHAARPEVQLLESGGGLVQPGGSLRLSCAVSGFALSNHGMSWVRRAPGKGLEWVSGIVYSGSTYYAASVKGRFTISRDNSRNTLYLQMNSLRPEDTAIYYCSAHGGESDVWGQGTTVTVSSASGGGGSGGRASGGGGSDIVMTQTPLSLSVTPGQPASISCKSSQSLLRNDGKTPLYWYLQKAGQPPQLLIYEVSNRFSGVPDRFSGSGSGTDFTLKISRVEAEDVGAYYCMQNIQFPSFGGGTKLEIKTTTPAPRPPTPAPTIASQPLSLRPEACRPAAGGAVHTRGLDFACDIYIWAPLAGTCGVLLLSLVITLYCKRGRKKLLYIFKQPFMRPVQTTQEEDGCSCRFPEEEEGGCELRVKFSRSADAPAYKQGQNQLYNELNLGRREEYDVLDKRRGRDPEMGGKPRRKNPQEGLYNELQKDKMAEAYSEIGMKGERRRGKGHDGLYQGLSTATKDTYDALHMQALPPR

SEQ ID NO: 206320 - protein, 483 aa, Artificial Sequence
  Description of Artificial Sequence: Synthetic Chimeric Antigen Receptor
MALPVTALLLPLALLLHAARPQVQLVESGGGLVQPGGSLRLSCAVSGFALSNHGMSWVRRAPGKGLEWVSGIVYSGSTYYAASVKGRFTISRDNSRNTLYLQMNSLRPEDTAIYYCSAHGGESDVWGQGTTVTVSSASGGGGSGGRASGGGGSDIRLTQSPSPLSASVGDRVTITCQASEDINKFLNWYHQTPGKAPKLLIYDASTLQTGVPSRFSGSGSGTDFTLTINSLQPEDIGTYYCQQYESLPLTFGGGTKVEIKTTTPAPRPPTPAPTIASQPLSLRPEACRPAAGGAVHTRGLDFACDIYIWAPLAGTCGVLLLSLVITLYCKRGRKKLLYIFKQPFMRPVQTTQEEDGCSCRFPEEEEGGCELRVKFSRSADAPAYKQGQNQLYNELNLGRREEYDVLDKRRGRDPEMGGKPRRKNPQEGLYNELQKDKMAEAYSEIGMKGERRRGKGHDGLYQGLSTATKDTYDALHMQALPPR

SEQ ID NO: 206321 - protein, 484 aa, Artificial Sequence
  Description of Artificial Sequence: Synthetic Chimeric Antigen Receptor
MALPVTALLLPLALLLHAARPEVQLVETGGGLVQPGGSLRLSCAVSGFALSNHGMSWVRRAPGKGLEWVSGIVYSGSTYYAASVKGRFTISRDNSRNTLYLQMNSLRPEDTAIYYCSAHGGESDVWGQGTTVTVSSASGGGGSGGRASGGGGSETTLTQSPATLSVSPGERATLSCRASQSVGSNLAWYQQKPGQGPRLLIYGASTRATGIPARFSGSGSGTEFTLTISSLQPEDFAVYYCQQYNDWLPVTFGQGTKVEIKTTTPAPRPPTPAPTIASQPLSLRPEACRPAAGGAVHTRGLDFACDIYIWAPLAGTCGVLLLSLVITLYCKRGRKKLLYIFKQPFMRPVQTTQEEDGCSCRFPEEEEGGCELRVKFSRSADAPAYKQGQNQLYNELNLGRREEYDVLDKRRGRDPEMGGKPRRKNPQEGLYNELQKDKMAEAYSEIGMKGERRRGKGHDGLYQGLSTATKDTYDALHMQALPPR

SEQ ID NO: 206322 - protein, 485 aa, Artificial Sequence
  Description of Artificial Sequence: Synthetic Chimeric Antigen Receptor
MALPVTALLLPLALLLHAARPEVQLVESGGGLVQPGGSLRLSCAVSGFALSNHGMSWVRRAPGKGLEWVSGIVYSGSTYYAASVKGRFTISRDNSRNTLYLQMNSLRPEDTAIYYCSAHGGESDVWGQGTTVTVSSASGGGGSGGRASGGGGSEIVLTQSPGTLSLSPGERATLSCRASQSIGSSSLAWYQQKPGQAPRLLMYGASSRASGIPDRFSGSGSGTDFTLTISRLEPEDFAVYYCQQYAGSPPFTFGQGTKVEIKTTTPAPRPPTPAPTIASQPLSLRPEACRPAAGGAVHTRGLDFACDIYIWAPLAGTCGVLLLSLVITLYCKRGRKKLLYIFKQPFMRPVQTTQEEDGCSCRFPEEEEGGCELRVKFSRSADAPAYKQGQNQLYNELNLGRREEYDVLDKRRGRDPEMGGKPRRKNPQEGLYNELQKDKMAEAYSEIGMKGERRRGKGHDGLYQGLSTATKDTYDALHMQALPPR

SEQ ID NO: 206323 - protein, 487 aa, Artificial Sequence
  Description of Artificial Sequence: Synthetic Chimeric Antigen Receptor
MALPVTALLLPLALLLHAARPQVQLQESGPGLVKPSETLSLTCTVSGGSISSSYYYWGWIRQPPGKGLEWIGSIYYSGSAYYNPSLKSRVTISVDTSKNQFSLRLSSVTAADTAVYYCARHWQEWPDAFDIWGQGTMVTVSSGGGGSGGGGSGGGGSETTLTQSPAFMSATPGDKVIISCKASQDIDDAMNWYQQKPGEAPLFIIQSATSPVPGIPPRFSGSGFGTDFSLTINNIESEDAAYYFCLQHDNFPLTFGQGTKLEIKTTTPAPRPPTPAPTIASQPLSLRPEACRPAAGGAVHTRGLDFACDIYIWAPLAGTCGVLLLSLVITLYCKRGRKKLLYIFKQPFMRPVQTTQEEDGCSCRFPEEEEGGCELRVKFSRSADAPAYKQGQNQLYNELNLGRREEYDVLDKRRGRDPEMGGKPRRKNPQEGLYNELQKDKMAEAYSEIGMKGERRRGKGHDGLYQGLSTATKDTYDALHMQALPPR

SEQ ID NO: 206324 - protein, 489 aa, Artificial Sequence
  Description of Artificial Sequence: Synthetic Chimeric Antigen Receptor
MALPVTALLLPLALLLHAARPQVNLRESGPALVKPTQTLTLTCTFSGFSLRTSGMCVSWIRQPPGKALEWLARIDWDEDKFYSTSLKTRLTISKDTSDNQVVLRMTNMDPADTATYYCARSGAGGTSATAFDIWGPGTMVTVSSGGGGSGGGGSGGGGSDIQMTQSPSSLSASVGDRVTITCRASQDIYNNLAWFQLKPGSAPRSLMYAANKSQSGVPSRFSGSASGTDFTLTISSLQPEDFATYYCQHYYRFPYSFGQGTKLEIKTTTPAPRPPTPAPTIASQPLSLRPEACRPAAGGAVHTRGLDFACDIYIWAPLAGTCGVLLLSLVITLYCKRGRKKLLYIFKQPFMRPVQTTQEEDGCSCRFPEEEEGGCELRVKFSRSADAPAYKQGQNQLYNELNLGRREEYDVLDKRRGRDPEMGGKPRRKNPQEGLYNELQKDKMAEAYSEIGMKGERRRGKGHDGLYQGLSTATKDTYDALHMQALPPR

SEQ ID NO: 206325 - protein, 490 aa, Artificial Sequence
  Description of Artificial Sequence: Synthetic Chimeric Antigen Receptor
MALPVTALLLPLALLLHAARPEVQLVESGGGLVKPGGSLRLSCAASGFTFSSYSMNWVRQAPGKGLEWVSSISSSSSYIYYADSVKGRFTISRDNAKNSLYLQMNSLRAEDTAVYYCAKTIAAVYAFDIWGQGTTVTVSSGGGGSGGGGSGGGGSEIVLTQSPLSLPVTPEEPASISCRSSQSLLHSNGYNYLDWYLQKPGQSPQLLIYLGSNRASGVPDRFSGSGSGTDFTLKISRVEAEDVGVYYCMQALQTPYTFGQGTKLEIKTTTPAPRPPTPAPTIASQPLSLRPEACRPAAGGAVHTRGLDFACDIYIWAPLAGTCGVLLLSLVITLYCKRGRKKLLYIFKQPFMRPVQTTQEEDGCSCRFPEEEEGGCELRVKFSRSADAPAYKQGQNQLYNELNLGRREEYDVLDKRRGRDPEMGGKPRRKNPQEGLYNELQKDKMAEAYSEIGMKGERRRGKGHDGLYQGLSTATKDTYDALHMQALPPR

SEQ ID NO: 206326 - protein, 484 aa, Artificial Sequence
  Description of Artificial Sequence: Synthetic Chimeric Antigen Receptor
MALPVTALLLPLALLLHAARPEVQLVESGGGLVKPGGSLRLSCAASGFTFSDYYMSWIRQAPGKGLEWVSYISSSGSTIYYADSVKGRFTISRDNAKNSLYLQMNSLRAEDTAVYYCARDLRGAFDIWGQGTMVTVSSGGGGSGGGGSGGGGSSYVLTQSPSVSAAPGYTATISCGGNNIGTKSVHWYQQKPGQAPLLVIRDDSVRPSKIPGRFSGSNSGNMATLTISGVQAGDEADFYCQVWDSDSEHVVFGGGTKLTVLTTTPAPRPPTPAPTIASQPLSLRPEACRPAAGGAVHTRGLDFACDIYIWAPLAGTCGVLLLSLVITLYCKRGRKKLLYIFKQPFMRPVQTTQEEDGCSCRFPEEEEGGCELRVKFSRSADAPAYKQGQNQLYNELNLGRREEYDVLDKRRGRDPEMGGKPRRKNPQEGLYNELQKDKMAEAYSEIGMKGERRRGKGHDGLYQGLSTATKDTYDALHMQALPPR

SEQ ID NO: 206327 - protein, 485 aa, Artificial Sequence; identical to SEQ ID NO: 206244
  Description of Artificial Sequence: Synthetic Chimeric Antigen Receptor

SEQ ID NO: 206328 - protein, 489 aa, Artificial Sequence
  Description of Artificial Sequence: Synthetic Chimeric Antigen Receptor
MALPVTALLLPLALLLHAARPQVQLQESGPGLVKPSQTLSLTCTVSGGSISSGGYYWSWIRQHPGKGLEWIGYIYYSGSTYYNPSLKSRVTISVDTSKNQFSLKLSSVTAADTAVYYCARAGIAARLRGAFDIWGQGTMVTVSSGGGGSGGGGSGGGGSDIVMTQSPSSVSASVGDRVIITCRASQGIRNWLAWYQQKPGKAPNLLIYAASNLQSGVPSRFSGSGSGADFTLTISSLQPEDVATYYCQKYNSAPFTFGPGTKVDIKTTTPAPRPPTPAPTIASQPLSLRPEACRPAAGGAVHTRGLDFACDIYIWAPLAGTCGVLLLSLVITLYCKRGRKKLLYIFKQPFMRPVQTTQEEDGCSCRFPEEEEGGCELRVKFSRSADAPAYKQGQNQLYNELNLGRREEYDVLDKRRGRDPEMGGKPRRKNPQEGLYNELQKDKMAEAYSEIGMKGERRRGKGHDGLYQGLSTATKDTYDALHMQALPPR

SEQ ID NO: 206329 - protein, 497 aa, Artificial Sequence
  Description of Artificial Sequence: Synthetic Chimeric Antigen Receptor
MALPVTALLLPLALLLHAARPQVQLVQSGAEVKKPGSSVKVSCKASGGTFSSYAISWVRQAPGQGLEWMGGIIPIFGTANYAQKFQGRVTITADESTSTAYMELSSLRSEDTAVYYCARRGGYQLLRWDVGLLRSAFDIWGQGTMVTVSSGGGGSGGGGSGGGGSSYVLTQPPSVSVAPGQTARITCGGNNIGSKSVHWYQQKPGQAPVLVLYGKNNRPSGVPDRFSGSRSGTTASLTITGAQAEDEADYYCSSRDSSGDHLRVFGTGTKVTVLTTTPAPRPPTPAPTIASQPLSLRPEACRPAAGGAVHTRGLDFACDIYIWAPLAGTCGVLLLSLVITLYCKRGRKKLLYIFKQPFMRPVQTTQEEDGCSCRFPEEEEGGCELRVKFSRSADAPAYKQGQNQLYNELNLGRREEYDVLDKRRGRDPEMGGKPRRKNPQEGLYNELQKDKMAEAYSEIGMKGERRRGKGHDGLYQGLSTATKDTYDALHMQALPPR

SEQ ID NO: 206330 - protein, 492 aa, Artificial Sequence
  Description of Artificial Sequence: Synthetic Chimeric Antigen Receptor
MALPVTALLLPLALLLHAARPEVQLQQSGPGLVKPSQTLSLTCAISGDSVSSNSAAWNWIRQSPSRGLEWLGRTYYRSKWYSFYAISLKSRIIINPDTSKNQFSLQLKSVTPEDTAVYYCARSSPEGLFLYWFDPWGQGTLVTVSSGGDGSGGGGSGGGGSSSELTQDPAVSVALGQTIRITCQGDSLGNYYATWYQQKPGQAPVLVIYGTNNRPSGIPDRFSASSSGNTASLTITGAQAEDEADYYCNSRDSSGHHLLFGTGTKVTVLTTTPAPRPPTPAPTIASQPLSLRPEACRPAAGGAVHTRGLDFACDIYIWAPLAGTCGVLLLSLVITLYCKRGRKKLLYIFKQPFMRPVQTTQEEDGCSCRFPEEEEGGCELRVKFSRSADAPAYKQGQNQLYNELNLGRREEYDVLDKRRGRDPEMGGKPRRKNPQEGLYNELQKDKMAEAYSEIGMKGERRRGKGHDGLYQGLSTATKDTYDALHMQALPPR

SEQ ID NO: 206331 - protein, 483 aa, Artificial Sequence
  Description of Artificial Sequence: Synthetic Chimeric Antigen Receptor
MALPVTALLLPLALLLHAARPEVQLVETGGGLVQPGRSLRLSCAASGFTFDDYAMHWVRQAPGKGLEWVSGISWNSGSIGYADSVKGRFTISRDNAKNSLYLQMNSLRDEDTAVYYCARVGKAVPDVWGQGTTVTVSSGGGGSGGGGSGGGGSDIVMTQTPSSLSASVGDRVTITCRASQSISSYLNWYQQKPGKAPKLLIYAASSLQSGVPSRFSGSGSGTDFTLTISSLQPEDFATYYCQQSYSTPYSFGQGTRLEIKTTTPAPRPPTPAPTIASQPLSLRPEACRPAAGGAVHTRGLDFACDIYIWAPLAGTCGVLLLSLVITLYCKRGRKKLLYIFKQPFMRPVQTTQEEDGCSCRFPEEEEGGCELRVKFSRSADAPAYKQGQNQLYNELNLGRREEYDVLDKRRGRDPEMGGKPRRKNPQEGLYNELQKDKMAEAYSEIGMKGERRRGKGHDGLYQGLSTATKDTYDALHMQALPPR

SEQ ID NO: 206332 - protein, 488 aa, Artificial Sequence
  Description of Artificial Sequence: Synthetic Chimeric Antigen Receptor
MALPVTALLLPLALLLHAARPEVQLLETGGGLVQPGGSLRLSCAASGFSFSSYAMSWVRQAPGKGLEWVSAISGSGGSTYYADSVKGRFTISRDNSKNTLYLQMNSLRAEDTAVYYCAKALVGATGAFDIWGQGTLVTVSSGGGGSGGGGSGGGGSEIVLTQSPGTLSLSPGERATLSCRASQSLSSNFLAWYQQKPGQAPGLLIYGASNWATGTPDRFSGSGSGTDFTLTITRLEPEDFAVYYCQYYGTSPMYTFGQGTKVEIKTTTPAPRPPTPAPTIASQPLSLRPEACRPAAGGAVHTRGLDFACDIYIWAPLAGTCGVLLLSLVITLYCKRGRKKLLYIFKQPFMRPVQTTQEEDGCSCRFPEEEEGGCELRVKFSRSADAPAYKQGQNQLYNELNLGRREEYDVLDKRRGRDPEMGGKPRRKNPQEGLYNELQKDKMAEAYSEIGMKGERRRGKGHDGLYQGLSTATKDTYDALHMQALPPR

SEQ ID NO: 206333 - protein, 492 aa, Artificial Sequence; identical to SEQ ID NO: 206262
  Description of Artificial Sequence: Synthetic Chimeric Antigen Receptor

SEQ ID NO: 206334 - protein, 490 aa, Artificial Sequence
  Description of Artificial Sequence: Synthetic Chimeric Antigen Receptor
MALPVTALLLPLALLLHAARPEVQLVESGGGLVQPGGSLRLSCAASGFTFSSYAMSWVRQAPGKGLEWVSAISGSGGSTYYADSVKGRFTISRDNSKNTLYLQMNSLRAEDTAVYYCAKVEGSGSLDYWGQGTLVTVSSGGGGSGGGGSGGGGSEIVMTQSPGTLSLSPGERATLSCRASQSVSSAYLAWYQQKPGQPPRLLISGASTRATGIPDRFGGSGSGTDFTLTISRLEPEDFAVYYCQHYGSSFNGSSLFTFGQGTRLEIKTTTPAPRPPTPAPTIASQPLSLRPEACRPAAGGAVHTRGLDFACDIYIWAPLAGTCGVLLLSLVITLYCKRGRKKLLYIFKQPFMRPVQTTQEEDGCSCRFPEEEEGGCELRVKFSRSADAPAYKQGQNQLYNELNLGRREEYDVLDKRRGRDPEMGGKPRRKNPQEGLYNELQKDKMAEAYSEIGMKGERRRGKGHDGLYQGLSTATKDTYDALHMQALPPR

SEQ ID NO: 206335 - protein, 485 aa, Artificial Sequence; identical to SEQ ID NO: 206242
  Description of Artificial Sequence: Synthetic Chimeric Antigen Receptor

SEQ ID NO: 206336 - protein, 490 aa, Artificial Sequence
  Description of Artificial Sequence: Synthetic Chimeric Antigen Receptor
MALPVTALLLPLALLLHAARPEVQLVESGGGLVQPGGSLRLSCAASGFTFSSYAMSWVRQAPGKGLEWVSAISGSGGSTYYADSVKGRFTISRDNSKNTLYLQMNSLRAEDTAVYYCAKMGWSSGYLGAFDIWGQGTTVTVSSGGGGSGGGGSGGGGSEIVLTQSPGTLSLSPGERATLSCRASQSVASSFLAWYQQKPGQAPRLLIYGASGRATGIPDRFSGSGSGTDFTLTISRLEPEDFAVYYCQHYGGSPRLTFGGGTKVDIKTTTPAPRPPTPAPTIASQPLSLRPEACRPAAGGAVHTRGLDFACDIYIWAPLAGTCGVLLLSLVITLYCKRGRKKLLYIFKQPFMRPVQTTQEEDGCSCRFPEEEEGGCELRVKFSRSADAPAYKQGQNQLYNELNLGRREEYDVLDKRRGRDPEMGGKPRRKNPQEGLYNELQKDKMAEAYSEIGMKGERRRGKGHDGLYQGLSTATKDTYDALHMQALPPR

SEQ ID NO: 206337 - protein, 492 aa, Artificial Sequence
  Description of Artificial Sequence: Synthetic Chimeric Antigen Receptor
MALPVTALLLPLALLLHAARPQVQLVESGGGLVQPGGSLRLSCAASGFTFSSYAMSWVRQAPGKGLEWVSAISGSGGSTYYADSVKGRFTISRDNAKNSLYLQMNSLRAEDTAIYYCARATYKRELRYYYGMDVWGQGTMVTVSSGGGGSGGGGSGGGGSEIVMTQSPGTVSLSPGERATLSCRASQSVSSSFLAWYQQKPGQAPRLLIYGASSRATGIPDRFSGSGSGTDFTLTISRLEPEDSAVYYCQQYHSSPSWTFGQGTRLEIKTTTPAPRPPTPAPTIASQPLSLRPEACRPAAGGAVHTRGLDFACDIYIWAPLAGTCGVLLLSLVITLYCKRGRKKLLYIFKQPFMRPVQTTQEEDGCSCRFPEEEEGGCELRVKFSRSADAPAYKQGQNQLYNELNLGRREEYDVLDKRRGRDPEMGGKPRRKNPQEGLYNELQKDKMAEAYSEIGMKGERRRGKGHDGLYQGLSTATKDTYDALHMQALPPR

SEQ ID NO: 206338 - protein, 490 aa, Artificial Sequence
  Description of Artificial Sequence: Synthetic Chimeric Antigen Receptor
MALPVTALLLPLALLLHAARPEVQLVESGGGLVQPGRSLRLSCTASGFTFDDYAMHWVRQRPGKGLEWVASINWKGNSLAYGDSVKGRFAISRDNAKNTVFLQMNSLRTEDTAVYYCASHQGVAYYNYAMDVWGRGTLVTVSSGGGGSGGGGSGGGGSEIVLTQSPGTLSLSPGERATLSCRATQSIGSSFLAWYQQRPGQAPRLLIYGASQRATGIPDRFSGRGSGTDFTLTISRVEPEDSAVYYCQHYESSPSWTFGQGTKVEIKTTTPAPRPPTPAPTIASQPLSLRPEACRPAAGGAVHTRGLDFACDIYIWAPLAGTCGVLLLSLVITLYCKRGRKKLLYIFKQPFMRPVQTTQEEDGCSCRFPEEEEGGCELRVKFSRSADAPAYKQGQNQLYNELNLGRREEYDVLDKRRGRDPEMGGKPRRKNPQEGLYNELQKDKMAEAYSEIGMKGERRRGKGHDGLYQGLSTATKDTYDALHMQALPPR

SEQ ID NO: 206339 - protein, 486 aa, Artificial Sequence
  Description of Artificial Sequence: Synthetic Chimeric Antigen Receptor
MALPVTALLLPLALLLHAARPEVQLLESGGGLVQPGGSLRLSCAASGFTFSSYAMSWVRQAPGKGLEWVSAISGSGGSTYYADSVKGRFTISRDNSKNTLYLQMNSLRAEDTAVYYCAKIPQTGTFDYWGQGTLVTVSSGGGGSGGGGSGGGGSEIVLTQSPGTLSLSPGERATLSCRASQSVSSSYLAWYQQRPGQAPRLLIYGASSRATGIPDRFSGSGSGTDFTLTISRLEPEDFAVYYCQHYGSSPSWTFGQGTRLEIKTTTPAPRPPTPAPTIASQPLSLRPEACRPAAGGAVHTRGLDFACDIYIWAPLAGTCGVLLLSLVITLYCKRGRKKLLYIFKQPFMRPVQTTQEEDGCSCRFPEEEEGGCELRVKFSRSADAPAYKQGQNQLYNELNLGRREEYDVLDKRRGRDPEMGGKPRRKNPQEGLYNELQKDKMAEAYSEIGMKGERRRGKGHDGLYQGLSTATKDTYDALHMQALPPR

SEQ ID NO: 206340 - protein, 488 aa, Artificial Sequence
  Description of Artificial Sequence: Synthetic Chimeric Antigen Receptor
MALPVTALLLPLALLLHAARPEVQLLESGGGLVQPGGSLRLSCAASGFTFSSYAMSWVRQAPGKGLEWVSAISGSGGSTYYADSVKGRFTISRDNSKNTLYLQMNSLRAEDTAVYYCVLWFGEGFDPWGQGTLVTVSSGGGGSGGGGSGGGGSDIVLTQSPLSLPVTPGEPASISCRSSQSLLHSNGYNYLDWYLQKPGQSPQLLIYLGSNRASGVPDRFSGSGSGTDFTLKISRVEAEDVGVYYCMQALQTPLTFGGGTKVDIKTTTPAPRPPTPAPTIASQPLSLRPEACRPAAGGAVHTRGLDFACDIYIWAPLAGTCGVLLLSLVITLYCKRGRKKLLYIFKQPFMRPVQTTQEEDGCSCRFPEEEEGGCELRVKFSRSADAPAYKQGQNQLYNELNLGRREEYDVLDKRRGRDPEMGGKPRRKNPQEGLYNELQKDKMAEAYSEIGMKGERRRGKGHDGLYQGLSTATKDTYDALHMQALPPR

SEQ ID NO: 206341 - protein, 485 aa, Artificial Sequence; identical to SEQ ID NO: 206241
  Description of Artificial Sequence: Synthetic Chimeric Antigen Receptor

SEQ ID NO: 206342 - protein, 495 aa, Artificial Sequence
  Description of Artificial Sequence: Synthetic Chimeric Antigen Receptor
MALPVTALLLPLALLLHAARPQVQLVESGGGLVQPGGSLRLSCAASGFTFSSYAMSWVRQAPGKGLEWVSAISGSGGSTYYADSVKGRFTISRDNSKNTLYLQMNSLRAEDTAVYYCAKVGYDSSGYYRDYYGMDVWGQGTTVTVSSGGGGSGGGGSGGGGSEIVLTQSPGTLSLSPGERATLSCRASQSVSSSYLAWYQQKPGQAPRLLIYGTSSRATGISDRFSGSGSGTDFTLTISRLEPEDFAVYYCQHYGNSPPKFTFGPGTKLEIKTTTPAPRPPTPAPTIASQPLSLRPEACRPAAGGAVHTRGLDFACDIYIWAPLAGTCGVLLLSLVITLYCKRGRKKLLYIFKQPFMRPVQTTQEEDGCSCRFPEEEEGGCELRVKFSRSADAPAYKQGQNQLYNELNLGRREEYDVLDKRRGRDPEMGGKPRRKNPQEGLYNELQKDKMAEAYSEIGMKGERRRGKGHDGLYQGLSTATKDTYDALHMQALPPR

SEQ ID NO: 206343 - protein, 449 aa, Artificial Sequence
  Description of Artificial Sequence: Synthetic Chimeric Antigen Receptor
EVKLVESGGGLVQPGGSLSLSCAASGFTFTDYYMSWVRQPPGKALEWLALIRSKADGYTTEYSASVKGRFTLSRDDSQSILYLQMNALRPEDSATYYCARDAAYYSYYSPEGAMDYWGQGTSVTVSSGGGGSGGGGSGGGGSMADYKDIVMTQSHKFMSTSVGDRVNITCKASQNVDSAVAWYQQKPGQSPKALIYSASYRYSGVPDRFTGRGSGTDFTLTISSVQAEDLAVYYCQQYYSTPWTFGGGTKLEIKRGLAVSTISSFFPPGYQIYIWAPLAGTCGVLLLSLVITLYCKRGRKKLLYIFKQPFMRPVQTTQEEDGCSCRFPEEEEGGCELRVKFSRSADAPAYQQGQNQLYNELNLGRREEYDVLDKRRGRDPEMGGKPRRKNPQEGLYNELQKDKMAEAYSEIGMKGERRRGKGHDGLYQGLSTATKDTYDALHMQALPPR

SEQ ID NO: 206344 - protein, 424 aa, Artificial Sequence
  Description of Artificial Sequence: Synthetic Chimeric Antigen Receptor
METDTLLLWVLLLWVPGSTGSVLHLVPINATSKDDSDVTEVMWQPALRRGRGLQAQGYGVRIQDAGVYLLYSQVLFQDVTFTMGQVVSREGQGRQETLFRCIRSMPSHPDRAYNSCYSAGVFHLHQGDILSVIIPRARAKLNLSPHGTFLGFVKLSGGGSDPTTTPAPRPPTPAPTIASQPLSLRPEACRPAAGGAVHTRGLDFACDIFWVLVVVGGVLACYSLLVTVAFIIFWVRSKRSRLLHSDYMNMTPRRPGPTRKHYQPYAPPRDFAAYRSRDQRLPPDAHKPPGGGSFRTPIQEEQADAHSTLAKIRVKFSRSADAPAYQQGQNQLYNELNLGRREEYDVLDKRRGRDPEMGGKPRRKNPQEGLYNELQKDKMAEAYSEIGMKGERRRGKGHDGLYQGLSTATKDTYDALHMQALPPR

SEQ ID NO: 206345 - protein, 436 aa, Artificial Sequence
  Description of Artificial Sequence: Synthetic Chimeric Antigen Receptor
EVQLQQSGPELVKPGASVKISCKASGYTFTDYNMHWVKQSHGKSLEWIGYIYPYNGGTGYNQKFKSKATLTVDNSSSTAYMDVRSLTSEDSAVYYCARGRPAMDYWGQGTSVTVSSGGGGSGGGGSGGGGSDIVLTQSPASLAVSLGQRATISCRASESVDNYGISFMNWFQQKPGQPPKLLIYAASNQGSGVPARFSGSGSGTDFSLNIHPMEEDDTAMYFCQQSKEVPWTFGGGTKLEIKGLAVSTISSFFPPGYQIYIWAPLAGTCGVLLLSLVITLYCKRGRKKLLYIFKQPFMRPVQTTQEEDGCSCRFPEEEEGGCELRVKFSRSADAPAYQQGQNQLYNELNLGRREEYDVLDKRRGRDPEMGGKPRRKNPQEGLYNELQKDKMAEAYSEIGMKGERRRGKGHDGLYQGLSTATKDTYDALHMQALPPR

SEQ ID NO: 206346 - protein, 434 aa, Artificial Sequence
  Description of Artificial Sequence: Synthetic Chimeric Antigen Receptor
QVQLQQSGPELVRPGTFVKISCKASGYTFTNYDINWVNQRPGQGLEWIGWIYPGDGSTKYNEKFKAKATLTADKSSSTAYLQLNNLTSENSAVYFCASGYEDAMDYWGQGTSVTVSSGGGGSGGGGSGGGGSDIKMTQSPSSMYASLGERVIINCKASQDINSYLSWFQQKPGKSPKTLIYRANRLVDGVPSRFSGSGSGQDYSLTISSLEYEDMGIYYCLQYDEFPLTFGAGTKLELKRGLAVSTISSFFPPGYQIYIWAPLAGTCGVLLLSLVITLYCKRGRKKLLYIFKQPFMRPVQTTQEEDGCSCRFPEEEEGGCELRVKFSRSADAPAYQQGQNQLYNELNLGRREEYDVLDKRRGRDPEMGGKPRRKNPQEGLYNELQKDKMAEAYSEIGMKGERRRGKGHDGLYQGLSTATKDTYDALHMQALPPR

SEQ ID NO: 206347 - protein, 437 aa, Artificial Sequence
  Description of Artificial Sequence: Synthetic Chimeric Antigen Receptor
QVQLQQSGPELVRPGTFVKISCKASGYTFTNYDINWVNQRPGQGLEWIGWIYPGDGSTKYNEKFKAKATLTADKSSSTAYLQLNNLTSENSAVYFCASGYEDAMDYWGQGTSVTVSSGGGGSGGGGSGGGGSDIKMTQSPSSMYASLGERVIINCKASQDINSYLSWFQQKPGKSPKTLIYRANRLVDGVPSRFSGSGSGQDYSLTISSLEYEDMGIYYCLQYDEFPLTFGAGTKLELKRGLAVSTISSFFPPGYQIISFFLALTSTALLFLLFFLTLRFSVVKRGRKKLLYIFKQPFMRPVQTTQEEDGCSCRFPEEEEGGCELRVKFSRSADAPAYQQGQNQLYNELNLGRREEYDVLDKRRGRDPEMGGKPRRKNPQEGLYNELQKDKMAEAYSEIGMKGERRRGKGHDGLYQGLSTATKDTYDALHMQALPPR

SEQ ID NO: 206348 - protein, 439 aa, Artificial Sequence
  Description of Artificial Sequence: Synthetic Chimeric Antigen Receptor
EVQLQQSGPELVKPGASVKISCKASGYTFTDYNMHWVKQSHGKSLEWIGYIYPYNGGTGYNQKFKSKATLTVDNSSSTAYMDVRSLTSEDSAVYYCARGRPAMDYWGQGTSVTVSSGGGGSGGGGSGGGGSDIVLTQSPASLAVSLGQRATISCRASESVDNYGISFMNWFQQKPGQPPKLLIYAASNQGSGVPARFSGSGSGTDFSLNIHPMEEDDTAMYFCQQSKEVPWTFGGGTKLEIKGLAVSTISSFFPPGYQIISFFLALTSTALLFLLFFLTLRFSVVKRGRKKLLYIFKQPFMRPVQTTQEEDGCSCRFPEEEEGGCELRVKFSRSADAPAYQQGQNQLYNELNLGRREEYDVLDKRRGRDPEMGGKPRRKNPQEGLYNELQKDKMAEAYSEIGMKGERRRGKGHDGLYQGLSTATKDTYDALHMQALPPR

SEQ ID NO: 206349 - protein, 440 aa, Artificial Sequence
  Description of Artificial Sequence: Synthetic Chimeric Antigen Receptor
QVQLQQPGAEVVKPGASVKMSCKASGYTFTSYYIHWIKQTPGQGLEWVGVIYPGNDDISYNQKFKGKATLTADKSSTTAYMQLSSLTSEDSAVYYCAREVRLRYFDVWGAGTTVTVSSGGGGSGGGGSGGGGSNIMLTQSPSSLAVSAGEKVTMSCKSSQSVFFSSSQKNYLAWYQQIPGQSPKLLIYWASTRESGVPDRFTGSGSGTDFTLTISSVQSEDLAIYYCHQYLSSRTFGGGTKLEIKRGLAVSTISSFFPPGYQIYIWAPLAGTCGVLLLSLVITLYCKRGRKKLLYIFKQPFMRPVQTTQEEDGCSCRFPEEEEGGCELRVKFSRSADAPAYQQGQNQLYNELNLGRREEYDVLDKRRGRDPEMGGKPRRKNPQEGLYNELQKDKMAEAYSEIGMKGERRRGKGHDGLYQGLSTATKDTYDALHMQALPPR

SEQ ID NO: 206350 - protein, 443 aa, Artificial Sequence
  Description of Artificial Sequence: Synthetic Chimeric Antigen Receptor
QVQLQQPGAEVVKPGASVKMSCKASGYTFTSYYIHWIKQTPGQGLEWVGVIYPGNDDISYNQKFKGKATLTADKSSTTAYMQLSSLTSEDSAVYYCAREVRLRYFDVWGAGTTVTVSSGGGGSGGGGSGGGGSNIMLTQSPSSLAVSAGEKVTMSCKSSQSVFFSSSQKNYLAWYQQIPGQSPKLLIYWASTRESGVPDRFTGSGSGTDFTLTISSVQSEDLAIYYCHQYLSSRTFGGGTKLEIKRGLAVSTISSFFPPGYQIISFFLALTSTALLFLLFFLTLRFSVVKRGRKKLLYIFKQPFMRPVQTTQEEDGCSCRFPEEEEGGCELRVKFSRSADAPAYQQGQNQLYNELNLGRREEYDVLDKRRGRDPEMGGKPRRKNPQEGLYNELQKDKMAEAYSEIGMKGERRRGKGHDGLYQGLSTATKDTYDALHMQALPPR

SEQ ID NO: 206351 - protein, 444 aa, Artificial Sequence
  Description of Artificial Sequence: Synthetic Chimeric Antigen Receptor
EVKLQESGPELVKPGASVKMSCKASGYKFTDYVVHWLKQKPGQGLEWIGYINPYNDGTKYNEKFKGKATLTSDKSSSTAYMEVSSLTSEDSAVYYCARDYRYEVYGMDYWGQGTSVTVSSGGGGSGGGGSGGGGSDIVLTQSPTIMSASPGERVTMTCTASSSVNYIHWYQQKSGDSPLRWIFDTSKVASGVPARFSGSGSGTSYSLTISTMEAEDAATYYCQQWRSYPLTFGDGTRLELKRADAAPTVSGLAVSTISSFFPPGYQIYIWAPLAGTCGVLLLSLVITLYCKRGRKKLLYIFKQPFMRPVQTTQEEDGCSCRFPEEEEGGCELRVKFSRSADAPAYQQGQNQLYNELNLGRREEYDVLDKRRGRDPEMGGKPRRKNPQEGLYNELQKDKMAEAYSEIGMKGERRRGKGHDGLYQGLSTATKDTYDALHMQALPPR

SEQ ID NO: 206352 - protein, 447 aa, Artificial Sequence
  Description of Artificial Sequence: Synthetic Chimeric Antigen Receptor
EVKLQESGPELVKPGASVKMSCKASGYKFTDYVVHWLKQKPGQGLEWIGYINPYNDGTKYNEKFKGKATLTSDKSSSTAYMEVSSLTSEDSAVYYCARDYRYEVYGMDYWGQGTSVTVSSGGGGSGGGGSGGGGSDIVLTQSPTIMSASPGERVTMTCTASSSVNYIHWYQQKSGDSPLRWIFDTSKVASGVPARFSGSGSGTSYSLTISTMEAEDAATYYCQQWRSYPLTFGDGTRLELKRADAAPTVSGLAVSTISSFFPPGYQIISFFLALTSTALLFLLFFLTLRFSVVKRGRKKLLYIFKQPFMRPVQTTQEEDGCSCRFPEEEEGGCELRVKFSRSADAPAYQQGQNQLYNELNLGRREEYDVLDKRRGRDPEMGGKPRRKNPQEGLYNELQKDKMAEAYSEIGMKGERRRGKGHDGLYQGLSTATKDTYDALHMQALPPR

SEQ ID NO: 206353 - protein, 463 aa, Artificial Sequence
  Description of Artificial Sequence: Synthetic Chimeric Antigen Receptor
QVQLQQSGPELVRPGTFVKISCKASGYTFTNYDINWVNQRPGQGLEWIGWIYPGDGSTKYNEKFKAKATLTADKSSSTAYLQLNNLTSENSAVYFCASGYEDAMDYWGQGTSVTVSSGGGGSGGGGSGGGGSDIKMTQSPSSMYASLGERVIINCKASQDINSYLSWFQQKPGKSPKTLIYRANRLVDGVPSRFSGSGSGQDYSLTISSLEYEDMGIYYCLQYDEFPLTFGAGTKLELKRTTTPAPRPPTPAPTIASQPLSLRPEACRPAAGGAVHTRGLDFACDIYIWAPLAGTCGVLLLSLVITLYCKRGRKKLLYIFKQPFMRPVQTTQEEDGCSCRFPEEEEGGCELRVKFSRSADAPAYQQGQNQLYNELNLGRREEYDVLDKRRGRDPEMGGKPRRKNPQEGLYNELQKDKMAEAYSEIGMKGERRRGKGHDGLYQGLSTATKDTYDALHMQALPPR

SEQ ID NO: 206354 - protein, 465 aa, Artificial Sequence
  Description of Artificial Sequence: Synthetic Chimeric Antigen Receptor
EVQLQQSGPELVKPGASVKISCKASGYTFTDYNMHWVKQSHGKSLEWIGYIYPYNGGTGYNQKFKSKATLTVDNSSSTAYMDVRSLTSEDSAVYYCARGRPAMDYWGQGTSVTVSSGGGGSGGGGSGGGGSDIVLTQSPASLAVSLGQRATISCRASESVDNYGISFMNWFQQKPGQPPKLLIYAASNQGSGVPARFSGSGSGTDFSLNIHPMEEDDTAMYFCQQSKEVPWTFGGGTKLEIKTTTPAPRPPTPAPTIASQPLSLRPEACRPAAGGAVHTRGLDFACDIYIWAPLAGTCGVLLLSLVITLYCKRGRKKLLYIFKQPFMRPVQTTQEEDGCSCRFPEEEEGGCELRVKFSRSADAPAYQQGQNQLYNELNLGRREEYDVLDKRRGRDPEMGGKPRRKNPQEGLYNELQKDKMAEAYSEIGMKGERRRGKGHDGLYQGLSTATKDTYDALHMQALPPR

SEQ ID NO: 206355 - protein, 466 aa, Artificial Sequence
  Description of Artificial Sequence: Synthetic Chimeric Antigen Receptor
QVQLQQSGPELVRPGTFVKISCKASGYTFTNYDINWVNQRPGQGLEWIGWIYPGDGSTKYNEKFKAKATLTADKSSSTAYLQLNNLTSENSAVYFCASGYEDAMDYWGQGTSVTVSSGGGGSGGGGSGGGGSDIKMTQSPSSMYASLGERVIINCKASQDINSYLSWFQQKPGKSPKTLIYRANRLVDGVPSRFSGSGSGQDYSLTISSLEYEDMGIYYCLQYDEFPLTFGAGTKLELKRTTTPAPRPPTPAPTIASQPLSLRPEACRPAAGGAVHTRGLDFACDIISFFLALTSTALLFLLFFLTLRFSVVKRGRKKLLYIFKQPFMRPVQTTQEEDGCSCRFPEEEEGGCELRVKFSRSADAPAYQQGQNQLYNELNLGRREEYDVLDKRRGRDPEMGGKPRRKNPQEGLYNELQKDKMAEAYSEIGMKGERRRGKGHDGLYQGLSTATKDTYDALHMQALPPR

SEQ ID NO: 206356 - protein, 468 aa, Artificial Sequence
  Description of Artificial Sequence: Synthetic Chimeric Antigen Receptor
EVQLQQSGPELVKPGASVKISCKASGYTFTDYNMHWVKQSHGKSLEWIGYIYPYNGGTGYNQKFKSKATLTVDNSSSTAYMDVRSLTSEDSAVYYCARGRPAMDYWGQGTSVTVSSGGGGSGGGGSGGGGSDIVLTQSPASLAVSLGQRATISCRASESVDNYGISFMNWFQQKPGQPPKLLIYAASNQGSGVPARFSGSGSGTDFSLNIHPMEEDDTAMYFCQQSKEVPWTFGGGTKLEIKTTTPAPRPPTPAPTIASQPLSLRPEACRPAAGGAVHTRGLDFACDIISFFLALTSTALLFLLFFLTLRFSVVKRGRKKLLYIFKQPFMRPVQTTQEEDGCSCRFPEEEEGGCELRVKFSRSADAPAYQQGQNQLYNELNLGRREEYDVLDKRRGRDPEMGGKPRRKNPQEGLYNELQKDKMAEAYSEIGMKGERRRGKGHDGLYQGLSTATKDTYDALHMQALPPR

SEQ ID NO: 206357 - protein, 469 aa, Artificial Sequence
  Description of Artificial Sequence: Synthetic Chimeric Antigen Receptor
QVQLQQPGAEVVKPGASVKMSCKASGYTFTSYYIHWIKQTPGQGLEWVGVIYPGNDDISYNQKFKGKATLTADKSSTTAYMQLSSLTSEDSAVYYCAREVRLRYFDVWGAGTTVTVSSGGGGSGGGGSGGGGSNIMLTQSPSSLAVSAGEKVTMSCKSSQSVFFSSSQKNYLAWYQQIPGQSPKLLIYWASTRESGVPDRFTGSGSGTDFTLTISSVQSEDLAIYYCHQYLSSRTFGGGTKLEIKRTTTPAPRPPTPAPTIASQPLSLRPEACRPAAGGAVHTRGLDFACDIYIWAPLAGTCGVLLLSLVITLYCKRGRKKLLYIFKQPFMRPVQTTQEEDGCSCRFPEEEEGGCELRVKFSRSADAPAYQQGQNQLYNELNLGRREEYDVLDKRRGRDPEMGGKPRRKNPQEGLYNELQKDKMAEAYSEIGMKGERRRGKGHDGLYQGLSTATKDTYDALHMQALPPR

SEQ ID NO: 206358 - protein, 472 aa, Artificial Sequence
  Description of Artificial Sequence: Synthetic Chimeric Antigen Receptor
QVQLQQPGAEVVKPGASVKMSCKASGYTFTSYYIHWIKQTPGQGLEWVGVIYPGNDDISYNQKFKGKATLTADKSSTTAYMQLSSLTSEDSAVYYCAREVRLRYFDVWGAGTTVTVSSGGGGSGGGGSGGGGSNIMLTQSPSSLAVSAGEKVTMSCKSSQSVFFSSSQKNYLAWYQQIPGQSPKLLIYWASTRESGVPDRFTGSGSGTDFTLTISSVQSEDLAIYYCHQYLSSRTFGGGTKLEIKRTTTPAPRPPTPAPTIASQPLSLRPEACRPAAGGAVHTRGLDFACDIISFFLALTSTALLFLLFFLTLRFSVVKRGRKKLLYIFKQPFMRPVQTTQEEDGCSCRFPEEEEGGCELRVKFSRSADAPAYQQGQNQLYNELNLGRREEYDVLDKRRGRDPEMGGKPRRKNPQEGLYNELQKDKMAEAYSEIGMKGERRRGKGHDGLYQGLSTATKDTYDALHMQALPPR

SEQ ID NO: 206359 - protein, 473 aa, Artificial Sequence
  Description of Artificial Sequence: Synthetic Chimeric Antigen Receptor
EVKLQESGPELVKPGASVKMSCKASGYKFTDYVVHWLKQKPGQGLEWIGYINPYNDGTKYNEKFKGKATLTSDKSSSTAYMEVSSLTSEDSAVYYCARDYRYEVYGMDYWGQGTSVTVSSGGGGSGGGGSGGGGSDIVLTQSPTIMSASPGERVTMTCTASSSVNYIHWYQQKSGDSPLRWIFDTSKVASGVPARFSGSGSGTSYSLTISTMEAEDAATYYCQQWRSYPLTFGDGTRLELKRADAAPTVSTTTPAPRPPTPAPTIASQPLSLRPEACRPAAGGAVHTRGLDFACDIYIWAPLAGTCGVLLLSLVITLYCKRGRKKLLYIFKQPFMRPVQTTQEEDGCSCRFPEEEEGGCELRVKFSRSADAPAYQQGQNQLYNELNLGRREEYDVLDKRRGRDPEMGGKPRRKNPQEGLYNELQKDKMAEAYSEIGMKGERRRGKGHDGLYQGLSTATKDTYDALHMQALPPR

SEQ ID NO: 206360 - protein, 476 aa, Artificial Sequence
  Description of Artificial Sequence: Synthetic Chimeric Antigen Receptor
EVKLQESGPELVKPGASVKMSCKASGYKFTDYVVHWLKQKPGQGLEWIGYINPYNDGTKYNEKFKGKATLTSDKSSSTAYMEVSSLTSEDSAVYYCARDYRYEVYGMDYWGQGTSVTVSSGGGGSGGGGSGGGGSDIVLTQSPTIMSASPGERVTMTCTASSSVNYIHWYQQKSGDSPLRWIFDTSKVASGVPARFSGSGSGTSYSLTISTMEAEDAATYYCQQWRSYPLTFGDGTRLELKRADAAPTVSTTTPAPRPPTPAPTIASQPLSLRPEACRPAAGGAVHTRGLDFACDIISFFLALTSTALLFLLFFLTLRFSVVKRGRKKLLYIFKQPFMRPVQTTQEEDGCSCRFPEEEEGGCELRVKFSRSADAPAYQQGQNQLYNELNLGRREEYDVLDKRRGRDPEMGGKPRRKNPQEGLYNELQKDKMAEAYSEIGMKGERRRGKGHDGLYQGLSTATKDTYDALHMQALPPR

SEQ ID NO: 206361 - protein, 649 aa, Artificial Sequence
  Description of Artificial Sequence: Synthetic Chimeric Antigen Receptor
QVQLQQSGPELVRPGTFVKISCKASGYTFTNYDINWVNQRPGQGLEWIGWIYPGDGSTKYNEKFKAKATLTADKSSSTAYLQLNNLTSENSAVYFCASGYEDAMDYWGQGTSVTVSSGGGGSGGGGSGGGGSDIKMTQSPSSMYASLGERVIINCKASQDINSYLSWFQQKPGKSPKTLIYRANRLVDGVPSRFSGSGSGQDYSLTISSLEYEDMGIYYCLQYDEFPLTFGAGTKLELKREPKSPDKTHTCPPCPAPPVAGPSVFLFPPKPKDTLMIARTPEVTCVVVDVSHEDPEVKFNWYVDGVEVHNAKTKPREEQYNSTYRVVSVLTVLHQDWLNGKEYKCKVSNKALPAPIEKTISKAKGQPREPQVYTLPPSRDELTKNQVSLTCLVKGFYPSDIAVEWESNGQPENNYKTTPPVLDSDGSFFLYSKLTVDKSRWQQGNVFSCSVMHEALHNHYTQKSLSLSPGKIYIWAPLAGTCGVLLLSLVITLYCKRGRKKLLYIFKQPFMRPVQTTQEEDGCSCRFPEEEEGGCELRVKFSRSADAPAYQQGQNQLYNELNLGRREEYDVLDKRRGRDPEMGGKPRRKNPQEGLYNELQKDKMAEAYSEIGMKGERRRGKGHDGLYQGLSTATKDTYDALHMQALPPR

SEQ ID NO: 206362 - protein, 651 aa, Artificial Sequence
  Description of Artificial Sequence: Synthetic Chimeric Antigen Receptor
EVQLQQSGPELVKPGASVKISCKASGYTFTDYNMHWVKQSHGKSLEWIGYIYPYNGGTGYNQKFKSKATLTVDNSSSTAYMDVRSLTSEDSAVYYCARGRPAMDYWGQGTSVTVSSGGGGSGGGGSGGGGSDIVLTQSPASLAVSLGQRATISCRASESVDNYGISFMNWFQQKPGQPPKLLIYAASNQGSGVPARFSGSGSGTDFSLNIHPMEEDDTAMYFCQQSKEVPWTFGGGTKLEIKEPKSPDKTHTCPPCPAPPVAGPSVFLFPPKPKDTLMIARTPEVTCVVVDVSHEDPEVKFNWYVDGVEVHNAKTKPREEQYNSTYRVVSVLTVLHQDWLNGKEYKCKVSNKALPAPIEKTISKAKGQPREPQVYTLPPSRDELTKNQVSLTCLVKGFYPSDIAVEWESNGQPENNYKTTPPVLDSDGSFFLYSKLTVDKSRWQQGNVFSCSVMHEALHNHYTQKSLSLSPGKIYIWAPLAGTCGVLLLSLVITLYCKRGRKKLLYIFKQPFMRPVQTTQEEDGCSCRFPEEEEGGCELRVKFSRSADAPAYQQGQNQLYNELNLGRREEYDVLDKRRGRDPEMGGKPRRKNPQEGLYNELQKDKMAEAYSEIGMKGERRRGKGHDGLYQGLSTATKDTYDALHMQALPPR

SEQ ID NO: 206363 - protein, 654 aa, Artificial Sequence
  Description of Artificial Sequence: Synthetic Chimeric Antigen Receptor
EVQLQQSGPELVKPGASVKISCKASGYTFTDYNMHWVKQSHGKSLEWIGYIYPYNGGTGYNQKFKSKATLTVDNSSSTAYMDVRSLTSEDSAVYYCARGRPAMDYWGQGTSVTVSSGGGGSGGGGSGGGGSDIVLTQSPASLAVSLGQRATISCRASESVDNYGISFMNWFQQKPGQPPKLLIYAASNQGSGVPARFSGSGSGTDFSLNIHPMEEDDTAMYFCQQSKEVPWTFGGGTKLEIKEPKSPDKTHTCPPCPAPPVAGPSVFLFPPKPKDTLMIARTPEVTCVVVDVSHEDPEVKFNWYVDGVEVHNAKTKPREEQYNSTYRVVSVLTVLHQDWLNGKEYKCKVSNKALPAPIEKTISKAKGQPREPQVYTLPPSRDELTKNQVSLTCLVKGFYPSDIAVEWESNGQPENNYKTTPPVLDSDGSFFLYSKLTVDKSRWQQGNVFSCSVMHEALHNHYTQKSLSLSPGKIISFFLALTSTALLFLLFFLTLRFSVVKRGRKKLLYIFKQPFMRPVQTTQEEDGCSCRFPEEEEGGCELRVKFSRSADAPAYQQGQNQLYNELNLGRREEYDVLDKRRGRDPEMGGKPRRKNPQEGLYNELQKDKMAEAYSEIGMKGERRRGKGHDGLYQGLSTATKDTYDALHMQALPPR

SEQ ID NO: 206364 - protein, 655 aa, Artificial Sequence
  Description of Artificial Sequence: Synthetic Chimeric Antigen Receptor
QVQLQQPGAEVVKPGASVKMSCKASGYTFTSYYIHWIKQTPGQGLEWVGVIYPGNDDISYNQKFKGKATLTADKSSTTAYMQLSSLTSEDSAVYYCAREVRLRYFDVWGAGTTVTVSSGGGGSGGGGSGGGGSNIMLTQSPSSLAVSAGEKVTMSCKSSQSVFFSSSQKNYLAWYQQIPGQSPKLLIYWASTRESGVPDRFTGSGSGTDFTLTISSVQSEDLAIYYCHQYLSSRTFGGGTKLEIKREPKSPDKTHTCPPCPAPPVAGPSVFLFPPKPKDTLMIARTPEVTCVVVDVSHEDPEVKFNWYVDGVEVHNAKTKPREEQYNSTYRVVSVLTVLHQDWLNGKEYKCKVSNKALPAPIEKTISKAKGQPREPQVYTLPPSRDELTKNQVSLTCLVKGFYPSDIAVEWESNGQPENNYKTTPPVLDSDGSFFLYSKLTVDKSRWQQGNVFSCSVMHEALHNHYTQKSLSLSPGKIYIWAPLAGTCGVLLLSLVITLYCKRGRKKLLYIFKQPFMRPVQTTQEEDGCSCRFPEEEEGGCELRVKFSRSADAPAYQQGQNQLYNELNLGRREEYDVLDKRRGRDPEMGGKPRRKNPQEGLYNELQKDKMAEAYSEIGMKGERRRGKGHDGLYQGLSTATKDTYDALHMQALPPR

SEQ ID NO: 206365 - protein, 658 aa, Artificial Sequence
  Description of Artificial Sequence: Synthetic Chimeric Antigen Receptor
QVQLQQPGAEVVKPGASVKMSCKASGYTFTSYYIHWIKQTPGQGLEWVGVIYPGNDDISYNQKFKGKATLTADKSSTTAYMQLSSLTSEDSAVYYCAREVRLRYFDVWGAGTTVTVSSGGGGSGGGGSGGGGSNIMLTQSPSSLAVSAGEKVTMSCKSSQSVFFSSSQKNYLAWYQQIPGQSPKLLIYWASTRESGVPDRFTGSGSGTDFTLTISSVQSEDLAIYYCHQYLSSRTFGGGTKLEIKREPKSPDKTHTCPPCPAPPVAGPSVFLFPPKPKDTLMIARTPEVTCVVVDVSHEDPEVKFNWYVDGVEVHNAKTKPREEQYNSTYRVVSVLTVLHQDWLNGKEYKCKVSNKALPAPIEKTISKAKGQPREPQVYTLPPSRDELTKNQVSLTCLVKGFYPSDIAVEWESNGQPENNYKTTPPVLDSDGSFFLYSKLTVDKSRWQQGNVFSCSVMHEALHNHYTQKSLSLSPGKIISFFLALTSTALLFLLFFLTLRFSVVKRGRKKLLYIFKQPFMRPVQTTQEEDGCSCRFPEEEEGGCELRVKFSRSADAPAYQQGQNQLYNELNLGRREEYDVLDKRRGRDPEMGGKPRRKNPQEGLYNELQKDKMAEAYSEIGMKGERRRGKGHDGLYQGLSTATKDTYDALHMQALPPR

SEQ ID NO: 206366 - protein, 659 aa, Artificial Sequence
  Description of Artificial Sequence: Synthetic Chimeric Antigen Receptor
EVKLQESGPELVKPGASVKMSCKASGYKFTDYVVHWLKQKPGQGLEWIGYINPYNDGTKYNEKFKGKATLTSDKSSSTAYMEVSSLTSEDSAVYYCARDYRYEVYGMDYWGQGTSVTVSSGGGGSGGGGSGGGGSDIVLTQSPTIMSASPGERVTMTCTASSSVNYIHWYQQKSGDSPLRWIFDTSKVASGVPARFSGSGSGTSYSLTISTMEAEDAATYYCQQWRSYPLTFGDGTRLELKRADAAPTVSEPKSPDKTHTCPPCPAPPVAGPSVFLFPPKPKDTLMIARTPEVTCVVVDVSHEDPEVKFNWYVDGVEVHNAKTKPREEQYNSTYRVVSVLTVLHQDWLNGKEYKCKVSNKALPAPIEKTISKAKGQPREPQVYTLPPSRDELTKNQVSLTCLVKGFYPSDIAVEWESNGQPENNYKTTPPVLDSDGSFFLYSKLTVDKSRWQQGNVFSCSVMHEALHNHYTQKSLSLSPGKIYIWAPLAGTCGVLLLSLVITLYCKRGRKKLLYIFKQPFMRPVQTTQEEDGCSCRFPEEEEGGCELRVKFSRSADAPAYQQGQNQLYNELNLGRREEYDVLDKRRGRDPEMGGKPRRKNPQEGLYNELQKDKMAEAYSEIGMKGERRRGKGHDGLYQGLSTATKDTYDALHMQALPPR

SEQ ID NO: 206367 - protein, 662 aa, Artificial Sequence
  Description of Artificial Sequence: Synthetic Chimeric Antigen Receptor
EVKLQESGPELVKPGASVKMSCKASGYKFTDYVVHWLKQKPGQGLEWIGYINPYNDGTKYNEKFKGKATLTSDKSSSTAYMEVSSLTSEDSAVYYCARDYRYEVYGMDYWGQGTSVTVSSGGGGSGGGGSGGGGSDIVLTQSPTIMSASPGERVTMTCTASSSVNYIHWYQQKSGDSPLRWIFDTSKVASGVPARFSGSGSGTSYSLTISTMEAEDAATYYCQQWRSYPLTFGDGTRLELKRADAAPTVSEPKSPDKTHTCPPCPAPPVAGPSVFLFPPKPKDTLMIARTPEVTCVVVDVSHEDPEVKFNWYVDGVEVHNAKTKPREEQYNSTYRVVSVLTVLHQDWLNGKEYKCKVSNKALPAPIEKTISKAKGQPREPQVYTLPPSRDELTKNQVSLTCLVKGFYPSDIAVEWESNGQPENNYKTTPPVLDSDGSFFLYSKLTVDKSRWQQGNVFSCSVMHEALHNHYTQKSLSLSPGKIISFFLALTSTALLFLLFFLTLRFSVVKRGRKKLLYIFKQPFMRPVQTTQEEDGCSCRFPEEEEGGCELRVKFSRSADAPAYQQGQNQLYNELNLGRREEYDVLDKRRGRDPEMGGKPRRKNPQEGLYNELQKDKMAEAYSEIGMKGERRRGKGHDGLYQGLSTATKDTYDALHMQALPPR

SEQ ID NO: 206368 - protein, 378 aa, Artificial Sequence; identical to SEQ ID NO: 41534
  Description of Artificial Sequence: Synthetic Chimeric Antigen Receptor

SEQ ID NO: 206369 - protein, 383 aa, Artificial Sequence
  Description of Artificial Sequence: Synthetic Chimeric Antigen Receptor
MALPVTALLLPLALLLHAARPGSGSGAQAAQVQLVQSGAEVKKPGASVKVSCKASGYSFPDYYINWVRQAPGQGLEWMGWIYFASGNSEYNQKFTGRVTMTRDTSSSTAYMELSSLRSEDTAVYFCASLYDYDWYFDVWGQGTMVTVSSGGGGSGGGGSGGGGSDIVMTQTPLSLSVTPGEPASISCKSSQSLVHSNGNTYLHWYLQKPGQSPQLLIYKVSNRFSGVPDRFSGSGSGADFTLKISRVEAEDVGVYYCAETSHVPWTFGQGTKLEIKRSDPASGAGSGSGSAVKEGPPSEHSGISRNAIIFLVLGILVFLILLGIGIYFYWSKCSREVLWHCHLCPSSTEHASASANGHVSYSAVSRENSSSQDPQTEGTRSHG

SEQ ID NO: 206370 - protein, 391 aa, Artificial Sequence
  Description of Artificial Sequence: Synthetic Chimeric Antigen Receptor
MALPVTALLLPLALLLHAARPGSGSGAQAAQVQLVQSGAEVKKPGASVKVSCKASGYSFPDYYINWVRQAPGQGLEWMGWIYFASGNSEYNQKFTGRVTMTRDTSSSTAYMELSSLRSEDTAVYFCASLYDYDWYFDVWGQGTMVTVSSGGGGSGGGGSGGGGSDIVMTQTPLSLSVTPGEPASISCKSSQSLVHSNGNTYLHWYLQKPGQSPQLLIYKVSNRFSGVPDRFSGSGSGADFTLKISRVEAEDVGVYYCAETSHVPWTFGQGTKLEIKRSDPASGAGSGSGSAVQAPSSSPMGIIVAVVTGIAVAAIVAAVVALIYCRKKRISALPGYPECREMGETLPEKPANPTNPDEADKVGAENTITYSLLMHPDALEEPDDQNRISHG

SEQ ID NO: 206371 - protein, 409 aa, Artificial Sequence
  Description of Artificial Sequence: Synthetic Chimeric Antigen Receptor
MALPVTALLLPLALLLHAARPGSGSGAQAAQVQLVQSGAEVKKPGASVKVSCKASGYSFPDYYINWVRQAPGQGLEWMGWIYFASGNSEYNQKFTGRVTMTRDTSSSTAYMELSSLRSEDTAVYFCASLYDYDWYFDVWGQGTMVTVSSGGGGSGGGGSGGGGSDIVMTQTPLSLSVTPGEPASISCKSSQSLVHSNGNTYLHWYLQKPGQSPQLLIYKVSNRFSGVPDRFSGSGSGADFTLKISRVEAEDVGVYYCAETSHVPWTFGQGTKLEIKRSDPASGAGSGSGSASFRALPHAWSDPSDPLPVSVTGNSRYLHALIGTSVVIIPFAILLFFLLHRWCANKKNAVVMDQEPAGNRTVNREDSDEQDPQEVTYAQLNHCVFTQRKITRPSQRPKTPPTDTSVSHG

SEQ ID NO: 206372 - protein, 414 aa, Artificial Sequence
  Description of Artificial Sequence: Synthetic Chimeric Antigen Receptor
MALPVTALLLPLALLLHAARPGSGSGAQAAQVQLVQSGAEVKKPGASVKVSCKASGYSFPDYYINWVRQAPGQGLEWMGWIYFASGNSEYNQKFTGRVTMTRDTSSSTAYMELSSLRSEDTAVYFCASLYDYDWYFDVWGQGTMVTVSSGGGGSGGGGSGGGGSDIVMTQTPLSLSVTPGEPASISCKSSQSLVHSNGNTYLHWYLQKPGQSPQLLIYKVSNRFSGVPDRFSGSGSGADFTLKISRVEAEDVGVYYCAETSHVPWTFGQGTKLEIKRSDPASGAGSGSGSALFVHWKPEGRAGGVLGAVWGASITTLVFLCVCFIFRVKTRRKKAAQPVQNTDDVNPVMVSGSRGHQHQFQTGIVSDHPAEAGPISEDEQELHYAVLHFHKVQPQEPKVTDTEYSEIKIHKSHG

SEQ ID NO: 206373 - protein, 415 aa, Artificial Sequence
  Description of Artificial Sequence: Synthetic Chimeric Antigen Receptor
MALPVTALLLPLALLLHAARPGSGSGAQAAQVQLVQSGAEVKKPGASVKVSCKASGYSFPDYYINWVRQAPGQGLEWMGWIYFASGNSEYNQKFTGRVTMTRDTSSSTAYMELSSLRSEDTAVYFCASLYDYDWYFDVWGQGTMVTVSSGGGGSGGGGSGGGGSDIVMTQTPLSLSVTPGEPASISCKSSQSLVHSNGNTYLHWYLQKPGQSPQLLIYKVSNRFSGVPDRFSGSGSGADFTLKISRVEAEDVGVYYCAETSHVPWTFGQGTKLEIKRSDPASGAGSGSGSAGPDGYRRDLMTAGVLWGLFGVLGFTGVALLLYALFHKISGESSATNEPRGASRPNPQEFTYSSPTPDMEELQPVYVNVGSVDVDVVYSQVWSMQQPESSANIRTLLENKDSQVIYSSVKKSSHG

SEQ ID NO: 206374 - protein, 417 aa, Artificial Sequence
  Description of Artificial Sequence: Synthetic Chimeric Antigen Receptor
MALPVTALLLPLALLLHAARPGSGSGAQAAQVQLVQSGAEVKKPGASVKVSCKASGYSFPDYYINWVRQAPGQGLEWMGWIYFASGNSEYNQKFTGRVTMTRDTSSSTAYMELSSLRSEDTAVYFCASLYDYDWYFDVWGQGTMVTVSSGGGGSGGGGSGGGGSDIVMTQTPLSLSVTPGEPASISCKSSQSLVHSNGNTYLHWYLQKPGQSPQLLIYKVSNRFSGVPDRFSGSGSGADFTLKISRVEAEDVGVYYCAETSHVPWTFGQGTKLEIKRSDPASGAGSGSGSAPGHIRLYVVEKENLPVFPVWVVVGIVTAVVLGLTLLISMILAVLYRRKNSKRDYTGCSTSESLSPVKQAPRKSPSDTEGLVKSLPSGSHQGPVIYAQLDHSGGHHSDKINKSESVVYADIRKNSHG

SEQ ID NO: 206375 - protein, 421 aa, Artificial Sequence
  Description of Artificial Sequence: Synthetic Chimeric Antigen Receptor
MALPVTALLLPLALLLHAARPGSGSGAQAAQVQLVQSGAEVKKPGASVKVSCKASGYSFPDYYINWVRQAPGQGLEWMGWIYFASGNSEYNQKFTGRVTMTRDTSSSTAYMELSSLRSEDTAVYFCASLYDYDWYFDVWGQGTMVTVSSGGGGSGGGGSGGGGSDIVMTQTPLSLSVTPGEPASISCKSSQSLVHSNGNTYLHWYLQKPGQSPQLLIYKVSNRFSGVPDRFSGSGSGADFTLKISRVEAEDVGVYYCAETSHVPWTFGQGTKLEIKRSDPASGAGSGSGSALQSKATSGVTQGVVGGAGATALVFLSFCVIFVVVRSCRKKSARPAAGVGDTGIEDANAVRGSASQGPLTEPWAEDSPPDQPPPASARSSVGEGELQYASLSFQMVKPWDSRGQEATDTEYSEIKIHRSHG

SEQ ID NO: 206376 - protein, 424 aa, Artificial Sequence
  Description of Artificial Sequence: Synthetic Chimeric Antigen Receptor
MALPVTALLLPLALLLHAARPGSGSGAQAAQVQLVQSGAEVKKPGASVKVSCKASGYSFPDYYINWVRQAPGQGLEWMGWIYFASGNSEYNQKFTGRVTMTRDTSSSTAYMELSSLRSEDTAVYFCASLYDYDWYFDVWGQGTMVTVSSGGGGSGGGGSGGGGSDIVMTQTPLSLSVTPGEPASISCKSSQSLVHSNGNTYLHWYLQKPGQSPQLLIYKVSNRFSGVPDRFSGSGSGADFTLKISRVEAEDVGVYYCAETSHVPWTFGQGTKLEIKRSDPASGAGSGSGSAMPSTGGDSCPFCLKLLLPGLLLLLVVIILILAFWVLPKYKTRKAMRNNVPRDRGDTAMEVGIYANILEKQAKEESVPEVGSRPCVSTAQDEAKHSQELQYATPVFQEVAPREQEACDSYKSGYVYSELNFSHG

SEQ ID NO: 206377 - protein, 425 aa, Artificial Sequence
  Description of Artificial Sequence: Synthetic Chimeric Antigen Receptor
MALPVTALLLPLALLLHAARPGSGSGAQAAQVQLVQSGAEVKKPGASVKVSCKASGYSFPDYYINWVRQAPGQGLEWMGWIYFASGNSEYNQKFTGRVTMTRDTSSSTAYMELSSLRSEDTAVYFCASLYDYDWYFDVWGQGTMVTVSSGGGGSGGGGSGGGGSDIVMTQTPLSLSVTPGEPASISCKSSQSLVHSNGNTYLHWYLQKPGQSPQLLIYKVSNRFSGVPDRFSGSGSGADFTLKISRVEAEDVGVYYCAETSHVPWTFGQGTKLEIKRSDPASGAGSGSGSALQQEYTGKMRPVSGVLLGAVGGAGATALVFLSFCVIFIVVRSCRKKSARPAADVGDIGMKDANTIRGSASQGNLTESWADDNPRHHGLAAHSSGEEREIQYAPLSFHKGEPQDLSGQEATNNEYSEIKIPKSHG

SEQ ID NO: 206378 - protein, 427 aa, Artificial Sequence
  Description of Artificial Sequence: Synthetic Chimeric Antigen Receptor
MALPVTALLLPLALLLHAARPGSGSGAQAAQVQLVQSGAEVKKPGASVKVSCKASGYSFPDYYINWVRQAPGQGLEWMGWIYFASGNSEYNQKFTGRVTMTRDTSSSTAYMELSSLRSEDTAVYFCASLYDYDWYFDVWGQGTMVTVSSGGGGSGGGGSGGGGSDIVMTQTPLSLSVTPGEPASISCKSSQSLVHSNGNTYLHWYLQKPGQSPQLLIYKVSNRFSGVPDRFSGSGSGADFTLKISRVEAEDVGVYYCAETSHVPWTFGQGTKLEIKRSDPASGAGSGSGSALQNEYTGKMRPISGVTLGAFGGAGATALVFLYFCIIFVVVRSCRKKSARPAVGVGDTGMEDANAVRGSASQGPLIESPADDSPPHHAPPALATPSPEEGEIQYASLSFHKARPQYPQEQEAIGYEYSEINIPKSHG

SEQ ID NO: 206379 - protein, 430 aa, Artificial Sequence
  Description of Artificial Sequence: Synthetic Chimeric Antigen Receptor
MALPVTALLLPLALLLHAARPGSGSGAQAAQVQLVQSGAEVKKPGASVKVSCKASGYSFPDYYINWVRQAPGQGLEWMGWIYFASGNSEYNQKFTGRVTMTRDTSSSTAYMELSSLRSEDTAVYFCASLYDYDWYFDVWGQGTMVTVSSGGGGSGGGGSGGGGSDIVMTQTPLSLSVTPGEPASISCKSSQSLVHSNGNTYLHWYLQKPGQSPQLLIYKVSNRFSGVPDRFSGSGSGADFTLKISRVEAEDVGVYYCAETSHVPWTFGQGTKLEIKRSDPASGAGSGSGSALNVTYVPQNPTTGIFPGDGSGKQETRAGVVHGAIGGAGVTALLALCLCLIFFIVKTHRRKAARTAVGRNDTHPTTGSASPKHQKKSKLHGPTETSSCSGAAPTVEMDEELHYASLNFHGMNPSKDTSTEYSEVRTQSHG

SEQ ID NO: 206380 - protein, 430 aa, Artificial Sequence
  Description of Artificial Sequence: Synthetic Chimeric Antigen Receptor
MALPVTALLLPLALLLHAARPGSGSGAQAAQVQLVQSGAEVKKPGASVKVSCKASGYSFPDYYINWVRQAPGQGLEWMGWIYFASGNSEYNQKFTGRVTMTRDTSSSTAYMELSSLRSEDTAVYFCASLYDYDWYFDVWGQGTMVTVSSGGGGSGGGGSGGGGSDIVMTQTPLSLSVTPGEPASISCKSSQSLVHSNGNTYLHWYLQKPGQSPQLLIYKVSNRFSGVPDRFSGSGSGADFTLKISRVEAEDVGVYYCAETSHVPWTFGQGTKLEIKRSDPASGAGSGSGSAPYEWSNSSDPLLVSVTGNPSNSWPSPTEPSSETGNPRHLHVLIGTSVVIILFILLLFFLLHRWCCNKKNAVVMDQEPAGNRTVNREDSDEQDPQEVTYAQLNHCVFTQRKITRPSQRPKTPPTDIIVYTELPNAEPSHG

SEQ ID NO: 206381 - protein, 431 aa, Artificial Sequence
  Description of Artificial Sequence: Synthetic Chimeric Antigen Receptor
MALPVTALLLPLALLLHAARPQVQLVQSGAEVKKPGASVKVSCKASGYSFPDYYINWVRQAPGQGLEWMGWIYFASGNSEYNQKFTGRVTMTRDTSSSTAYMELSSLRSEDTAVYFCASLYDYDWYFDVWGQGTMVTVSSGGGGSGGGGSGGGGSDIVMTQTPLSLSVTPGEPASISCKSSQSLVHSNGNTYLHWYLQKPGQSPQLLIYKVSNRFSGVPDRFSGSGSGADFTLKISRVEAEDVGVYYCAETSHVPWTFGQGTKLEIKYPLTFGAGTMLDLKRAAATERRAEVPTAHPSPSPRPAGQFQTLVVGVVGGLLGSLVLLVWVLAVICSRAARGTIGARRTGQPLKEDPSAVPVFSVDYGELDFQWREKTPEPPVPCVPEQTEYATIVFPSGMGTSSPARRGSADGPRSAQPLRPEDGHCSWPLSH

SEQ ID NO: 206382 - protein, 432 aa, Artificial Sequence
  Description of Artificial Sequence: Synthetic Chimeric Antigen Receptor
MALPVTALLLPLALLLHAARPGSGSGAQAAQVQLVQSGAEVKKPGASVKVSCKASGYSFPDYYINWVRQAPGQGLEWMGWIYFASGNSEYNQKFTGRVTMTRDTSSSTAYMELSSLRSEDTAVYFCASLYDYDWYFDVWGQGTMVTVSSGGGGSGGGGSGGGGSDIVMTQTPLSLSVTPGEPASISCKSSQSLVHSNGNTYLHWYLQKPGQSPQLLIYKVSNRFSGVPDRFSGSGSGADFTLKISRVEAEDVGVYYCAETSHVPWTFGQGTKLEIKRSDPASGAGSGSGSALNFTVPTGARSNHLTSGVIEGLLSTLGPATVALLFCYGLKRKIGRRSARDPLRSLPSPLPQEFTYLNSPTPGQLQPIYENVNVVSGDEVYSLAYYNQPEQESVAAETLGTHMEDKVSLDIYSRLRKANITDVDYEDAMSHG

SEQ ID NO: 206383 - protein, 435 aa, Artificial Sequence
  Description of Artificial Sequence: Synthetic Chimeric Antigen Receptor
MALPVTALLLPLALLLHAARPGSGSGAQAAQVQLVQSGAEVKKPGASVKVSCKASGYSFPDYYINWVRQAPGQGLEWMGWIYFASGNSEYNQKFTGRVTMTRDTSSSTAYMELSSLRSEDTAVYFCASLYDYDWYFDVWGQGTMVTVSSGGGGSGGGGSGGGGSDIVMTQTPLSLSVTPGEPASISCKSSQSLVHSNGNTYLHWYLQKPGQSPQLLIYKVSNRFSGVPDRFSGSGSGADFTLKISRVEAEDVGVYYCAETSHVPWTFGQGTKLEIKRSDPASGAGSGSGSAVTVRETPGNRDGLVAAGATGGLLSALLLAVALLFHCWRRRKSGVGFLGDETRLPPAPGPGESSHSICPAQVELQSLYVDVHPKKGDLVYSEIQTTQLGEEEEANTSRTLLEDKDVSVVYSEVKTQHPDNSAGKISSKDEESSHG

SEQ ID NO: 206384 - protein, 437 aa, Artificial Sequence
  Description of Artificial Sequence: Synthetic Chimeric Antigen Receptor
MALPVTALLLPLALLLHAARPGSGSGAQAAQVQLVQSGAEVKKPGASVKVSCKASGYSFPDYYINWVRQAPGQGLEWMGWIYFASGNSEYNQKFTGRVTMTRDTSSSTAYMELSSLRSEDTAVYFCASLYDYDWYFDVWGQGTMVTVSSGGGGSGGGGSGGGGSDIVMTQTPLSLSVTPGEPASISCKSSQSLVHSNGNTYLHWYLQKPGQSPQLLIYKVSNRFSGVPDRFSGSGSGADFTLKISRVEAEDVGVYYCAETSHVPWTFGQGTKLEIKRSDPASGAGSGSGSALYITGLTANRSGPFATGVAGGLLSIAGLAAGALLLYCWLSRKAGRKPASDPARSPPDSDSQEPTYHNVPAWEELQPVYTNANPRGENVVYSEVRIIQEKKKHAVASDPRHLRNKGSPIIYSEVKVASTPVSGSLFLASSAPHRSHG

SEQ ID NO: 206385 - protein, 437 aa, Artificial Sequence
  Description of Artificial Sequence: Synthetic Chimeric Antigen Receptor
MALPVTALLLPLALLLHAARPGSGSGAQAAQVQLVQSGAEVKKPGASVKVSCKASGYSFPDYYINWVRQAPGQGLEWMGWIYFASGNSEYNQKFTGRVTMTRDTSSSTAYMELSSLRSEDTAVYFCASLYDYDWYFDVWGQGTMVTVSSGGGGSGGGGSGGGGSDIVMTQTPLSLSVTPGEPASISCKSSQSLVHSNGNTYLHWYLQKPGQSPQLLIYKVSNRFSGVPDRFSGSGSGADFTLKISRVEAEDVGVYYCAETSHVPWTFGQGTKLEIKRSDPASGAGSGSGSAPYEWSKSSDPLLVSVTGNPSNSWPSPTEPSSKTGNPRHLHILIGTSVVIILFILLFFLLHRWCSNKKNAAVMDQESAGNRTANSEDSDEQDPQEVTYTQLNHCVFTQRKITRPSQRPKTPPTDIIVYTELPNAESRSKVVSCPSHG

SEQ ID NO: 206386 - protein, 437 aa, Artificial Sequence
  Description of Artificial Sequence: Synthetic Chimeric Antigen Receptor
MALPVTALLLPLALLLHAARPGSGSGAQAAQVQLVQSGAEVKKPGASVKVSCKASGYSFPDYYINWVRQAPGQGLEWMGWIYFASGNSEYNQKFTGRVTMTRDTSSSTAYMELSSLRSEDTAVYFCASLYDYDWYFDVWGQGTMVTVSSGGGGSGGGGSGGGGSDIVMTQTPLSLSVTPGEPASISCKSSQSLVHSNGNTYLHWYLQKPGQSPQLLIYKVSNRFSGVPDRFSGSGSGADFTLKISRVEAEDVGVYYCAETSHVPWTFGQGTKLEIKRSDPASGAGSGSGSAPYEWSNSSDPLLVSVIGNPSNSWPSPTEPSSKTGNPRHLHILIGTSVVIILFILLFFLLHRWCSNKKNAAVMDQESAGNRTANSEDSDEQDPQEVTYTQLNHCVFTQRKITRPSQRPKTPPTDIIVYAELPNAESRSKVVSCPSHG

SEQ ID NO: 206387 - protein, 437 aa, Artificial Sequence
  Description of Artificial Sequence: Synthetic Chimeric Antigen Receptor
MALPVTALLLPLALLLHAARPGSGSGAQAAQVQLVQSGAEVKKPGASVKVSCKASGYSFPDYYINWVRQAPGQGLEWMGWIYFASGNSEYNQKFTGRVTMTRDTSSSTAYMELSSLRSEDTAVYFCASLYDYDWYFDVWGQGTMVTVSSGGGGSGGGGSGGGGSDIVMTQTPLSLSVTPGEPASISCKSSQSLVHSNGNTYLHWYLQKPGQSPQLLIYKVSNRFSGVPDRFSGSGSGADFTLKISRVEAEDVGVYYCAETSHVPWTFGQGTKLEIKRSDPASGAGSGSGSAERRAEVPTAHPSPSPRPAGQFQTLVVGVVGGLLGSLVLLVWVLAVICSRAARGTIGARRTGQPLKEDPSAVPVFSVDYGELDFQWREKTPEPPVPCVPEQTEYATIVFPSGMGTSSPARRGSADGPRSAQPLRPEDGHCSWPLSHG

SEQ ID NO: 206388 - protein, 438 aa, Artificial Sequence
  Description of Artificial Sequence: Synthetic Chimeric Antigen Receptor
MALPVTALLLPLALLLHAARPGSGSGAQAAQVQLVQSGAEVKKPGASVKVSCKASGYSFPDYYINWVRQAPGQGLEWMGWIYFASGNSEYNQKFTGRVTMTRDTSSSTAYMELSSLRSEDTAVYFCASLYDYDWYFDVWGQGTMVTVSSGGGGSGGGGSGGGGSDIVMTQTPLSLSVTPGEPASISCKSSQSLVHSNGNTYLHWYLQKPGQSPQLLIYKVSNRFSGVPDRFSGSGSGADFTLKISRVEAEDVGVYYCAETSHVPWTFGQGTKLEIKRSDPASGAGSGSGSAPYEWSDPSDPLLVSVTGNPSSSWPSPTEPSSKSGNPRHLHILIGTSVVIILFILLLFFLLHLWCSNKKNAAVMDQEPAGNRTANSEDSDEQDPEEVTYAQLDHCVFTQRKITRPSQRPKTPPTDTILYTELPNAKPRSKVVSCPSHG

SEQ ID NO: 206389 - protein, 441 aa, Artificial Sequence
  Description of Artificial Sequence: Synthetic Chimeric Antigen Receptor
MALPVTALLLPLALLLHAARPGSGSGAQAAQVQLVQSGAEVKKPGASVKVSCKASGYSFPDYYINWVRQAPGQGLEWMGWIYFASGNSEYNQKFTGRVTMTRDTSSSTAYMELSSLRSEDTAVYFCASLYDYDWYFDVWGQGTMVTVSSGGGGSGGGGSGGGGSDIVMTQTPLSLSVTPGEPASISCKSSQSLVHSNGNTYLHWYLQKPGQSPQLLIYKVSNRFSGVPDRFSGSGSGADFTLKISRVEAEDVGVYYCAETSHVPWTFGQGTKLEIKRSDPASGAGSGSGSAVRVILAPWKKGLIAVVIIGVIIALLIIAAKCYFLRKAKAKQMPVEMSRPAVPLLNSNNEKMSDPNMEANSHYGHNDDVGNHAMKPINDNKEPLNSDVQYTEVQVSSAESHKDLGKKDTETVYSEVRKAVPDAVESRYSRTEGSLDGTSHG

SEQ ID NO: 206390 - protein, 447 aa, Artificial Sequence
  Description of Artificial Sequence: Synthetic Chimeric Antigen Receptor
MALPVTALLLPLALLLHAARPGSGSGAQAAQVQLVQSGAEVKKPGASVKVSCKASGYSFPDYYINWVRQAPGQGLEWMGWIYFASGNSEYNQKFTGRVTMTRDTSSSTAYMELSSLRSEDTAVYFCASLYDYDWYFDVWGQGTMVTVSSGGGGSGGGGSGGGGSDIVMTQTPLSLSVTPGEPASISCKSSQSLVHSNGNTYLHWYLQKPGQSPQLLIYKVSNRFSGVPDRFSGSGSGADFTLKISRVEAEDVGVYYCAETSHVPWTFGQGTKLEIKRSDPASGAGSGSGSAQAVTTTTQRPSSMTTTWRLSSTTTTTGLRVTQGKRRSDSWHISLETAVGVAVAVTVLGIMILGLICLLRWRRRKGQQRTKATTPAREPFQNTEEPYENIRNEGQNTDPKLNPKDDGIVYASLALSSSTSPKAPPSHRPLKSPQNETLYSVLKASHG

SEQ ID NO: 206391 - protein, 449 aa, Artificial Sequence
  Description of Artificial Sequence: Synthetic Chimeric Antigen Receptor
MALPVTALLLPLALLLHAARPGSGSGAQAAQVQLVQSGAEVKKPGASVKVSCKASGYSFPDYYINWVRQAPGQGLEWMGWIYFASGNSEYNQKFTGRVTMTRDTSSSTAYMELSSLRSEDTAVYFCASLYDYDWYFDVWGQGTMVTVSSGGGGSGGGGSGGGGSDIVMTQTPLSLSVTPGEPASISCKSSQSLVHSNGNTYLHWYLQKPGQSPQLLIYKVSNRFSGVPDRFSGSGSGADFTLKISRVEAEDVGVYYCAETSHVPWTFGQGTKLEIKRSDPASGAGSGSGSAPCVWSNSSDPLLVSVTGNPSSSWPSPTEPSSKSGICRHLHVLIGTSVVIFLFILLLFFLLYRWCSNKKNAAVMDQEPAGDRTVNRQDSDEQDPQEVTYAQLDHCVFIQRKISRPSQRPKTPLTDTSVYTELPNAEPRSKVVSCPRAPQSGLEGVFSHG

SEQ ID NO: 206392 - protein, 449 aa, Artificial Sequence
  Description of Artificial Sequence: Synthetic Chimeric Antigen Receptor
MALPVTALLLPLALLLHAARPGSGSGAQAAQVQLVQSGAEVKKPGASVKVSCKASGYSFPDYYINWVRQAPGQGLEWMGWIYFASGNSEYNQKFTGRVTMTRDTSSSTAYMELSSLRSEDTAVYFCASLYDYDWYFDVWGQGTMVTVSSGGGGSGGGGSGGGGSDIVMTQTPLSLSVTPGEPASISCKSSQSLVHSNGNTYLHWYLQKPGQSPQLLIYKVSNRFSGVPDRFSGSGSGADFTLKISRVEAEDVGVYYCAETSHVPWTFGQGTKLEIKRSDPASGAGSGSGSALQNEGTGTSRPVSQVTLAAVGGAGATALAFLSFCIIFIIVRSCRKKSARPAAGVGDTGMEDAKAIRGSASQGPLTESWKDGNPLKKPPPAVAPSSGEEGELHYATLSFHKVKPQDPQGQEATDSEYSEIKIHKRETAETQACLRNHNPSSKEVRGSHG

SEQ ID NO: 206393 - protein, 465 aa, Artificial Sequence
  Description of Artificial Sequence: Synthetic Chimeric Antigen Receptor
MALPVTALLLPLALLLHAARPGSGSGAQAAQVQLVQSGAEVKKPGASVKVSCKASGYSFPDYYINWVRQAPGQGLEWMGWIYFASGNSEYNQKFTGRVTMTRDTSSSTAYMELSSLRSEDTAVYFCASLYDYDWYFDVWGQGTMVTVSSGGGGSGGGGSGGGGSDIVMTQTPLSLSVTPGEPASISCKSSQSLVHSNGNTYLHWYLQKPGQSPQLLIYKVSNRFSGVPDRFSGSGSGADFTLKISRVEAEDVGVYYCAETSHVPWTFGQGTKLEIKRSDPASGAGSGSGSAGTSRNRTGLTAAGITGLVLSILVLAAAAALLHYARARRKPGGLSATGTSSHSPSECQEPSSSRPSRIDPQEPTHSKPLAPMELEPMYSNANPGDSNPIYSQIWSIQHTKENSANCPMMHQEHEELTVLYSELKKTHPDDSAGEASSRGRAHEEDDEENYENVPRVLLASDHSHG

SEQ ID NO: 206394 - protein, 466 aa, Artificial Sequence
  Description of Artificial Sequence: Synthetic Chimeric Antigen Receptor
MALPVTALLLPLALLLHAARPGSGSGAQAAQVQLVQSGAEVKKPGASVKVSCKASGYSFPDYYINWVRQAPGQGLEWMGWIYFASGNSEYNQKFTGRVTMTRDTSSSTAYMELSSLRSEDTAVYFCASLYDYDWYFDVWGQGTMVTVSSGGGGSGGGGSGGGGSDIVMTQTPLSLSVTPGEPASISCKSSQSLVHSNGNTYLHWYLQKPGQSPQLLIYKVSNRFSGVPDRFSGSGSGADFTLKISRVEAEDVGVYYCAETSHVPWTFGQGTKLEIKRSDPASGAGSGSGSAGPSGDPSLSPTGSTPTPGPEDQPLTPTGLDPQSGLGRHLGVVTGVSVAFVLLLFLLLFLLLRHRHQSKHRTSAHFYRPAGAAGPEPKDQGLQKRASPVADIQEEILNAAVKDTQPKDGVEMDARAAASEAPQDVTYAQLHSLTLRREATEPPPSQEREPPAEPSIYAPLAIHSHG

SEQ ID NO: 206395 - protein, 469 aa, Artificial Sequence
  Description of Artificial Sequence: Synthetic Chimeric Antigen Receptor
MALPVTALLLPLALLLHAARPGSGSGAQAAQVQLVQSGAEVKKPGASVKVSCKASGYSFPDYYINWVRQAPGQGLEWMGWIYFASGNSEYNQKFTGRVTMTRDTSSSTAYMELSSLRSEDTAVYFCASLYDYDWYFDVWGQGTMVTVSSGGGGSGGGGSGGGGSDIVMTQTPLSLSVTPGEPASISCKSSQSLVHSNGNTYLHWYLQKPGQSPQLLIYKVSNRFSGVPDRFSGSGSGADFTLKISRVEAEDVGVYYCAETSHVPWTFGQGTKLEIKRSDPASGAGSGSGSAPYEWSDASDPLPVSVTGNPSSSWPSPTEPSFKTGIARHLHAVIRYSVAIILFTILPFFLLHRWCSKKKDAAVMNQEPAGHRTVNREDSDEQDPQEVTYAQLDHCIFTQRKITGPSQRSKRPSTDTSVCIELPNAEPRALSPAHEHHSQALMGSSRETTALSQTQLASSHVPAAGISHG

SEQ ID NO: 206396 - protein, 469 aa, Artificial Sequence
  Description of Artificial Sequence: Synthetic Chimeric Antigen Receptor
MALPVTALLLPLALLLHAARPGSGSGAQAAQVQLVQSGAEVKKPGASVKVSCKASGYSFPDYYINWVRQAPGQGLEWMGWIYFASGNSEYNQKFTGRVTMTRDTSSSTAYMELSSLRSEDTAVYFCASLYDYDWYFDVWGQGTMVTVSSGGGGSGGGGSGGGGSDIVMTQTPLSLSVTPGEPASISCKSSQSLVHSNGNTYLHWYLQKPGQSPQLLIYKVSNRFSGVPDRFSGSGSGADFTLKISRVEAEDVGVYYCAETSHVPWTFGQGTKLEIKRSDPASGAGSGSGSAPYEWSDPSDPLLVSVTGNSSSSSSSPTEPSSKTGIRRHLHILIGTSVAIILFIILFFFLLHCCCSNKKNAAVMDQEPAGDRTVNREDSDDQDPQEVTYAQLDHCVFTQTKITSPSQRPKTPPTDTTMYMELPNAKPRSLSPAHKHHSQALRGSSRETTALSQNRVASSHVPAAGISHG

SEQ ID NO: 206397 - protein, 473 aa, Artificial Sequence
  Description of Artificial Sequence: Synthetic Chimeric Antigen Receptor
MALPVTALLLPLALLLHAARPGSGSGAQAAQVQLVQSGAEVKKPGASVKVSCKASGYSFPDYYINWVRQAPGQGLEWMGWIYFASGNSEYNQKFTGRVTMTRDTSSSTAYMELSSLRSEDTAVYFCASLYDYDWYFDVWGQGTMVTVSSGGGGSGGGGSGGGGSDIVMTQTPLSLSVTPGEPASISCKSSQSLVHSNGNTYLHWYLQKPGQSPQLLIYKVSNRFSGVPDRFSGSGSGADFTLKISRVEAEDVGVYYCAETSHVPWTFGQGTKLEIKRSDPASGAGSGSGSAGPSMGSSPPPTGPISTPAGPEDQPLTPTGSDPQSGLGRHLGVVIGILVAVVLLLLLLLLLFLILRHRRQGKHWTSTQRKADFQHPAGAVGPEPTDRGLQWRSSPAADAQEENLYAAVKDTQPEDGVEMDTRAAASEAPQDVTYAQLHSLTLRRKATEPPPSQEREPPAEPSIYATLAIHSHG

SEQ ID NO: 206398 - protein, 500 aa, Artificial Sequence
  Description of Artificial Sequence: Synthetic Chimeric Antigen Receptor
MALPVTALLLPLALLLHAARPGSGSGAQAAQVQLVQSGAEVKKPGASVKVSCKASGYSFPDYYINWVRQAPGQGLEWMGWIYFASGNSEYNQKFTGRVTMTRDTSSSTAYMELSSLRSEDTAVYFCASLYDYDWYFDVWGQGTMVTVSSGGGGSGGGGSGGGGSDIVMTQTPLSLSVTPGEPASISCKSSQSLVHSNGNTYLHWYLQKPGQSPQLLIYKVSNRFSGVPDRFSGSGSGADFTLKISRVEAEDVGVYYCAETSHVPWTFGQGTKLEIKRSDPASGAGSGSGSAKNESAASSTGKTPAAEETVTTILGMLASPYHYLIIIVVLVIILAVVVVGFSCRKKFISYLKGICSGGGGGPERVHRVLFRRRSCPSRVPGAEDNARNETLSNRYLQPTQVSEQEIQGQELAELTGVTVELPEEPQRLLEQAEAEGCQRRRLLVPVNDADSADISTLLDASATLEEGHAKETIQDQLVGSEKLFYEEDEAGSATSCLSHG

SEQ ID NO: 206399 - protein, 506 aa, Artificial Sequence
  Description of Artificial Sequence: Synthetic Chimeric Antigen Receptor
MALPVTALLLPLALLLHAARPGSGSGAQAAQVQLVQSGAEVKKPGASVKVSCKASGYSFPDYYINWVRQAPGQGLEWMGWIYFASGNSEYNQKFTGRVTMTRDTSSSTAYMELSSLRSEDTAVYFCASLYDYDWYFDVWGQGTMVTVSSGGGGSGGGGSGGGGSDIVMTQTPLSLSVTPGEPASISCKSSQSLVHSNGNTYLHWYLQKPGQSPQLLIYKVSNRFSGVPDRFSGSGSGADFTLKISRVEAEDVGVYYCAETSHVPWTFGQGTKLEIKRSDPASGAGSGSGSAGHSGGSSLPPTGPPSTPGLGRYLEVLIGVSVAFVLLLFLLLFLLLRRQRHSKHRTSDQRKTDFQRPAGAAETEPKDRGLLRRSSPAADVQEENLYAAVKDTQSEDRVELDSQSPHDEDPQAVTYAPVKHSSPRREMASPPSSLSGEFLDTKDRQVEEDRQMDTEAAASEASQDVTYAQLHSLTLRRKATEPPPSQEGEPPAEPSIYATLAIHSHG

SEQ ID NO: 206400 - protein, 515 aa, Artificial Sequence
  Description of Artificial Sequence: Synthetic Chimeric Antigen Receptor
MALPVTALLLPLALLLHAARPGSGSGAQAAQVQLVQSGAEVKKPGASVKVSCKASGYSFPDYYINWVRQAPGQGLEWMGWIYFASGNSEYNQKFTGRVTMTRDTSSSTAYMELSSLRSEDTAVYFCASLYDYDWYFDVWGQGTMVTVSSGGGGSGGGGSGGGGSDIVMTQTPLSLSVTPGEPASISCKSSQSLVHSNGNTYLHWYLQKPGQSPQLLIYKVSNRFSGVPDRFSGSGSGADFTLKISRVEAEDVGVYYCAETSHVPWTFGQGTKLEIKRSDPASGAGSGSGSAVYSLPQLLGPSCSWEAEGLHCRCSFRAWPAPSLCWRLEEKPLEGNSSQGSFKVNSSSPGPWANSSLILHGGLNSDLKVSCKAWNIYGSQSGSVLLLQGRSNLGTGVVPAALGGAGVMALLCICLCLIFFLIVKARRKQAAGRPEKMDDEDPIMGTITSGSRKKPWPDSPGDQASPPGDAPPLEEQKELHYASLSFSEMKSREPKDQEAPSTTEYSEIKTSKSHG

SEQ ID NO: 206401 - protein, 524 aa, Artificial Sequence
  Description of Artificial Sequence: Synthetic Chimeric Antigen Receptor
MALPVTALLLPLALLLHAARPGSGSGAQAAQVQLVQSGAEVKKPGASVKVSCKASGYSFPDYYINWVRQAPGQGLEWMGWIYFASGNSEYNQKFTGRVTMTRDTSSSTAYMELSSLRSEDTAVYFCASLYDYDWYFDVWGQGTMVTVSSGGGGSGGGGSGGGGSDIVMTQTPLSLSVTPGEPASISCKSSQSLVHSNGNTYLHWYLQKPGQSPQLLIYKVSNRFSGVPDRFSGSGSGADFTLKISRVEAEDVGVYYCAETSHVPWTFGQGTKLEIKRSDPASGAGSGSGSAGSLEGPRPSPTRSVSTAAGPEDQPLMPTGSVPHSGLRRHWEVLIGVLVVSILLLSLLLFLLLQHWRQGKHRTLAQRQADFQRPPGAAEPEPKDGGLQRRSSPAADVQGENFCAAVKNTQPEDGVEMDTRQSPHDEDPQAVTYAKVKHSRPRREMASPPSPLSGEFLDTKDRQAEEDRQMDTEAAASEAPQDVTYAQLHSFTLRQKATEPPPSQEGASPAEPSVYATLAIHSHG

SEQ ID NO: 206402 - protein, 533 aa, Artificial Sequence
  Description of Artificial Sequence: Synthetic Chimeric Antigen Receptor
MALPVTALLLPLALLLHAARPGSGSGAQAAQVQLVQSGAEVKKPGASVKVSCKASGYSFPDYYINWVRQAPGQGLEWMGWIYFASGNSEYNQKFTGRVTMTRDTSSSTAYMELSSLRSEDTAVYFCASLYDYDWYFDVWGQGTMVTVSSGGGGSGGGGSGGGGSDIVMTQTPLSLSVTPGEPASISCKSSQSLVHSNGNTYLHWYLQKPGQSPQLLIYKVSNRFSGVPDRFSGSGSGADFTLKISRVEAEDVGVYYCAETSHVPWTFGQGTKLEIKRSDPASGAGSGSGSAVHKESGNGHNIWVILVVTLVVPLLLVAVLIVCCCIGSGCGGDPKCMDRVCFWRLGLLRGPGAEDNAHNEILSNADSLSTFVSEQQMESQEPADLTGVTVQSPGEAQCLLGPAEAEGSQRRRLLVPANGADPTETLMLFFDKFANIVPFDSWDQLMRQLDLTKNEIDVVRAGTAGPGDALYAMLMKWVNKTGRNASIHTLLDALERMEERHAKEKIQDLLVDSGKFIYLEDGTGSAVSLESHG

SEQ ID NO: 206403 - protein, 540 aa, Artificial Sequence
  Description of Artificial Sequence: Synthetic Chimeric Antigen Receptor
MALPVTALLLPLALLLHAARPGSGSGAQAAQVQLVQSGAEVKKPGASVKVSCKASGYSFPDYYINWVRQAPGQGLEWMGWIYFASGNSEYNQKFTGRVTMTRDTSSSTAYMELSSLRSEDTAVYFCASLYDYDWYFDVWGQGTMVTVSSGGGGSGGGGSGGGGSDIVMTQTPLSLSVTPGEPASISCKSSQSLVHSNGNTYLHWYLQKPGQSPQLLIYKVSNRFSGVPDRFSGSGSGADFTLKISRVEAEDVGVYYCAETSHVPWTFGQGTKLEIKRSDPASGAGSGSGSAVHYPPQLLGPSCSWEAEGLHCSCSSQASPAPSLRWWLGEELLEGNSSQGSFEVTPSSAGPWANSSLSLHGGLSSGLRLRCKAWNVHGAQSGSVFQLLPGKLEHGGGLGLGAALGAGVAALLAFCSCLVVFRVKICRKEARKRAAAEQDVPSTLGPISQGHQHECSAGSSQDHPPPGAATYTPGKGEEQELHYASLSFQGLRLWEPADQEAPSTTEYSEIKIHTGQPLRGPGFGLQLEREMSGMVPKSHG

SEQ ID NO: 206404 - protein, 550 aa, Artificial Sequence
  Description of Artificial Sequence: Synthetic Chimeric Antigen Receptor
MALPVTALLLPLALLLHAARPGSGSGAQAAQVQLVQSGAEVKKPGASVKVSCKASGYSFPDYYINWVRQAPGQGLEWMGWIYFASGNSEYNQKFTGRVTMTRDTSSSTAYMELSSLRSEDTAVYFCASLYDYDWYFDVWGQGTMVTVSSGGGGSGGGGSGGGGSDIVMTQTPLSLSVTPGEPASISCKSSQSLVHSNGNTYLHWYLQKPGQSPQLLIYKVSNRFSGVPDRFSGSGSGADFTLKISRVEAEDVGVYYCAETSHVPWTFGQGTKLEIKRSDPASGAGSGSGSAVHYSPKLLGPSCSWEAEGLHCSCSSQASPAPSLRWWLGEELLEGNSSQDSFEVTPSSAGPWANSSLSLHGGLSSGLRLRCEAWNVHGAQSGSILQLPDKKGLISTAFSNGAFLGIGITALLFLCLALIIMKILPKRRTQTETPRPRFSRHSTILDYINVVPTAGPLAQKRNQKATPNSPRTPLPPGAPSPESKKNQKKQYQLPSFPEPKSSTQAPESQESQEELHYATLNFPGVRPRPEARMPKGTQADYAEVKFQSHG

SEQ ID NO: 206405 - protein, 556 aa, Artificial Sequence
  Description of Artificial Sequence: Synthetic Chimeric Antigen Receptor
MALPVTALLLPLALLLHAARPGSGSGAQAAQVQLVQSGAEVKKPGASVKVSCKASGYSFPDYYINWVRQAPGQGLEWMGWIYFASGNSEYNQKFTGRVTMTRDTSSSTAYMELSSLRSEDTAVYFCASLYDYDWYFDVWGQGTMVTVSSGGGGSGGGGSGGGGSDIVMTQTPLSLSVTPGEPASISCKSSQSLVHSNGNTYLHWYLQKPGQSPQLLIYKVSNRFSGVPDRFSGSGSGADFTLKISRVEAEDVGVYYCAETSHVPWTFGQGTKLEIKRSDPASGAGSGSGSAVHKESGTKHSGEAPAVEETVTSSPGTPASPCSLSGIIIGVTVAAVVLIVAVFVCKSLLWKKVLPYLKGICSGGGGDPERVDRSSQRPGAEDNVLNEIVSILQPTQVPEQEMEVQEPAEPTGVNMLSPGESEHLLEPAEAERSQRRRLLVPANEGDPTETLRQCFDDFADLVPFDSWEPLMRKLGLMDNEIKVAKAEAAGHRDTLYTMLIKWVNKTGRDASVHTLLDALETLGERLAKQKIEDHLLSSGKFMYLEGNADSAMSSHG

SEQ ID NO: 206406 - protein, 741 aa, Artificial Sequence
  Description of Artificial Sequence: Synthetic Chimeric Antigen Receptor
MSELIKENMHMKLYMEGTVDNHHFKCTSEGEGKPYEGTQTMRIKVVEGGPLPFAFDILATSFLYGSKTFINHTQGIPDFFKQSFPEGFTWERVTTYEDGGVLTATQDTSLQDGCLIYNVKIRGVNFTSNGPVMQKKTLGWEAFTETLYPADGGLEGRNDMALKLVGGSHLIANIKTTYRSKKPAKNLKMPGVYYVDYRLERIKEANNETYVEQHEVAVARYCDLPSKLGHKLNRAEGRGSLLTCGDVEENPGPMALPVTALLLPLALLLHAARPEVQLVESGGGLVQPGRSLRLSCAASGFTFNDYAMHWVRQAPGKGLEWVSTISWNSGSIGYADSVKGRFTISRDNAKKSLYLQMNSLRAEDTALYYCAKDIQYGNYYYGMDVWGQGTTVTVSSGGGGSGGGGSGGGGSEIVLTQSPATLSLSPGERATLSCRASQSVSSYLAWYQQKPGQAPRLLIYDASNRATGIPARFSGSGSGTDFTLTISSLEPEDFAVYYCQQRSNWPITFGQGTRLEIKTTTPAPRPPTPAPTIASQPLSLRPEACRPAAGGAVHTRGLDFACDIYIWAPLAGTCGVLLLSLVITLYCKRGRKKLLYIFKQPFMRPVQTTQEEDGCSCRFPEEEEGGCELRVKFSRSADAPAYQQGQNQLYNELNLGRREEYDVLDKRRGRDPEMGGKPRRKNPQEGLYNELQKDKMAEAYSEIGMKGERRRGKGHDGLYQGLSTATKDTYDALHMQALPPR

SEQ ID NO: 206407 - protein, 1352 aa, Artificial Sequence
  Description of Artificial Sequence: Synthetic Chimeric Antigen Receptor
MSLPVTALLLPLALLLHAARPDIQMTQTTSSLSASLGDRVTISCRASQDISKYLNWYQQKPDGTVKLLIYHTSRLHSGVPSRFSGSGSGTDYSLTISNLEQEDIATYFCQQGNTLPYTFGGGTKLEITKAGGGGSGGGGSGGGGSGGGGSEVKLQESGPGLVAPSQSLSVTCTVSGVSLPDYGVSWIRQPPRKGLEWLGVIWGSETTYYNSALKSRLTIIKDNSKSQVFLKIVINSLQTDDTAIYYCAKHYYYGGSYAMDYWGQGTSVTVSSDPTTTPAPRPPTPAPTIASQPLSLRPEACRPAAGGAVHTRGLDFACDIFWVLVVVGGVLACYSLLVTVAFIIFWVRRVKFSRSADAPAYQQGQNQLYNELNLGRREEYDVLDKRRGRDPEMGGKPRRKNPQEGLYNELQKDKMAEAYSEIGMKGERRRGKGHDGLYQGLSTATKDTYDALHMQALPPRRAEGRGSLLTCGDVEENPGPMAVPTQVLGLLLLWLTDARCDIQMTQSPSSLSASVGDRVTITCRASEDIYFNLVWYQQKPGKAPKLLIYDTNRLADGVPSRFSGSGSGTQYTLTISSLQPEDFATYYCQHYKNYPLTFGQGTKLEIKRSGGGGSGGGGSGGGGSGGGGSRSEVQLVESGGGLVQPGGSLRLSCAASGFTLSNYGMHWIRQAPGKGLEWVSSISLNGGSTYYRDSVKGRFTISRDNAKSTLYLQMNSLRAEDTAVYYCAAQDAYTGGYFDYWGQGTLVTVSSMDPAEPKSPDKTHTCPPCPAPPVAGPSVFLFPPKPKDTLMIARTPEVTCVVVDVSHEDPEVKFNWYVDGVEVHNAKTKPREEQYNSTYRVVSVLTVLHQDWLNGKEYKCKVSNKALPAPIEKTISKAKGQPREPQVYTLPPSRDELTKNQVSLTCLVKGFYPSDIAVEWESNGQPENNYKTTPPVLDSDGSFFLYSKLTVDKSRWQQGNVFSCSVMHEALHNHYTQKSLSLSPGKKDPKAVFGCIFGALVIVTVGGFIFWRKKRKDAKNNEVSFSQIKPKKSKLIRVENFEAYFKKQQADSNCGFAEEYEDLKLVGISQPKYAAELAENRGKNRYNNVLPYDISRVKLSVQTHSTDDYINANYMPGYHSKKDFIATQGPLPNTLKDFWRMVWEKNVYAIIMLTKCVEQGRTKCEEYWPSKQAQDYGDITVAMTSEIVLPEWTIRDFTVKNIQTSESHPLRQFHFTSWPDHGVPDTTDLLINFRYLVRDYMKQSPPESPILVHCSAGVGRTGTFIAIDRLIYQIENENTVDVYGIVYDLRMHRPLMVQTEDQYVFLNQCVLDIVRSQKDSKVDLIYQNTTAMTIYENLAPVTTFGKTNGYIA

SEQ ID NO: 206408 - protein, 1341 aa, Artificial Sequence
  Description of Artificial Sequence: Synthetic Chimeric Antigen Receptor
MSLPVTALLLPLALLLHAARPDIQMTQTTSSLSASLGDRVTISCRASQDISKYLNWYQQKPDGTVKLLIYHTSRLHSGVPSRFSGSGSGTDYSLTISNLEQEDIATYFCQQGNTLPYTEGGGTKLEITKAGGGGSGGGGSGGGGSGGGGSEVKLQESGPGLVAPSQSLSVTCTVSGVSLPDYGVSWIRQPPRKGLEWLGVIWGSETTYYNSALKSRLTIIKDNSKSQVFLKMNSLQTDDTAIYYCAKHYYYGGSYAMDYWGQGTSVTVSSDPTTTPAPRPPTPAPTIASQPLSLRPEACRPAAGGAVHTRGLDFACDIFWVLVVVGGVLACYSLLVTVAFIIEWVRRVKFSRSADAPAYQQGQNQLYNELNLGRREEYDVLDKRRGRDPEMGGKPRRKNPQEGLYNELQKDKMAEAYSEIGMKGERRRGKGHDGLYQGLSTATKDTYDALHMQALPPRRAEGRGSLLTCGDVEENPGPMETDTLLLWVLLLWVPGSTGQVTLKESGPGILKPSQTLSLTCSFSGESLSTSGMGVGWIRQPSGKGLEWLAHIWWDDDVYYNPSLKNQLTISKDASRDQVFLKITNLDTADTATYYCVRRRATGTGEDYWGQGTTLTVSSGGGGSGGGGSGGGGSNIVMTQSHKFMSTSVGDRVSIACKASQDVGTAVAWYQQKPGQSPKLLIYWTSTRHTGVPDRFTGSGSGTDFTLTITNVQSEDLADYFCHQYNSYNTFGSGTRLELKRSDPAEPKSPDKTHTCPPCPAPPVAGPSVFLEPPKPKDTLMIARTPEVTCVVVDVSHEDPEVKFNWYVDGVEVHNAKTKPREEQYNSTYRVVSVLTVLHQDWLNGKEYKCKVSNKALPAPIEKTISKAKGQPREPQVYTLPPSRDELTKNQVSLTCLVKGFYPSDIAVEWESNGQPENNYKTTPPVLDSDGSFFLYSKLTVDKSRWQQGNVESCSVMHEALHNHYTQKSLSLSPGKKDPKAVFGCIFGALVIVTVGGFIFWRKKRKDAKNNEVSFSQIKPKKSKLIRVENFEAYFKKQQADSNCGFAEEYEDLKLVGISQPKYAAELAENRGKNRYNNVLPYDISRVKLSVQTHSTDDYINANYMPGYHSKKDFIATQGPLPNTLKDFWRMVWEKNVYAIIMLTKCVEQGRTKCEEYWPSKQAQDYGDITVAMTSEIVLPEWTIRDFTVKNIQTSESHPLRQFHFTSWPDHGVPDTTDLLINFRYLVRDYMKQSPPESPILVHCSAGVGRTGTFIAIDRLIYQIENENTVDVYGIVYDLRMHRPLMVQTEDQYVFLNQCVLDIVRSQKDSKVDLIYQNTTAMTIYENLAPVTTFGKTNGYIA

SEQ ID NO: 206409 - protein, 1342 aa, Artificial Sequence [sequence omitted]

SEQ ID NO: 206410 - protein, 1341 aa, Artificial Sequence
  Description of Artificial Sequence: Synthetic Chimeric Antigen Receptor
MSLPVTALLLPLALLLHAARPDIQMTQTTSSLSASLGDRVTISCRASQDISKYLNWYQQKPDGTVKLLIYHTSRLHSGVPSRFSGSGSGTDYSLTISNLEQEDIATYFCQQGNTLPYTEGGGTKLEITKAGGGGSGGGGSGGGGSGGGGSEVKLQESGPGLVAPSQSLSVTCTVSGVSLPDYGVSWIRQPPRKGLEWLGVIWGSETTYYNSALKSRLTIIKDNSKSQVFLKMNSLQTDDTAIYYCAKHYYYGGSYAMDYWGQGTSVTVSSDPTTTPAPRPPTPAPTIASQPLSLRPEACRPAAGGAVHTRGLDFACDIFWVLVVVGGVLACYSLLVTVAFIIFWVRRVKFSRSADAPAYQQGQNQLYNELNLGRREEYDVLDKRRGRDPEMGGKPRRKNPQEGLYNELQKDKMAEAYSEIGMKGERRRGKGHDGLYQGLSTATKDTYDALHMQALPPRRAEGRGSLLTCGDVEENPGPMETDTLLLWVLLLWVPGSTGQVQLQESGPGLVKPSQTLSITCTVSGFSLASYNIHWVRQPPGKGLEWLGVIWAGGSTNYNSALMSRLTISKDNSKNQVFLKMSSLTAADTAVYYCAKRSDDYSWFAYWGQGTLVTVSSGGGGSGGGGSGGGGSENQMTQSPSSLSASVGDRVTMTCRASSSVSSSYLHWYQQKSGKAPKVWIYSTSNLASGVPSRFSGSGSGTDYTLTISSLQPEDFATYYCQQYSGYPITEGQGTKVEIKRSDPAEPKSPDKTHTCPPCPAPPVAGPSVFLFPPKPKDTLMIARTPEVTCVVVDVSHEDPEVKFNWYVDGVEVHNAKTKPREEQYNSTYRVVSVLTVLHQDWLNGKEYKCKVSNKALPAPIEKTISKAKGQPREPQVYTLPPSRDELTKNQVSLTCLVKGFYPSDIAVEWESNGQPENNYKTTPPVLDSDGSFFLYSKLTVDKSRWQQGNVFSCSVMHEALHNHYTQKSLSLSPGKKDPKAVFGCIFGALVIVTVGGFIFWRKKRKDAKNNEVSFSQIKPKKSKLIRVENFEAYFKKQQADSNCGFAEEYEDLKLVGISQPKYAAELAENRGKNRYNNVLPYDISRVKLSVQTHSTDDYINANYMPGYHSKKDFIATQGPLPNTLKDFWRMVWEKNVYAIIMLTKCVEQGRTKCEEYWPSKQAQDYGDITVAMTSEIVLPEWTIRDFTVKNIQTSESHPLRQFHFTSWPDHGVPDTTDLLINFRYLVRDYMKQSPPESPILVHCSAGVGRTGTFIAIDRLIYQIENENTVDVYGIVYDLRMHRPLMVQTEDQYVFLNQCVLDIVRSQKDSKVDLIYQNTTAMTIYENLAPVTTEGKTNGYIA

SEQ ID NO: 206411 - protein, 1341 aa, Artificial Sequence [sequence omitted]

SEQ ID NO: 206412 - protein, 1113 aa, Artificial Sequence
  Description of Artificial Sequence: Synthetic Chimeric Antigen Receptor
MSLPVTALLLPLALLLHAARPDIQMTQTTSSLSASLGDRVTISCRASQDISKYLNWYQQKPDGTVKLLIYHTSRLHSGVPSRFSGSGSGTDYSLTISNLEQEDIATYFCQQGNTLPYTFGGGTKLEITKAGGGGSGGGGSGGGGSGGGGSEVKLQESGPGLVAPSQSLSVTCTVSGVSLPDYGVSWIRQPPRKGLEWLGVIWGSETTYYNSALKSRLTIIKDNSKSQVFLKMNSLQTDDTAIYYCAKHYYYGGSYAMDYWGQGTSVTVSSDPTTTPAPRPPTPAPTIASQPLSLRPEACRPAAGGAVHTRGLDFACDIFWVLVVVGGVLACYLLVTVAFIIFWVRRVKFSRSADAPAYQQGQNQLYNELNLGRREEYDVLDKRRGRDPEMGGKPRRKNPQEGLYNELQKDKMAEAYSEIGMKGERRRGKGHDGLYQGLSTATKDTYDALHMQALPPRRAEGRGSLLTCGDVEENPGPMAVPTQVLGLLLLWLTDARCDIQMTQSPSSLSASVGDRVTITCRASEDIYFNLVWYQQKPGKAPKLLIYDTNRLADGVPSRFSGSGSGTQYTLTISSLQPEDFATYYCQHYKNYPLTFGQGTKLEIKRSGGGGSGGGGSGGGGSGGGGSRSEVQLVESGGGLVQPGGSLRLSCAASGFTLSNYGMHWIRQAPGKGLEWVSSISLNGGSTYYRDSVKGRFTISRDNAKSTLYLQMNSLRAEDTAVYYCAAQDAYTGGYFDYWGQGTLVTVSSMDPATTTKPVLRTPSPVHPTGTSQPQRPEDCRPRGSVKGTGLDFACDIYWAPLAGICVALLLSLIITLICYHRSRKRVCKSGGGSFWEEFESLQKQEVKNLHQRLEGQRPENKGKNRYKNILPFDHSRVILQGRDSNIPGSDYINANYIKNQLLGPDENAKTYIASQGCLEATVNDFWQMAWQENSRVIVMTTREVEKGRNKCVPYWPEVGMQRAYGPYSVTNCGEHDTTEYKLRTLQVSPLDNGDLIREIWHYQYLSWPDHGVPSEPGGVLSFLDQINQRQESLPHAGPIIVHCSAGIGRIGTIIVIDMLMENISTKGLDCDIDIQKTIQMVRAQRSGMVQTEAQYKFIYVAIAQFIETTKKKL

SEQ ID NO: 206413 - protein, 918 aa, Artificial Sequence
  Description of Artificial Sequence: Synthetic Chimeric Antigen Receptor
MSLPVTALLLPLALLLHAARPDIQMTQTTSSLSASLGDRVTISCRASQDISKYLNWYQQKPDGTVKLLIYHTSRLHSGVPSRFSGSGSGTDYSLTISNLEQEDIATYFCQQGNTLPYTFGGGTKLEITKAGGGGSGGGGSGGGGSGGGGSEVKLQESGPGLVAPSQSLSVTCTVSGVSLPDYGVSWIRQPPRKGLEWLGVIWGSETTYYNSALKSRLTIIKDNSKSQVFLKMNSLQTDDTAIYYCAKHYYYGGSYAMDYWGQGTSVTVSSDPITTPAPRPPTPAPTIASQPLSLRPEACRPAAGGAVHTRGLDFACDIFWVLVVVGGVLACYSLLVTVAFIIFWVRRVKFSRSADAPAYQQGQNQLYNELNLGRREEYDVLDKRRGRDPEMGGKPRRKNPQEGLYNELQKDKMAEAYSEIGMKGERRRGKGHDGLYQGLSTATKDTYDALHMQALPPRRAEGRGSLLTCGDVEENPGPMAVPTQVLGLLLLWLTDARCDIQMTQSPSSLSASVGDRVTITCRASEDIYFNLVWYQQKPGKAPKLLIYDTNRLADGVPSRFSGSGSGTQYTLTISSLQPEDFATYYCQHYKNYPLTFGQGTKLEIKRSGGGGSGGGGSGGGGSGGGGSRSEVQLVESGGGLVQPGGSLRLSCAASGFTLSNYGMHWIRQAPGKGLEWVSSISLNGGSTYYRDSVKGRFTISRDNAKSTLYLQMNSLRAEDTAVYYCAAQDAYTGGYFDYWGQGTLVTVSSMDPATTTKPVLRTPSPVHPTGTSQPQRPEDCRPRGSVKGTGLDFACDILIGVSVVFLFCLLLLVLFCLHRQNQIKQGPPRSKDEEQKPQQRPDLAVDVLERTADKATVNGLPEKDRETDTSALAAGSSQEVTYAQLDHWALTQRTARAVSPQSTKPMAESITYAAVARH

SEQ ID NO: 206414 - protein, 1114 aa, Artificial Sequence
  Description of Artificial Sequence: Synthetic Chimeric Antigen Receptor
MSLPVTALLLPLALLLHAARPDIQMTQTTSSLSASLGDRVTISCRASQDISKYLNWYQQKPDGTVKLLIYHTSRLHSGVPSRFSGSGSGTDYSLTISNLEQEDIATYFCQQGNTLPYTFGGGTKLEITKAGGGGSGGGGSGGGGSGGGGSEVKLQESGPGLVAPSQSLSVTCTVSGVSLPDYGVSWIRQPPRKGLEWLGVIWGSETTYYNSALKSRLTIIKDNSKSQVFLKMNSLQTDDTAIYYCAKHYYYGGSYAMDYWGQGTSVTVSSDPTTTPAPRPPTPAPTIASQPLSLRPEACRPAAGGAVHTRGLDFACDIFWVLVVVGGVLACYSLLVTVAFIIFWVRRVKFSRSADAPAYQQGQNQLYNELNLGRREEYDVLDKRRGRDPEMGGKPRRKNPQEGLYNELQKDKMAEAYSEIGMKGERRRGKGHDGLYQGLSTATKDTYDALHMQALPPRRAEGRGSLLTCGDVEENPGPMAVPTQVLGLLLLWLTDARCDIQMTQSPSSLSASVGDRVTITCRASEDIYFNLVWYQQKPGKAPKLLIYDTNRLADGVPSRFSGSGSGTQYTLTISSLQPEDFATYYCQHYKNYPLTFGQGTKLEIKRSGGGGSGGGGSGGGGSGGGGSRSEVQLVESGGGLVQPGGSLRLSCAASGFTLSNYGMHWIRQAPGKGLEWVSSISLNGGSTYYRDSVKGRFTISRDNAKSTLYLQMNSLRAEDTAVYYCAAQDAYTGGYFDYWGQGTLVTVSSMDPATTTKPVLRTPSPVHPTGTSQPQRPEDCRPRGSVKGTGLDFACDIYWAPLAGICVALLLSLIITLICYHRSRKRVCKSGGGSFWEEFESLQKQEVKNLHQRLEGQRPENKGKNRYKNILPFDHSRVILQGRDSNIPGSDYINANYIKNQLLGPDENAKTYIASQGCLEATVNDFWQMAWQENSRVIVMTTREVEKGRNKCVPYWPEVGMQRAYGPYSVTNCGEHDTTEYKLRTLQVSPLDNGDLIREIWHYQYLSWPDHGVPSEPGGVLSFLDQINQRQESLPHAGPIIVHCSAGIGRTGTIIVIDMLMENISTKGLDCDIDIQKTIQMVRAQRSGMVQTEAQYKFIYVAIAQFIETTKKKL

SEQ ID NO: 206415 - protein, 918 aa, Artificial Sequence
  Description of Artificial Sequence: Synthetic Chimeric Antigen Receptor
MSLPVTALLLPLALLLHAARPDIQMTQTTSSLSASLGDRVTISCRASQDISKYLNWYQQKPDGTVKLLIYHTSRLHSGVPSRFSGSGSGTDYSLTISNLEQEDIATYFCQQGNTLPYTFGGGTKLEITKAGGGGSGGGGSGGGGSGGGGSEVKLQESGPGLVAPSQSLSVTCTVSGVSLPDYGVSWIRQPPRKGLEWLGVIWGSETTYYNSALKSRLTIIKDNSKSQVFLKMNSLQTDDTAIYYCAKHYYYGGSYAMDYWGQGTSVTVSSDPTTTPAPRPPTPAPTIASQPLSLRPEACRPAAGGAVHTRGLDFACDIFWVLVVVGGVLACYSLLVTVAFIIFWVRRVKFSRSADAPAYQQGQNQLYNELNLGRREEYDVLDKRRGRDPEMGGKPRRKNPQEGLYNELQKDKMAEAYSEIGMKGERRRGKGHDGLYQGLSTATKDTYDALHMQALPPRRAEGRGSLLTCGDVEENPGPMAVPTQVLGLLLLWLTDARCDIQMTQSPSSLSASVGDRVTITCRASEDIYFNLVWYQQKPGKAPKLLIYDTNRLADGVPSRFSGSGSGTQYTLTISSLQPEDFATYYCQHYKNYPLTFGQGTKLEIKRSGGGGSGGGGSGGGGSGGGGSRSEVQLVESGGGLVQPGGSLRLSCAASGFTLSNYGMHWIRQAPGKGLEWVSSISLNGGSTYYRDSVKGRFTISRDNAKSTLYLQMNSLRAEDTAVYYCAAQDAYTGGYFDYWGQGTLVTVSSMDPATTTKPVLRTPSPVHPTGTSQPQRPEDCRPRGSVKGTGLDFACDILIGVSVVFLFCLLLLVLFCLHRQNQIKQGPPRSKDEEQKPQQRPDLAVDVLERTADKATVNGLPEKDRETDTSALAAGSSQEVTYAQLDHWALTQRTARAVSPQSTKPMAESITYAAVARH

SEQ ID NO: 206416 - protein, 1362 aa, Artificial Sequence
  Description of Artificial Sequence: Synthetic Chimeric Antigen Receptor
MSLPVTALLLPLALLLHAARPDIQMTQTTSSLSASLGDRVTISCRASQDISKYLNWYQQKPDGTVKLLIYHTSRLHSGVPSRFSGSGSGTDYSLTISNLEQEDIATYFCQQGNTLPYTFGGGTKLEITKAGGGGSGGGGSGGGGSGGGGSEVKLQESGPGLVAPSQSLSVTCTVSGVSLPDYGVSWIRQPPRKGLEWLGVIWGSETTYYNSALKSRLTIIKDNSKSQVFLKMNSLQTDDTAIYYCAKHYYYGGSYAMDYWGQGTSVTVSSDPTTTPAPRPPTPAPTIASQPLSLRPEACRPAAGGAVHTRGLDFACDIFWVLVVVGGVLACYSLLVTVAFIIFWVRRVKFSRSADAPAYQQGQNQLYNELNLGRREEYDVLDKRRGRDPEMGGKPRRKNPQEGLYNELQKDKMAEAYSEIGMKGERRRGKGHDGLYQGLSTATKDTYDALHMQALPPRRAEGRGSLLTCGDVEENPGPMAVPTQVLGLLLLWLTDARCDIQMTQSPSSLSASVGDRVTITCRASEDIYFNLVWYQQKPGKAPKLLIYDTNRLADGVPSRFSGSGSGTQYTLTISSLQPEDFATYYCQHYKNYPLTFGQGTKLEIKRSGGGGSGGGGSGGGGSGGGGSRSEVQLVESGGGLVQPGGSLRLSCAASGFTLSNYGMHWIRQAPGKGLEWVSSISLNGGSTYYRDSVKGRFTISRDNAKSTLYLQMNSLRAEDTAVYYCAAQDAYTGGYFDYWGQGTLVTVSSMDPTTTKPVLRTPSPVHPTGTSQPQRPEDCRPRGSVKGTGLDFACDILIGVSVVFLFCLLLLVLFCLHRQNQIKQGPPRSKDEEQKPQQRPDLAVDVLERTADKATVNGLPEKDRETDTSALAAGSSQEVTYAQLDHWALTQRTARAVSPQSTKPMAESITYAAVARHRAEGRGSLLTCGDVEENPGPWYHGHMSGGQAETLLQAKGEPWTFLVRESLSQPGDFVLSVLSDQPKAGPGSPLRVTHIKVMCEGGRYTVGGLETFDSLTDLVEHFKKTGIEEASGAFVYLRQPYSGGGGSFEAYFKKQQADSNCGFAEEYEDLKLVGISQPKYAAELAENRGKNRYNNVLPYDISRVKLSVQTHSTDDYINANYMPGYHSKKDFIATQGPLPNTLKDFWRMVWEKNVYAIIMLTKCVEQGRTKCEEYWPSKQAQDYGDITVAMTSEIVLPEWTIRDFTVKNIQTSESHPLRQFHFTSWPDHGVPDTTDLLINFRYLVRDYMKQSPPESPILVHCSAGVGRTGTFIAIDRLIYQIENENTVDVYGIVYDLRMHRPLMVQTEDQYVFLNQCVLDIVRSQKDSKVDLIYQNTTAMTIYENLAPVTTFGKTNGYIASGS

SEQ ID NO: 206417 - protein, 1129 aa, Artificial Sequence [sequence omitted]

SEQ ID NO: 206418 - protein, 487 aa, Artificial Sequence
  Description of Artificial Sequence: Synthetic Chimeric Antigen Receptor
MGTSLLCWMALCLLGADHADAQVQLQQSGPELVKPGASVKISCKASGYAFSSSWMNWVKQRPGKGLEWIGRIYPGDEDTNYSGKFKDKATLTADKSSTTAYMQLSSLTSEDSAVYFCARSLLYGDYLDYWGQGTTLTVSSGGGGSGGGGSGGGGSQIVLTQSPAIMSASPGEKVTMTCSASSSVSYMHWYQQKSGTSPKRWIYDTSKLASGVPDRFSGSGSGTSYFLTINNMEAEDAATYYCQQWNINPLTFGAGTKLELKRSDPTTTPAPRPPTPAPTIASQPLSLRPEACRPAAGGAVHTRGLDFACDIYIWAPLAGTCGVLLLSLVITLYCRSKRSRLLHSDYMNMTPRRPGPTRKHYQPYAPPRDFAAYRSRVKFSRSADAPAYQQGQNQLYNELNLGRREEYDVLDKRRGRDPEMGGKPRRKNPQEGLYNELQKDKMAEAYSEIGMKGERRRGKGHDGLYQGLSTATKDTYDALHMQALPPR

SEQ ID NO: 206419 - protein, 483 aa, Artificial Sequence
  Description of Artificial Sequence: Synthetic Chimeric Antigen Receptor
MGTSLLCWMALCLLGADHADAQVQLQQSGPELVKPGASVKISCKASGYAFSSSWMNWVKQRPGKGLEWIGRIYPGDEDTNYSGKFKDKATLTADKSSTTAYMQLSSLTSEDSAVYFCARSLLYGDYLDYWGQGTTLTVSSGGGGSGGGGSGGGGSQIVLTQSPAIMSASPGEKVTMTCSASSSVSYMHWYQQKSGTSPKRWIYDTSKLASGVPDRFSGSGSGTSYFLTINNMEAEDAATYYCQQWNINPLTFGAGTKLELKRSDPTTTPAPRPPTPAPTIASQPLSLRPEACRPAAGGAVHTRGLDFACDIYIWAPLAGTCGVLLLSLVITLYCRRDQRLPPDAHKPPGGGSFRTPIQEEQADAHSTLAKIRVKFSRSADAPAYQQGQNQLYNELNLGRREEYDVLDKRRGRDPEMGGKPRRKNPQEGLYNELQKDKMAEAYSEIGMKGERRRGKGHDGLYQGLSTATKDTYDALHMQALPPR

SEQ ID NO: 206420 - protein, 488 aa, Artificial Sequence
  Description of Artificial Sequence: Synthetic Chimeric Antigen Receptor
MGTSLLCWMALCLLGADHADAQVQLQQSGPELVKPGASVKISCKASGYAFSSSWMNWVKQRPGKGLEWIGRIYPGDEDTNYSGKFKDKATLTADKSSTTAYMQLSSLTSEDSAVYFCARSLLYGDYLDYWGQGTTLTVSSGGGGSGGGGSGGGGSQIVLTQSPAIMSASPGEKVTMTCSASSSVSYMHWYQQKSGTSPKRWIYDTSKLASGVPDRFSGSGSGTSYFLTINNMEAEDAATYYCQQWNINPLTFGAGTKLELKRSDPTTTPAPRPPTPAPTIASQPLSLRPEACRPAAGGAVHTRGLDFACDIYIWAPLAGTCGVLLLSLVITLYCKRGRKKLLYIFKQPFMRPVQTTQEEDGCSCRFPEEEEGGCELRVKFSRSADAPAYQQGQNQLYNELNLGRREEYDVLDKRRGRDPEMGGKPRRKNPQEGLYNELQKDKMAEAYSEIGMKGERRRGKGHDGLYQGLSTATKDTYDALHMQALPPR

SEQ ID NO: 206421 - protein, 527 aa, Artificial Sequence
  Description of Artificial Sequence: Synthetic Chimeric Antigen Receptor
MGTSLLCWMALCLLGADHADAQVQLQQSGPELVKPGASVKISCKASGYAFSSSWMNWVKQRPGKGLEWIGRIYPGDEDTNYSGKFKDKATLTADKSSTTAYMQLSSLTSEDSAVYFCARSLLYGDYLDYWGQGTTLTVSSGGGGSGGGGSGGGGSQIVLTQSPAIMSASPGEKVTMTCSASSSVSYMHWYQQKSGTSPKRWIYDTSKLASGVPDRFSGSGSGTSYFLTINNMEAEDAATYYCQQWNINPLTFGAGTKLELKRSDPTTTPAPRPPTPAPTIASQPLSLRPEACRPAAGGAVHTRGLDFACDIFWVLVVVGGVLACYSLLVTVAFIIFWVRSKRSRLLHSDYMNMTPRRPGPTRKHYQPYAPPRDFAAYRSRDQRLPPDAHKPPGGGSFRTPIQEEQADAHSTLAKIRVKFSRSADAPAYQQGQNQLYNELNLGRREEYDVLDKRRGRDPEMGGKPRRKNPQEGLYNELQKDKMAEAYSEIGMKGERRRGKGHDGLYQGLSTATKDTYDALHMQALPPR

SEQ ID NO: 206422 - protein, 431 aa, Artificial Sequence
  Description of Artificial Sequence: Synthetic Chimeric Antigen Receptor
QVQLQQPGAELVRPGASVKLSCKASGYTFTSYWMNWVKQRPDQGLEWIGRIDPYDSETHYNQKFKDKAILTVDKSSSTAYMQLSSLTSEDSAVYYCARGNWDDYWGQGTTLTVSSGGGGSGGGGSGGGGSDVQITQSPSYLAASPGETITINCRASKSISKDLAWYQEKPGKTNKLLIYSGSTLQSGIPSRFSGSGSGTDFTLTISSLEPEDFAMYYCQQHNKYPYTFGGGTKLEIKGLAVSTISSFFPPGYQIYIWAPLAGTCGVLLLSLVITLYCKRGRKKLLYIFKQPFMRPVQTTQEEDGCSCRFPEEEEGGCELRVKFSRSADAPAYQQGQNQLYNELNLGRREEYDVLDKRRGRDPEMGGKPRRKNPQEGLYNELQKDKMAEAYSEIGMKGERRRGKGHDGLYQGLSTATKDTYDALHMQALPPR

SEQ ID NO: 206423 - protein, 434 aa, Artificial Sequence
  Description of Artificial Sequence: Synthetic Chimeric Antigen Receptor
QVQLQQPGAELVRPGASVKLSCKASGYTFTSYWMNWVKQRPDQGLEWIGRIDPYDSETHYNQKFKDKAILTVDKSSSTAYMQLSSLTSEDSAVYYCARGNWDDYWGQGTTLTVSSGGGGSGGGGSGGGGSDVQITQSPSYLAASPGETITINCRASKSISKDLAWYQEKPGKTNKLLIYSGSTLQSGIPSRFSGSGSGTDFTLTISSLEPEDFAMYYCQQHNKYPYTFGGGTKLEIKGLAVSTISSFFPPGYQIISFFLALTSTALLFLLFFLTLRFSVVKRGRKKLLYIFKQPFMRPVQTTQEEDGCSCRFPEEEEGGCELRVKFSRSADAPAYQQGQNQLYNELNLGRREEYDVLDKRRGRDPEMGGKPRRKNPQEGLYNELQKDKMAEAYSEIGMKGERRRGKGHDGLYQGLSTATKDTYDALHMQALPPR

SEQ ID NO: 206424 - protein, 438 aa, Artificial Sequence
  Description of Artificial Sequence: Synthetic Chimeric Antigen Receptor
QIQLVQSGPELKKPGETVKISCKASGYIFTNYGMNWVKQAPGKSFKWMGWINTYTGESTYSADFKGRFAFSLETSASTAYLHINDLKNEDTATYFCARSGGYDPMDYWGQGTSVTVSSGGGGSGGGGSGGGGSDIVLTQSPASLAVSLGQRATISCRASESVDNYGNTFMHWYQQKPGQPPKLLIYRASNLESGIPARFSGSGSRTDFTLTINPVEADDVATYYCQQSNEDPPTFGAGTKLELKGLAVSTISSFFPPGYQIYIWAPLAGTCGVLLLSLVITLYCKRGRKKLLYIFKQPFMRPVQTTQEEDGCSCRFPEEEEGGCELRVKFSRSADAPAYQQGQNQLYNELNLGRREEYDVLDKRRGRDPEMGGKPRRKNPQEGLYNELQKDKMAEAYSEIGMKGERRRGKGHDGLYQGLSTATKDTYDALHMQALPPR

SEQ ID NO: 206425 - protein, 441 aa, Artificial Sequence
  Description of Artificial Sequence: Synthetic Chimeric Antigen Receptor
QIQLVQSGPELKKPGETVKISCKASGYIFTNYGMNWVKQAPGKSFKWMGWINTYTGESTYSADFKGRFAFSLETSASTAYLHINDLKNEDTATYFCARSGGYDPMDYWGQGTSVTVSSGGGGSGGGGSGGGGSDIVLTQSPASLAVSLGQRATISCRASESVDNYGNTFMHWYQQKPGQPPKLLIYRASNLESGIPARFSGSGSRTDFTLTINPVEADDVATYYCQQSNEDPPTFGAGTKLELKGLAVSTISSFFPPGYQIISFFLALTSTALLFLLFFLTLRFSVVKRGRKKLLYIFKQPFMRPVQTTQEEDGCSCRFPEEEEGGCELRVKFSRSADAPAYQQGQNQLYNELNLGRREEYDVLDKRRGRDPEMGGKPRRKNPQEGLYNELQKDKMAEAYSEIGMKGERRRGKGHDGLYQGLSTATKDTYDALHMQALPPR

SEQ ID NO: 206426 - protein, 452 aa, Artificial Sequence
  Description of Artificial Sequence: Synthetic Chimeric Antigen Receptor
EVKLVESGGGLVQPGGSLSLSCAASGFTFTDYYMSWVRQPPGKALEWLALIRSKADGYTTEYSASVKGRFTLSRDDSQSILYLQMNALRPEDSATYYCARDAAYYSYYSPEGAMDYWGQGTSVTVSSGGGGSGGGGSGGGGSMADYKDIVMTQSHKFMSTSVGDRVNITCKASQNVDSAVAWYQQKPGQSPKALIYSASYRYSGVPDRFTGRGSGTDFTLTISSVQAEDLAVYYCQQYYSTPWTFGGGTKLEIKRGLAVSTISSFFPPGYQIISFFLALTSTALLFLLFFLTLRFSVVKRGRKKLLYIFKQPFMRPVQTTQEEDGCSCRFPEEEEGGCELRVKFSRSADAPAYQQGQNQLYNELNLGRREEYDVLDKRRGRDPEMGGKPRRKNPQEGLYNELQKDKMAEAYSEIGMKGERRRGKGHDGLYQGLSTATKDTYDALHMQALPPR

SEQ ID NO: 206427 - protein, 460 aa, Artificial Sequence
  Description of Artificial Sequence: Synthetic Chimeric Antigen Receptor
QVQLQQPGAELVRPGASVKLSCKASGYTFTSYWMNWVKQRPDQGLEWIGRIDPYDSETHYNQKFKDKAILTVDKSSSTAYMQLSSLTSEDSAVYYCARGNWDDYWGQGTTLTVSSGGGGSGGGGSGGGGSDVQITQSPSYLAASPGETITINCRASKSISKDLAWYQEKPGKTNKLLIYSGSTLQSGIPSRFSGSGSGTDFTLTISSLEPEDFAMYYCQQHNKYPYTFGGGTKLEIKTTTPAPRPPTPAPTIASQPLSLRPEACRPAAGGAVHTRGLDFACDIYIWAPLAGTCGVLLLSLVITLYCKRGRKKLLYIFKQPFMRPVQTTQEEDGCSCRFPEEEEGGCELRVKFSRSADAPAYQQGQNQLYNELNLGRREEYDVLDKRRGRDPEMGGKPRRKNPQEGLYNELQKDKMAEAYSEIGMKGERRRGKGHDGLYQGLSTATKDTYDALHMQALPPR

SEQ ID NO: 206428 - protein, 463 aa, Artificial Sequence
  Description of Artificial Sequence: Synthetic Chimeric Antigen Receptor
QVQLQQPGAELVRPGASVKLSCKASGYTFTSYWMNWVKQRPDQGLEWIGRIDPYDSETHYNQKFKDKAILTVDKSSSTAYMQLSSLTSEDSAVYYCARGNWDDYWGQGTTLTVSSGGGGSGGGGSGGGGSDVQITQSPSYLAASPGETITINCRASKSISKDLAWYQEKPGKTNKLLIYSGSTLQSGIPSRFSGSGSGTDFTLTISSLEPEDFAMYYCQQHNKYPYTFGGGTKLEIKTTTPAPRPPTPAPTIASQPLSLRPEACRPAAGGAVHTRGLDFACDIISFFLALTSTALLFLLFFLTLRFSVVKRGRKKLLYIFKQPFMRPVQTTQEEDGCSCRFPEEEEGGCELRVKFSRSADAPAYQQGQNQLYNELNLGRREEYDVLDKRRGRDPEMGGKPRRKNPQEGLYNELQKDKMAEAYSEIGMKGERRRGKGHDGLYQGLSTATKDTYDALHMQALPPR

SEQ ID NO: 206429 - protein, 467 aa, Artificial Sequence
  Description of Artificial Sequence: Synthetic Chimeric Antigen Receptor
QIQLVQSGPELKKPGETVKISCKASGYIFTNYGMNWVKQAPGKSFKWMGWINTYTGESTYSADFKGRFAFSLETSASTAYLHINDLKNEDTATYFCARSGGYDPMDYWGQGTSVTVSSGGGGSGGGGSGGGGSDIVLTQSPASLAVSLGQRATISCRASESVDNYGNTFMHWYQQKPGQPPKLLIYRASNLESGIPARFSGSGSRTDFTLTINPVEADDVATYYCQQSNEDPPTFGAGTKLELKTTTPAPRPPTPAPTIASQPLSLRPEACRPAAGGAVHTRGLDFACDIYIWAPLAGTCGVLLLSLVITLYCKRGRKKLLYIFKQPFMRPVQTTQEEDGCSCRFPEEEEGGCELRVKFSRSADAPAYQQGQNQLYNELNLGRREEYDVLDKRRGRDPEMGGKPRRKNPQEGLYNELQKDKMAEAYSEIGMKGERRRGKGHDGLYQGLSTATKDTYDALHMQALPPR

SEQ ID NO: 206430 - protein, 470 aa, Artificial Sequence
  Description of Artificial Sequence: Synthetic Chimeric Antigen Receptor
EVQLVESGGGLVQPGRSLRLSCTASGFTFTDYYMSVRQAPGKGLEWVGLIRSKADGYTTEYAASVKGRFTISRDDSQSIAYLQMNSLKTEDTAVYYCARDAAYYSYYSPEGAMDYGQGTLVTVSSGGGGSGGGGSGGGGSDIQMTQSPSSVSASVGDRVTITCKASQNVDSAVAYQQKPGKAPKALIYSASYRYSGVPDRFSGSGSGTDFTLTISSLQPEDLATYYCQQYYSTPWTFGQGTKVEIKRTTTPAPRPPTPAPTIASQPLSLRPEACRPAAGGAVHTRGLDFACDIYIWAPLAGTCGVLLLSLVITLYCKRGRKKLLYIFKQPFMRPVQTTQEEDGCSCRFPEEEEGGCELRVKFSRSADAPAYQQGQNQLYNELNLGRREEYDVLDKRRGRDPEMGGKPRRKNPQEGLYNELQKDKMAEAYSEIGMKGERRRGKGHDGLYQGLSTATKDTYDALHMQALPPR

SEQ ID NO: 206431 - protein, 470 aa, Artificial Sequence
  Description of Artificial Sequence: Synthetic Chimeric Antigen Receptor
EVQLVESGGGLVQPGRSLRLSCTASGFTFTDYYMSVRQAPGKGLEWVGLIRSKADGYTTEYSASVKGRFTISRDDSKSILYLQMNSLKTEDTAVYYCARDAAYYSYYSPEGAMDYGQGTLVTVSSGGGGSGGGGSGGGGSDIQMTQSPSSVSASVGDRVTITCRASQNVDSAVAYQQKPGKAPKALIYSASYRYSGVPSRFSGSGSGTDFTLTISSLQPEDFATYYCQQYYSTPWTFGQGTKVEIKRTTTPAPRPPTPAPTIASQPLSLRPEACRPAAGGAVHTRGLDFACDIYIWAPLAGTCGVLLLSLVITLYCKRGRKKLLYIFKQPFMRPVQTTQEEDGCSCRFPEEEEGGCELRVKFSRSADAPAYQQGQNQLYNELNLGRREEYDVLDKRRGRDPEMGGKPRRKNPQEGLYNELQKDKMAEAYSEIGMKGERRRGKGHDGLYQGLSTATKDTYDALHMQALPPR

SEQ ID NO: 206432 - protein, 470 aa, Artificial Sequence
  Description of Artificial Sequence: Synthetic Chimeric Antigen Receptor
EVQLVESGGGLVQPGRSLRLSCTASGFTFTDYYMSWVRQAPGKGLEWVGLIRSKADGYTTEYSASVKGRFTISRDDSQSIAYLQMNSLKTEDTAVYYCARDAAYYSYYSPEGAMDYGQGTLVTVSSGGGGSGGGGSGGGGSDIQMTQSPSSVSASVGDRVTITCRASQVDSAVAWYQQKPGKAPKALIYSASYRYSGVPSRFSGSGSGTDFTLTISSLQPEDLATYYCQQYYSTPTFGQGTKVEIKRTTTPAPRPPTPAPTIASQPLSLRPEACRPAAGGAVHTRGLDFACDIYIWAPLAGTCGVLLLSLVITLYCKRGRKKLLYIFKQPFMRPVQTTQEEDGCSCRFPEEEEGGCELRVKFSRSADAPAYQQGQNQLYNELNLGRREEYDVLDKRRGRDPEMGGKPRRKNPQEGLYNELQKDKMAEAYSEIGMKGERRRGKGHDGLYQGLSTATKDTYDALHMQALPPR

SEQ ID NO: 206433 - protein, 470 aa, Artificial Sequence
  Description of Artificial Sequence: Synthetic Chimeric Antigen Receptor
MALPVTALLLPLALLLHAARPEVKLVESGGGLVQPGGSLSLSCAASGFTFTDYYMSWVRQPPGKALEWLALIRSKADGYTTEYSASVKGRFTLSRDDSQSILYLQMNALRPEDSATYYCARDAAYYSYYSPEGAMDYWGQGTSVTVSSGGGGSGGGGSGGGGSMADYKDIVMTQSHKFMSTSVGDRVNITCKASQNVDSAVAWYQQKPGQSPKALIYSASYRYSGVPDRFTGRGSGTDFTLTISSVQAEDLAVYYCQQYYSTPWTFGGGTKLEIKRGLAVSTISSFFPPGYQIYIWAPLAGTCGVLLLSLVITLYCKRGRKKLLYIFKQPFMRPVQTTQEEDGCSCRFPEEEEGGCELRVKFSRSADAPAYQQGQNQLYNELNLGRREEYDVLDKRRGRDPEMGGKPRRKNPQEGLYNELQKDKMAEAYSEIGMKGERRRGKGHDGLYQGLSTATKDTYDALHMQALPPR

SEQ ID NO: 206434 - protein, 470 aa, Artificial Sequence
  Description of Artificial Sequence: Synthetic Chimeric Antigen Receptor
MALPVTALLLPLALLLHAARPEVKLVESGGGLVQPGRSLRLSCTASGFTFTDYYMSWVRQAPGKGLEWVGLIRSKADGYTTEYSASVKGRFTISRDDSKSILYLQMNSLKTEDTAVYYCARDAAYYSYYSPEGAMDYWGQGTLVTVSSGGGGSGGGGSGGGGSMADYKDIQMTQSPSSVSASVGDRVTITCRASQNVDSAVAWYQQKPGKAPKALIYSASYRYSGVPSRFSGRGSGTDFTLTISSLQPEDFATYYCQQYYSTPWTFGQGTKVEIKRGLAVSTISSFFPPGYQIYIWAPLAGTCGVLLLSLVITLYCKRGRKKLLYIFKQPFMRPVQTTQEEDGCSCRFPEEEEGGCELRVKFSRSADAPAYQQGQNQLYNELNLGRREEYDVLDKRRGRDPEMGGKPRRKNPQEGLYNELQKDKMAEAYSEIGMKGERRRGKGHDGLYQGLSTATKDTYDALHMQALPPR

SEQ ID NO: 206435 - protein, 470 aa, Artificial Sequence
  Description of Artificial Sequence: Synthetic Chimeric Antigen Receptor
MALPVTALLLPLALLLHAARPEVKLVESGGGLVQPGRSLRLSCTASGFTFTDYYMSWVRQAPGKGLEWVGLIRSKADGYTTEYSASVKGRFTISRDDSKSILYLQMNSLKTEDTAVYYCARDAAYYSYYSPEGAMDYWGQGTLVTVSSGGGGSGGGGSGGGGSMADYKDIQMTQSPSSVSASVGDRVTITCRASQNVDSAVAWYQQKPGKAPKALIYSASYRYSGVPSRFSGSGSGTDFTLTISSLQPEDFATYYCQQYYSTPWTFGQGTKVEIKRGLAVSTISSFFPPGYQIYIWAPLAGTCGVLLLSLVITLYCKRGRKKLLYIFKQPFMRPVQTTQEEDGCSCRFPEEEEGGCELRVKFSRSADAPAYQQGQNQLYNELNLGRREEYDVLDKRRGRDPEMGGKPRRKNPQEGLYNELQKDKMAEAYSEIGMKGERRRGKGHDGLYQGLSTATKDTYDALHMQALPPR

SEQ ID NO: 206436 - protein, 470 aa, Artificial Sequence
  Description of Artificial Sequence: Synthetic Chimeric Antigen Receptor
MALPVTALLLPLALLLHAARPEVKLVESGGGLVQPGRSLRLSCTASGFTFTDYYMSWVRQAPGKGLEWVGLIRSKADGYTTEYSASVKGRFTISRDDSKSILYLQMNSLKTEDTAVYYCARDAAYYSYYSPEGAMDYWGQGTLVTVSSGGGGSGGGGSGGGGSMADYKDIQMTQSPSSVSASVGDRVTITCRASQNVDSAVAWYQQKPGKAPKLLIYSASYGQSGVPSRFSGSGSGTDFTLTISSLQPEDFATYYCQQYYSTPWTFGQGTKVEIKRGLAVSTISSFFPPGYQIYIWAPLAGTCGVLLLSLVITLYCKRGRKKLLYIFKQPFMRPVQTTQEEDGCSCRFPEEEEGGCELRVKFSRSADAPAYQQGQNQLYNELNLGRREEYDVLDKRRGRDPEMGGKPRRKNPQEGLYNELQKDKMAEAYSEIGMKGERRRGKGHDGLYQGLSTATKDTYDALHMQALPPR

SEQ ID NO: 206437 - protein, 470 aa, Artificial Sequence
  Description of Artificial Sequence: Synthetic Chimeric Antigen Receptor
MALPVTALLLPLALLLHAARPEVKLVESGGGLVQPGRSLRLSCTASGFTFTDYYMSWVRQAPGKGLEWVGLIRSKADGYTTEYSASVKGRFTISRDDSKSILYLQMNSLKTEDTAVYYCARDAAYYSYYSPEGAMDYWGQGTLVTVSSGGGGSGGGGSGGGGSMADYKDIQMTQSPSSVSASVGDRVTITCRASQNVDSAVAWYQQKPGKAPKLLIYSASYRQSGVPSRFSGSGSGTDFTLTISSLQPEDFATYYCQQYYSTPWTFGQGTKVEIKRGLAVSTISSFFPPGYQIYIWAPLAGTCGVLLLSLVITLYCKRGRKKLLYIFKQPFMRPVQTTQEEDGCSCRFPEEEEGGCELRVKFSRSADAPAYQQGQNQLYNELNLGRREEYDVLDKRRGRDPEMGGKPRRKNPQEGLYNELQKDKMAEAYSEIGMKGERRRGKGHDGLYQGLSTATKDTYDALHMQALPPR

SEQ ID NO: 206438 - protein, 470 aa, Artificial Sequence
  Description of Artificial Sequence: Synthetic Chimeric Antigen Receptor
MALPVTALLLPLALLLHAARPEVKLVESGGGLVQPGRSLRLSCTASGFTFTDYYMSWVRQAPGKGLEWVGLIRSKADGYTTEYSASVKGRFTISRDDSKSILYLQMNSLKTEDTAVYYCARDAAYYSYYSPEGAMDYWGQGTLVTVSSGGGGSGGGGSGGGGSMADYKDIQMTQSPSSVSASVGDRVTITCRASQNVDSAVAWYQQKPGKAPKLLIYSASYRYSGVPSRFSGSGSGTDFTLTISSLQPEDFATYYCQQYYSTPWTFGQGTKVEIKRGLAVSTISSFFPPGYQIYIWAPLAGTCGVLLLSLVITLYCKRGRKKLLYIFKQPFMRPVQTTQEEDGCSCRFPEEEEGGCELRVKFSRSADAPAYQQGQNQLYNELNLGRREEYDVLDKRRGRDPEMGGKPRRKNPQEGLYNELQKDKMAEAYSEIGMKGERRRGKGHDGLYQGLSTATKDTYDALHMQALPPR

SEQ ID NO: 206439 - protein, 470 aa, Artificial Sequence
  Description of Artificial Sequence: Synthetic Chimeric Antigen Receptor
MALPVTALLLPLALLLHAARPEVKLVESGGGLVQPGRSLRLSCTASGFTFTDYYMSWVRQAPGKGLEWVGLIRSKADGYTTEYSASVKGRFTISRDDSKSILYLQMNSLKTEDTAVYYCARDAAYYSYYSPEGAMDYWGQGTLVTVSSGGGGSGGGGSGGGGSMADYKDIVMTQSPSSVSASVGDRVTITCRASQNVDSAVAWYQQKPGKAPKALIYSASYRYSGVPSRFSGRGSGTDFTLTISSLQPEDFATYYCQQYYSTPWTFGQGTKVEIKRGLAVSTISSFFPPGYQIYIWAPLAGTCGVLLLSLVITLYCKRGRKKLLYIFKQPFMRPVQTTQEEDGCSCRFPEEEEGGCELRVKFSRSADAPAYQQGQNQLYNELNLGRREEYDVLDKRRGRDPEMGGKPRRKNPQEGLYNELQKDKMAEAYSEIGMKGERRRGKGHDGLYQGLSTATKDTYDALHMQALPPR

SEQ ID NO: 206440 - protein, 470 aa, Artificial Sequence
  Description of Artificial Sequence: Synthetic Chimeric Antigen Receptor
MALPVTALLLPLALLLHAARPEVQLVESGGGLVQPGRSLRLSCTASGFTFTDYYMSWVRQAPGKGLEWVGFIRSKADGYTTEYAASVKGRFTISRDDSKSIAYLQMNSLKTEDTAVYYCARDAAYYSYYSPEGAMDYWGQGTLVTVSSGGGGSGGGGSGGGGSMADYKDIQMTQSPSSVSASVGDRVTITCRASQNVDSAVAWYQQKPGKAPKALIYSASYRYSGVPSRFSGRGSGTDFTLTISSLQPEDFATYYCQQYYSTPWTFGQGTKVEIKRGLAVSTISSFFPPGYQIYIWAPLAGTCGVLLLSLVITLYCKRGRKKLLYIFKQPFMRPVQTTQEEDGCSCRFPEEEEGGCELRVKFSRSADAPAYQQGQNQLYNELNLGRREEYDVLDKRRGRDPEMGGKPRRKNPQEGLYNELQKDKMAEAYSEIGMKGERRRGKGHDGLYQGLSTATKDTYDALHMQALPPR

SEQ ID NO: 206441 - protein, 470 aa, Artificial Sequence
  Description of Artificial Sequence: Synthetic Chimeric Antigen Receptor
MALPVTALLLPLALLLHAARPEVQLVESGGGLVQPGRSLRLSCTASGFTFTDYYMSWVRQAPGKGLEWVGFIRSKADGYTTEYAASVKGRFTISRDDSKSIAYLQMNSLKTEDTAVYYCARDAAYYSYYSPEGAMDYWGQGTLVTVSSGGGGSGGGGSGGGGSMADYKDIQMTQSPSSVSASVGDRVTITCRASQNVDSAVAWYQQKPGKAPKALIYSASYRYSGVPSRFSGSGSGTDFTLTISSLQPEDFATYYCQQYYSTPWTFGQGTKVEIKRGLAVSTISSFFPPGYQIYIWAPLAGTCGVLLLSLVITLYCKRGRKKLLYIFKQPFMRPVQTTQEEDGCSCRFPEEEEGGCELRVKFSRSADAPAYQQGQNQLYNELNLGRREEYDVLDKRRGRDPEMGGKPRRKNPQEGLYNELQKDKMAEAYSEIGMKGERRRGKGHDGLYQGLSTATKDTYDALHMQALPPR

SEQ ID NO: 206442 - protein, 470 aa, Artificial Sequence
  Description of Artificial Sequence: Synthetic Chimeric Antigen Receptor
MALPVTALLLPLALLLHAARPEVQLVESGGGLVQPGRSLRLSCTASGFTFTDYYMSWVRQAPGKGLEWVGFIRSKADGYTTEYAASVKGRFTISRDDSKSIAYLQMNSLKTEDTAVYYCARDAAYYSYYSPEGAMDYWGQGTLVTVSSGGGGSGGGGSGGGGSMADYKDIQMTQSPSSVSASVGDRVTITCRASQNVDSAVAWYQQKPGKAPKLLIYSASYGQSGVPSRFSGSGSGTDFTLTISSLQPEDFATYYCQQYYSTPWTFGQGTKVEIKRGLAVSTISSFFPPGYQIYIWAPLAGTCGVLLLSLVITLYCKRGRKKLLYIFKQPFMRPVQTTQEEDGCSCRFPEEEEGGCELRVKFSRSADAPAYQQGQNQLYNELNLGRREEYDVLDKRRGRDPEMGGKPRRKNPQEGLYNELQKDKMAEAYSEIGMKGERRRGKGHDGLYQGLSTATKDTYDALHMQALPPR

SEQ ID NO: 206443 - protein, 470 aa, Artificial Sequence
  Description of Artificial Sequence: Synthetic Chimeric Antigen Receptor
MALPVTALLLPLALLLHAARPEVQLVESGGGLVQPGRSLRLSCTASGFTFTDYYMSWVRQAPGKGLEWVGFIRSKADGYTTEYAASVKGRFTISRDDSKSIAYLQMNSLKTEDTAVYYCARDAAYYSYYSPEGAMDYWGQGTLVTVSSGGGGSGGGGSGGGGSMADYKDIQMTQSPSSVSASVGDRVTITCRASQNVDSAVAWYQQKPGKAPKLLIYSASYRQSGVPSRFSGSGSGTDFTLTISSLQPEDFATYYCQQYYSTPWTFGQGTKVEIKRGLAVSTISSFFPPGYQIYIWAPLAGTCGVLLLSLVITLYCKRGRKKLLYIFKQPFMRPVQTTQEEDGCSCRFPEEEEGGCELRVKFSRSADAPAYQQGQNQLYNELNLGRREEYDVLDKRRGRDPEMGGKPRRKNPQEGLYNELQKDKMAEAYSEIGMKGERRRGKGHDGLYQGLSTATKDTYDALHMQALPPR

SEQ ID NO: 206444 - protein, 470 aa, Artificial Sequence
  Description of Artificial Sequence: Synthetic Chimeric Antigen Receptor
MALPVTALLLPLALLLHAARPEVQLVESGGGLVQPGRSLRLSCTASGFTFTDYYMSWVRQAPGKGLEWVGFIRSKADGYTTEYAASVKGRFTISRDDSKSIAYLQMNSLKTEDTAVYYCARDAAYYSYYSPEGAMDYWGQGTLVTVSSGGGGSGGGGSGGGGSMADYKDIQMTQSPSSVSASVGDRVTITCRASQNVDSAVAWYQQKPGKAPKLLIYSASYRYSGVPSRFSGSGSGTDFTLTISSLQPEDFATYYCQQYYSTPWTFGQGTKVEIKRGLAVSTISSFFPPGYQIYIWAPLAGTCGVLLLSLVITLYCKRGRKKLLYIFKQPFMRPVQTTQEEDGCSCRFPEEEEGGCELRVKFSRSADAPAYQQGQNQLYNELNLGRREEYDVLDKRRGRDPEMGGKPRRKNPQEGLYNELQKDKMAEAYSEIGMKGERRRGKGHDGLYQGLSTATKDTYDALHMQALPPR

SEQ ID NO: 206445 - protein, 470 aa, Artificial Sequence
  Description of Artificial Sequence: Synthetic Chimeric Antigen Receptor
MALPVTALLLPLALLLHAARPEVQLVESGGGLVQPGRSLRLSCTASGFTFTDYYMSWVRQAPGKGLEWVGFIRSKADGYTTEYAASVKGRFTISRDDSKSIAYLQMNSLKTEDTAVYYCARDAAYYSYYSPEGAMDYWGQGTLVTVSSGGGGSGGGGSGGGGSMADYKDIVMTQSPSSVSASVGDRVTITCRASQNVDSAVAWYQQKPGKAPKALIYSASYRYSGVPSRFSGRGSGTDFTLTISSLQPEDFATYYCQQYYSTPWTFGQGTKVEIKRGLAVSTISSFFPPGYQIYIWAPLAGTCGVLLLSLVITLYCKRGRKKLLYIFKQPFMRPVQTTQEEDGCSCRFPEEEEGGCELRVKFSRSADAPAYQQGQNQLYNELNLGRREEYDVLDKRRGRDPEMGGKPRRKNPQEGLYNELQKDKMAEAYSEIGMKGERRRGKGHDGLYQGLSTATKDTYDALHMQALPPR

SEQ ID NO: 206446 - protein, 470 aa, Artificial Sequence
  Description of Artificial Sequence: Synthetic Chimeric Antigen Receptor
MALPVTALLLPLALLLHAARPEVQLVESGGGLVQPGRSLRLSCTASGFTFTDYYMSWVRQAPGKGLEWVGFIRSKADGYTTEYAASVKGRFTISRDDSKSIAYLQMNSLKTEDTAVYYCTRDAAYYSYYSPEGAMDYWGQGTLVTVSSGGGGSGGGGSGGGGSMADYKDIQMTQSPSSVSASVGDRVTITCRASQNVDSAVAWYQQKPGKAPKALIYSASYRYSGVPSRFSGRGSGTDFTLTISSLQPEDFATYYCQQYYSTPWTFGQGTKVEIKRGLAVSTISSFFPPGYQIYIWAPLAGTCGVLLLSLVITLYCKRGRKKLLYIFKQPFMRPVQTTQEEDGCSCRFPEEEEGGCELRVKFSRSADAPAYQQGQNQLYNELNLGRREEYDVLDKRRGRDPEMGGKPRRKNPQEGLYNELQKDKMAEAYSEIGMKGERRRGKGHDGLYQGLSTATKDTYDALHMQALPPR

SEQ ID NO: 206447 - protein, 470 aa, Artificial Sequence
  Description of Artificial Sequence: Synthetic Chimeric Antigen Receptor
MALPVTALLLPLALLLHAARPEVQLVESGGGLVQPGRSLRLSCTASGFTFTDYYMSWVRQAPGKGLEWVGFIRSKADGYTTEYAASVKGRFTISRDDSKSIAYLQMNSLKTEDTAVYYCTRDAAYYSYYSPEGAMDYWGQGTLVTVSSGGGGSGGGGSGGGGSMADYKDIQMTQSPSSVSASVGDRVTITCRASQNVDSAVAWYQQKPGKAPKALIYSASYRYSGVPSRFSGSGSGTDFTLTISSLQPEDFATYYCQQYYSTPWTFGQGTKVEIKRGLAVSTISSFFPPGYQIYIWAPLAGTCGVLLLSLVITLYCKRGRKKLLYIFKQPFMRPVQTTQEEDGCSCRFPEEEEGGCELRVKFSRSADAPAYQQGQNQLYNELNLGRREEYDVLDKRRGRDPEMGGKPRRKNPQEGLYNELQKDKMAEAYSEIGMKGERRRGKGHDGLYQGLSTATKDTYDALHMQALPPR

SEQ ID NO: 206448 - protein, 470 aa, Artificial Sequence
  Description of Artificial Sequence: Synthetic Chimeric Antigen Receptor
MALPVTALLLPLALLLHAARPEVQLVESGGGLVQPGRSLRLSCTASGFTFTDYYMSWVRQAPGKGLEWVGFIRSKADGYTTEYAASVKGRFTISRDDSKSIAYLQMNSLKTEDTAVYYCTRDAAYYSYYSPEGAMDYWGQGTLVTVSSGGGGSGGGGSGGGGSMADYKDIQMTQSPSSVSASVGDRVTITCRASQNVDSAVAWYQQKPGKAPKLLIYSASYGQSGVPSRFSGSGSGTDFTLTISSLQPEDFATYYCQQYYSTPWTFGQGTKVEIKRGLAVSTISSFFPPGYQIYIWAPLAGTCGVLLLSLVITLYCKRGRKKLLYIFKQPFMRPVQTTQEEDGCSCRFPEEEEGGCELRVKFSRSADAPAYQQGQNQLYNELNLGRREEYDVLDKRRGRDPEMGGKPRRKNPQEGLYNELQKDKMAEAYSEIGMKGERRRGKGHDGLYQGLSTATKDTYDALHMQALPPR

SEQ ID NO: 206449 - protein, 470 aa, Artificial Sequence
  Description of Artificial Sequence: Synthetic Chimeric Antigen Receptor
MALPVTALLLPLALLLHAARPEVQLVESGGGLVQPGRSLRLSCTASGFTFTDYYMSWVRQAPGKGLEWVGFIRSKADGYTTEYAASVKGRFTISRDDSKSIAYLQMNSLKTEDTAVYYCTRDAAYYSYYSPEGAMDYWGQGTLVTVSSGGGGSGGGGSGGGGSMADYKDIQMTQSPSSVSASVGDRVTITCRASQNVDSAVAWYQQKPGKAPKLLIYSASYRQSGVPSRFSGSGSGTDFTLTISSLQPEDFATYYCQQYYSTPWTFGQGTKVEIKRGLAVSTISSFFPPGYQIYIWAPLAGTCGVLLLSLVITLYCKRGRKKLLYIFKQPFMRPVQTTQEEDGCSCRFPEEEEGGCELRVKFSRSADAPAYQQGQNQLYNELNLGRREEYDVLDKRRGRDPEMGGKPRRKNPQEGLYNELQKDKMAEAYSEIGMKGERRRGKGHDGLYQGLSTATKDTYDALHMQALPPR

SEQ ID NO: 206450 - protein, 470 aa, Artificial Sequence
  Description of Artificial Sequence: Synthetic Chimeric Antigen Receptor
MALPVTALLLPLALLLHAARPEVQLVESGGGLVQPGRSLRLSCTASGFTFTDYYMSWVRQAPGKGLEWVGFIRSKADGYTTEYAASVKGRFTISRDDSKSIAYLQMNSLKTEDTAVYYCTRDAAYYSYYSPEGAMDYWGQGTLVTVSSGGGGSGGGGSGGGGSMADYKDIQMTQSPSSVSASVGDRVTITCRASQNVDSAVAWYQQKPGKAPKLLIYSASYRYSGVPSRFSGSGSGTDFTLTISSLQPEDFATYYCQQYYSTPWTFGQGTKVEIKRGLAVSTISSFFPPGYQIYIWAPLAGTCGVLLLSLVITLYCKRGRKKLLYIFKQPFMRPVQTTQEEDGCSCRFPEEEEGGCELRVKFSRSADAPAYQQGQNQLYNELNLGRREEYDVLDKRRGRDPEMGGKPRRKNPQEGLYNELQKDKMAEAYSEIGMKGERRRGKGHDGLYQGLSTATKDTYDALHMQALPPR

SEQ ID NO: 206451 - protein, 470 aa, Artificial Sequence
  Description of Artificial Sequence: Synthetic Chimeric Antigen Receptor
MALPVTALLLPLALLLHAARPEVQLVESGGGLVQPGRSLRLSCTASGFTFTDYYMSWVRQAPGKGLEWVGFIRSKADGYTTEYAASVKGRFTISRDDSKSIAYLQMNSLKTEDTAVYYCTRDAAYYSYYSPEGAMDYWGQGTLVTVSSGGGGSGGGGSGGGGSMADYKDIVMTQSPSSVSASVGDRVTITCRASQNVDSAVAWYQQKPGKAPKALIYSASYRYSGVPSRFSGRGSGTDFTLTISSLQPEDFATYYCQQYYSTPWTFGQGTKVEIKRGLAVSTISSFFPPGYQIYIWAPLAGTCGVLLLSLVITLYCKRGRKKLLYIFKQPFMRPVQTTQEEDGCSCRFPEEEEGGCELRVKFSRSADAPAYQQGQNQLYNELNLGRREEYDVLDKRRGRDPEMGGKPRRKNPQEGLYNELQKDKMAEAYSEIGMKGERRRGKGHDGLYQGLSTATKDTYDALHMQALPPR

SEQ ID NO: 206452 - protein, 470 aa, Artificial Sequence
  Description of Artificial Sequence: Synthetic Chimeric Antigen Receptor
MALPVTALLLPLALLLHAARPEVQLVESGGGLVQPGRSLRLSCTASGFTFTDYYMSWVRQAPGKGLEWVGFIRSKADGYTTEYSASVKGRFTISRDDSKSIAYLQMNSLKTEDTAVYYCARDAAYYSYYSPEGAMDYWGQGTLVTVSSGGGGSGGGGSGGGGSMADYKDIQMTQSPSSVSASVGDRVTITCRASQNVDSAVAWYQQKPGKAPKALIYSASYRYSGVPSRFSGRGSGTDFTLTISSLQPEDFATYYCQQYYSTPWTFGQGTKVEIKRGLAVSTISSFFPPGYQIYIWAPLAGTCGVLLLSLVITLYCKRGRKKLLYIFKQPFMRPVQTTQEEDGCSCRFPEEEEGGCELRVKFSRSADAPAYQQGQNQLYNELNLGRREEYDVLDKRRGRDPEMGGKPRRKNPQEGLYNELQKDKMAEAYSEIGMKGERRRGKGHDGLYQGLSTATKDTYDALHMQALPPR

SEQ ID NO: 206453 - protein, 470 aa, Artificial Sequence
  Description of Artificial Sequence: Synthetic Chimeric Antigen Receptor
MALPVTALLLPLALLLHAARPEVQLVESGGGLVQPGRSLRLSCTASGFTFTDYYMSWVRQAPGKGLEWVGFIRSKADGYTTEYSASVKGRFTISRDDSKSIAYLQMNSLKTEDTAVYYCARDAAYYSYYSPEGAMDYWGQGTLVTVSSGGGGSGGGGSGGGGSMADYKDIQMTQSPSSVSASVGDRVTITCRASQNVDSAVAWYQQKPGKAPKALIYSASYRYSGVPSRFSGSGSGTDFTLTISSLQPEDFATYYCQQYYSTPWTFGQGTKVEIKRGLAVSTISSFFPPGYQIYIWAPLAGTCGVLLLSLVITLYCKRGRKKLLYIFKQPFMRPVQTTQEEDGCSCRFPEEEEGGCELRVKFSRSADAPAYQQGQNQLYNELNLGRREEYDVLDKRRGRDPEMGGKPRRKNPQEGLYNELQKDKMAEAYSEIGMKGERRRGKGHDGLYQGLSTATKDTYDALHMQALPPR

SEQ ID NO: 206454 - protein, 470 aa, Artificial Sequence
  Description of Artificial Sequence: Synthetic Chimeric Antigen Receptor
MALPVTALLLPLALLLHAARPEVQLVESGGGLVQPGRSLRLSCTASGFTFTDYYMSWVRQAPGKGLEWVGFIRSKADGYTTEYSASVKGRFTISRDDSKSIAYLQMNSLKTEDTAVYYCARDAAYYSYYSPEGAMDYWGQGTLVTVSSGGGGSGGGGSGGGGSMADYKDIQMTQSPSSVSASVGDRVTITCRASQNVDSAVAWYQQKPGKAPKLLIYSASYGQSGVPSRFSGSGSGTDFTLTISSLQPEDFATYYCQQYYSTPWTFGQGTKVEIKRGLAVSTISSFFPPGYQIYIWAPLAGTCGVLLLSLVITLYCKRGRKKLLYIFKQPFMRPVQTTQEEDGCSCRFPEEEEGGCELRVKFSRSADAPAYQQGQNQLYNELNLGRREEYDVLDKRRGRDPEMGGKPRRKNPQEGLYNELQKDKMAEAYSEIGMKGERRRGKGHDGLYQGLSTATKDTYDALHMQALPPR

SEQ ID NO: 206455 - protein, 470 aa, Artificial Sequence
  Description of Artificial Sequence: Synthetic Chimeric Antigen Receptor
MALPVTALLLPLALLLHAARPEVQLVESGGGLVQPGRSLRLSCTASGFTFTDYYMSWVRQAPGKGLEWVGFIRSKADGYTTEYSASVKGRFTISRDDSKSIAYLQMNSLKTEDTAVYYCARDAAYYSYYSPEGAMDYWGQGTLVTVSSGGGGSGGGGSGGGGSMADYKDIQMTQSPSSVSASVGDRVTITCRASQNVDSAVAWYQQKPGKAPKLLIYSASYRQSGVPSRFSGSGSGTDFTLTISSLQPEDFATYYCQQYYSTPWTFGQGTKVEIKRGLAVSTISSFFPPGYQIYIWAPLAGTCGVLLLSLVITLYCKRGRKKLLYIFKQPFMRPVQTTQEEDGCSCRFPEEEEGGCELRVKFSRSADAPAYQQGQNQLYNELNLGRREEYDVLDKRRGRDPEMGGKPRRKNPQEGLYNELQKDKMAEAYSEIGMKGERRRGKGHDGLYQGLSTATKDTYDALHMQALPPR

SEQ ID NO: 206456 - protein, 470 aa, Artificial Sequence
  Description of Artificial Sequence: Synthetic Chimeric Antigen Receptor
MALPVTALLLPLALLLHAARPEVQLVESGGGLVQPGRSLRLSCTASGFTFTDYYMSWVRQAPGKGLEWVGFIRSKADGYTTEYSASVKGRFTISRDDSKSIAYLQMNSLKTEDTAVYYCARDAAYYSYYSPEGAMDYWGQGTLVTVSSGGGGSGGGGSGGGGSMADYKDIQMTQSPSSVSASVGDRVTITCRASQNVDSAVAWYQQKPGKAPKLLIYSASYRYSGVPSRFSGSGSGTDFTLTISSLQPEDFATYYCQQYYSTPWTFGQGTKVEIKRGLAVSTISSFFPPGYQIYIWAPLAGTCGVLLLSLVITLYCKRGRKKLLYIFKQPFMRPVQTTQEEDGCSCRFPEEEEGGCELRVKFSRSADAPAYQQGQNQLYNELNLGRREEYDVLDKRRGRDPEMGGKPRRKNPQEGLYNELQKDKMAEAYSEIGMKGERRRGKGHDGLYQGLSTATKDTYDALHMQALPPR

SEQ ID NO: 206457 - protein, 470 aa, Artificial Sequence
  Description of Artificial Sequence: Synthetic Chimeric Antigen Receptor
MALPVTALLLPLALLLHAARPEVQLVESGGGLVQPGRSLRLSCTASGFTFTDYYMSWVRQAPGKGLEWVGFIRSKADGYTTEYSASVKGRFTISRDDSKSIAYLQMNSLKTEDTAVYYCARDAAYYSYYSPEGAMDYWGQGTLVTVSSGGGGSGGGGSGGGGSMADYKDIVMTQSPSSVSASVGDRVTITCRASQNVDSAVAWYQQKPGKAPKALIYSASYRYSGVPSRFSGRGSGTDFTLTISSLQPEDFATYYCQQYYSTPWTFGQGTKVEIKRGLAVSTISSFFPPGYQIYIWAPLAGTCGVLLLSLVITLYCKRGRKKLLYIFKQPFMRPVQTTQEEDGCSCRFPEEEEGGCELRVKFSRSADAPAYQQGQNQLYNELNLGRREEYDVLDKRRGRDPEMGGKPRRKNPQEGLYNELQKDKMAEAYSEIGMKGERRRGKGHDGLYQGLSTATKDTYDALHMQALPPR

SEQ ID NO: 206458 - protein, 470 aa, Artificial Sequence
  Description of Artificial Sequence: Synthetic Chimeric Antigen Receptor
MALPVTALLLPLALLLHAARPEVQLVESGGGLVQPGRSLRLSCTASGFTFTDYYMSWVRQAPGKGLEWVGLIRSKADGYTTEYAASVKGRFTISRDDSKSIAYLQMNSLKTEDTAVYYCARDAAYYSYYSPEGAMDYWGQGTLVTVSSGGGGSGGGGSGGGGSMADYKDIQMTQSPSSVSASVGDRVTITCRASQNVDSAVAWYQQKPGKAPKALIYSASYRYSGVPSRFSGRGSGTDFTLTISSLQPEDFATYYCQQYYSTPWTFGQGTKVEIKRGLAVSTISSFFPPGYQIYIWAPLAGTCGVLLLSLVITLYCKRGRKKLLYIFKQPFMRPVQTTQEEDGCSCRFPEEEEGGCELRVKFSRSADAPAYQQGQNQLYNELNLGRREEYDVLDKRRGRDPEMGGKPRRKNPQEGLYNELQKDKMAEAYSEIGMKGERRRGKGHDGLYQGLSTATKDTYDALHMQALPPR

SEQ ID NO: 206459 - protein, 470 aa, Artificial Sequence
  Description of Artificial Sequence: Synthetic Chimeric Antigen Receptor
MALPVTALLLPLALLLHAARPEVQLVESGGGLVQPGRSLRLSCTASGFTFTDYYMSWVRQAPGKGLEWVGLIRSKADGYTTEYAASVKGRFTISRDDSKSIAYLQMNSLKTEDTAVYYCARDAAYYSYYSPEGAMDYWGQGTLVTVSSGGGGSGGGGSGGGGSMADYKDIQMTQSPSSVSASVGDRVTITCRASQNVDSAVAWYQQKPGKAPKALIYSASYRYSGVPSRFSGSGSGTDFTLTISSLQPEDFATYYCQQYYSTPWTFGQGTKVEIKRGLAVSTISSFFPPGYQIYIWAPLAGTCGVLLLSLVITLYCKRGRKKLLYIFKQPFMRPVQTTQEEDGCSCRFPEEEEGGCELRVKFSRSADAPAYQQGQNQLYNELNLGRREEYDVLDKRRGRDPEMGGKPRRKNPQEGLYNELQKDKMAEAYSEIGMKGERRRGKGHDGLYQGLSTATKDTYDALHMQALPPR

SEQ ID NO: 206460 - protein, 470 aa, Artificial Sequence
  Description of Artificial Sequence: Synthetic Chimeric Antigen Receptor
MALPVTALLLPLALLLHAARPEVQLVESGGGLVQPGRSLRLSCTASGFTFTDYYMSWVRQAPGKGLEWVGLIRSKADGYTTEYAASVKGRFTISRDDSKSIAYLQMNSLKTEDTAVYYCARDAAYYSYYSPEGAMDYWGQGTLVTVSSGGGGSGGGGSGGGGSMADYKDIQMTQSPSSVSASVGDRVTITCRASQNVDSAVAWYQQKPGKAPKLLIYSASYGQSGVPSRFSGSGSGTDFTLTISSLQPEDFATYYCQQYYSTPWTFGQGTKVEIKRGLAVSTISSFFPPGYQIYIWAPLAGTCGVLLLSLVITLYCKRGRKKLLYIFKQPFMRPVQTTQEEDGCSCRFPEEEEGGCELRVKFSRSADAPAYQQGQNQLYNELNLGRREEYDVLDKRRGRDPEMGGKPRRKNPQEGLYNELQKDKMAEAYSEIGMKGERRRGKGHDGLYQGLSTATKDTYDALHMQALPPR

SEQ ID NO: 206461 - protein, 470 aa, Artificial Sequence
  Description of Artificial Sequence: Synthetic Chimeric Antigen Receptor
MALPVTALLLPLALLLHAARPEVQLVESGGGLVQPGRSLRLSCTASGFTFTDYYMSWVRQAPGKGLEWVGLIRSKADGYTTEYAASVKGRFTISRDDSKSIAYLQMNSLKTEDTAVYYCARDAAYYSYYSPEGAMDYWGQGTLVTVSSGGGGSGGGGSGGGGSMADYKDIQMTQSPSSVSASVGDRVTITCRASQNVDSAVAWYQQKPGKAPKLLIYSASYRQSGVPSRFSGSGSGTDFTLTISSLQPEDFATYYCQQYYSTPWTFGQGTKVEIKRGLAVSTISSFFPPGYQIYIWAPLAGTCGVLLLSLVITLYCKRGRKKLLYIFKQPFMRPVQTTQEEDGCSCRFPEEEEGGCELRVKFSRSADAPAYQQGQNQLYNELNLGRREEYDVLDKRRGRDPEMGGKPRRKNPQEGLYNELQKDKMAEAYSEIGMKGERRRGKGHDGLYQGLSTATKDTYDALHMQALPPR

SEQ ID NO: 206462 - protein, 470 aa, Artificial Sequence
  Description of Artificial Sequence: Synthetic Chimeric Antigen Receptor
MALPVTALLLPLALLLHAARPEVQLVESGGGLVQPGRSLRLSCTASGFTFTDYYMSWVRQAPGKGLEWVGLIRSKADGYTTEYAASVKGRFTISRDDSKSIAYLQMNSLKTEDTAVYYCARDAAYYSYYSPEGAMDYWGQGTLVTVSSGGGGSGGGGSGGGGSMADYKDIQMTQSPSSVSASVGDRVTITCRASQNVDSAVAWYQQKPGKAPKLLIYSASYRYSGVPSRFSGSGSGTDFTLTISSLQPEDFATYYCQQYYSTPWTFGQGTKVEIKRGLAVSTISSFFPPGYQIYIWAPLAGTCGVLLLSLVITLYCKRGRKKLLYIFKQPFMRPVQTTQEEDGCSCRFPEEEEGGCELRVKFSRSADAPAYQQGQNQLYNELNLGRREEYDVLDKRRGRDPEMGGKPRRKNPQEGLYNELQKDKMAEAYSEIGMKGERRRGKGHDGLYQGLSTATKDTYDALHMQALPPR

SEQ ID NO: 206463 - protein, 470 aa, Artificial Sequence
  Description of Artificial Sequence: Synthetic Chimeric Antigen Receptor
MALPVTALLLPLALLLHAARPEVQLVESGGGLVQPGRSLRLSCTASGFTFTDYYMSWVRQAPGKGLEWVGLIRSKADGYTTEYAASVKGRFTISRDDSKSIAYLQMNSLKTEDTAVYYCARDAAYYSYYSPEGAMDYWGQGTLVTVSSGGGGSGGGGSGGGGSMADYKDIVMTQSPSSVSASVGDRVTITCRASQNVDSAVAWYQQKPGKAPKALIYSASYRYSGVPSRFSGRGSGTDFTLTISSLQPEDFATYYCQQYYSTPWTFGQGTKVEIKRGLAVSTISSFFPPGYQIYIWAPLAGTCGVLLLSLVITLYCKRGRKKLLYIFKQPFMRPVQTTQEEDGCSCRFPEEEEGGCELRVKFSRSADAPAYQQGQNQLYNELNLGRREEYDVLDKRRGRDPEMGGKPRRKNPQEGLYNELQKDKMAEAYSEIGMKGERRRGKGHDGLYQGLSTATKDTYDALHMQALPPR

SEQ ID NO: 206464 - protein, 470 aa, Artificial Sequence
  Description of Artificial Sequence: Synthetic Chimeric Antigen Receptor
MALPVTALLLPLALLLHAARPEVQLVESGGGLVQPGRSLRLSCTASGFTFTDYYMSWVRQAPGKGLEWVGLIRSKADGYTTEYSASVKGRFTISRDDSKSIAYLQMNSLKTEDTAVYYCARDAAYYSYYSPEGAMDYWGQGTLVTVSSGGGGSGGGGSGGGGSMADYKDIQMTQSPSSVSASVGDRVTITCRASQNVDSAVAWYQQKPGKAPKALIYSASYRYSGVPSRFSGRGSGTDFTLTISSLQPEDFATYYCQQYYSTPWTFGQGTKVEIKRGLAVSTISSFFPPGYQIYIWAPLAGTCGVLLLSLVITLYCKRGRKKLLYIFKQPFMRPVQTTQEEDGCSCRFPEEEEGGCELRVKFSRSADAPAYQQGQNQLYNELNLGRREEYDVLDKRRGRDPEMGGKPRRKNPQEGLYNELQKDKMAEAYSEIGMKGERRRGKGHDGLYQGLSTATKDTYDALHMQALPPR

SEQ ID NO: 206465 - protein, 470 aa, Artificial Sequence
  Description of Artificial Sequence: Synthetic Chimeric Antigen Receptor
MALPVTALLLPLALLLHAARPEVQLVESGGGLVQPGRSLRLSCTASGFTFTDYYMSWVRQAPGKGLEWVGLIRSKADGYTTEYSASVKGRFTISRDDSKSIAYLQMNSLKTEDTAVYYCARDAAYYSYYSPEGAMDYWGQGTLVTVSSGGGGSGGGGSGGGGSMADYKDIQMTQSPSSVSASVGDRVTITCRASQNVDSAVAWYQQKPGKAPKALIYSASYRYSGVPSRFSGSGSGTDFTLTISSLQPEDFATYYCQQYYSTPWTFGQGTKVEIKRGLAVSTISSFFPPGYQIYIWAPLAGTCGVLLLSLVITLYCKRGRKKLLYIFKQPFMRPVQTTQEEDGCSCRFPEEEEGGCELRVKFSRSADAPAYQQGQNQLYNELNLGRREEYDVLDKRRGRDPEMGGKPRRKNPQEGLYNELQKDKMAEAYSEIGMKGERRRGKGHDGLYQGLSTATKDTYDALHMQALPPR

SEQ ID NO: 206466 - protein, 470 aa, Artificial Sequence
  Description of Artificial Sequence: Synthetic Chimeric Antigen Receptor
MALPVTALLLPLALLLHAARPEVQLVESGGGLVQPGRSLRLSCTASGFTFTDYYMSWVRQAPGKGLEWVGLIRSKADGYTTEYSASVKGRFTISRDDSKSIAYLQMNSLKTEDTAVYYCARDAAYYSYYSPEGAMDYWGQGTLVTVSSGGGGSGGGGSGGGGSMADYKDIQMTQSPSSVSASVGDRVTITCRASQNVDSAVAWYQQKPGKAPKLLIYSASYGQSGVPSRFSGSGSGTDFTLTISSLQPEDFATYYCQQYYSTPWTFGQGTKVEIKRGLAVSTISSFFPPGYQIYIWAPLAGTCGVLLLSLVITLYCKRGRKKLLYIFKQPFMRPVQTTQEEDGCSCRFPEEEEGGCELRVKFSRSADAPAYQQGQNQLYNELNLGRREEYDVLDKRRGRDPEMGGKPRRKNPQEGLYNELQKDKMAEAYSEIGMKGERRRGKGHDGLYQGLSTATKDTYDALHMQALPPR

SEQ ID NO: 206467 - protein, 470 aa, Artificial Sequence
  Description of Artificial Sequence: Synthetic Chimeric Antigen Receptor
MALPVTALLLPLALLLHAARPEVQLVESGGGLVQPGRSLRLSCTASGFTFTDYYMSWVRQAPGKGLEWVGLIRSKADGYTTEYSASVKGRFTISRDDSKSIAYLQMNSLKTEDTAVYYCARDAAYYSYYSPEGAMDYWGQGTLVTVSSGGGGSGGGGSGGGGSMADYKDIQMTQSPSSVSASVGDRVTITCRASQNVDSAVAWYQQKPGKAPKLLIYSASYRQSGVPSRFSGSGSGTDFTLTISSLQPEDFATYYCQQYYSTPWTFGQGTKVEIKRGLAVSTISSFFPPGYQIYIWAPLAGTCGVLLLSLVITLYCKRGRKKLLYIFKQPFMRPVQTTQEEDGCSCRFPEEEEGGCELRVKFSRSADAPAYQQGQNQLYNELNLGRREEYDVLDKRRGRDPEMGGKPRRKNPQEGLYNELQKDKMAEAYSEIGMKGERRRGKGHDGLYQGLSTATKDTYDALHMQALPPR

SEQ ID NO: 206468 - protein, 470 aa, Artificial Sequence
  Description of Artificial Sequence: Synthetic Chimeric Antigen Receptor
MALPVTALLLPLALLLHAARPEVQLVESGGGLVQPGRSLRLSCTASGFTFTDYYMSWVRQAPGKGLEWVGLIRSKADGYTTEYSASVKGRFTISRDDSKSIAYLQMNSLKTEDTAVYYCARDAAYYSYYSPEGAMDYWGQGTLVTVSSGGGGSGGGGSGGGGSMADYKDIQMTQSPSSVSASVGDRVTITCRASQNVDSAVAWYQQKPGKAPKLLIYSASYRYSGVPSRFSGSGSGTDFTLTISSLQPEDFATYYCQQYYSTPWTFGQGTKVEIKRGLAVSTISSFFPPGYQIYIWAPLAGTCGVLLLSLVITLYCKRGRKKLLYIFKQPFMRPVQTTQEEDGCSCRFPEEEEGGCELRVKFSRSADAPAYQQGQNQLYNELNLGRREEYDVLDKRRGRDPEMGGKPRRKNPQEGLYNELQKDKMAEAYSEIGMKGERRRGKGHDGLYQGLSTATKDTYDALHMQALPPR

SEQ ID NO: 206469 - protein, 470 aa, Artificial Sequence
  Description of Artificial Sequence: Synthetic Chimeric Antigen Receptor
MALPVTALLLPLALLLHAARPEVQLVESGGGLVQPGRSLRLSCTASGFTFTDYYMSWVRQAPGKGLEWVGLIRSKADGYTTEYSASVKGRFTISRDDSKSIAYLQMNSLKTEDTAVYYCARDAAYYSYYSPEGAMDYWGQGTLVTVSSGGGGSGGGGSGGGGSMADYKDIVMTQSPSSVSASVGDRVTITCRASQNVDSAVAWYQQKPGKAPKALIYSASYRYSGVPSRFSGRGSGTDFTLTISSLQPEDFATYYCQQYYSTPWTFGQGTKVEIKRGLAVSTISSFFPPGYQIYIWAPLAGTCGVLLLSLVITLYCKRGRKKLLYIFKQPFMRPVQTTQEEDGCSCRFPEEEEGGCELRVKFSRSADAPAYQQGQNQLYNELNLGRREEYDVLDKRRGRDPEMGGKPRRKNPQEGLYNELQKDKMAEAYSEIGMKGERRRGKGHDGLYQGLSTATKDTYDALHMQALPPR

SEQ ID NO: 206470 - protein, 470 aa, Artificial Sequence
  Description of Artificial Sequence: Synthetic Chimeric Antigen Receptor
MALPVTALLLPLALLLHAARPEVQLVESGGGLVQPGRSLRLSCTASGFTFTDYYMSWVRQAPGKGLEWVGLIRSKADGYTTEYSASVKGRFTISRDDSKSILYLQMNSLKTEDTAVYYCARDAAYYSYYSPEGAMDYWGQGTLVTVSSGGGGSGGGGSGGGGSMADYKDIQMTQSPSSVSASVGDRVTITCRASQNVDSAVAWYQQKPGKAPKALIYSASYRYSGVPSRFSGRGSGTDFTLTISSLQPEDFATYYCQQYYSTPWTFGQGTKVEIKRGLAVSTISSFFPPGYQIYIWAPLAGTCGVLLLSLVITLYCKRGRKKLLYIFKQPFMRPVQTTQEEDGCSCRFPEEEEGGCELRVKFSRSADAPAYQQGQNQLYNELNLGRREEYDVLDKRRGRDPEMGGKPRRKNPQEGLYNELQKDKMAEAYSEIGMKGERRRGKGHDGLYQGLSTATKDTYDALHMQALPPR

SEQ ID NO: 206471 - protein, 470 aa, Artificial Sequence
  Description of Artificial Sequence: Synthetic Chimeric Antigen Receptor
MALPVTALLLPLALLLHAARPEVQLVESGGGLVQPGRSLRLSCTASGFTFTDYYMSWVRQAPGKGLEWVGLIRSKADGYTTEYSASVKGRFTISRDDSKSILYLQMNSLKTEDTAVYYCARDAAYYSYYSPEGAMDYWGQGTLVTVSSGGGGSGGGGSGGGGSMADYKDIQMTQSPSSVSASVGDRVTITCRASQNVDSAVAWYQQKPGKAPKALIYSASYRYSGVPSRFSGSGSGTDFTLTISSLQPEDFATYYCQQYYSTPWTFGQGTKVEIKRGLAVSTISSFFPPGYQIYIWAPLAGTCGVLLLSLVITLYCKRGRKKLLYIFKQPFMRPVQTTQEEDGCSCRFPEEEEGGCELRVKFSRSADAPAYQQGQNQLYNELNLGRREEYDVLDKRRGRDPEMGGKPRRKNPQEGLYNELQKDKMAEAYSEIGMKGERRRGKGHDGLYQGLSTATKDTYDALHMQALPPR

SEQ ID NO: 206472 - protein, 470 aa, Artificial Sequence
  Description of Artificial Sequence: Synthetic Chimeric Antigen Receptor
MALPVTALLLPLALLLHAARPEVQLVESGGGLVQPGRSLRLSCTASGFTFTDYYMSWVRQAPGKGLEWVGLIRSKADGYTTEYSASVKGRFTISRDDSKSILYLQMNSLKTEDTAVYYCARDAAYYSYYSPEGAMDYWGQGTLVTVSSGGGGSGGGGSGGGGSMADYKDIQMTQSPSSVSASVGDRVTITCRASQNVDSAVAWYQQKPGKAPKLLIYSASYGQSGVPSRFSGSGSGTDFTLTISSLQPEDFATYYCQQYYSTPWTFGQGTKVEIKRGLAVSTISSFFPPGYQIYIWAPLAGTCGVLLLSLVITLYCKRGRKKLLYIFKQPFMRPVQTTQEEDGCSCRFPEEEEGGCELRVKFSRSADAPAYQQGQNQLYNELNLGRREEYDVLDKRRGRDPEMGGKPRRKNPQEGLYNELQKDKMAEAYSEIGMKGERRRGKGHDGLYQGLSTATKDTYDALHMQALPPR

SEQ ID NO: 206473 - protein, 470 aa, Artificial Sequence
  Description of Artificial Sequence: Synthetic Chimeric Antigen Receptor
MALPVTALLLPLALLLHAARPEVQLVESGGGLVQPGRSLRLSCTASGFTFTDYYMSWVRQAPGKGLEWVGLIRSKADGYTTEYSASVKGRFTISRDDSKSILYLQMNSLKTEDTAVYYCARDAAYYSYYSPEGAMDYWGQGTLVTVSSGGGGSGGGGSGGGGSMADYKDIQMTQSPSSVSASVGDRVTITCRASQNVDSAVAWYQQKPGKAPKLLIYSASYRQSGVPSRFSGSGSGTDFTLTISSLQPEDFATYYCQQYYSTPWTFGQGTKVEIKRGLAVSTISSFFPPGYQIYIWAPLAGTCGVLLLSLVITLYCKRGRKKLLYIFKQPFMRPVQTTQEEDGCSCRFPEEEEGGCELRVKFSRSADAPAYQQGQNQLYNELNLGRREEYDVLDKRRGRDPEMGGKPRRKNPQEGLYNELQKDKMAEAYSEIGMKGERRRGKGHDGLYQGLSTATKDTYDALHMQALPPR

SEQ ID NO: 206474 - protein, 470 aa, Artificial Sequence
  Description of Artificial Sequence: Synthetic Chimeric Antigen Receptor
MALPVTALLLPLALLLHAARPEVQLVESGGGLVQPGRSLRLSCTASGFTFTDYYMSWVRQAPGKGLEWVGLIRSKADGYTTEYSASVKGRFTISRDDSKSILYLQMNSLKTEDTAVYYCARDAAYYSYYSPEGAMDYWGQGTLVTVSSGGGGSGGGGSGGGGSMADYKDIQMTQSPSSVSASVGDRVTITCRASQNVDSAVAWYQQKPGKAPKLLIYSASYRYSGVPSRFSGSGSGTDFTLTISSLQPEDFATYYCQQYYSTPWTFGQGTKVEIKRGLAVSTISSFFPPGYQIYIWAPLAGTCGVLLLSLVITLYCKRGRKKLLYIFKQPFMRPVQTTQEEDGCSCRFPEEEEGGCELRVKFSRSADAPAYQQGQNQLYNELNLGRREEYDVLDKRRGRDPEMGGKPRRKNPQEGLYNELQKDKMAEAYSEIGMKGERRRGKGHDGLYQGLSTATKDTYDALHMQALPPR

SEQ ID NO: 206475 - protein, 470 aa, Artificial Sequence
  Description of Artificial Sequence: Synthetic Chimeric Antigen Receptor
MALPVTALLLPLALLLHAARPEVQLVESGGGLVQPGRSLRLSCTASGFTFTDYYMSWVRQAPGKGLEWVGLIRSKADGYTTEYSASVKGRFTISRDDSKSILYLQMNSLKTEDTAVYYCARDAAYYSYYSPEGAMDYWGQGTLVTVSSGGGGSGGGGSGGGGSMADYKDIVMTQSPSSVSASVGDRVTITCRASQNVDSAVAWYQQKPGKAPKALIYSASYRYSGVPSRFSGRGSGTDFTLTISSLQPEDFATYYCQQYYSTPWTFGQGTKVEIKRGLAVSTISSFFPPGYQIYIWAPLAGTCGVLLLSLVITLYCKRGRKKLLYIFKQPFMRPVQTTQEEDGCSCRFPEEEEGGCELRVKFSRSADAPAYQQGQNQLYNELNLGRREEYDVLDKRRGRDPEMGGKPRRKNPQEGLYNELQKDKMAEAYSEIGMKGERRRGKGHDGLYQGLSTATKDTYDALHMQALPPR

SEQ ID NO: 206476 - protein, 470 aa, Artificial Sequence
  Description of Artificial Sequence: Synthetic Chimeric Antigen Receptor
QIQLVQSGPELKKPGETVKISCKASGYIFTNYGMNWVKQAPGKSFKWMGWINTYTGESTYSADFKGRFAFSLETSASTAYLHINDLKNEDTATYFCARSGGYDPMDYWGQGTSVTVSSGGGGSGGGGSGGGGSDIVLTQSPASLAVSLGQRATISCRASESVDNYGNTFMHWYQQKPGQPPKLLIYRASNLESGIPARFSGSGSRTDFTLTINPVEADDVATYYCQQSNEDPPTFGAGTKLELKTTTPAPRPPTPAPTIASQPLSLRPEACRPAAGGAVHTRGLDFACDIISFFLALTSTALLFLLFFLTLRFSVVKRGRKKLLYIFKQPFMRPVQTTQEEDGCSCRFPEEEEGGCELRVKFSRSADAPAYQQGQNQLYNELNLGRREEYDVLDKRRGRDPEMGGKPRRKNPQEGLYNELQKDKMAEAYSEIGMKGERRRGKGHDGLYQGLSTATKDTYDALHMQALPPR

SEQ ID NO: 206477 - protein, 470 aa, Artificial Sequence
  Description of Artificial Sequence: Synthetic Chimeric Antigen Receptor
VQLQESGPGLVKPSQSLSLTCSVTDYSITSGYYWNWIRQFPGNKLEWMGYISYDGSNNYNPSLKNRISITRDTSKNQFFLKLSSVTTEDTATYYCSRGEGFYFDSWGQGTTLTVSSARSGGGGSGGGGSGGGGSDIMMSQSPSSLAVSVGEKFTMTCKSSQSLFFGSTQKNYLAWYQQKPGQSPKLLIYWASTRESGVPDRFTGSGSGTDFTLAISSVMPEDLAVYYCQQYYNYPWTFGGGTKLEIKTTTPAPRPPTPAPTIASQPLSLRPEACRPAAGGAVHTRGLDFACDIYIWAPLAGTCGVLLLSLVITLYCKRGRKKLLYIFKQPFMRPVQTTQEEDGCSCRFPEEEEGGCELRVKFSRSADAPAYQQGQNQLYNELNLGRREEYDVLDKRRGRDPEMGGKPRRKNPQEGLYNELQKDKMAEAYSEIGMKGERRRGKGHDGLYQGLSTATKDTYDALHMQALPPR

SEQ ID NO: 206478 - protein, 471 aa, Artificial Sequence
  Description of Artificial Sequence: Synthetic Chimeric Antigen Receptor
EVQLVESGGGLVQPGRSLRLSCTASGFTFTDYYMSWVRQAPGKGLEWVGLIRSKADGYTTEYAASVKGRFTISRDDSQSIAYLQMNSLKTEDTAVYYCARDAAYYSYYSPEGAMDYGQGTLVTVSSGGGGSGGGGSGGGGSDIQMTQSPSSVSASVGDRVTITCRASQNVDSAVAYQQKPGKAPKALIYSASYRYSGVPSRFSGSGSGTDFTLTISSLQPEDFATYYCQQYYSTPWTFGQGTKVEIKRTTTPAPRPPTPAPTIASQPLSLRPEACRPAAGGAVHTRGLDFACDIYIWAPLAGTCGVLLLSLVITLYCKRGRKKLLYIFKQPFMRPVQTTQEEDGCSCRFPEEEEGGCELRVKFSRSADAPAYQQGQNQLYNELNLGRREEYDVLDKRRGRDPEMGGKPRRKNPQEGLYNELQKDKMAEAYSEIGMKGERRRGKGHDGLYQGLSTATKDTYDALHMQALPPR

SEQ ID NO: 206479 - protein, 471 aa, Artificial Sequence
  Description of Artificial Sequence: Synthetic Chimeric Antigen Receptor
EVQLVESGGGLVQPGRSLRLSCTASGFTFTDYYMSWVRQAPGKGLEWVGLIRSKADGYTTEYAASVKGRFTISRDDSQSIAYLQMNSLKTEDTAVYYCARDAAYYSYYSPEGAMDYGQGTLVTVSSGGGGSGGGGSGGGGSDIVMTQSPSSVSASVGDRVTITCRASQNVDSAVAYQQKPGKAPKALIYSASYRYSGVPSRFSGRGSGTDFTLTISSLQPEDFATYYCQQYYSTPWTFGQGTKVEIKRTTTPAPRPPTPAPTIASQPLSLRPEACRPAAGGAVHTRGLDFACDIYIWAPLAGTCGVLLLSLVITLYCKRGRKKLLYIFKQPFMRPVQTTQEEDGCSCRFPEEEEGGCELRVKFSRSADAPAYQQGQNQLYNELNLGRREEYDVLDKRRGRDPEMGGKPRRKNPQEGLYNELQKDKMAEAYSEIGMKGERRRGKGHDGLYQGLSTATKDTYDALHMQALPPR

SEQ ID NO: 206480 - protein, 471 aa, Artificial Sequence
  Description of Artificial Sequence: Synthetic Chimeric Antigen Receptor
EVQLVESGGGLVQPGRSLRLSCTASGFTFTDYYMSWVRQAPGKGLEWVGLIRSKADGYTTEYSASVKGRFTISRDDSQSIAYLQMNSLKTEDTAVYYCARDAAYYSYYSPEGAMDYGQGTLVTVSSGGGGSGGGGSGGGGSDIQMTQSPSSVSASVGDRVTITCKASQNVDSAVAYQQKPGKAPKLLIYSASYRYSGVPSRFSGSGSGTDFTLTISSLQPEDFATYYCQQYYSTPWTFGQGTKVEIKRTTTPAPRPPTPAPTIASQPLSLRPEACRPAAGGAVHTRGLDFACDIYIWAPLAGTCGVLLLSLVITLYCKRGRKKLLYIFKQPFMRPVQTTQEEDGCSCRFPEEEEGGCELRVKFSRSADAPAYQQGQNQLYNELNLGRREEYDVLDKRRGRDPEMGGKPRRKNPQEGLYNELQKDKMAEAYSEIGMKGERRRGKGHDGLYQGLSTATKDTYDALHMQALPPR

SEQ ID NO: 206481 - protein, 471 aa, Artificial Sequence
  Description of Artificial Sequence: Synthetic Chimeric Antigen Receptor
EVQLVESGGGLVQPGRSLRLSCTASGFTFTDYYMSWVRQAPGKGLEWVGLIRSKADGYTTEYSASVKGRFTISRDDSQSIAYLQMNSLKTEDTAVYYCARDAAYYSYYSPEGAMDYGQGTLVTVSSGGGGSGGGGSGGGGSDIQMTQSPSSVSASVGDRVTITCRASQVDSAVAWYQQKPGKAPKALIYSASYRYSGVPSRFSGSGSGTDFTLTISSLQPEDFATYYCGQYYSTPWTFGQGTKVEIKRTTTPAPRPPTPAPTIASQPLSLRPEACRPAAGGAVHTRGLDFACDIYIWAPLAGTCGVLLLSLVITLYCKRGRKKLLYIFKQPFMRPVQTTQEEDGCSCRFPEEEEGGCELRVKFSRSADAPAYQQGQNQLYNELNLGRREEYDVLDKRRGRDPEMGGKPRRKNPQEGLYNELQKDKMAEAYSEIGMKGERRRGKGHDGLYQGLSTATKDTYDALHMQALPPR

SEQ ID NO: 206482 - protein, 473 aa, Artificial Sequence
  Description of Artificial Sequence: Synthetic Chimeric Antigen Receptor
EVQLVESGGGLVQPGRSLRLSCTASGFTFTDYYMSWVRQAPGKGLEWVGLIRSKADGYTTEYSASVKGRFTISRDDSKSILYLQMNSLKTEDTAVYYCARDAAYYSYYSPEGAMDYWGQGTLVTVSSGGGGSGGGGSGGGGSDIVMTQSPSSVSASVGDRVTITCRASQNVDSAVAWYQQKPGKAPKALIYSASYRYSGVPSRFSGRGSGTDFTLTISSLQPEDFATYYCQQYYSTPWTFGQGTKVEIKRTTTPAPRPPTPAPTIASQPLSLRPEACRPAAGGAVHTRGLDFACDIYIWAPLAGTCGVLLLSLVITLYCKRGRKKLLYIFKQPFMRPVQTTQEEDGCSCRFPEEEEGGCELRVKFSRSADAPAYQQGQNQLYNELNLGRREEYDVLDKRRGRDPEMGGKPRRKNPQEGLYNELQKDKMAEAYSEIGMKGERRRGKGHDGLYQGLSTATKDTYDALHMQALPPR

SEQ ID NO: 206483 - protein, 478 aa, Artificial Sequence
  Description of Artificial Sequence: Synthetic Chimeric Antigen Receptor
EVKLVESGGGLVQPGGSLSLSCAASGFTFTDYYMSWVRQPPGKALEWLALIRSKADGYTTEYSASVKGRFTLSRDDSQSILYLQMNALRPEDSATYYCARDAAYYSYYSPEGAMDYWGQGTSVTVSSGGGGSGGGGSGGGGSMADYKDIVMTQSHKFMSTSVGDRVNITCKASQNVDSAVAWYQQKPGQSPKALIYSASYRYSGVPDRFTGRGSGTDFTLTISSVQAEDLAVYYCQQYYSTPWTFGGGTKLEIKRTTTPAPRPPTPAPTIASQPLSLRPEACRPAAGGAVHTRGLDFACDIYIWAPLAGTCGVLLLSLVITLYCKRGRKKLLYIFKQPFMRPVQTTQEEDGCSCRFPEEEEGGCELRVKFSRSADAPAYQQGQNQLYNELNLGRREEYDVLDKRRGRDPEMGGKPRRKNPQEGLYNELQKDKMAEAYSEIGMKGERRRGKGHDGLYQGLSTATKDTYDALHMQALPPR

SEQ ID NO: 206484 - protein, 481 aa, Artificial Sequence
  Description of Artificial Sequence: Synthetic Chimeric Antigen Receptor
EVKLVESGGGLVQPGGSLSLSCAASGFTFTDYYMSWVRQPPGKALEWLALIRSKADGYTTEYSASVKGRFTLSRDDSQSILYLQMNALRPEDSATYYCARDAAYYSYYSPEGAMDYWGQGTSVTVSSGGGGSGGGGSGGGGSMADYKDIVMTQSHKFMSTSVGDRVNITCKASQNVDSAVAWYQQKPGQSPKALIYSASYRYSGVPDRFTGRGSGTDFTLTISSVQAEDLAVYYCQQYYSTPWTFGGGTKLEIKRTTTPAPRPPTPAPTIASQPLSLRPEACRPAAGGAVHTRGLDFACDIISFFLALTSTALLFLLFFLTLRFSVVKRGRKKLLYIFKQPFMRPVQTTQEEDGCSCRFPEEEEGGCELRVKFSRSADAPAYQQGQNQLYNELNLGRREEYDVLDKRRGRDPEMGGKPRRKNPQEGLYNELQKDKMAEAYSEIGMKGERRRGKGHDGLYQGLSTATKDTYDALHMQALPPR

SEQ ID NO: 206485 - protein, 484 aa, Artificial Sequence
  Description of Artificial Sequence: Synthetic Chimeric Antigen Receptor
MGWSWIFLFLVSGTGGVLSEVQLQQSGPELVKPGASVKMSCKASGYTFTDYYMKWVKQSHGKSLEWIGDIIPSNGATFYNQKFKGKATLTVDRSSSTAYMHLNSLTSEDSAVYYCTRSHLLRASWFAYWGQGTLVTVSAASGGGGSGGGGSGGGGSMESQTQVLMSLLFWVSGTCGDFVMTQSPSSLTVTAGEKVTMSCKSSQSLLNSGNQKNYLTWYLQKPGQPPKLLIYWASTRESGVPDRFTGSGSGTDFTLTISSVQAEDLAVYYCQNDYSYPYTFGGGTKLEIKRGLAVSTISSFFPPGYQIYIWAPLAGTCGVLLLSLVITLYCKRGRKKLLYIFKQPFMRPVQTTQEEDGCSCRFPEEEEGGCELRVKFSRSADAPAYQQGQNQLYNELNLGRREEYDVLDKRRGRDPEMGGKPRRKNPQEGLYNELQKDKMAEAYSEIGMKGERRRGKGHDGLYQGLSTATKDTYDALHMQALPPR

SEQ ID NO: 206486 - protein, 486 aa, Artificial Sequence
  Description of Artificial Sequence: Synthetic Chimeric Antigen Receptor
MALPVTALLLPLALLLHAARPDVQLTQSPSFLSASVGDRVTITCRASKSISKDLAWYQQKPGKAPKLLIYSGSTLQSGVPSRFSGSGSGTEFTLTISSLQPEDFATYYCQQHNKYPYTFGGGTKVEIKGGGGSGGGGSGGGGSGGGGSEVQLVESGGGLVQPGGSLRLSCAASGYTFTSYWMNWVRQAPGKGLVWVSRIDPYDSETHYNQKFKDRFTISVDKAKSTAYLQMNSLRAEDTAVYYCARGNWDDYWGQGTTVTVSSTTTPAPRPPTPAPTIASQPLSLRPEACRPAAGGAVHTRGLDFACDIYIWAPLAGTCGVLLLSLVITLYCKRGRKKLLYIFKQPFMRPVQTTQEEDGCSCRFPEEEEGGCELRVKFSRSADAPAYKQGQNQLYNELNLGRREEYDVLDKRRGRDPEMGGKPRRKNPQEGLYNELQKDKMAEAYSEIGMKGERRRGKGHDGLYQGLSTATKDTYDALHMQALPPR

SEQ ID NO: 206487 - protein, 486 aa, Artificial Sequence
  Description of Artificial Sequence: Synthetic Chimeric Antigen Receptor
MALPVTALLLPLALLLHAARPDVQLTQSPSFLSASVGDRVTITCRASKSISKDLAWYQQKPGKAPKLLIYSGSTLQSGVPSRFSGSGSGTEFTLTISSLQPEDFATYYCQQHNKYPYTFGGGTKVEIKGGGGSGGGGSGGGGSGGGGSEVQLVQSGAEVKKPGESLRISCKGSGYTFTSYWMNWVRQMPGKGLEWMGRIDPYDSETHYNQKFKDHVTISVDKSISTAYLQWSSLKASDTAMYYCARGNWDDYWGQGTTVTVSSTTTPAPRPPTPAPTIASQPLSLRPEACRPAAGGAVHTRGLDFACDIYIWAPLAGTCGVLLLSLVITLYCKRGRKKLLYIFKQPFMRPVQTTQEEDGCSCRFPEEEEGGCELRVKFSRSADAPAYKQGQNQLYNELNLGRREEYDVLDKRRGRDPEMGGKPRRKNPQEGLYNELQKDKMAEAYSEIGMKGERRRGKGHDGLYQGLSTATKDTYDALHMQALPPR

SEQ ID NO: 206488 - protein, 486 aa, Artificial Sequence
  Description of Artificial Sequence: Synthetic Chimeric Antigen Receptor
MALPVTALLLPLALLLHAARPDVQLTQSPSFLSASVGDRVTITCRASKSISKDLAWYQQKPGKAPKLLIYSGSTLQSGVPSRFSGSGSGTEFTLTISSLQPEDFATYYCQQHNKYPYTFGGGTKVEIKGGGGSGGGGSGGGGSGGGGSQVQLVQSGAEVKKPGASVKVSCKASGYTFTSYWMNWVRQAPGQGLEWMGRIDPYDSETHYNQKFKDRVTMTVDKSTSTAYMELSSLRSEDTAVYYCARGNWDDYWGQGTTVTVSSTTTPAPRPPTPAPTIASQPLSLRPEACRPAAGGAVHTRGLDFACDIYIWAPLAGTCGVLLLSLVITLYCKRGRKKLLYIFKQPFMRPVQTTQEEDGCSCRFPEEEEGGCELRVKFSRSADAPAYKQGQNQLYNELNLGRREEYDVLDKRRGRDPEMGGKPRRKNPQEGLYNELQKDKMAEAYSEIGMKGERRRGKGHDGLYQGLSTATKDTYDALHMQALPPR

SEQ ID NO: 206489 - protein, 486 aa, Artificial Sequence
  Description of Artificial Sequence: Synthetic Chimeric Antigen Receptor
MALPVTALLLPLALLLHAARPDVQLTQSPSFLSASVGDRVTITCRASKSISKDLAWYQQKPGKAPKLLIYSGSTLQSGVPSRFSGSGSGTEFTLTISSLQPEDFATYYCQQHNKYPYTFGGGTKVEIKGGGGSGGGGSGGGGSGGGGSQVQLVQSGSELKKPGASVKVSCKASGYTFTSYWMNWVRQAPGQGLEWMGRIDPYDSETHYNQKFKDRFVFSVDKSVSTAYLQISSLKAEDTAVYYCARGNWDDYWGQGTTVTVSSTTTPAPRPPTPAPTIASQPLSLRPEACRPAAGGAVHTRGLDFACDIYIWAPLAGTCGVLLLSLVITLYCKRGRKKLLYIFKQPFMRPVQTTQEEDGCSCRFPEEEEGGCELRVKFSRSADAPAYKQGQNQLYNELNLGRREEYDVLDKRRGRDPEMGGKPRRKNPQEGLYNELQKDKMAEAYSEIGMKGERRRGKGHDGLYQGLSTATKDTYDALHMQALPPR

SEQ ID NO: 206490 - protein, 486 aa, Artificial Sequence
  Description of Artificial Sequence: Synthetic Chimeric Antigen Receptor
MALPVTALLLPLALLLHAARPDVVMTQSPAFLSVTPGEKVTITCRASKSISKDLAWYQQKPDQAPKLLIYSGSTLQSGVPSRFSGSGSGTDFTFTISSLEAEDAATYYCQQHNKYPYTFGGGTKVEIKGGGGSGGGGSGGGGSGGGGSEVQLVESGGGLVQPGGSLRLSCAASGYTFTSYWMNWVRQAPGKGLVWVSRIDPYDSETHYNQKFKDRFTISVDKAKSTAYLQMNSLRAEDTAVYYCARGNWDDYWGQGTTVTVSSTTTPAPRPPTPAPTIASQPLSLRPEACRPAAGGAVHTRGLDFACDIYIWAPLAGTCGVLLLSLVITLYCKRGRKKLLYIFKQPFMRPVQTTQEEDGCSCRFPEEEEGGCELRVKFSRSADAPAYKQGQNQLYNELNLGRREEYDVLDKRRGRDPEMGGKPRRKNPQEGLYNELQKDKMAEAYSEIGMKGERRRGKGHDGLYQGLSTATKDTYDALHMQALPPR

SEQ ID NO: 206491 - protein, 486 aa, Artificial Sequence
  Description of Artificial Sequence: Synthetic Chimeric Antigen Receptor
MALPVTALLLPLALLLHAARPDVVMTQSPAFLSVTPGEKVTITCRASKSISKDLAWYQQKPDQAPKLLIYSGSTLQSGVPSRFSGSGSGTDFTFTISSLEAEDAATYYCQQHNKYPYTFGGGTKVEIKGGGGSGGGGSGGGGSGGGGSEVQLVQSGAEVKKPGESLRISCKGSGYTFTSYWMNWVRQMPGKGLEWMGRIDPYDSETHYNQKFKDHVTISVDKSISTAYLQWSSLKASDTAMYYCARGNWDDYWGQGTTVTVSSTTTPAPRPPTPAPTIASQPLSLRPEACRPAAGGAVHTRGLDFACDIYIWAPLAGTCGVLLLSLVITLYCKRGRKKLLYIFKQPFMRPVQTTQEEDGCSCRFPEEEEGGCELRVKFSRSADAPAYKQGQNQLYNELNLGRREEYDVLDKRRGRDPEMGGKPRRKNPQEGLYNELQKDKMAEAYSEIGMKGERRRGKGHDGLYQGLSTATKDTYDALHMQALPPR

SEQ ID NO: 206492 - protein, 486 aa, Artificial Sequence
  Description of Artificial Sequence: Synthetic Chimeric Antigen Receptor
MALPVTALLLPLALLLHAARPDVVMTQSPAFLSVTPGEKVTITCRASKSISKDLAWYQQKPDQAPKLLIYSGSTLQSGVPSRFSGSGSGTDFTFTISSLEAEDAATYYCQQHNKYPYTFGGGTKVEIKGGGGSGGGGSGGGGSGGGGSQVQLVQSGAEVKKPGASVKVSCKASGYTFTSYWMNWVRQAPGQGLEWMGRIDPYDSETHYNQKFKDRVTMTVDKSTSTAYMELSSLRSEDTAVYYCARGNWDDYWGQGTTVTVSSTTTPAPRPPTPAPTIASQPLSLRPEACRPAAGGAVHTRGLDFACDIYIWAPLAGTCGVLLLSLVITLYCKRGRKKLLYIFKQPFMRPVQTTQEEDGCSCRFPEEEEGGCELRVKFSRSADAPAYKQGQNQLYNELNLGRREEYDVLDKRRGRDPEMGGKPRRKNPQEGLYNELQKDKMAEAYSEIGMKGERRRGKGHDGLYQGLSTATKDTYDALHMQALPPR

SEQ ID NO: 206493 - protein, 486 aa, Artificial Sequence
  Description of Artificial Sequence: Synthetic Chimeric Antigen Receptor
MALPVTALLLPLALLLHAARPDVVMTQSPAFLSVTPGEKVTITCRASKSISKDLAWYQQKPDQAPKLLIYSGSTLQSGVPSRFSGSGSGTDFTFTISSLEAEDAATYYCQQHNKYPYTFGGGTKVEIKGGGGSGGGGSGGGGSGGGGSQVQLVQSGSELKKPGASVKVSCKASGYTFTSYWMNWVRQAPGQGLEWMGRIDPYDSETHYNQKFKDRFVFSVDKSVSTAYLQISSLKAEDTAVYYCARGNWDDYWGQGTTVTVSSTTTPAPRPPTPAPTIASQPLSLRPEACRPAAGGAVHTRGLDFACDIYIWAPLAGTCGVLLLSLVITLYCKRGRKKLLYIFKQPFMRPVQTTQEEDGCSCRFPEEEEGGCELRVKFSRSADAPAYKQGQNQLYNELNLGRREEYDVLDKRRGRDPEMGGKPRRKNPQEGLYNELQKDKMAEAYSEIGMKGERRRGKGHDGLYQGLSTATKDTYDALHMQALPPR

SEQ ID NO: 206494 - protein, 486 aa, Artificial Sequence
  Description of Artificial Sequence: Synthetic Chimeric Antigen Receptor
MALPVTALLLPLALLLHAARPDVVMTQSPDSLAVSLGERATINCRASKSISKDLAWYQQKPGQPPKLLIYSGSTLQSGVPDRFSGSGSGTDFTLTISSLQAEDVAVYYCQQHNKYPYTFGGGTKVEIKGGGGSGGGGSGGGGSGGGGSEVQLVESGGGLVQPGGSLRLSCAASGYTFTSYWMNWVRQAPGKGLVWVSRIDPYDSETHYNQKFKDRFTISVDKAKSTAYLQMNSLRAEDTAVYYCARGNWDDYWGQGTTVTVSSTTTPAPRPPTPAPTIASQPLSLRPEACRPAAGGAVHTRGLDFACDIYIWAPLAGTCGVLLLSLVITLYCKRGRKKLLYIFKQPFMRPVQTTQEEDGCSCRFPEEEEGGCELRVKFSRSADAPAYKQGQNQLYNELNLGRREEYDVLDKRRGRDPEMGGKPRRKNPQEGLYNELQKDKMAEAYSEIGMKGERRRGKGHDGLYQGLSTATKDTYDALHMQALPPR

SEQ ID NO: 206495 - protein, 486 aa, Artificial Sequence
  Description of Artificial Sequence: Synthetic Chimeric Antigen Receptor
MALPVTALLLPLALLLHAARPDVVMTQSPDSLAVSLGERATINCRASKSISKDLAWYQQKPGQPPKLLIYSGSTLQSGVPDRFSGSGSGTDFTLTISSLQAEDVAVYYCQQHNKYPYTFGGGTKVEIKGGGGSGGGGSGGGGSGGGGSEVQLVQSGAEVKKPGESLRISCKGSGYTFTSYWMNWVRQMPGKGLEWMGRIDPYDSETHYNQKFKDHVTISVDKSISTAYLQWSSLKASDTAMYYCARGNWDDYWGQGTTVTVSSTTTPAPRPPTPAPTIASQPLSLRPEACRPAAGGAVHTRGLDFACDIYIWAPLAGTCGVLLLSLVITLYCKRGRKKLLYIFKQPFMRPVQTTQEEDGCSCRFPEEEEGGCELRVKFSRSADAPAYKQGQNQLYNELNLGRREEYDVLDKRRGRDPEMGGKPRRKNPQEGLYNELQKDKMAEAYSEIGMKGERRRGKGHDGLYQGLSTATKDTYDALHMQALPPR

SEQ ID NO: 206496 - protein, 486 aa, Artificial Sequence
  Description of Artificial Sequence: Synthetic Chimeric Antigen Receptor
MALPVTALLLPLALLLHAARPDVVMTQSPDSLAVSLGERATINCRASKSISKDLAWYQQKPGQPPKLLIYSGSTLQSGVPDRFSGSGSGTDFTLTISSLQAEDVAVYYCQQHNKYPYTFGGGTKVEIKGGGGSGGGGSGGGGSGGGGSQVQLVQSGAEVKKPGASVKVSCKASGYTFTSYWMNWVRQAPGQGLEWMGRIDPYDSETHYNQKFKDRVTMTVDKSTSTAYMELSSLRSEDTAVYYCARGNWDDYWGQGTTVTVSSTTTPAPRPPTPAPTIASQPLSLRPEACRPAAGGAVHTRGLDFACDIYIWAPLAGTCGVLLLSLVITLYCKRGRKKLLYIFKQPFMRPVQTTQEEDGCSCRFPEEEEGGCELRVKFSRSADAPAYKQGQNQLYNELNLGRREEYDVLDKRRGRDPEMGGKPRRKNPQEGLYNELQKDKMAEAYSEIGMKGERRRGKGHDGLYQGLSTATKDTYDALHMQALPPR

SEQ ID NO: 206497 - protein, 486 aa, Artificial Sequence
  Description of Artificial Sequence: Synthetic Chimeric Antigen Receptor
MALPVTALLLPLALLLHAARPDVVMTQSPDSLAVSLGERATINCRASKSISKDLAWYQQKPGQPPKLLIYSGSTLQSGVPDRFSGSGSGTDFTLTISSLQAEDVAVYYCQQHNKYPYTFGGGTKVEIKGGGGSGGGGSGGGGSGGGGSQVQLVQSGSELKKPGASVKVSCKASGYTFTSYWMNWVRQAPGQGLEWMGRIDPYDSETHYNQKFKDRFVFSVDKSVSTAYLQISSLKAEDTAVYYCARGNWDDYWGQGTTVTVSSTTTPAPRPPTPAPTIASQPLSLRPEACRPAAGGAVHTRGLDFACDIYIWAPLAGTCGVLLLSLVITLYCKRGRKKLLYIFKQPFMRPVQTTQEEDGCSCRFPEEEEGGCELRVKFSRSADAPAYKQGQNQLYNELNLGRREEYDVLDKRRGRDPEMGGKPRRKNPQEGLYNELQKDKMAEAYSEIGMKGERRRGKGHDGLYQGLSTATKDTYDALHMQALPPR

SEQ ID NO: 206498 - protein, 486 aa, Artificial Sequence
  Description of Artificial Sequence: Synthetic Chimeric Antigen Receptor
MALPVTALLLPLALLLHAARPEVQLVESGGGLVQPGGSLRLSCAASGYTFTSYWMNWVRQAPGKGLVWVSRIDPYDSETHYNQKFKDRFTISVDKAKSTAYLQMNSLRAEDTAVYYCARGNWDDYWGQGTTVTVSSGGGGSGGGGSGGGGSGGGGSDVQLTQSPSFLSASVGDRVTITCRASKSISKDLAWYQQKPGKAPKLLIYSGSTLQSGVPSRFSGSGSGTEFTLTISSLQPEDFATYYCQQHNKYPYTFGGGTKVEIKTTTPAPRPPTPAPTIASQPLSLRPEACRPAAGGAVHTRGLDFACDIYIWAPLAGTCGVLLLSLVITLYCKRGRKKLLYIFKQPFMRPVQTTQEEDGCSCRFPEEEEGGCELRVKFSRSADAPAYKQGQNQLYNELNLGRREEYDVLDKRRGRDPEMGGKPRRKNPQEGLYNELQKDKMAEAYSEIGMKGERRRGKGHDGLYQGLSTATKDTYDALHMQALPPR

SEQ ID NO: 206499 - protein, 486 aa, Artificial Sequence
  Description of Artificial Sequence: Synthetic Chimeric Antigen Receptor
MALPVTALLLPLALLLHAARPEVQLVESGGGLVQPGGSLRLSCAASGYTFTSYWMNWVRQAPGKGLVWVSRIDPYDSETHYNQKFKDRFTISVDKAKSTAYLQMNSLRAEDTAVYYCARGNWDDYWGQGTTVTVSSGGGGSGGGGSGGGGSGGGGSDVVMTQSPAFLSVTPGEKVTITCRASKSISKDLAWYQQKPDQAPKLLIYSGSTLQSGVPSRFSGSGSGTDFTFTISSLEAEDAATYYCQQHNKYPYTFGGGTKVEIKTTTPAPRPPTPAPTIASQPLSLRPEACRPAAGGAVHTRGLDFACDIYIWAPLAGTCGVLLLSLVITLYCKRGRKKLLYIFKQPFMRPVQTTQEEDGCSCRFPEEEEGGCELRVKFSRSADAPAYKQGQNQLYNELNLGRREEYDVLDKRRGRDPEMGGKPRRKNPQEGLYNELQKDKMAEAYSEIGMKGERRRGKGHDGLYQGLSTATKDTYDALHMQALPPR

SEQ ID NO: 206500 - protein, 486 aa, Artificial Sequence
  Description of Artificial Sequence: Synthetic Chimeric Antigen Receptor
MALPVTALLLPLALLLHAARPEVQLVESGGGLVQPGGSLRLSCAASGYTFTSYWMNWVRQAPGKGLVWVSRIDPYDSETHYNQKFKDRFTISVDKAKSTAYLQMNSLRAEDTAVYYCARGNWDDYWGQGTTVTVSSGGGGSGGGGSGGGGSGGGGSDVVMTQSPDSLAVSLGERATINCRASKSISKDLAWYQQKPGQPPKLLIYSGSTLQSGVPDRFSGSGSGTDFTLTISSLQAEDVAVYYCQQHNKYPYTFGGGTKVEIKTTTPAPRPPTPAPTIASQPLSLRPEACRPAAGGAVHTRGLDFACDIYIWAPLAGTCGVLLLSLVITLYCKRGRKKLLYIFKQPFMRPVQTTQEEDGCSCRFPEEEEGGCELRVKFSRSADAPAYKQGQNQLYNELNLGRREEYDVLDKRRGRDPEMGGKPRRKNPQEGLYNELQKDKMAEAYSEIGMKGERRRGKGHDGLYQGLSTATKDTYDALHMQALPPR

SEQ ID NO: 206501 - protein, 486 aa, Artificial Sequence
  Description of Artificial Sequence: Synthetic Chimeric Antigen Receptor
MALPVTALLLPLALLLHAARPEVQLVESGGGLVQPGGSLRLSCAASGYTFTSYWMNWVRQAPGKGLVWVSRIDPYDSETHYNQKFKDRFTISVDKAKSTAYLQMNSLRAEDTAVYYCARGNWDDYWGQGTTVTVSSGGGGSGGGGSGGGGSGGGGSEVVLTQSPATLSLSPGERATLSCRASKSISKDLAWYQQKPGQAPRLLIYSGSTLQSGIPARFSGSGSGTDFTLTISSLEPEDFAVYYCQQHNKYPYTFGGGTKVEIKTTTPAPRPPTPAPTIASQPLSLRPEACRPAAGGAVHTRGLDFACDIYIWAPLAGTCGVLLLSLVITLYCKRGRKKLLYIFKQPFMRPVQTTQEEDGCSCRFPEEEEGGCELRVKFSRSADAPAYKQGQNQLYNELNLGRREEYDVLDKRRGRDPEMGGKPRRKNPQEGLYNELQKDKMAEAYSEIGMKGERRRGKGHDGLYQGLSTATKDTYDALHMQALPPR

SEQ ID NO: 206502 - protein, 486 aa, Artificial Sequence
  Description of Artificial Sequence: Synthetic Chimeric Antigen Receptor
MALPVTALLLPLALLLHAARPEVQLVQSGAEVKKPGESLRISCKGSGYTFTSYWMNWVRQMPGKGLEWMGRIDPYDSETHYNQKFKDHVTISVDKSISTAYLQWSSLKASDTAMYYCARGNWDDYWGQGTTVTVSSGGGGSGGGGSGGGGSGGGGSDVQLTQSPSFLSASVGDRVTITCRASKSISKDLAWYQQKPGKAPKLLIYSGSTLQSGVPSRFSGSGSGTEFTLTISSLQPEDFATYYCQQHNKYPYTFGGGTKVEIKTTTPAPRPPTPAPTIASQPLSLRPEACRPAAGGAVHTRGLDFACDIYIWAPLAGTCGVLLLSLVITLYCKRGRKKLLYIFKQPFMRPVQTTQEEDGCSCRFPEEEEGGCELRVKFSRSADAPAYKQGQNQLYNELNLGRREEYDVLDKRRGRDPEMGGKPRRKNPQEGLYNELQKDKMAEAYSEIGMKGERRRGKGHDGLYQGLSTATKDTYDALHMQALPPR

SEQ ID NO: 206503 - protein, 486 aa, Artificial Sequence
  Description of Artificial Sequence: Synthetic Chimeric Antigen Receptor
MALPVTALLLPLALLLHAARPEVQLVQSGAEVKKPGESLRISCKGSGYTFTSYWMNWVRQMPGKGLEWMGRIDPYDSETHYNQKFKDHVTISVDKSISTAYLQWSSLKASDTAMYYCARGNWDDYWGQGTTVTVSSGGGGSGGGGSGGGGSGGGGSDVVMTQSPAFLSVTPGEKVTITCRASKSISKDLAWYQQKPDQAPKLLIYSGSTLQSGVPSRFSGSGSGTDFTFTISSLEAEDAATYYCQQHNKYPYTFGGGTKVEIKTTTPAPRPPTPAPTIASQPLSLRPEACRPAAGGAVHTRGLDFACDIYIWAPLAGTCGVLLLSLVITLYCKRGRKKLLYIFKQPFMRPVQTTQEEDGCSCRFPEEEEGGCELRVKFSRSADAPAYKQGQNQLYNELNLGRREEYDVLDKRRGRDPEMGGKPRRKNPQEGLYNELQKDKMAEAYSEIGMKGERRRGKGHDGLYQGLSTATKDTYDALHMQALPPR

SEQ ID NO: 206504 - protein, 486 aa, Artificial Sequence
  Description of Artificial Sequence: Synthetic Chimeric Antigen Receptor
MALPVTALLLPLALLLHAARPEVQLVQSGAEVKKPGESLRISCKGSGYTFTSYWMNWVRQMPGKGLEWMGRIDPYDSETHYNQKFKDHVTISVDKSISTAYLQWSSLKASDTAMYYCARGNWDDYWGQGTTVTVSSGGGGSGGGGSGGGGSGGGGSDVVMTQSPDSLAVSLGERATINCRASKSISKDLAWYQQKPGQPPKLLIYSGSTLQSGVPDRFSGSGSGTDFTLTISSLQAEDVAVYYCQQHNKYPYTFGGGTKVEIKTTTPAPRPPTPAPTIASQPLSLRPEACRPAAGGAVHTRGLDFACDIYIWAPLAGTCGVLLLSLVITLYCKRGRKKLLYIFKQPFMRPVQTTQEEDGCSCRFPEEEEGGCELRVKFSRSADAPAYKQGQNQLYNELNLGRREEYDVLDKRRGRDPEMGGKPRRKNPQEGLYNELQKDKMAEAYSEIGMKGERRRGKGHDGLYQGLSTATKDTYDALHMQALPPR

SEQ ID NO: 206505 - protein, 486 aa, Artificial Sequence
  Description of Artificial Sequence: Synthetic Chimeric Antigen Receptor
MALPVTALLLPLALLLHAARPEVQLVQSGAEVKKPGESLRISCKGSGYTFTSYWMNWVRQMPGKGLEWMGRIDPYDSETHYNQKFKDHVTISVDKSISTAYLQWSSLKASDTAMYYCARGNWDDYWGQGTTVTVSSGGGGSGGGGSGGGGSGGGGSEVVLTQSPATLSLSPGERATLSCRASKSISKDLAWYQQKPGQAPRLLIYSGSTLQSGIPARFSGSGSGTDFTLTISSLEPEDFAVYYCQQHNKYPYTFGGGTKVEIKTTTPAPRPPTPAPTIASQPLSLRPEACRPAAGGAVHTRGLDFACDIYIWAPLAGTCGVLLLSLVITLYCKRGRKKLLYIFKQPFMRPVQTTQEEDGCSCRFPEEEEGGCELRVKFSRSADAPAYKQGQNQLYNELNLGRREEYDVLDKRRGRDPEMGGKPRRKNPQEGLYNELQKDKMAEAYSEIGMKGERRRGKGHDGLYQGLSTATKDTYDALHMQALPPR

SEQ ID NO: 206506 - protein, 486 aa, Artificial Sequence
  Description of Artificial Sequence: Synthetic Chimeric Antigen Receptor
MALPVTALLLPLALLLHAARPEVVLTQSPATLSLSPGERATLSCRASKSISKDLAWYQQKPGQAPRLLIYSGSTLQSGIPARFSGSGSGTDFTLTISSLEPEDFAVYYCQQHNKYPYTFGGGTKVEIKGGGGSGGGGSGGGGSGGGGSEVQLVESGGGLVQPGGSLRLSCAASGYTFTSYWMNWVRQAPGKGLVWVSRIDPYDSETHYNQKFKDRFTISVDKAKSTAYLQMNSLRAEDTAVYYCARGNWDDYWGQGTTVTVSSTTTPAPRPPTPAPTIASQPLSLRPEACRPAAGGAVHTRGLDFACDIYIWAPLAGTCGVLLLSLVITLYCKRGRKKLLYIFKQPFMRPVQTTQEEDGCSCRFPEEEEGGCELRVKFSRSADAPAYKQGQNQLYNELNLGRREEYDVLDKRRGRDPEMGGKPRRKNPQEGLYNELQKDKMAEAYSEIGMKGERRRGKGHDGLYQGLSTATKDTYDALHMQALPPR

SEQ ID NO: 206507 - protein, 486 aa, Artificial Sequence
  Description of Artificial Sequence: Synthetic Chimeric Antigen Receptor
MALPVTALLLPLALLLHAARPEVVLTQSPATLSLSPGERATLSCRASKSISKDLAWYQQKPGQAPRLLIYSGSTLQSGIPARFSGSGSGTDFTLTISSLEPEDFAVYYCQQHNKYPYTFGGGTKVEIKGGGGSGGGGSGGGGSGGGGSEVQLVQSGAEVKKPGESLRISCKGSGYTFTSYWMNWVRQMPGKGLEWMGRIDPYDSETHYNQKFKDHVTISVDKSISTAYLQWSSLKASDTAMYYCARGNWDDYWGQGTTVTVSSTTTPAPRPPTPAPTIASQPLSLRPEACRPAAGGAVHTRGLDFACDIYIWAPLAGTCGVLLLSLVITLYCKRGRKKLLYIFKQPFMRPVQTTQEEDGCSCRFPEEEEGGCELRVKFSRSADAPAYKQGQNQLYNELNLGRREEYDVLDKRRGRDPEMGGKPRRKNPQEGLYNELQKDKMAEAYSEIGMKGERRRGKGHDGLYQGLSTATKDTYDALHMQALPPR

SEQ ID NO: 206508 - protein, 486 aa, Artificial Sequence
  Description of Artificial Sequence: Synthetic Chimeric Antigen Receptor
MALPVTALLLPLALLLHAARPEVVLTQSPATLSLSPGERATLSCRASKSISKDLAWYQQKPGQAPRLLIYSGSTLQSGIPARFSGSGSGTDFTLTISSLEPEDFAVYYCQQHNKYPYTFGGGTKVEIKGGGGSGGGGSGGGGSGGGGSQVQLVQSGAEVKKPGASVKVSCKASGYTFTSYWMNWVRQAPGQGLEWMGRIDPYDSETHYNQKFKDRVTMTVDKSTSTAYMELSSLRSEDTAVYYCARGNWDDYWGQGTTVTVSSTTTPAPRPPTPAPTIASQPLSLRPEACRPAAGGAVHTRGLDFACDIYIWAPLAGTCGVLLLSLVITLYCKRGRKKLLYIFKQPFMRPVQTTQEEDGCSCRFPEEEEGGCELRVKFSRSADAPAYKQGQNQLYNELNLGRREEYDVLDKRRGRDPEMGGKPRRKNPQEGLYNELQKDKMAEAYSEIGMKGERRRGKGHDGLYQGLSTATKDTYDALHMQALPPR

SEQ ID NO: 206509 - protein, 486 aa, Artificial Sequence
  Description of Artificial Sequence: Synthetic Chimeric Antigen Receptor
MALPVTALLLPLALLLHAARPEVVLTQSPATLSLSPGERATLSCRASKSISKDLAWYQQKPGQAPRLLIYSGSTLQSGIPARFSGSGSGTDFTLTISSLEPEDFAVYYCQQHNKYPYTFGGGTKVEIKGGGGSGGGGSGGGGSGGGGSQVQLVQSGSELKKPGASVKVSCKASGYTFTSYWMNWVRQAPGQGLEWMGRIDPYDSETHYNQKFKDRFVFSVDKSVSTAYLQISSLKAEDTAVYYCARGNWDDYWGQGTTVTVSSTTTPAPRPPTPAPTIASQPLSLRPEACRPAAGGAVHTRGLDFACDIYIWAPLAGTCGVLLLSLVITLYCKRGRKKLLYIFKQPFMRPVQTTQEEDGCSCRFPEEEEGGCELRVKFSRSADAPAYKQGQNQLYNELNLGRREEYDVLDKRRGRDPEMGGKPRRKNPQEGLYNELQKDKMAEAYSEIGMKGERRRGKGHDGLYQGLSTATKDTYDALHMQALPPR

SEQ ID NO: 206510 - protein, 486 aa, Artificial Sequence
  Description of Artificial Sequence: Synthetic Chimeric Antigen Receptor
MALPVTALLLPLALLLHAARPQVQLVQSGAEVKKPGASVKVSCKASGYTFTSYWMNWVRQAPGQGLEWMGRIDPYDSETHYNQKFKDRVTMTVDKSTSTAYMELSSLRSEDTAVYYCARGNWDDYWGQGTTVTVSSGGGGSGGGGSGGGGSGGGGSDVQLTQSPSFLSASVGDRVTITCRASKSISKDLAWYQQKPGKAPKLLIYSGSTLQSGVPSRFSGSGSGTEFTLTISSLQPEDFATYYCQQHNKYPYTFGGGTKVEIKTTTPAPRPPTPAPTIASQPLSLRPEACRPAAGGAVHTRGLDFACDIYIWAPLAGTCGVLLLSLVITLYCKRGRKKLLYIFKQPFMRPVQTTQEEDGCSCRFPEEEEGGCELRVKFSRSADAPAYKQGQNQLYNELNLGRREEYDVLDKRRGRDPEMGGKPRRKNPQEGLYNELQKDKMAEAYSEIGMKGERRRGKGHDGLYQGLSTATKDTYDALHMQALPPR

SEQ ID NO: 206511 - protein, 486 aa, Artificial Sequence
  Description of Artificial Sequence: Synthetic Chimeric Antigen Receptor
MALPVTALLLPLALLLHAARPQVQLVQSGAEVKKPGASVKVSCKASGYTFTSYWMNWVRQAPGQGLEWMGRIDPYDSETHYNQKFKDRVTMTVDKSTSTAYMELSSLRSEDTAVYYCARGNWDDYWGQGTTVTVSSGGGGSGGGGSGGGGSGGGGSDVVMTQSPAFLSVTPGEKVTITCRASKSISKDLAWYQQKPDQAPKLLIYSGSTLQSGVPSRFSGSGSGTDFTFTISSLEAEDAATYYCQQHNKYPYTFGGGTKVEIKTTTPAPRPPTPAPTIASQPLSLRPEACRPAAGGAVHTRGLDFACDIYIWAPLAGTCGVLLLSLVITLYCKRGRKKLLYIFKQPFMRPVQTTQEEDGCSCRFPEEEEGGCELRVKFSRSADAPAYKQGQNQLYNELNLGRREEYDVLDKRRGRDPEMGGKPRRKNPQEGLYNELQKDKMAEAYSEIGMKGERRRGKGHDGLYQGLSTATKDTYDALHMQALPPR

SEQ ID NO: 206512 - protein, 486 aa, Artificial Sequence
  Description of Artificial Sequence: Synthetic Chimeric Antigen Receptor
MALPVTALLLPLALLLHAARPQVQLVQSGAEVKKPGASVKVSCKASGYTFTSYWMNWVRQAPGQGLEWMGRIDPYDSETHYNQKFKDRVTMTVDKSTSTAYMELSSLRSEDTAVYYCARGNWDDYWGQGTTVTVSSGGGGSGGGGSGGGGSGGGGSDVVMTQSPDSLAVSLGERATINCRASKSISKDLAWYQQKPGQPPKLLIYSGSTLQSGVPDRFSGSGSGTDFTLTISSLQAEDVAVYYCQQHNKYPYTFGGGTKVEIKTTTPAPRPPTPAPTIASQPLSLRPEACRPAAGGAVHTRGLDFACDIYIWAPLAGTCGVLLLSLVITLYCKRGRKKLLYIFKQPFMRPVQTTQEEDGCSCRFPEEEEGGCELRVKFSRSADAPAYKQGQNQLYNELNLGRREEYDVLDKRRGRDPEMGGKPRRKNPQEGLYNELQKDKMAEAYSEIGMKGERRRGKGHDGLYQGLSTATKDTYDALHMQALPPR

SEQ ID NO: 206513 - protein, 486 aa, Artificial Sequence
  Description of Artificial Sequence: Synthetic Chimeric Antigen Receptor
MALPVTALLLPLALLLHAARPQVQLVQSGAEVKKPGASVKVSCKASGYTFTSYWMNWVRQAPGQGLEWMGRIDPYDSETHYNQKFKDRVTMTVDKSTSTAYMELSSLRSEDTAVYYCARGNWDDYWGQGTTVTVSSGGGGSGGGGSGGGGSGGGGSEVVLTQSPATLSLSPGERATLSCRASKSISKDLAWYQQKPGQAPRLLIYSGSTLQSGIPARFSGSGSGTDFTLTISSLEPEDFAVYYCQQHNKYPYTFGGGTKVEIKTTTPAPRPPTPAPTIASQPLSLRPEACRPAAGGAVHTRGLDFACDIYIWAPLAGTCGVLLLSLVITLYCKRGRKKLLYIFKQPFMRPVQTTQEEDGCSCRFPEEEEGGCELRVKFSRSADAPAYKQGQNQLYNELNLGRREEYDVLDKRRGRDPEMGGKPRRKNPQEGLYNELQKDKMAEAYSEIGMKGERRRGKGHDGLYQGLSTATKDTYDALHMQALPPR

SEQ ID NO: 206514 - protein, 486 aa, Artificial Sequence
  Description of Artificial Sequence: Synthetic Chimeric Antigen Receptor
MALPVTALLLPLALLLHAARPQVQLVQSGSELKKPGASVKVSCKASGYTFTSYWMNWVRQAPGQGLEWMGRIDPYDSETHYNQKFKDRFVFSVDKSVSTAYLQISSLKAEDTAVYYCARGNWDDYWGQGTTVTVSSGGGGSGGGGSGGGGSGGGGSDVQLTQSPSFLSASVGDRVTITCRASKSISKDLAWYQQKPGKAPKLLIYSGSTLQSGVPSRFSGSGSGTEFTLTISSLQPEDFATYYCQQHNKYPYTFGGGTKVEIKTTTPAPRPPTPAPTIASQPLSLRPEACRPAAGGAVHTRGLDFACDIYIWAPLAGTCGVLLLSLVITLYCKRGRKKLLYIFKQPFMRPVQTTQEEDGCSCRFPEEEEGGCELRVKFSRSADAPAYKQGQNQLYNELNLGRREEYDVLDKRRGRDPEMGGKPRRKNPQEGLYNELQKDKMAEAYSEIGMKGERRRGKGHDGLYQGLSTATKDTYDALHMQALPPR

SEQ ID NO: 206515 - protein, 486 aa, Artificial Sequence
  Description of Artificial Sequence: Synthetic Chimeric Antigen Receptor
MALPVTALLLPLALLLHAARPQVQLVQSGSELKKPGASVKVSCKASGYTFTSYWMNWVRQAPGQGLEWMGRIDPYDSETHYNQKFKDRFVFSVDKSVSTAYLQISSLKAEDTAVYYCARGNWDDYWGQGTTVTVSSGGGGSGGGGSGGGGSGGGGSDVVMTQSPAFLSVTPGEKVTITCRASKSISKDLAWYQQKPDQAPKLLIYSGSTLQSGVPSRFSGSGSGTDFTFTISSLEAEDAATYYCQQHNKYPYTFGGGTKVEIKTTTPAPRPPTPAPTIASQPLSLRPEACRPAAGGAVHTRGLDFACDIYIWAPLAGTCGVLLLSLVITLYCKRGRKKLLYIFKQPFMRPVQTTQEEDGCSCRFPEEEEGGCELRVKFSRSADAPAYKQGQNQLYNELNLGRREEYDVLDKRRGRDPEMGGKPRRKNPQEGLYNELQKDKMAEAYSEIGMKGERRRGKGHDGLYQGLSTATKDTYDALHMQALPPR

SEQ ID NO: 206516 - protein, 486 aa, Artificial Sequence
  Description of Artificial Sequence: Synthetic Chimeric Antigen Receptor
MALPVTALLLPLALLLHAARPQVQLVQSGSELKKPGASVKVSCKASGYTFTSYWMNWVRQAPGQGLEWMGRIDPYDSETHYNQKFKDRFVFSVDKSVSTAYLQISSLKAEDTAVYYCARGNWDDYWGQGTTVTVSSGGGGSGGGGSGGGGSGGGGSDVVMTQSPDSLAVSLGERATINCRASKSISKDLAWYQQKPGQPPKLLIYSGSTLQSGVPDRFSGSGSGTDFTLTISSLQAEDVAVYYCQQHNKYPYTFGGGTKVEIKTTTPAPRPPTPAPTIASQPLSLRPEACRPAAGGAVHTRGLDFACDIYIWAPLAGTCGVLLLSLVITLYCKRGRKKLLYIFKQPFMRPVQTTQEEDGCSCRFPEEEEGGCELRVKFSRSADAPAYKQGQNQLYNELNLGRREEYDVLDKRRGRDPEMGGKPRRKNPQEGLYNELQKDKMAEAYSEIGMKGERRRGKGHDGLYQGLSTATKDTYDALHMQALPPR

SEQ ID NO: 206517 - protein, 486 aa, Artificial Sequence
  Description of Artificial Sequence: Synthetic Chimeric Antigen Receptor
MALPVTALLLPLALLLHAARPQVQLVQSGSELKKPGASVKVSCKASGYTFTSYWMNWVRQAPGQGLEWMGRIDPYDSETHYNQKFKDRFVFSVDKSVSTAYLQISSLKAEDTAVYYCARGNWDDYWGQGTTVTVSSGGGGSGGGGSGGGGSGGGGSEVVLTQSPATLSLSPGERATLSCRASKSISKDLAWYQQKPGQAPRLLIYSGSTLQSGIPARFSGSGSGTDFTLTISSLEPEDFAVYYCQQHNKYPYTFGGGTKVEIKTTTPAPRPPTPAPTIASQPLSLRPEACRPAAGGAVHTRGLDFACDIYIWAPLAGTCGVLLLSLVITLYCKRGRKKLLYIFKQPFMRPVQTTQEEDGCSCRFPEEEEGGCELRVKFSRSADAPAYKQGQNQLYNELNLGRREEYDVLDKRRGRDPEMGGKPRRKNPQEGLYNELQKDKMAEAYSEIGMKGERRRGKGHDGLYQGLSTATKDTYDALHMQALPPR

SEQ ID NO: 206518 - protein, 487 aa, Artificial Sequence
  Description of Artificial Sequence: Synthetic Chimeric Antigen Receptor
MGWSWIFLFLVSGTGGVLSEVQLQQSGPELVKPGASVKMSCKASGYTFTDYYMKWVKQSHGKSLEWIGDIIPSNGATFYNQKFKGKATLTVDRSSSTAYMHLNSLTSEDSAVYYCTRSHLLRASWFAYWGQGTLVTVSAASGGGGSGGGGSGGGGSMESQTQVLMSLLFWVSGTCGDFVMTQSPSSLTVTAGEKVTMSCKSSQSLLNSGNQKNYLTWYLQKPGQPPKLLIYWASTRESGVPDRFTGSGSGTDFTLTISSVQAEDLAVYYCQNDYSYPYTFGGGTKLEIKRGLAVSTISSFFPPGYQIISFFLALTSTALLFLLFFLTLRFSVVKRGRKKLLYIFKQPFMRPVQTTQEEDGCSCRFPEEEEGGCELRVKFSRSADAPAYQQGQNQLYNELNLGRREEYDVLDKRRGRDPEMGGKPRRKNPQEGLYNELQKDKMAEAYSEIGMKGERRRGKGHDGLYQGLSTATKDTYDALHMQALPPR

SEQ ID NO: 206519 - protein, 495 aa, Artificial Sequence
  Description of Artificial Sequence: Synthetic Chimeric Antigen Receptor
MALPVTALLLPLALLLHAARPQIQLVQSGPELKKPGETVKISCKASGYIFTNYGMNWVKQAPGKSFKWMGWINTYTGESTYSADFKGRFAFSLETSASTAYLHINDLKNEDTATYFCARSGGYDPMDYWGQGTSVTVSSGGGCPYSNPSLCGGGGSDIVLTQSPASLAVSLGQRATISCRASESVDNYGNTFMHWYQQKPGQPPKLLIYRASNLESGIPARFSGSGSRTDFTLTINPVEADDVATYYCQQSNEDPPTFGAGTKLELKRSDPTTTPAPRPPTPAPTIASQPLSLRPEACRPAAGGAVHTRGLDFACDIYIWAPLAGTCGVLLLSLVITLYCRRGRKKLLYIFKQPFMRPVQTTQEEDGCSCRFPEEEEGGCELRVKFSRSADAPAYQQGQNQLYNELNLGRREEYDVLDKRRGRDPEMGGKPRRKNPQEGLYNELQKDKMAEAYSEIGMKGERRRGKGHDGLYQGLSTATKDTYDALHMQALPPRE

SEQ ID NO: 206520 - protein, 499 aa, Artificial Sequence
  Description of Artificial Sequence: Synthetic Chimeric Antigen Receptor
MALPVTALLLPLALLLHAARPEVKLVESGGGLVQPGGSLSLSCAASGFTFTDYYMSWVRQPPGKALEWLALIRSKADGYTTEYSASVKGRFTLSRDDSQSILYLQMNALRPEDSATYYCARDAAYYSYYSPEGAMDYWGQGTSVTVSSGGGGSGGGGSGGGGSMADYKDIVMTQSHKFMSTSVGDRVNITCKASQNVDSAVAWYQQKPGQSPKALIYSASYRYSGVPDRFTGRGSGTDFTLTISSVQAEDLAVYYCQQYYSTPWTFGGGTKLEIKRTTTPAPRPPTPAPTIASQPLSLRPEACRPAAGGAVHTRGLDFACDIYIWAPLAGTCGVLLLSLVITLYCKRGRKKLLYIFKQPFMRPVQTTQEEDGCSCRFPEEEEGGCELRVKFSRSADAPAYQQGQNQLYNELNLGRREEYDVLDKRRGRDPEMGGKPRRKNPQEGLYNELQKDKMAEAYSEIGMKGERRRGKGHDGLYQGLSTATKDTYDALHMQALPPR

SEQ ID NO: 206521 - protein, 499 aa, Artificial Sequence
  Description of Artificial Sequence: Synthetic Chimeric Antigen Receptor
MALPVTALLLPLALLLHAARPEVKLVESGGGLVQPGRSLRLSCTASGFTFTDYYMSWVRQAPGKGLEWVGLIRSKADGYTTEYSASVKGRFTISRDDSKSILYLQMNSLKTEDTAVYYCARDAAYYSYYSPEGAMDYWGQGTLVTVSSGGGGSGGGGSGGGGSMADYKDIQMTQSPSSVSASVGDRVTITCRASQNVDSAVAWYQQKPGKAPKALIYSASYRYSGVPSRFSGRGSGTDFTLTISSLQPEDFATYYCQQYYSTPWTFGQGTKVEIKRTTTPAPRPPTPAPTIASQPLSLRPEACRPAAGGAVHTRGLDFACDIYIWAPLAGTCGVLLLSLVITLYCKRGRKKLLYIFKQPFMRPVQTTQEEDGCSCRFPEEEEGGCELRVKFSRSADAPAYQQGQNQLYNELNLGRREEYDVLDKRRGRDPEMGGKPRRKNPQEGLYNELQKDKMAEAYSEIGMKGERRRGKGHDGLYQGLSTATKDTYDALHMQALPPR

SEQ ID NO: 206522 - protein, 499 aa, Artificial Sequence
  Description of Artificial Sequence: Synthetic Chimeric Antigen Receptor
MALPVTALLLPLALLLHAARPEVKLVESGGGLVQPGRSLRLSCTASGFTFTDYYMSWVRQAPGKGLEWVGLIRSKADGYTTEYSASVKGRFTISRDDSKSILYLQMNSLKTEDTAVYYCARDAAYYSYYSPEGAMDYWGQGTLVTVSSGGGGSGGGGSGGGGSMADYKDIQMTQSPSSVSASVGDRVTITCRASQNVDSAVAWYQQKPGKAPKALIYSASYRYSGVPSRFSGSGSGTDFTLTISSLQPEDFATYYCQQYYSTPWTFGQGTKVEIKRTTTPAPRPPTPAPTIASQPLSLRPEACRPAAGGAVHTRGLDFACDIYIWAPLAGTCGVLLLSLVITLYCKRGRKKLLYIFKQPFMRPVQTTQEEDGCSCRFPEEEEGGCELRVKFSRSADAPAYQQGQNQLYNELNLGRREEYDVLDKRRGRDPEMGGKPRRKNPQEGLYNELQKDKMAEAYSEIGMKGERRRGKGHDGLYQGLSTATKDTYDALHMQALPPR

SEQ ID NO: 206523 - protein, 499 aa, Artificial Sequence
  Description of Artificial Sequence: Synthetic Chimeric Antigen Receptor
MALPVTALLLPLALLLHAARPEVKLVESGGGLVQPGRSLRLSCTASGFTFTDYYMSWVRQAPGKGLEWVGLIRSKADGYTTEYSASVKGRFTISRDDSKSILYLQMNSLKTEDTAVYYCARDAAYYSYYSPEGAMDYWGQGTLVTVSSGGGGSGGGGSGGGGSMADYKDIQMTQSPSSVSASVGDRVTITCRASQNVDSAVAWYQQKPGKAPKLLIYSASYGQSGVPSRFSGSGSGTDFTLTISSLQPEDFATYYCQQYYSTPWTFGQGTKVEIKRTTTPAPRPPTPAPTIASQPLSLRPEACRPAAGGAVHTRGLDFACDIYIWAPLAGTCGVLLLSLVITLYCKRGRKKLLYIFKQPFMRPVQTTQEEDGCSCRFPEEEEGGCELRVKFSRSADAPAYQQGQNQLYNELNLGRREEYDVLDKRRGRDPEMGGKPRRKNPQEGLYNELQKDKMAEAYSEIGMKGERRRGKGHDGLYQGLSTATKDTYDALHMQALPPR

SEQ ID NO: 206524 - protein, 499 aa, Artificial Sequence
  Description of Artificial Sequence: Synthetic Chimeric Antigen Receptor
MALPVTALLLPLALLLHAARPEVKLVESGGGLVQPGRSLRLSCTASGFTFTDYYMSWVRQAPGKGLEWVGLIRSKADGYTTEYSASVKGRFTISRDDSKSILYLQMNSLKTEDTAVYYCARDAAYYSYYSPEGAMDYWGQGTLVTVSSGGGGSGGGGSGGGGSMADYKDIQMTQSPSSVSASVGDRVTITCRASQNVDSAVAWYQQKPGKAPKLLIYSASYRQSGVPSRFSGSGSGTDFTLTISSLQPEDFATYYCQQYYSTPWTFGQGTKVEIKRTTTPAPRPPTPAPTIASQPLSLRPEACRPAAGGAVHTRGLDFACDIYIWAPLAGTCGVLLLSLVITLYCKRGRKKLLYIFKQPFMRPVQTTQEEDGCSCRFPEEEEGGCELRVKFSRSADAPAYQQGQNQLYNELNLGRREEYDVLDKRRGRDPEMGGKPRRKNPQEGLYNELQKDKMAEAYSEIGMKGERRRGKGHDGLYQGLSTATKDTYDALHMQALPPR

SEQ ID NO: 206525 - protein, 499 aa, Artificial Sequence
  Description of Artificial Sequence: Synthetic Chimeric Antigen Receptor
MALPVTALLLPLALLLHAARPEVKLVESGGGLVQPGRSLRLSCTASGFTFTDYYMSWVRQAPGKGLEWVGLIRSKADGYTTEYSASVKGRFTISRDDSKSILYLQMNSLKTEDTAVYYCARDAAYYSYYSPEGAMDYWGQGTLVTVSSGGGGSGGGGSGGGGSMADYKDIQMTQSPSSVSASVGDRVTITCRASQNVDSAVAWYQQKPGKAPKLLIYSASYRYSGVPSRFSGSGSGTDFTLTISSLQPEDFATYYCQQYYSTPWTFGQGTKVEIKRTTTPAPRPPTPAPTIASQPLSLRPEACRPAAGGAVHTRGLDFACDIYIWAPLAGTCGVLLLSLVITLYCKRGRKKLLYIFKQPFMRPVQTTQEEDGCSCRFPEEEEGGCELRVKFSRSADAPAYQQGQNQLYNELNLGRREEYDVLDKRRGRDPEMGGKPRRKNPQEGLYNELQKDKMAEAYSEIGMKGERRRGKGHDGLYQGLSTATKDTYDALHMQALPPR

SEQ ID NO: 206526 - protein, 499 aa, Artificial Sequence
  Description of Artificial Sequence: Synthetic Chimeric Antigen Receptor
MALPVTALLLPLALLLHAARPEVKLVESGGGLVQPGRSLRLSCTASGFTFTDYYMSWVRQAPGKGLEWVGLIRSKADGYTTEYSASVKGRFTISRDDSKSILYLQMNSLKTEDTAVYYCARDAAYYSYYSPEGAMDYWGQGTLVTVSSGGGGSGGGGSGGGGSMADYKDIVMTQSPSSVSASVGDRVTITCRASQNVDSAVAWYQQKPGKAPKALIYSASYRYSGVPSRFSGRGSGTDFTLTISSLQPEDFATYYCQQYYSTPWTFGQGTKVEIKRTTTPAPRPPTPAPTIASQPLSLRPEACRPAAGGAVHTRGLDFACDIYIWAPLAGTCGVLLLSLVITLYCKRGRKKLLYIFKQPFMRPVQTTQEEDGCSCRFPEEEEGGCELRVKFSRSADAPAYQQGQNQLYNELNLGRREEYDVLDKRRGRDPEMGGKPRRKNPQEGLYNELQKDKMAEAYSEIGMKGERRRGKGHDGLYQGLSTATKDTYDALHMQALPPR

SEQ ID NO: 206527 - protein, 499 aa, Artificial Sequence
  Description of Artificial Sequence: Synthetic Chimeric Antigen Receptor
MALPVTALLLPLALLLHAARPEVQLVESGGGLVQPGRSLRLSCTASGFTFTDYYMSWVRQAPGKGLEWVGFIRSKADGYTTEYAASVKGRFTISRDDSKSIAYLQMNSLKTEDTAVYYCARDAAYYSYYSPEGAMDYWGQGTLVTVSSGGGGSGGGGSGGGGSMADYKDIQMTQSPSSVSASVGDRVTITCRASQNVDSAVAWYQQKPGKAPKALIYSASYRYSGVPSRFSGRGSGTDFTLTISSLQPEDFATYYCQQYYSTPWTFGQGTKVEIKRTTTPAPRPPTPAPTIASQPLSLRPEACRPAAGGAVHTRGLDFACDIYIWAPLAGTCGVLLLSLVITLYCKRGRKKLLYIFKQPFMRPVQTTQEEDGCSCRFPEEEEGGCELRVKFSRSADAPAYQQGQNQLYNELNLGRREEYDVLDKRRGRDPEMGGKPRRKNPQEGLYNELQKDKMAEAYSEIGMKGERRRGKGHDGLYQGLSTATKDTYDALHMQALPPR

SEQ ID NO: 206528 - protein, 499 aa, Artificial Sequence
  Description of Artificial Sequence: Synthetic Chimeric Antigen Receptor
MALPVTALLLPLALLLHAARPEVQLVESGGGLVQPGRSLRLSCTASGFTFTDYYMSWVRQAPGKGLEWVGFIRSKADGYTTEYAASVKGRFTISRDDSKSIAYLQMNSLKTEDTAVYYCARDAAYYSYYSPEGAMDYWGQGTLVTVSSGGGGSGGGGSGGGGSMADYKDIQMTQSPSSVSASVGDRVTITCRASQNVDSAVAWYQQKPGKAPKALIYSASYRYSGVPSRFSGSGSGTDFTLTISSLQPEDFATYYCQQYYSTPWTFGQGTKVEIKRTTTPAPRPPTPAPTIASQPLSLRPEACRPAAGGAVHTRGLDFACDIYIWAPLAGTCGVLLLSLVITLYCKRGRKKLLYIFKQPFMRPVQTTQEEDGCSCRFPEEEEGGCELRVKFSRSADAPAYQQGQNQLYNELNLGRREEYDVLDKRRGRDPEMGGKPRRKNPQEGLYNELQKDKMAEAYSEIGMKGERRRGKGHDGLYQGLSTATKDTYDALHMQALPPR

SEQ ID NO: 206529 - protein, 499 aa, Artificial Sequence
  Description of Artificial Sequence: Synthetic Chimeric Antigen Receptor
MALPVTALLLPLALLLHAARPEVQLVESGGGLVQPGRSLRLSCTASGFTFTDYYMSWVRQAPGKGLEWVGFIRSKADGYTTEYAASVKGRFTISRDDSKSIAYLQMNSLKTEDTAVYYCARDAAYYSYYSPEGAMDYWGQGTLVTVSSGGGGSGGGGSGGGGSMADYKDIQMTQSPSSVSASVGDRVTITCRASQNVDSAVAWYQQKPGKAPKLLIYSASYGQSGVPSRFSGSGSGTDFTLTISSLQPEDFATYYCQQYYSTPWTFGQGTKVEIKRTTTPAPRPPTPAPTIASQPLSLRPEACRPAAGGAVHTRGLDFACDIYIWAPLAGTCGVLLLSLVITLYCKRGRKKLLYIFKQPFMRPVQTTQEEDGCSCRFPEEEEGGCELRVKFSRSADAPAYQQGQNQLYNELNLGRREEYDVLDKRRGRDPEMGGKPRRKNPQEGLYNELQKDKMAEAYSEIGMKGERRRGKGHDGLYQGLSTATKDTYDALHMQALPPR

SEQ ID NO: 206530 - protein, 499 aa, Artificial Sequence
  Description of Artificial Sequence: Synthetic Chimeric Antigen Receptor
MALPVTALLLPLALLLHAARPEVQLVESGGGLVQPGRSLRLSCTASGFTFTDYYMSWVRQAPGKGLEWVGFIRSKADGYTTEYAASVKGRFTISRDDSKSIAYLQMNSLKTEDTAVYYCARDAAYYSYYSPEGAMDYWGQGTLVTVSSGGGGSGGGGSGGGGSMADYKDIQMTQSPSSVSASVGDRVTITCRASQNVDSAVAWYQQKPGKAPKLLIYSASYRQSGVPSRFSGSGSGTDFTLTISSLQPEDFATYYCQQYYSTPWTFGQGTKVEIKRTTTPAPRPPTPAPTIASQPLSLRPEACRPAAGGAVHTRGLDFACDIYIWAPLAGTCGVLLLSLVITLYCKRGRKKLLYIFKQPFMRPVQTTQEEDGCSCRFPEEEEGGCELRVKFSRSADAPAYQQGQNQLYNELNLGRREEYDVLDKRRGRDPEMGGKPRRKNPQEGLYNELQKDKMAEAYSEIGMKGERRRGKGHDGLYQGLSTATKDTYDALHMQALPPR

SEQ ID NO: 206531 - protein, 499 aa, Artificial Sequence
  Description of Artificial Sequence: Synthetic Chimeric Antigen Receptor
MALPVTALLLPLALLLHAARPEVQLVESGGGLVQPGRSLRLSCTASGFTFTDYYMSWVRQAPGKGLEWVGFIRSKADGYTTEYAASVKGRFTISRDDSKSIAYLQMNSLKTEDTAVYYCARDAAYYSYYSPEGAMDYWGQGTLVTVSSGGGGSGGGGSGGGGSMADYKDIQMTQSPSSVSASVGDRVTITCRASQNVDSAVAWYQQKPGKAPKLLIYSASYRYSGVPSRFSGSGSGTDFTLTISSLQPEDFATYYCQQYYSTPWTFGQGTKVEIKRTTTPAPRPPTPAPTIASQPLSLRPEACRPAAGGAVHTRGLDFACDIYIWAPLAGTCGVLLLSLVITLYCKRGRKKLLYIFKQPFMRPVQTTQEEDGCSCRFPEEEEGGCELRVKFSRSADAPAYQQGQNQLYNELNLGRREEYDVLDKRRGRDPEMGGKPRRKNPQEGLYNELQKDKMAEAYSEIGMKGERRRGKGHDGLYQGLSTATKDTYDALHMQALPPR

SEQ ID NO: 206532 - protein, 499 aa, Artificial Sequence
  Description of Artificial Sequence: Synthetic Chimeric Antigen Receptor
MALPVTALLLPLALLLHAARPEVQLVESGGGLVQPGRSLRLSCTASGFTFTDYYMSWVRQAPGKGLEWVGFIRSKADGYTTEYAASVKGRFTISRDDSKSIAYLQMNSLKTEDTAVYYCARDAAYYSYYSPEGAMDYWGQGTLVTVSSGGGGSGGGGSGGGGSMADYKDIVMTQSPSSVSASVGDRVTITCRASQNVDSAVAWYQQKPGKAPKALIYSASYRYSGVPSRFSGRGSGTDFTLTISSLQPEDFATYYCQQYYSTPWTFGQGTKVEIKRTTTPAPRPPTPAPTIASQPLSLRPEACRPAAGGAVHTRGLDFACDIYIWAPLAGTCGVLLLSLVITLYCKRGRKKLLYIFKQPFMRPVQTTQEEDGCSCRFPEEEEGGCELRVKFSRSADAPAYQQGQNQLYNELNLGRREEYDVLDKRRGRDPEMGGKPRRKNPQEGLYNELQKDKMAEAYSEIGMKGERRRGKGHDGLYQGLSTATKDTYDALHMQALPPR

SEQ ID NO: 206533 - protein, 499 aa, Artificial Sequence
  Description of Artificial Sequence: Synthetic Chimeric Antigen Receptor
MALPVTALLLPLALLLHAARPEVQLVESGGGLVQPGRSLRLSCTASGFTFTDYYMSWVRQAPGKGLEWVGFIRSKADGYTTEYAASVKGRFTISRDDSKSIAYLQMNSLKTEDTAVYYCTRDAAYYSYYSPEGAMDYWGQGTLVTVSSGGGGSGGGGSGGGGSMADYKDIQMTQSPSSVSASVGDRVTITCRASQNVDSAVAWYQQKPGKAPKALIYSASYRYSGVPSRFSGRGSGTDFTLTISSLQPEDFATYYCQQYYSTPWTFGQGTKVEIKRTTTPAPRPPTPAPTIASQPLSLRPEACRPAAGGAVHTRGLDFACDIYIWAPLAGTCGVLLLSLVITLYCKRGRKKLLYIFKQPFMRPVQTTQEEDGCSCRFPEEEEGGCELRVKFSRSADAPAYQQGQNQLYNELNLGRREEYDVLDKRRGRDPEMGGKPRRKNPQEGLYNELQKDKMAEAYSEIGMKGERRRGKGHDGLYQGLSTATKDTYDALHMQALPPR

SEQ ID NO: 206534 - protein, 499 aa, Artificial Sequence
  Description of Artificial Sequence: Synthetic Chimeric Antigen Receptor
MALPVTALLLPLALLLHAARPEVQLVESGGGLVQPGRSLRLSCTASGFTFTDYYMSWVRQAPGKGLEWVGFIRSKADGYTTEYAASVKGRFTISRDDSKSIAYLQMNSLKTEDTAVYYCTRDAAYYSYYSPEGAMDYWGQGTLVTVSSGGGGSGGGGSGGGGSMADYKDIQMTQSPSSVSASVGDRVTITCRASQNVDSAVAWYQQKPGKAPKALIYSASYRYSGVPSRFSGSGSGTDFTLTISSLQPEDFATYYCQQYYSTPWTFGQGTKVEIKRTTTPAPRPPTPAPTIASQPLSLRPEACRPAAGGAVHTRGLDFACDIYIWAPLAGTCGVLLLSLVITLYCKRGRKKLLYIFKQPFMRPVQTTQEEDGCSCRFPEEEEGGCELRVKFSRSADAPAYQQGQNQLYNELNLGRREEYDVLDKRRGRDPEMGGKPRRKNPQEGLYNELQKDKMAEAYSEIGMKGERRRGKGHDGLYQGLSTATKDTYDALHMQALPPR

SEQ ID NO: 206535 - protein, 499 aa, Artificial Sequence
  Description of Artificial Sequence: Synthetic Chimeric Antigen Receptor
MALPVTALLLPLALLLHAARPEVQLVESGGGLVQPGRSLRLSCTASGFTFTDYYMSWVRQAPGKGLEWVGFIRSKADGYTTEYAASVKGRFTISRDDSKSIAYLQMNSLKTEDTAVYYCTRDAAYYSYYSPEGAMDYWGQGTLVTVSSGGGGSGGGGSGGGGSMADYKDIQMTQSPSSVSASVGDRVTITCRASQNVDSAVAWYQQKPGKAPKLLIYSASYGQSGVPSRFSGSGSGTDFTLTISSLQPEDFATYYCQQYYSTPWTFGQGTKVEIKRTTTPAPRPPTPAPTIASQPLSLRPEACRPAAGGAVHTRGLDFACDIYIWAPLAGTCGVLLLSLVITLYCKRGRKKLLYIFKQPFMRPVQTTQEEDGCSCRFPEEEEGGCELRVKFSRSADAPAYQQGQNQLYNELNLGRREEYDVLDKRRGRDPEMGGKPRRKNPQEGLYNELQKDKMAEAYSEIGMKGERRRGKGHDGLYQGLSTATKDTYDALHMQALPPR

SEQ ID NO: 206536 - protein, 499 aa, Artificial Sequence
  Description of Artificial Sequence: Synthetic Chimeric Antigen Receptor
MALPVTALLLPLALLLHAARPEVQLVESGGGLVQPGRSLRLSCTASGFTFTDYYMSWVRQAPGKGLEWVGFIRSKADGYTTEYAASVKGRFTISRDDSKSIAYLQMNSLKTEDTAVYYCTRDAAYYSYYSPEGAMDYWGQGTLVTVSSGGGGSGGGGSGGGGSMADYKDIQMTQSPSSVSASVGDRVTITCRASQNVDSAVAWYQQKPGKAPKLLIYSASYRQSGVPSRFSGSGSGTDFTLTISSLQPEDFATYYCQQYYSTPWTFGQGTKVEIKRTTTPAPRPPTPAPTIASQPLSLRPEACRPAAGGAVHTRGLDFACDIYIWAPLAGTCGVLLLSLVITLYCKRGRKKLLYIFKQPFMRPVQTTQEEDGCSCRFPEEEEGGCELRVKFSRSADAPAYQQGQNQLYNELNLGRREEYDVLDKRRGRDPEMGGKPRRKNPQEGLYNELQKDKMAEAYSEIGMKGERRRGKGHDGLYQGLSTATKDTYDALHMQALPPR

SEQ ID NO: 206537 - protein, 499 aa, Artificial Sequence
  Description of Artificial Sequence: Synthetic Chimeric Antigen Receptor
MALPVTALLLPLALLLHAARPEVQLVESGGGLVQPGRSLRLSCTASGFTFTDYYMSWVRQAPGKGLEWVGFIRSKADGYTTEYAASVKGRFTISRDDSKSIAYLQMNSLKTEDTAVYYCTRDAAYYSYYSPEGAMDYWGQGTLVTVSSGGGGSGGGGSGGGGSMADYKDIQMTQSPSSVSASVGDRVTITCRASQNVDSAVAWYQQKPGKAPKLLIYSASYRYSGVPSRFSGSGSGTDFTLTISSLQPEDFATYYCQQYYSTPWTFGQGTKVEIKRTTTPAPRPPTPAPTIASQPLSLRPEACRPAAGGAVHTRGLDFACDIYIWAPLAGTCGVLLLSLVITLYCKRGRKKLLYIFKQPFMRPVQTTQEEDGCSCRFPEEEEGGCELRVKFSRSADAPAYQQGQNQLYNELNLGRREEYDVLDKRRGRDPEMGGKPRRKNPQEGLYNELQKDKMAEAYSEIGMKGERRRGKGHDGLYQGLSTATKDTYDALHMQALPPR

SEQ ID NO: 206538 - protein, 499 aa, Artificial Sequence
  Description of Artificial Sequence: Synthetic Chimeric Antigen Receptor
MALPVTALLLPLALLLHAARPEVQLVESGGGLVQPGRSLRLSCTASGFTFTDYYMSWVRQAPGKGLEWVGFIRSKADGYTTEYAASVKGRFTISRDDSKSIAYLQMNSLKTEDTAVYYCTRDAAYYSYYSPEGAMDYWGQGTLVTVSSGGGGSGGGGSGGGGSMADYKDIVMTQSPSSVSASVGDRVTITCRASQNVDSAVAWYQQKPGKAPKALIYSASYRYSGVPSRFSGRGSGTDFTLTISSLQPEDFATYYCQQYYSTPWTFGQGTKVEIKRTTTPAPRPPTPAPTIASQPLSLRPEACRPAAGGAVHTRGLDFACDIYIWAPLAGTCGVLLLSLVITLYCKRGRKKLLYIFKQPFMRPVQTTQEEDGCSCRFPEEEEGGCELRVKFSRSADAPAYQQGQNQLYNELNLGRREEYDVLDKRRGRDPEMGGKPRRKNPQEGLYNELQKDKMAEAYSEIGMKGERRRGKGHDGLYQGLSTATKDTYDALHMQALPPR

SEQ ID NO: 206539 - protein, 499 aa, Artificial Sequence
  Description of Artificial Sequence: Synthetic Chimeric Antigen Receptor
MALPVTALLLPLALLLHAARPEVQLVESGGGLVQPGRSLRLSCTASGFTFTDYYMSWVRQAPGKGLEWVGFIRSKADGYTTEYSASVKGRFTISRDDSKSIAYLQMNSLKTEDTAVYYCARDAAYYSYYSPEGAMDYWGQGTLVTVSSGGGGSGGGGSGGGGSMADYKDIQMTQSPSSVSASVGDRVTITCRASQNVDSAVAWYQQKPGKAPKALIYSASYRYSGVPSRFSGRGSGTDFTLTISSLQPEDFATYYCQQYYSTPWTFGQGTKVEIKRTTTPAPRPPTPAPTIASQPLSLRPEACRPAAGGAVHTRGLDFACDIYIWAPLAGTCGVLLLSLVITLYCKRGRKKLLYIFKQPFMRPVQTTQEEDGCSCRFPEEEEGGCELRVKFSRSADAPAYQQGQNQLYNELNLGRREEYDVLDKRRGRDPEMGGKPRRKNPQEGLYNELQKDKMAEAYSEIGMKGERRRGKGHDGLYQGLSTATKDTYDALHMQALPPR

SEQ ID NO: 206540 - protein, 499 aa, Artificial Sequence
  Description of Artificial Sequence: Synthetic Chimeric Antigen Receptor
MALPVTALLLPLALLLHAARPEVQLVESGGGLVQPGRSLRLSCTASGFTFTDYYMSWVRQAPGKGLEWVGFIRSKADGYTTEYSASVKGRFTISRDDSKSIAYLQMNSLKTEDTAVYYCARDAAYYSYYSPEGAMDYWGQGTLVTVSSGGGGSGGGGSGGGGSMADYKDIQMTQSPSSVSASVGDRVTITCRASQNVDSAVAWYQQKPGKAPKALIYSASYRYSGVPSRFSGSGSGTDFTLTISSLQPEDFATYYCQQYYSTPWTFGQGTKVEIKRTTTPAPRPPTPAPTIASQPLSLRPEACRPAAGGAVHTRGLDFACDIYIWAPLAGTCGVLLLSLVITLYCKRGRKKLLYIFKQPFMRPVQTTQEEDGCSCRFPEEEEGGCELRVKFSRSADAPAYQQGQNQLYNELNLGRREEYDVLDKRRGRDPEMGGKPRRKNPQEGLYNELQKDKMAEAYSEIGMKGERRRGKGHDGLYQGLSTATKDTYDALHMQALPPR

SEQ ID NO: 206541 - protein, 499 aa, Artificial Sequence
  Description of Artificial Sequence: Synthetic Chimeric Antigen Receptor
MALPVTALLLPLALLLHAARPEVQLVESGGGLVQPGRSLRLSCTASGFTFTDYYMSWVRQAPGKGLEWVGFIRSKADGYTTEYSASVKGRFTISRDDSKSIAYLQMNSLKTEDTAVYYCARDAAYYSYYSPEGAMDYWGQGTLVTVSSGGGGSGGGGSGGGGSMADYKDIQMTQSPSSVSASVGDRVTITCRASQNVDSAVAWYQQKPGKAPKLLIYSASYGQSGVPSRFSGSGSGTDFTLTISSLQPEDFATYYCQQYYSTPWTFGQGTKVEIKRTTTPAPRPPTPAPTIASQPLSLRPEACRPAAGGAVHTRGLDFACDIYIWAPLAGTCGVLLLSLVITLYCKRGRKKLLYIFKQPFMRPVQTTQEEDGCSCRFPEEEEGGCELRVKFSRSADAPAYQQGQNQLYNELNLGRREEYDVLDKRRGRDPEMGGKPRRKNPQEGLYNELQKDKMAEAYSEIGMKGERRRGKGHDGLYQGLSTATKDTYDALHMQALPPR

SEQ ID NO: 206542 - protein, 499 aa, Artificial Sequence
  Description of Artificial Sequence: Synthetic Chimeric Antigen Receptor
MALPVTALLLPLALLLHAARPEVQLVESGGGLVQPGRSLRLSCTASGFTFTDYYMSWVRQAPGKGLEWVGFIRSKADGYTTEYSASVKGRFTISRDDSKSIAYLQMNSLKTEDTAVYYCARDAAYYSYYSPEGAMDYWGQGTLVTVSSGGGGSGGGGSGGGGSMADYKDIQMTQSPSSVSASVGDRVTITCRASQNVDSAVAWYQQKPGKAPKLLIYSASYRQSGVPSRFSGSGSGTDFTLTISSLQPEDFATYYCQQYYSTPWTFGQGTKVEIKRTTTPAPRPPTPAPTIASQPLSLRPEACRPAAGGAVHTRGLDFACDIYIWAPLAGTCGVLLLSLVITLYCKRGRKKLLYIFKQPFMRPVQTTQEEDGCSCRFPEEEEGGCELRVKFSRSADAPAYQQGQNQLYNELNLGRREEYDVLDKRRGRDPEMGGKPRRKNPQEGLYNELQKDKMAEAYSEIGMKGERRRGKGHDGLYQGLSTATKDTYDALHMQALPPR

SEQ ID NO: 206543 - protein, 499 aa, Artificial Sequence
  Description of Artificial Sequence: Synthetic Chimeric Antigen Receptor
MALPVTALLLPLALLLHAARPEVQLVESGGGLVQPGRSLRLSCTASGFTFTDYYMSWVRQAPGKGLEWVGFIRSKADGYTTEYSASVKGRFTISRDDSKSIAYLQMNSLKTEDTAVYYCARDAAYYSYYSPEGAMDYWGQGTLVTVSSGGGGSGGGGSGGGGSMADYKDIQMTQSPSSVSASVGDRVTITCRASQNVDSAVAWYQQKPGKAPKLLIYSASYRYSGVPSRFSGSGSGTDFTLTISSLQPEDFATYYCQQYYSTPWTFGQGTKVEIKRTTTPAPRPPTPAPTIASQPLSLRPEACRPAAGGAVHTRGLDFACDIYIWAPLAGTCGVLLLSLVITLYCKRGRKKLLYIFKQPFMRPVQTTQEEDGCSCRFPEEEEGGCELRVKFSRSADAPAYQQGQNQLYNELNLGRREEYDVLDKRRGRDPEMGGKPRRKNPQEGLYNELQKDKMAEAYSEIGMKGERRRGKGHDGLYQGLSTATKDTYDALHMQALPPR

SEQ ID NO: 206544 - protein, 499 aa, Artificial Sequence
  Description of Artificial Sequence: Synthetic Chimeric Antigen Receptor
MALPVTALLLPLALLLHAARPEVQLVESGGGLVQPGRSLRLSCTASGFTFTDYYMSWVRQAPGKGLEWVGFIRSKADGYTTEYSASVKGRFTISRDDSKSIAYLQMNSLKTEDTAVYYCARDAAYYSYYSPEGAMDYWGQGTLVTVSSGGGGSGGGGSGGGGSMADYKDIVMTQSPSSVSASVGDRVTITCRASQNVDSAVAWYQQKPGKAPKALIYSASYRYSGVPSRFSGRGSGTDFTLTISSLQPEDFATYYCQQYYSTPWTFGQGTKVEIKRTTTPAPRPPTPAPTIASQPLSLRPEACRPAAGGAVHTRGLDFACDIYIWAPLAGTCGVLLLSLVITLYCKRGRKKLLYIFKQPFMRPVQTTQEEDGCSCRFPEEEEGGCELRVKFSRSADAPAYQQGQNQLYNELNLGRREEYDVLDKRRGRDPEMGGKPRRKNPQEGLYNELQKDKMAEAYSEIGMKGERRRGKGHDGLYQGLSTATKDTYDALHMQALPPR

SEQ ID NO: 206545 - protein, 499 aa, Artificial Sequence
  Description of Artificial Sequence: Synthetic Chimeric Antigen Receptor
MALPVTALLLPLALLLHAARPEVQLVESGGGLVQPGRSLRLSCTASGFTFTDYYMSWVRQAPGKGLEWVGLIRSKADGYTTEYAASVKGRFTISRDDSKSIAYLQMNSLKTEDTAVYYCARDAAYYSYYSPEGAMDYWGQGTLVTVSSGGGGSGGGGSGGGGSMADYKDIQMTQSPSSVSASVGDRVTITCRASQNVDSAVAWYQQKPGKAPKALIYSASYRYSGVPSRFSGRGSGTDFTLTISSLQPEDFATYYCQQYYSTPWTFGQGTKVEIKRTTTPAPRPPTPAPTIASQPLSLRPEACRPAAGGAVHTRGLDFACDIYIWAPLAGTCGVLLLSLVITLYCKRGRKKLLYIFKQPFMRPVQTTQEEDGCSCRFPEEEEGGCELRVKFSRSADAPAYQQGQNQLYNELNLGRREEYDVLDKRRGRDPEMGGKPRRKNPQEGLYNELQKDKMAEAYSEIGMKGERRRGKGHDGLYQGLSTATKDTYDALHMQALPPR

SEQ ID NO: 206546 - protein, 499 aa, Artificial Sequence
  Description of Artificial Sequence: Synthetic Chimeric Antigen Receptor
MALPVTALLLPLALLLHAARPEVQLVESGGGLVQPGRSLRLSCTASGFTFTDYYMSWVRQAPGKGLEWVGLIRSKADGYTTEYAASVKGRFTISRDDSKSIAYLQMNSLKTEDTAVYYCARDAAYYSYYSPEGAMDYWGQGTLVTVSSGGGGSGGGGSGGGGSMADYKDIQMTQSPSSVSASVGDRVTITCRASQNVDSAVAWYQQKPGKAPKALIYSASYRYSGVPSRFSGSGSGTDFTLTISSLQPEDFATYYCQQYYSTPWTFGQGTKVEIKRTTTPAPRPPTPAPTIASQPLSLRPEACRPAAGGAVHTRGLDFACDIYIWAPLAGTCGVLLLSLVITLYCKRGRKKLLYIFKQPFMRPVQTTQEEDGCSCRFPEEEEGGCELRVKFSRSADAPAYQQGQNQLYNELNLGRREEYDVLDKRRGRDPEMGGKPRRKNPQEGLYNELQKDKMAEAYSEIGMKGERRRGKGHDGLYQGLSTATKDTYDALHMQALPPR

SEQ ID NO: 206547 - protein, 499 aa, Artificial Sequence
  Description of Artificial Sequence: Synthetic Chimeric Antigen Receptor
MALPVTALLLPLALLLHAARPEVQLVESGGGLVQPGRSLRLSCTASGFTFTDYYMSWVRQAPGKGLEWVGLIRSKADGYTTEYAASVKGRFTISRDDSKSIAYLQMNSLKTEDTAVYYCARDAAYYSYYSPEGAMDYWGQGTLVTVSSGGGGSGGGGSGGGGSMADYKDIQMTQSPSSVSASVGDRVTITCRASQNVDSAVAWYQQKPGKAPKLLIYSASYGQSGVPSRFSGSGSGTDFTLTISSLQPEDFATYYCQQYYSTPWTFGQGTKVEIKRTTTPAPRPPTPAPTIASQPLSLRPEACRPAAGGAVHTRGLDFACDIYIWAPLAGTCGVLLLSLVITLYCKRGRKKLLYIFKQPFMRPVQTTQEEDGCSCRFPEEEEGGCELRVKFSRSADAPAYQQGQNQLYNELNLGRREEYDVLDKRRGRDPEMGGKPRRKNPQEGLYNELQKDKMAEAYSEIGMKGERRRGKGHDGLYQGLSTATKDTYDALHMQALPPR

SEQ ID NO: 206548 - protein, 499 aa, Artificial Sequence
  Description of Artificial Sequence: Synthetic Chimeric Antigen Receptor
MALPVTALLLPLALLLHAARPEVQLVESGGGLVQPGRSLRLSCTASGFTFTDYYMSWVRQAPGKGLEWVGLIRSKADGYTTEYAASVKGRFTISRDDSKSIAYLQMNSLKTEDTAVYYCARDAAYYSYYSPEGAMDYWGQGTLVTVSSGGGGSGGGGSGGGGSMADYKDIQMTQSPSSVSASVGDRVTITCRASQNVDSAVAWYQQKPGKAPKLLIYSASYRQSGVPSRFSGSGSGTDFTLTISSLQPEDFATYYCQQYYSTPWTFGQGTKVEIKRTTTPAPRPPTPAPTIASQPLSLRPEACRPAAGGAVHTRGLDFACDIYIWAPLAGTCGVLLLSLVITLYCKRGRKKLLYIFKQPFMRPVQTTQEEDGCSCRFPEEEEGGCELRVKFSRSADAPAYQQGQNQLYNELNLGRREEYDVLDKRRGRDPEMGGKPRRKNPQEGLYNELQKDKMAEAYSEIGMKGERRRGKGHDGLYQGLSTATKDTYDALHMQALPPR

SEQ ID NO: 206549 - protein, 499 aa, Artificial Sequence
  Description of Artificial Sequence: Synthetic Chimeric Antigen Receptor
MALPVTALLLPLALLLHAARPEVQLVESGGGLVQPGRSLRLSCTASGFTFTDYYMSWVRQAPGKGLEWVGLIRSKADGYTTEYAASVKGRFTISRDDSKSIAYLQMNSLKTEDTAVYYCARDAAYYSYYSPEGAMDYWGQGTLVTVSSGGGGSGGGGSGGGGSMADYKDIQMTQSPSSVSASVGDRVTITCRASQNVDSAVAWYQQKPGKAPKLLIYSASYRYSGVPSRFSGSGSGTDFTLTISSLQPEDFATYYCQQYYSTPWTFGQGTKVEIKRTTTPAPRPPTPAPTIASQPLSLRPEACRPAAGGAVHTRGLDFACDIYIWAPLAGTCGVLLLSLVITLYCKRGRKKLLYIFKQPFMRPVQTTQEEDGCSCRFPEEEEGGCELRVKFSRSADAPAYQQGQNQLYNELNLGRREEYDVLDKRRGRDPEMGGKPRRKNPQEGLYNELQKDKMAEAYSEIGMKGERRRGKGHDGLYQGLSTATKDTYDALHMQALPPR

SEQ ID NO: 206550 - protein, 499 aa, Artificial Sequence
  Description of Artificial Sequence: Synthetic Chimeric Antigen Receptor
MALPVTALLLPLALLLHAARPEVQLVESGGGLVQPGRSLRLSCTASGFTFTDYYMSWVRQAPGKGLEWVGLIRSKADGYTTEYAASVKGRFTISRDDSKSIAYLQMNSLKTEDTAVYYCARDAAYYSYYSPEGAMDYWGQGTLVTVSSGGGGSGGGGSGGGGSMADYKDIVMTQSPSSVSASVGDRVTITCRASQNVDSAVAWYQQKPGKAPKALIYSASYRYSGVPSRFSGRGSGTDFTLTISSLQPEDFATYYCQQYYSTPWTFGQGTKVEIKRTTTPAPRPPTPAPTIASQPLSLRPEACRPAAGGAVHTRGLDFACDIYIWAPLAGTCGVLLLSLVITLYCKRGRKKLLYIFKQPFMRPVQTTQEEDGCSCRFPEEEEGGCELRVKFSRSADAPAYQQGQNQLYNELNLGRREEYDVLDKRRGRDPEMGGKPRRKNPQEGLYNELQKDKMAEAYSEIGMKGERRRGKGHDGLYQGLSTATKDTYDALHMQALPPR

SEQ ID NO: 206551 - protein, 499 aa, Artificial Sequence
  Description of Artificial Sequence: Synthetic Chimeric Antigen Receptor
MALPVTALLLPLALLLHAARPEVQLVESGGGLVQPGRSLRLSCTASGFTFTDYYMSWVRQAPGKGLEWVGLIRSKADGYTTEYSASVKGRFTISRDDSKSIAYLQMNSLKTEDTAVYYCARDAAYYSYYSPEGAMDYWGQGTLVTVSSGGGGSGGGGSGGGGSMADYKDIQMTQSPSSVSASVGDRVTITCRASQNVDSAVAWYQQKPGKAPKALIYSASYRYSGVPSRFSGRGSGTDFTLTISSLQPEDFATYYCQQYYSTPWTFGQGTKVEIKRTTTPAPRPPTPAPTIASQPLSLRPEACRPAAGGAVHTRGLDFACDIYIWAPLAGTCGVLLLSLVITLYCKRGRKKLLYIFKQPFMRPVQTTQEEDGCSCRFPEEEEGGCELRVKFSRSADAPAYQQGQNQLYNELNLGRREEYDVLDKRRGRDPEMGGKPRRKNPQEGLYNELQKDKMAEAYSEIGMKGERRRGKGHDGLYQGLSTATKDTYDALHMQALPPR

SEQ ID NO: 206552 - protein, 499 aa, Artificial Sequence
  Description of Artificial Sequence: Synthetic Chimeric Antigen Receptor
MALPVTALLLPLALLLHAARPEVQLVESGGGLVQPGRSLRLSCTASGFTFTDYYMSWVRQAPGKGLEWVGLIRSKADGYTTEYSASVKGRFTISRDDSKSIAYLQMNSLKTEDTAVYYCARDAAYYSYYSPEGAMDYWGQGTLVTVSSGGGGSGGGGSGGGGSMADYKDIQMTQSPSSVSASVGDRVTITCRASQNVDSAVAWYQQKPGKAPKALIYSASYRYSGVPSRFSGSGSGTDFTLTISSLQPEDFATYYCQQYYSTPWTFGQGTKVEIKRTTTPAPRPPTPAPTIASQPLSLRPEACRPAAGGAVHTRGLDFACDIYIWAPLAGTCGVLLLSLVITLYCKRGRKKLLYIFKQPFMRPVQTTQEEDGCSCRFPEEEEGGCELRVKFSRSADAPAYQQGQNQLYNELNLGRREEYDVLDKRRGRDPEMGGKPRRKNPQEGLYNELQKDKMAEAYSEIGMKGERRRGKGHDGLYQGLSTATKDTYDALHMQALPPR

SEQ ID NO: 206553 - protein, 499 aa, Artificial Sequence
  Description of Artificial Sequence: Synthetic Chimeric Antigen Receptor
MALPVTALLLPLALLLHAARPEVQLVESGGGLVQPGRSLRLSCTASGFTFTDYYMSWVRQAPGKGLEWVGLIRSKADGYTTEYSASVKGRFTISRDDSKSIAYLQMNSLKTEDTAVYYCARDAAYYSYYSPEGAMDYWGQGTLVTVSSGGGGSGGGGSGGGGSMADYKDIQMTQSPSSVSASVGDRVTITCRASQNVDSAVAWYQQKPGKAPKLLIYSASYGQSGVPSRFSGSGSGTDFTLTISSLQPEDFATYYCQQYYSTPWTFGQGTKVEIKRTTTPAPRPPTPAPTIASQPLSLRPEACRPAAGGAVHTRGLDFACDIYIWAPLAGTCGVLLLSLVITLYCKRGRKKLLYIFKQPFMRPVQTTQEEDGCSCRFPEEEEGGCELRVKFSRSADAPAYQQGQNQLYNELNLGRREEYDVLDKRRGRDPEMGGKPRRKNPQEGLYNELQKDKMAEAYSEIGMKGERRRGKGHDGLYQGLSTATKDTYDALHMQALPPR

SEQ ID NO: 206554 - protein, 499 aa, Artificial Sequence
  Description of Artificial Sequence: Synthetic Chimeric Antigen Receptor
MALPVTALLLPLALLLHAARPEVQLVESGGGLVQPGRSLRLSCTASGFTFTDYYMSWVRQAPGKGLEWVGLIRSKADGYTTEYSASVKGRFTISRDDSKSIAYLQMNSLKTEDTAVYYCARDAAYYSYYSPEGAMDYWGQGTLVTVSSGGGGSGGGGSGGGGSMADYKDIQMTQSPSSVSASVGDRVTITCRASQNVDSAVAWYQQKPGKAPKLLIYSASYRQSGVPSRFSGSGSGTDFTLTISSLQPEDFATYYCQQYYSTPWTFGQGTKVEIKRTTTPAPRPPTPAPTIASQPLSLRPEACRPAAGGAVHTRGLDFACDIYIWAPLAGTCGVLLLSLVITLYCKRGRKKLLYIFKQPFMRPVQTTQEEDGCSCRFPEEEEGGCELRVKFSRSADAPAYQQGQNQLYNELNLGRREEYDVLDKRRGRDPEMGGKPRRKNPQEGLYNELQKDKMAEAYSEIGMKGERRRGKGHDGLYQGLSTATKDTYDALHMQALPPR

SEQ ID NO: 206555 - protein, 499 aa, Artificial Sequence
  Description of Artificial Sequence: Synthetic Chimeric Antigen Receptor
MALPVTALLLPLALLLHAARPEVQLVESGGGLVQPGRSLRLSCTASGFTFTDYYMSWVRQAPGKGLEWVGLIRSKADGYTTEYSASVKGRFTISRDDSKSIAYLQMNSLKTEDTAVYYCARDAAYYSYYSPEGAMDYWGQGTLVTVSSGGGGSGGGGSGGGGSMADYKDIQMTQSPSSVSASVGDRVTITCRASQNVDSAVAWYQQKPGKAPKLLIYSASYRYSGVPSRFSGSGSGTDFTLTISSLQPEDFATYYCQQYYSTPWTFGQGTKVEIKRTTTPAPRPPTPAPTIASQPLSLRPEACRPAAGGAVHTRGLDFACDIYIWAPLAGTCGVLLLSLVITLYCKRGRKKLLYIFKQPFMRPVQTTQEEDGCSCRFPEEEEGGCELRVKFSRSADAPAYQQGQNQLYNELNLGRREEYDVLDKRRGRDPEMGGKPRRKNPQEGLYNELQKDKMAEAYSEIGMKGERRRGKGHDGLYQGLSTATKDTYDALHMQALPPR

SEQ ID NO: 206556 - protein, 499 aa, Artificial Sequence
  Description of Artificial Sequence: Synthetic Chimeric Antigen Receptor
MALPVTALLLPLALLLHAARPEVQLVESGGGLVQPGRSLRLSCTASGFTFTDYYMSWVRQAPGKGLEWVGLIRSKADGYTTEYSASVKGRFTISRDDSKSIAYLQMNSLKTEDTAVYYCARDAAYYSYYSPEGAMDYWGQGTLVTVSSGGGGSGGGGSGGGGSMADYKDIVMTQSPSSVSASVGDRVTITCRASQNVDSAVAWYQQKPGKAPKALIYSASYRYSGVPSRFSGRGSGTDFTLTISSLQPEDFATYYCQQYYSTPWTFGQGTKVEIKRTTTPAPRPPTPAPTIASQPLSLRPEACRPAAGGAVHTRGLDFACDIYIWAPLAGTCGVLLLSLVITLYCKRGRKKLLYIFKQPFMRPVQTTQEEDGCSCRFPEEEEGGCELRVKFSRSADAPAYQQGQNQLYNELNLGRREEYDVLDKRRGRDPEMGGKPRRKNPQEGLYNELQKDKMAEAYSEIGMKGERRRGKGHDGLYQGLSTATKDTYDALHMQALPPR

SEQ ID NO: 206557 - protein, 499 aa, Artificial Sequence
  Description of Artificial Sequence: Synthetic Chimeric Antigen Receptor
MALPVTALLLPLALLLHAARPEVQLVESGGGLVQPGRSLRLSCTASGFTFTDYYMSWVRQAPGKGLEWVGLIRSKADGYTTEYSASVKGRFTISRDDSKSILYLQMNSLKTEDTAVYYCARDAAYYSYYSPEGAMDYWGQGTLVTVSSGGGGSGGGGSGGGGSMADYKDIQMTQSPSSVSASVGDRVTITCRASQNVDSAVAWYQQKPGKAPKALIYSASYRYSGVPSRFSGRGSGTDFTLTISSLQPEDFATYYCQQYYSTPWTFGQGTKVEIKRTTTPAPRPPTPAPTIASQPLSLRPEACRPAAGGAVHTRGLDFACDIYIWAPLAGTCGVLLLSLVITLYCKRGRKKLLYIFKQPFMRPVQTTQEEDGCSCRFPEEEEGGCELRVKFSRSADAPAYQQGQNQLYNELNLGRREEYDVLDKRRGRDPEMGGKPRRKNPQEGLYNELQKDKMAEAYSEIGMKGERRRGKGHDGLYQGLSTATKDTYDALHMQALPPR

SEQ ID NO: 206558 - protein, 499 aa, Artificial Sequence
  Description of Artificial Sequence: Synthetic Chimeric Antigen Receptor
MALPVTALLLPLALLLHAARPEVQLVESGGGLVQPGRSLRLSCTASGFTFTDYYMSWVRQAPGKGLEWVGLIRSKADGYTTEYSASVKGRFTISRDDSKSILYLQMNSLKTEDTAVYYCARDAAYYSYYSPEGAMDYWGQGTLVTVSSGGGGSGGGGSGGGGSMADYKDIQMTQSPSSVSASVGDRVTITCRASQNVDSAVAWYQQKPGKAPKALIYSASYRYSGVPSRFSGSGSGTDFTLTISSLQPEDFATYYCQQYYSTPWTFGQGTKVEIKRTTTPAPRPPTPAPTIASQPLSLRPEACRPAAGGAVHTRGLDFACDIYIWAPLAGTCGVLLLSLVITLYCKRGRKKLLYIFKQPFMRPVQTTQEEDGCSCRFPEEEEGGCELRVKFSRSADAPAYQQGQNQLYNELNLGRREEYDVLDKRRGRDPEMGGKPRRKNPQEGLYNELQKDKMAEAYSEIGMKGERRRGKGHDGLYQGLSTATKDTYDALHMQALPPR

SEQ ID NO: 206559 - protein, 499 aa, Artificial Sequence
  Description of Artificial Sequence: Synthetic Chimeric Antigen Receptor
MALPVTALLLPLALLLHAARPEVQLVESGGGLVQPGRSLRLSCTASGFTFTDYYMSWVRQAPGKGLEWVGLIRSKADGYTTEYSASVKGRFTISRDDSKSILYLQMNSLKTEDTAVYYCARDAAYYSYYSPEGAMDYWGQGTLVTVSSGGGGSGGGGSGGGGSMADYKDIQMTQSPSSVSASVGDRVTITCRASQNVDSAVAWYQQKPGKAPKLLIYSASYGQSGVPSRFSGSGSGTDFTLTISSLQPEDFATYYCQQYYSTPWTFGQGTKVEIKRTTTPAPRPPTPAPTIASQPLSLRPEACRPAAGGAVHTRGLDFACDIYIWAPLAGTCGVLLLSLVITLYCKRGRKKLLYIFKQPFMRPVQTTQEEDGCSCRFPEEEEGGCELRVKFSRSADAPAYQQGQNQLYNELNLGRREEYDVLDKRRGRDPEMGGKPRRKNPQEGLYNELQKDKMAEAYSEIGMKGERRRGKGHDGLYQGLSTATKDTYDALHMQALPPR

SEQ ID NO: 206560 - protein, 499 aa, Artificial Sequence
  Description of Artificial Sequence: Synthetic Chimeric Antigen Receptor
MALPVTALLLPLALLLHAARPEVQLVESGGGLVQPGRSLRLSCTASGFTFTDYYMSWVRQAPGKGLEWVGLIRSKADGYTTEYSASVKGRFTISRDDSKSILYLQMNSLKTEDTAVYYCARDAAYYSYYSPEGAMDYWGQGTLVTVSSGGGGSGGGGSGGGGSMADYKDIQMTQSPSSVSASVGDRVTITCRASQNVDSAVAWYQQKPGKAPKLLIYSASYRQSGVPSRFSGSGSGTDFTLTISSLQPEDFATYYCQQYYSTPWTFGQGTKVEIKRTTTPAPRPPTPAPTIASQPLSLRPEACRPAAGGAVHTRGLDFACDIYIWAPLAGTCGVLLLSLVITLYCKRGRKKLLYIFKQPFMRPVQTTQEEDGCSCRFPEEEEGGCELRVKFSRSADAPAYQQGQNQLYNELNLGRREEYDVLDKRRGRDPEMGGKPRRKNPQEGLYNELQKDKMAEAYSEIGMKGERRRGKGHDGLYQGLSTATKDTYDALHMQALPPR

SEQ ID NO: 206561 - protein, 499 aa, Artificial Sequence
  Description of Artificial Sequence: Synthetic Chimeric Antigen Receptor
MALPVTALLLPLALLLHAARPEVQLVESGGGLVQPGRSLRLSCTASGFTFTDYYMSWVRQAPGKGLEWVGLIRSKADGYTTEYSASVKGRFTISRDDSKSILYLQMNSLKTEDTAVYYCARDAAYYSYYSPEGAMDYWGQGTLVTVSSGGGGSGGGGSGGGGSMADYKDIQMTQSPSSVSASVGDRVTITCRASQNVDSAVAWYQQKPGKAPKLLIYSASYRYSGVPSRFSGSGSGTDFTLTISSLQPEDFATYYCQQYYSTPWTFGQGTKVEIKRTTTPAPRPPTPAPTIASQPLSLRPEACRPAAGGAVHTRGLDFACDIYIWAPLAGTCGVLLLSLVITLYCKRGRKKLLYIFKQPFMRPVQTTQEEDGCSCRFPEEEEGGCELRVKFSRSADAPAYQQGQNQLYNELNLGRREEYDVLDKRRGRDPEMGGKPRRKNPQEGLYNELQKDKMAEAYSEIGMKGERRRGKGHDGLYQGLSTATKDTYDALHMQALPPR

SEQ ID NO: 206562 - protein, 499 aa, Artificial Sequence
  Description of Artificial Sequence: Synthetic Chimeric Antigen Receptor
MALPVTALLLPLALLLHAARPEVQLVESGGGLVQPGRSLRLSCTASGFTFTDYYMSWVRQAPGKGLEWVGLIRSKADGYTTEYSASVKGRFTISRDDSKSILYLQMNSLKTEDTAVYYCARDAAYYSYYSPEGAMDYWGQGTLVTVSSGGGGSGGGGSGGGGSMADYKDIVMTQSPSSVSASVGDRVTITCRASQNVDSAVAWYQQKPGKAPKALIYSASYRYSGVPSRFSGRGSGTDFTLTISSLQPEDFATYYCQQYYSTPWTFGQGTKVEIKRTTTPAPRPPTPAPTIASQPLSLRPEACRPAAGGAVHTRGLDFACDIYIWAPLAGTCGVLLLSLVITLYCKRGRKKLLYIFKQPFMRPVQTTQEEDGCSCRFPEEEEGGCELRVKFSRSADAPAYQQGQNQLYNELNLGRREEYDVLDKRRGRDPEMGGKPRRKNPQEGLYNELQKDKMAEAYSEIGMKGERRRGKGHDGLYQGLSTATKDTYDALHMQALPPR

SEQ ID NO: 206563 - protein, 501 aa, Artificial Sequence
  Description of Artificial Sequence: Synthetic Chimeric Antigen Receptor
MALPVTALLLPLALLLHAARPQIQLVQSGPELKKPGETVKISCKASGYIFTNYGMNWVKQAPGKSFKWMGWINTYTGESTYSADFKGRFAFSLETSASTAYLHINDLKNEDTATYFCARSGGYDPMDYWGQGTSVTVSSGGGGGGCPYSNPSLCGGGGGGGSDIVLTQSPASLAVSLGQRATISCRASESVDNYGNTFMHWYQQKPGQPPKLLIYRASNLESGIPARFSGSGSRTDFTLTINPVEADDVATYYCQQSNEDPPTFGAGTKLELKRSDPTTTPAPRPPTPAPTIASQPLSLRPEACRPAAGGAVHTRGLDFACDIYIWAPLAGTCGVLLLSLVITLYCRRGRKKLLYIFKQPFMRPVQTTQEEDGCSCRFPEEEEGGCELRVKFSRSADAPAYQQGQNQLYNELNLGRREEYDVLDKRRGRDPEMGGKPRRKNPQEGLYNELQKDKMAEAYSEIGMKGERRRGKGHDGLYQGLSTATKDTYDALHMQALPPRE

SEQ ID NO: 206564 - protein, 508 aa, Artificial Sequence
  Description of Artificial Sequence: Synthetic Chimeric Antigen Receptor
MALPVTALLLPLALLLHAARPGGGGSCPYSNPSLCGQIQLVQSGPELKKPGETVKISCKASGYIFTNYGMNWVKQAPGKSFKWMGWINTYTGESTYSADFKGRFAFSLETSASTAYLHINDLKNEDTATYFCARSGGYDPMDYWGQGTSVTVSSGGGGSGGGGSGGGGSDIVLTQSPASLAVSLGQRATISCRASESVDNYGNTFMHWYQQKPGQPPKLLIYRASNLESGIPARFSGSGSRTDFTLTINPVEADDVATYYCQQSNEDPPTFGAGTKLELKRSDPTTTPAPRPPTPAPTIASQPLSLRPEACRPAAGGAVHTRGLDFACDIYIWAPLAGTCGVLLLSLVITLYCRRGRKKLLYIFKQPFMRPVQTTQEEDGCSCRFPEEEEGGCELRVKFSRSADAPAYQQGQNQLYNELNLGRREEYDVLDKRRGRDPEMGGKPRRKNPQEGLYNELQKDKMAEAYSEIGMKGERRRGKGHDGLYQGLSTATKDTYDALHMQALPPRE

SEQ ID NO: 206565 - protein, 510 aa, Artificial Sequence
  Description of Artificial Sequence: Synthetic Chimeric Antigen Receptor
WTWRFLFVVAAATGVQSQVQLLQSGAEVKKPGSSVKVSCKASGGTFSTYAISWVRQAPGQGLEWMGGIIPIFGIVNYAQKFQGRVTITADESTSTAYMELSSLRSEDTAVYYCARGGGSGPDVLDIWGQGTMVTVSSASTGGGGSGGGGSGGGGSMDMRVPAQLLGLLLLWLPGARCVIWMTQSPSLLSASTGDRVTISCRMSQGIRSYLAWYQQKPGKAPELLIYAASTLQSGVPSRFSGSGSGTDFTLTISSLQSEDFATYYCQQYYSFPYTFGQGTKLEIKRTVTTTPAPRPPTPAPTIASQPLSLRPEACRPAAGGAVHTRGLDFACDIYIWAPLAGTCGVLLLSLVITLYCKRGRKKLLYIFKQPFMRPVQTTQEEDGCSCRFPEEEEGGCELRVKFSRSADAPAYQQGQNQLYNELNLGRREEYDVLDKRRGRDPEMGGKPRRKNPQEGLYNELQKDKMAEAYSEIGMKGERRRGKGHDGLYQGLSTATKDTYDALHMQALPPR

SEQ ID NO: 206566 - protein, 511 aa, Artificial Sequence
  Description of Artificial Sequence: Synthetic Chimeric Antigen Receptor
MALPVTALLLPLALLLHAARPQIQLVQSGPELKKPGETVKISCKASGYIFTNYGMNWVKQAPGKSFKWMGWINTYTGESTYSADFKGRFAFSLETSASTAYLHINDLKNEDTATYFCARSGGYDPMDYWGQGTSVTVSSGGGGSGGGGSGGGGSDIVLTQSPASLAVSLGQRATISCRASESVDNYGNTFMHWYQQKPGQPPKLLIYRASNLESGIPARFSGSGSRTDFTLTINPVEADDVATYYCQQSNEDPPTFGAGTKLELKRSDPGSGGGGSCPYSNPSLCAPTTTPAPRPPTPAPTIASQPLSLRPEACRPAAGGAVHTRGLDFACDIYIWAPLAGTCGVLLLSLVITLYCRRGRKKLLYIFKQPFMRPVQTTQEEDGCSCRFPEEEEGGCELRVKFSRSADAPAYQQGQNQLYNELNLGRREEYDVLDKRRGRDPEMGGKPRRKNPQEGLYNELQKDKMAEAYSEIGMKGERRRGKGHDGLYQGLSTATKDTYDALHMQALPPRE

SEQ ID NO: 206567 - protein, 513 aa, Artificial Sequence
  Description of Artificial Sequence: Synthetic Chimeric Antigen Receptor
MGWSWIFLFLVSGTGGVLSEVQLQQSGPELVKPGASVKMSCKASGYTFTDYYMKWVKQSHGKSLEWIGDIIPSNGATFYNQKFKGKATLTVDRSSSTAYMHLNSLTSEDSAVYYCTRSHLLRASWFAYWGQGTLVTVSAASGGGGSGGGGSGGGGSMESQTQVLMSLLFWVSGTCGDFVMTQSPSSLTVTAGEKVTMSCKSSQSLLNSGNQKNYLTWYLQKPGQPPKLLIYWASTRESGVPDRFTGSGSGTDFTLTISSVQAEDLAVYYCQNDYSYPYTFGGGTKLEIKRTTTPAPRPPTPAPTIASQPLSLRPEACRPAAGGAVHTRGLDFACDIYIWAPLAGTCGVLLLSLVITLYCKRGRKKLLYIFKQPFMRPVQTTQEEDGCSCRFPEEEEGGCELRVKFSRSADAPAYQQGQNQLYNELNLGRREEYDVLDKRRGRDPEMGGKPRRKNPQEGLYNELQKDKMAEAYSEIGMKGERRRGKGHDGLYQGLSTATKDTYDALHMQALPPR

SEQ ID NO: 206568 - protein, 514 aa, Artificial Sequence
  Description of Artificial Sequence: Synthetic Chimeric Antigen Receptor
MALPVTALLLPLALLLHAARPGGGGSCPYSNPSLCSGGGGSGQIQLVQSGPELKKPGETVKISCKASGYIFTNYGMNWVKQAPGKSFKWMGWINTYTGESTYSADFKGRFAFSLETSASTAYLHINDLKNEDTATYFCARSGGYDPMDYWGQGTSVTVSSGGGGSGGGGSGGGGSDIVLTQSPASLAVSLGQRATISCRASESVDNYGNTFMHWYQQKPGQPPKLLIYRASNLESGIPARFSGSGSRTDFTLTINPVEADDVATYYCQQSNEDPPTFGAGTKLELKRSDPTTTPAPRPPTPAPTIASQPLSLRPEACRPAAGGAVHTRGLDFACDIYIWAPLAGTCGVLLLSLVITLYCRRGRKKLLYIFKQPFMRPVQTTQEEDGCSCRFPEEEEGGCELRVKFSRSADAPAYQQGQNQLYNELNLGRREEYDVLDKRRGRDPEMGGKPRRKNPQEGLYNELQKDKMAEAYSEIGMKGERRRGKGHDGLYQGLSTATKDTYDALHMQALPPRE

SEQ ID NO: 206569 - protein, 516 aa, Artificial Sequence
  Description of Artificial Sequence: Synthetic Chimeric Antigen Receptor
MGWSWIFLFLVSGTGGVLSEVQLQQSGPELVKPGASVKMSCKASGYTFTDYYMKWVKQSHGKSLEWIGDIIPSNGATFYNQKFKGKATLTVDRSSSTAYMHLNSLTSEDSAVYYCTRSHLLRASWFAYWGQGTLVTVSAASGGGGSGGGGSGGGGSMESQTQVLMSLLFWVSGTCGDFVMTQSPSSLTVTAGEKVTMSCKSSQSLLNSGNQKNYLTWYLQKPGQPPKLLIYWASTRESGVPDRFTGSGSGTDFTLTISSVQAEDLAVYYCQNDYSYPYTFGGGTKLEIKRTTTPAPRPPTPAPTIASQPLSLRPEACRPAAGGAVHTRGLDFACDIISFFLALTSTALLFLLFFLTLRFSVVKRGRKKLLYIFKQPFMRPVQTTQEEDGCSCRFPEEEEGGCELRVKFSRSADAPAYQQGQNQLYNELNLGRREEYDVLDKRRGRDPEMGGKPRRKNPQEGLYNELQKDKMAEAYSEIGMKGERRRGKGHDGLYQGLSTATKDTYDALHMQALPPR

SEQ ID NO: 206570 - protein, 517 aa, Artificial Sequence
  Description of Artificial Sequence: Synthetic Chimeric Antigen Receptor
MALPVTALLLPLALLLHAARPQIQLVQSGPELKKPGETVKISCKASGYIFTNYGMNWVKQAPGKSFKWMGWINTYTGESTYSADFKGRFAFSLETSASTAYLHINDLKNEDTATYFCARSGGYDPMDYWGQGTSVTVSSGGGGSGGGGSGGGGSDIVLTQSPASLAVSLGQRATISCRASESVDNYGNTFMHWYQQKPGQPPKLLIYRASNLESGIPARFSGSGSRTDFTLTINPVEADDVATYYCQQSNEDPPTFGAGTKLELKRSDPGSGGGGSCPYSNPSLCSGGGGSAPTTTPAPRPPTPAPTIASQPLSLRPEACRPAAGGAVHTRGLDFACDIYIWAPLAGTCGVLLLSLVITLYCRRGRKKLLYIFKQPFMRPVQTTQEEDGCSCRFPEEEEGGCELRVKFSRSADAPAYQQGQNQLYNELNLGRREEYDVLDKRRGRDPEMGGKPRRKNPQEGLYNELQKDKMAEAYSEIGMKGERRRGKGHDGLYQGLSTATKDTYDALHMQALPPRE

SEQ ID NO: 206571 - protein, 520 aa, Artificial Sequence
  Description of Artificial Sequence: Synthetic Chimeric Antigen Receptor
GPVPPSTALRYLIEELVNITQNQKAPLCNGSMVWSINLTAGMYCAALESLINVSGCSAIEKTQRMLSGFCPHKVSAGQFSSLHVRDTKIEVAQFVKDLLLHLKKLFREGRFNESKYGPPCPPCPAPEFEGGPSVFLFPPKPKDTLMISRTPEVTCVVVDVSQEDPEVQFNWYVDGVEVHNAKTKPREEQFQSTYRVVSVLTVLHQDWLNGKEYKCKVSNKGLPSSIEKTISKAKGQPREPQVYTLPPSQEEMTKNQVSLTCLVKGFYPSDIAVEWESNGQPENNYKTTPPVLDSDGSFFLYSRLTVDKSRWQEGNVFSCSVMHEALHNHYTQKSLSLSLGKMALIVLGGVAGLLLFIGLGIFFKRGRKKLLYIFKQPFMRPVQTTQEEDGCSCRFPEEEEGGCELGGGRVKFSRSADAPAYQQGQNQLYNELNLGRREEYDVLDKRRGRDPEMGGKPRRKNPQEGLYNELQKDKMAEAYSEIGMKGERRRGKGHDGLYQGLSTATKDTYDALHMQALPPR

SEQ ID NO: 206572 - protein, 523 aa, Artificial Sequence
  Description of Artificial Sequence: Synthetic Chimeric Antigen Receptor
MALPVTALLLPLALLLHAARPGGGGSCPYSNPSLCSGGGGSCPYSNPSLCGQIQLVQSGPELKKPGETVKISCKASGYIFTNYGMNWVKQAPGKSFKWMGWINTYTGESTYSADFKGRFAFSLETSASTAYLHINDLKNEDTATYFCARSGGYDPMDYWGQGTSVTVSSGGGGSGGGGSGGGGSDIVLTQSPASLAVSLGQRATISCRASESVDNYGNTFMHWYQQKPGQPPKLLIYRASNLESGIPARFSGSGSRTDFTLTINPVEADDVATYYCQQSNEDPPTFGAGTKLELKRSDPTTTPAPRPPTPAPTIASQPLSLRPEACRPAAGGAVHTRGLDFACDIYIWAPLAGTCGVLLLSLVITLYCRRGRKKLLYIFKQPFMRPVQTTQEEDGCSCRFPEEEEGGCELRVKFSRSADAPAYQQGQNQLYNELNLGRREEYDVLDKRRGRDPEMGGKPRRKNPQEGLYNELQKDKMAEAYSEIGMKGERRRGKGHDGLYQGLSTATKDTYDALHMQALPPRE

SEQ ID NO: 206573 - protein, 526 aa, Artificial Sequence
  Description of Artificial Sequence: Synthetic Chimeric Antigen Receptor
MALPVTALLLPLALLLHAARPEVKLVESGGGLVQPGGSLSLSCAASGFTFTDYYMSWVRQPPGKALEWLALIRSKADGYTTEYSASVKGRFTLSRDDSQSILYLQMNALRPEDSATYYCARDAAYYSYYSPEGAMDYWGQGTSVTVSSGGGGSGGGGSGGGGSMADYKDIVMTQSHKFMSTSVGDRVNITCKASQNVDSAVAWYQQKPGQSPKALIYSASYRYSGVPDRFTGRGSGTDFTLTISSVQAEDLAVYYCQQYYSTPWTFGGGTKLEIKRGSGGGGSCPYSNPSLCSGGGGSCPYSNPSLCSGGGGSAPTIASQPLSLRPEACRPAAGGAVHTRGLDFACDIYIWAPLAGTCGVLLLSLVITLYCRRGRKKLLYIFKQPFMRPVQTTQEEDGCSCRFPEEEEGGCELRVKFSRSADAPAYQQGQNQLYNELNLGRREEYDVLDKRRGRDPEMGGKPRRKNPQEGLYNELQKDKMAEAYSEIGMKGERRRGKGHDGLYQGLSTATKDTYDALHMQALPPRE

SEQ ID NO: 206574 - protein, 526 aa, Artificial Sequence
  Description of Artificial Sequence: Synthetic Chimeric Antigen Receptor
MALPVTALLLPLALLLHAARPQIQLVQSGPELKKPGETVKISCKASGYIFTNYGMNWVKQAPGKSFKWMGWINTYTGESTYSADFKGRFAFSLETSASTAYLHINDLKNEDTATYFCARSGGYDPMDYWGQGTSVTVSSGGGGSGGGGSGGGGSDIVLTQSPASLAVSLGQRATISCRASESVDNYGNTFMHWYQQKPGQPPKLLIYRASNLESGIPARFSGSGSRTDFTLTINPVEADDVATYYCQQSNEDPPTFGAGTKLELKRSDPGSGGGGSCPYSNPSLCSGGGGSCPYSNPSLCAPTTTPAPRPPTPAPTIASQPLSLRPEACRPAAGGAVHTRGLDFACDIYIWAPLAGTCGVLLLSLVITLYCRRGRKKLLYIFKQPFMRPVQTTQEEDGCSCRFPEEEEGGCELRVKFSRSADAPAYQQGQNQLYNELNLGRREEYDVLDKRRGRDPEMGGKPRRKNPQEGLYNELQKDKMAEAYSEIGMKGERRRGKGHDGLYQGLSTATKDTYDALHMQALPPRE

SEQ ID NO: 206575 - protein, 529 aa, Artificial Sequence
  Description of Artificial Sequence: Synthetic Chimeric Antigen Receptor
MALPVTALLLPLALLLHAARPGGGGSCPYSNPSLCSGGGGSCPYSNPSLCSGGGGSGQIQLVQSGPELKKPGETVKISCKASGYIFTNYGMNWVKQAPGKSFKWMGWINTYTGESTYSADFKGRFAFSLETSASTAYLHINDLKNEDTATYFCARSGGYDPMDYWGQGTSVTVSSGGGGSGGGGSGGGGSDIVLTQSPASLAVSLGQRATISCRASESVDNYGNTFMHWYQQKPGQPPKLLIYRASNLESGIPARFSGSGSRTDFTLTINPVEADDVATYYCQQSNEDPPTFGAGTKLELKRSDPTTTPAPRPPTPAPTIASQPLSLRPEACRPAAGGAVHTRGLDFACDIYIWAPLAGTCGVLLLSLVITLYCRRGRKKLLYIFKQPFMRPVQTTQEEDGCSCRFPEEEEGGCELRVKFSRSADAPAYQQGQNQLYNELNLGRREEYDVLDKRRGRDPEMGGKPRRKNPQEGLYNELQKDKMAEAYSEIGMKGERRRGKGHDGLYQGLSTATKDTYDALHMQALPPRE

SEQ ID NO: 206576 - protein, 531 aa, Artificial Sequence
  Description of Artificial Sequence: Synthetic Chimeric Antigen Receptor
MALPVTALLLPLALLLHAARPEVKLVESGGGLVQPGRSLRLSCTASGFTFTDYYMSWVRQAPGKGLEWVGLIRSKADGYTTEYSASVKGRFTISRDDSKSILYLQMNSLKTEDTAVYYCARDAAYYSYYSPEGAMDYWGQGTLVTVSSGGGGSGGGGSGGGGSMADYKDIQMTQSPSSVSASVGDRVTITCRASQNVDSAVAWYQQKPGKAPKALIYSASYRYSGVPSRFSGRGSGTDFTLTISSLQPEDFATYYCQQYYSTPWTFGQGTKVEIKREPKSPDKTHTCPPCPAPPVAGPSVFLFPPKPKDTLMIARTPEVTCVVVDVSHEDPEVKFNWYVDGVEVHNAKTKPREEQYNSTYRVVSVLTVLHQDWLNGKEYKCKVSNKALPAPIEKTISKAKGQPREPQVYTLPPSRDELTKNQVSLTCLVKGFYPSDIAVEWESNGQPENNYKTTPPVLDSDGSFFLYSKLTVDKSRWQQGNVFSCSVMHEALHNHYTQKSLSLSPGKIYIWAPLAGTCGVLLLSLVITLYC

SEQ ID NO: 206577 - protein, 531 aa, Artificial Sequence
  Description of Artificial Sequence: Synthetic Chimeric Antigen Receptor
MALPVTALLLPLALLLHAARPEVKLVESGGGLVQPGRSLRLSCTASGFTFTDYYMSWVRQAPGKGLEWVGLIRSKADGYTTEYSASVKGRFTISRDDSKSILYLQMNSLKTEDTAVYYCARDAAYYSYYSPEGAMDYWGQGTLVTVSSGGGGSGGGGSGGGGSMADYKDIQMTQSPSSVSASVGDRVTITCRASQNVDSAVAWYQQKPGKAPKALIYSASYRYSGVPSRFSGSGSGTDFTLTISSLQPEDFATYYCQQYYSTPWTFGQGTKVEIKREPKSPDKTHTCPPCPAPPVAGPSVFLFPPKPKDTLMIARTPEVTCVVVDVSHEDPEVKFNWYVDGVEVHNAKTKPREEQYNSTYRVVSVLTVLHQDWLNGKEYKCKVSNKALPAPIEKTISKAKGQPREPQVYTLPPSRDELTKNQVSLTCLVKGFYPSDIAVEWESNGQPENNYKTTPPVLDSDGSFFLYSKLTVDKSRWQQGNVFSCSVMHEALHNHYTQKSLSLSPGKIYIWAPLAGTCGVLLLSLVITLYC

SEQ ID NO: 206578 - protein, 531 aa, Artificial Sequence
  Description of Artificial Sequence: Synthetic Chimeric Antigen Receptor
MALPVTALLLPLALLLHAARPEVKLVESGGGLVQPGRSLRLSCTASGFTFTDYYMSWVRQAPGKGLEWVGLIRSKADGYTTEYSASVKGRFTISRDDSKSILYLQMNSLKTEDTAVYYCARDAAYYSYYSPEGAMDYWGQGTLVTVSSGGGGSGGGGSGGGGSMADYKDIQMTQSPSSVSASVGDRVTITCRASQNVDSAVAWYQQKPGKAPKLLIYSASYGQSGVPSRFSGSGSGTDFTLTISSLQPEDFATYYCQQYYSTPWTFGQGTKVEIKREPKSPDKTHTCPPCPAPPVAGPSVFLFPPKPKDTLMIARTPEVTCVVVDVSHEDPEVKFNWYVDGVEVHNAKTKPREEQYNSTYRVVSVLTVLHQDWLNGKEYKCKVSNKALPAPIEKTISKAKGQPREPQVYTLPPSRDELTKNQVSLTCLVKGFYPSDIAVEWESNGQPENNYKTTPPVLDSDGSFFLYSKLTVDKSRWQQGNVFSCSVMHEALHNHYTQKSLSLSPGKIYIWAPLAGTCGVLLLSLVITLYC

SEQ ID NO: 206579 - protein, 531 aa, Artificial Sequence
  Description of Artificial Sequence: Synthetic Chimeric Antigen Receptor
MALPVTALLLPLALLLHAARPEVKLVESGGGLVQPGRSLRLSCTASGFTFTDYYMSWVRQAPGKGLEWVGLIRSKADGYTTEYSASVKGRFTISRDDSKSILYLQMNSLKTEDTAVYYCARDAAYYSYYSPEGAMDYWGQGTLVTVSSGGGGSGGGGSGGGGSMADYKDIQMTQSPSSVSASVGDRVTITCRASQNVDSAVAWYQQKPGKAPKLLIYSASYRQSGVPSRFSGSGSGTDFTLTISSLQPEDFATYYCQQYYSTPWTFGQGTKVEIKREPKSPDKTHTCPPCPAPPVAGPSVFLFPPKPKDTLMIARTPEVTCVVVDVSHEDPEVKFNWYVDGVEVHNAKTKPREEQYNSTYRVVSVLTVLHQDWLNGKEYKCKVSNKALPAPIEKTISKAKGQPREPQVYTLPPSRDELTKNQVSLTCLVKGFYPSDIAVEWESNGQPENNYKTTPPVLDSDGSFFLYSKLTVDKSRWQQGNVFSCSVMHEALHNHYTQKSLSLSPGKIYIWAPLAGTCGVLLLSLVITLYC

SEQ ID NO: 206580 - protein, 531 aa, Artificial Sequence
  Description of Artificial Sequence: Synthetic Chimeric Antigen Receptor
MALPVTALLLPLALLLHAARPEVKLVESGGGLVQPGRSLRLSCTASGFTFTDYYMSWVRQAPGKGLEWVGLIRSKADGYTTEYSASVKGRFTISRDDSKSILYLQMNSLKTEDTAVYYCARDAAYYSYYSPEGAMDYWGQGTLVTVSSGGGGSGGGGSGGGGSMADYKDIQMTQSPSSVSASVGDRVTITCRASQNVDSAVAWYQQKPGKAPKLLIYSASYRYSGVPSRFSGSGSGTDFTLTISSLQPEDFATYYCQQYYSTPWTFGQGTKVEIKREPKSPDKTHTCPPCPAPPVAGPSVFLFPPKPKDTLMIARTPEVTCVVVDVSHEDPEVKFNWYVDGVEVHNAKTKPREEQYNSTYRVVSVLTVLHQDWLNGKEYKCKVSNKALPAPIEKTISKAKGQPREPQVYTLPPSRDELTKNQVSLTCLVKGFYPSDIAVEWESNGQPENNYKTTPPVLDSDGSFFLYSKLTVDKSRWQQGNVFSCSVMHEALHNHYTQKSLSLSPGKIYIWAPLAGTCGVLLLSLVITLYC

SEQ ID NO: 206581 - protein, 531 aa, Artificial Sequence
  Description of Artificial Sequence: Synthetic Chimeric Antigen Receptor
MALPVTALLLPLALLLHAARPEVKLVESGGGLVQPGRSLRLSCTASGFTFTDYYMSWVRQAPGKGLEWVGLIRSKADGYTTEYSASVKGRFTISRDDSKSILYLQMNSLKTEDTAVYYCARDAAYYSYYSPEGAMDYWGQGTLVTVSSGGGGSGGGGSGGGGSMADYKDIVMTQSPSSVSASVGDRVTITCRASQNVDSAVAWYQQKPGKAPKALIYSASYRYSGVPSRFSGRGSGTDFTLTISSLQPEDFATYYCQQYYSTPWTFGQGTKVEIKREPKSPDKTHTCPPCPAPPVAGPSVFLFPPKPKDTLMIARTPEVTCVVVDVSHEDPEVKFNWYVDGVEVHNAKTKPREEQYNSTYRVVSVLTVLHQDWLNGKEYKCKVSNKALPAPIEKTISKAKGQPREPQVYTLPPSRDELTKNQVSLTCLVKGFYPSDIAVEWESNGQPENNYKTTPPVLDSDGSFFLYSKLTVDKSRWQQGNVFSCSVMHEALHNHYTQKSLSLSPGKIYIWAPLAGTCGVLLLSLVITLYC

SEQ ID NO: 206582 - protein, 531 aa, Artificial Sequence
  Description of Artificial Sequence: Synthetic Chimeric Antigen Receptor
MALPVTALLLPLALLLHAARPEVQLVESGGGLVQPGRSLRLSCTASGFTFTDYYMSWVRQAPGKGLEWVGFIRSKADGYTTEYAASVKGRFTISRDDSKSIAYLQMNSLKTEDTAVYYCARDAAYYSYYSPEGAMDYWGQGTLVTVSSGGGGSGGGGSGGGGSMADYKDIQMTQSPSSVSASVGDRVTITCRASQNVDSAVAWYQQKPGKAPKALIYSASYRYSGVPSRFSGRGSGTDFTLTISSLQPEDFATYYCQQYYSTPWTFGQGTKVEIKREPKSPDKTHTCPPCPAPPVAGPSVFLFPPKPKDTLMIARTPEVTCVVVDVSHEDPEVKFNWYVDGVEVHNAKTKPREEQYNSTYRVVSVLTVLHQDWLNGKEYKCKVSNKALPAPIEKTISKAKGQPREPQVYTLPPSRDELTKNQVSLTCLVKGFYPSDIAVEWESNGQPENNYKTTPPVLDSDGSFFLYSKLTVDKSRWQQGNVFSCSVMHEALHNHYTQKSLSLSPGKIYIWAPLAGTCGVLLLSLVITLYC

SEQ ID NO: 206583 - protein, 531 aa, Artificial Sequence
  Description of Artificial Sequence: Synthetic Chimeric Antigen Receptor
MALPVTALLLPLALLLHAARPEVQLVESGGGLVQPGRSLRLSCTASGFTFTDYYMSWVRQAPGKGLEWVGFIRSKADGYTTEYAASVKGRFTISRDDSKSIAYLQMNSLKTEDTAVYYCARDAAYYSYYSPEGAMDYWGQGTLVTVSSGGGGSGGGGSGGGGSMADYKDIQMTQSPSSVSASVGDRVTITCRASQNVDSAVAWYQQKPGKAPKALIYSASYRYSGVPSRFSGSGSGTDFTLTISSLQPEDFATYYCQQYYSTPWTFGQGTKVEIKREPKSPDKTHTCPPCPAPPVAGPSVFLFPPKPKDTLMIARTPEVTCVVVDVSHEDPEVKFNWYVDGVEVHNAKTKPREEQYNSTYRVVSVLTVLHQDWLNGKEYKCKVSNKALPAPIEKTISKAKGQPREPQVYTLPPSRDELTKNQVSLTCLVKGFYPSDIAVEWESNGQPENNYKTTPPVLDSDGSFFLYSKLTVDKSRWQQGNVFSCSVMHEALHNHYTQKSLSLSPGKIYIWAPLAGTCGVLLLSLVITLYC

SEQ ID NO: 206584 - protein, 531 aa, Artificial Sequence
  Description of Artificial Sequence: Synthetic Chimeric Antigen Receptor
MALPVTALLLPLALLLHAARPEVQLVESGGGLVQPGRSLRLSCTASGFTFTDYYMSWVRQAPGKGLEWVGFIRSKADGYTTEYAASVKGRFTISRDDSKSIAYLQMNSLKTEDTAVYYCARDAAYYSYYSPEGAMDYWGQGTLVTVSSGGGGSGGGGSGGGGSMADYKDIQMTQSPSSVSASVGDRVTITCRASQNVDSAVAWYQQKPGKAPKLLIYSASYGQSGVPSRFSGSGSGTDFTLTISSLQPEDFATYYCQQYYSTPWTFGQGTKVEIKREPKSPDKTHTCPPCPAPPVAGPSVFLFPPKPKDTLMIARTPEVTCVVVDVSHEDPEVKFNWYVDGVEVHNAKTKPREEQYNSTYRVVSVLTVLHQDWLNGKEYKCKVSNKALPAPIEKTISKAKGQPREPQVYTLPPSRDELTKNQVSLTCLVKGFYPSDIAVEWESNGQPENNYKTTPPVLDSDGSFFLYSKLTVDKSRWQQGNVFSCSVMHEALHNHYTQKSLSLSPGKIYIWAPLAGTCGVLLLSLVITLYC

SEQ ID NO: 206585 - protein, 531 aa, Artificial Sequence
  Description of Artificial Sequence: Synthetic Chimeric Antigen Receptor
MALPVTALLLPLALLLHAARPEVQLVESGGGLVQPGRSLRLSCTASGFTFTDYYMSWVRQAPGKGLEWVGFIRSKADGYTTEYAASVKGRFTISRDDSKSIAYLQMNSLKTEDTAVYYCARDAAYYSYYSPEGAMDYWGQGTLVTVSSGGGGSGGGGSGGGGSMADYKDIQMTQSPSSVSASVGDRVTITCRASQNVDSAVAWYQQKPGKAPKLLIYSASYRQSGVPSRFSGSGSGTDFTLTISSLQPEDFATYYCQQYYSTPWTFGQGTKVEIKREPKSPDKTHTCPPCPAPPVAGPSVFLFPPKPKDTLMIARTPEVTCVVVDVSHEDPEVKFNWYVDGVEVHNAKTKPREEQYNSTYRVVSVLTVLHQDWLNGKEYKCKVSNKALPAPIEKTISKAKGQPREPQVYTLPPSRDELTKNQVSLTCLVKGFYPSDIAVEWESNGQPENNYKTTPPVLDSDGSFFLYSKLTVDKSRWQQGNVFSCSVMHEALHNHYTQKSLSLSPGKIYIWAPLAGTCGVLLLSLVITLYC

SEQ ID NO: 206586 - protein, 531 aa, Artificial Sequence
  Description of Artificial Sequence: Synthetic Chimeric Antigen Receptor
MALPVTALLLPLALLLHAARPEVQLVESGGGLVQPGRSLRLSCTASGFTFTDYYMSWVRQAPGKGLEWVGFIRSKADGYTTEYAASVKGRFTISRDDSKSIAYLQMNSLKTEDTAVYYCARDAAYYSYYSPEGAMDYWGQGTLVTVSSGGGGSGGGGSGGGGSMADYKDIQMTQSPSSVSASVGDRVTITCRASQNVDSAVAWYQQKPGKAPKLLIYSASYRYSGVPSRFSGSGSGTDFTLTISSLQPEDFATYYCQQYYSTPWTFGQGTKVEIKREPKSPDKTHTCPPCPAPPVAGPSVFLFPPKPKDTLMIARTPEVTCVVVDVSHEDPEVKFNWYVDGVEVHNAKTKPREEQYNSTYRVVSVLTVLHQDWLNGKEYKCKVSNKALPAPIEKTISKAKGQPREPQVYTLPPSRDELTKNQVSLTCLVKGFYPSDIAVEWESNGQPENNYKTTPPVLDSDGSFFLYSKLTVDKSRWQQGNVFSCSVMHEALHNHYTQKSLSLSPGKIYIWAPLAGTCGVLLLSLVITLYC

SEQ ID NO: 206587 - protein, 531 aa, Artificial Sequence
  Description of Artificial Sequence: Synthetic Chimeric Antigen Receptor
MALPVTALLLPLALLLHAARPEVQLVESGGGLVQPGRSLRLSCTASGFTFTDYYMSWVRQAPGKGLEWVGFIRSKADGYTTEYAASVKGRFTISRDDSKSIAYLQMNSLKTEDTAVYYCARDAAYYSYYSPEGAMDYWGQGTLVTVSSGGGGSGGGGSGGGGSMADYKDIVMTQSPSSVSASVGDRVTITCRASQNVDSAVAWYQQKPGKAPKALIYSASYRYSGVPSRFSGRGSGTDFTLTISSLQPEDFATYYCQQYYSTPWTFGQGTKVEIKREPKSPDKTHTCPPCPAPPVAGPSVFLFPPKPKDTLMIARTPEVTCVVVDVSHEDPEVKFNWYVDGVEVHNAKTKPREEQYNSTYRVVSVLTVLHQDWLNGKEYKCKVSNKALPAPIEKTISKAKGQPREPQVYTLPPSRDELTKNQVSLTCLVKGFYPSDIAVEWESNGQPENNYKTTPPVLDSDGSFFLYSKLTVDKSRWQQGNVFSCSVMHEALHNHYTQKSLSLSPGKIYIWAPLAGTCGVLLLSLVITLYC

SEQ ID NO: 206588 - protein, 531 aa, Artificial Sequence
  Description of Artificial Sequence: Synthetic Chimeric Antigen Receptor
MALPVTALLLPLALLLHAARPEVQLVESGGGLVQPGRSLRLSCTASGFTFTDYYMSWVRQAPGKGLEWVGFIRSKADGYTTEYAASVKGRFTISRDDSKSIAYLQMNSLKTEDTAVYYCTRDAAYYSYYSPEGAMDYWGQGTLVTVSSGGGGSGGGGSGGGGSMADYKDIQMTQSPSSVSASVGDRVTITCRASQNVDSAVAWYQQKPGKAPKALIYSASYRYSGVPSRFSGRGSGTDFTLTISSLQPEDFATYYCQQYYSTPWTFGQGTKVEIKREPKSPDKTHTCPPCPAPPVAGPSVFLFPPKPKDTLMIARTPEVTCVVVDVSHEDPEVKFNWYVDGVEVHNAKTKPREEQYNSTYRVVSVLTVLHQDWLNGKEYKCKVSNKALPAPIEKTISKAKGQPREPQVYTLPPSRDELTKNQVSLTCLVKGFYPSDIAVEWESNGQPENNYKTTPPVLDSDGSFFLYSKLTVDKSRWQQGNVFSCSVMHEALHNHYTQKSLSLSPGKIYIWAPLAGTCGVLLLSLVITLYC

SEQ ID NO: 206589 - protein, 531 aa, Artificial Sequence
  Description of Artificial Sequence: Synthetic Chimeric Antigen Receptor
MALPVTALLLPLALLLHAARPEVQLVESGGGLVQPGRSLRLSCTASGFTFTDYYMSWVRQAPGKGLEWVGFIRSKADGYTTEYAASVKGRFTISRDDSKSIAYLQMNSLKTEDTAVYYCTRDAAYYSYYSPEGAMDYWGQGTLVTVSSGGGGSGGGGSGGGGSMADYKDIQMTQSPSSVSASVGDRVTITCRASQNVDSAVAWYQQKPGKAPKALIYSASYRYSGVPSRFSGSGSGTDFTLTISSLQPEDFATYYCQQYYSTPWTFGQGTKVEIKREPKSPDKTHTCPPCPAPPVAGPSVFLFPPKPKDTLMIARTPEVTCVVVDVSHEDPEVKFNWYVDGVEVHNAKTKPREEQYNSTYRVVSVLTVLHQDWLNGKEYKCKVSNKALPAPIEKTISKAKGQPREPQVYTLPPSRDELTKNQVSLTCLVKGFYPSDIAVEWESNGQPENNYKTTPPVLDSDGSFFLYSKLTVDKSRWQQGNVFSCSVMHEALHNHYTQKSLSLSPGKIYIWAPLAGTCGVLLLSLVITLYC

SEQ ID NO: 206590 - protein, 531 aa, Artificial Sequence
  Description of Artificial Sequence: Synthetic Chimeric Antigen Receptor
MALPVTALLLPLALLLHAARPEVQLVESGGGLVQPGRSLRLSCTASGFTFTDYYMSWVRQAPGKGLEWVGFIRSKADGYTTEYAASVKGRFTISRDDSKSIAYLQMNSLKTEDTAVYYCTRDAAYYSYYSPEGAMDYWGQGTLVTVSSGGGGSGGGGSGGGGSMADYKDIQMTQSPSSVSASVGDRVTITCRASQNVDSAVAWYQQKPGKAPKLLIYSASYGQSGVPSRFSGSGSGTDFTLTISSLQPEDFATYYCQQYYSTPWTFGQGTKVEIKREPKSPDKTHTCPPCPAPPVAGPSVFLFPPKPKDTLMIARTPEVTCVVVDVSHEDPEVKFNWYVDGVEVHNAKTKPREEQYNSTYRVVSVLTVLHQDWLNGKEYKCKVSNKALPAPIEKTISKAKGQPREPQVYTLPPSRDELTKNQVSLTCLVKGFYPSDIAVEWESNGQPENNYKTTPPVLDSDGSFFLYSKLTVDKSRWQQGNVFSCSVMHEALHNHYTQKSLSLSPGKIYIWAPLAGTCGVLLLSLVITLYC

SEQ ID NO: 206591 - protein, 531 aa, Artificial Sequence
  Description of Artificial Sequence: Synthetic Chimeric Antigen Receptor
MALPVTALLLPLALLLHAARPEVQLVESGGGLVQPGRSLRLSCTASGFTFTDYYMSWVRQAPGKGLEWVGFIRSKADGYTTEYAASVKGRFTISRDDSKSIAYLQMNSLKTEDTAVYYCTRDAAYYSYYSPEGAMDYWGQGTLVTVSSGGGGSGGGGSGGGGSMADYKDIQMTQSPSSVSASVGDRVTITCRASQNVDSAVAWYQQKPGKAPKLLIYSASYRQSGVPSRFSGSGSGTDFTLTISSLQPEDFATYYCQQYYSTPWTFGQGTKVEIKREPKSPDKTHTCPPCPAPPVAGPSVFLFPPKPKDTLMIARTPEVTCVVVDVSHEDPEVKFNWYVDGVEVHNAKTKPREEQYNSTYRVVSVLTVLHQDWLNGKEYKCKVSNKALPAPIEKTISKAKGQPREPQVYTLPPSRDELTKNQVSLTCLVKGFYPSDIAVEWESNGQPENNYKTTPPVLDSDGSFFLYSKLTVDKSRWQQGNVFSCSVMHEALHNHYTQKSLSLSPGKIYIWAPLAGTCGVLLLSLVITLYC

SEQ ID NO: 206592 - protein, 531 aa, Artificial Sequence
  Description of Artificial Sequence: Synthetic Chimeric Antigen Receptor
MALPVTALLLPLALLLHAARPEVQLVESGGGLVQPGRSLRLSCTASGFTFTDYYMSWVRQAPGKGLEWVGFIRSKADGYTTEYAASVKGRFTISRDDSKSIAYLQMNSLKTEDTAVYYCTRDAAYYSYYSPEGAMDYWGQGTLVTVSSGGGGSGGGGSGGGGSMADYKDIQMTQSPSSVSASVGDRVTITCRASQNVDSAVAWYQQKPGKAPKLLIYSASYRYSGVPSRFSGSGSGTDFTLTISSLQPEDFATYYCQQYYSTPWTFGQGTKVEIKREPKSPDKTHTCPPCPAPPVAGPSVFLFPPKPKDTLMIARTPEVTCVVVDVSHEDPEVKFNWYVDGVEVHNAKTKPREEQYNSTYRVVSVLTVLHQDWLNGKEYKCKVSNKALPAPIEKTISKAKGQPREPQVYTLPPSRDELTKNQVSLTCLVKGFYPSDIAVEWESNGQPENNYKTTPPVLDSDGSFFLYSKLTVDKSRWQQGNVFSCSVMHEALHNHYTQKSLSLSPGKIYIWAPLAGTCGVLLLSLVITLYC

SEQ ID NO: 206593 - protein, 531 aa, Artificial Sequence
  Description of Artificial Sequence: Synthetic Chimeric Antigen Receptor
MALPVTALLLPLALLLHAARPEVQLVESGGGLVQPGRSLRLSCTASGFTFTDYYMSWVRQAPGKGLEWVGFIRSKADGYTTEYAASVKGRFTISRDDSKSIAYLQMNSLKTEDTAVYYCTRDAAYYSYYSPEGAMDYWGQGTLVTVSSGGGGSGGGGSGGGGSMADYKDIVMTQSPSSVSASVGDRVTITCRASQNVDSAVAWYQQKPGKAPKALIYSASYRYSGVPSRFSGRGSGTDFTLTISSLQPEDFATYYCQQYYSTPWTFGQGTKVEIKREPKSPDKTHTCPPCPAPPVAGPSVFLFPPKPKDTLMIARTPEVTCVVVDVSHEDPEVKFNWYVDGVEVHNAKTKPREEQYNSTYRVVSVLTVLHQDWLNGKEYKCKVSNKALPAPIEKTISKAKGQPREPQVYTLPPSRDELTKNQVSLTCLVKGFYPSDIAVEWESNGQPENNYKTTPPVLDSDGSFFLYSKLTVDKSRWQQGNVFSCSVMHEALHNHYTQKSLSLSPGKIYIWAPLAGTCGVLLLSLVITLYC

SEQ ID NO: 206594 - protein, 531 aa, Artificial Sequence
  Description of Artificial Sequence: Synthetic Chimeric Antigen Receptor
MALPVTALLLPLALLLHAARPEVQLVESGGGLVQPGRSLRLSCTASGFTFTDYYMSWVRQAPGKGLEWVGFIRSKADGYTTEYSASVKGRFTISRDDSKSIAYLQMNSLKTEDTAVYYCARDAAYYSYYSPEGAMDYWGQGTLVTVSSGGGGSGGGGSGGGGSMADYKDIQMTQSPSSVSASVGDRVTITCRASQNVDSAVAWYQQKPGKAPKALIYSASYRYSGVPSRFSGRGSGTDFTLTISSLQPEDFATYYCQQYYSTPWTFGQGTKVEIKREPKSPDKTHTCPPCPAPPVAGPSVFLFPPKPKDTLMIARTPEVTCVVVDVSHEDPEVKFNWYVDGVEVHNAKTKPREEQYNSTYRVVSVLTVLHQDWLNGKEYKCKVSNKALPAPIEKTISKAKGQPREPQVYTLPPSRDELTKNQVSLTCLVKGFYPSDIAVEWESNGQPENNYKTTPPVLDSDGSFFLYSKLTVDKSRWQQGNVFSCSVMHEALHNHYTQKSLSLSPGKIYIWAPLAGTCGVLLLSLVITLYC

SEQ ID NO: 206595 - protein, 531 aa, Artificial Sequence
  Description of Artificial Sequence: Synthetic Chimeric Antigen Receptor
MALPVTALLLPLALLLHAARPEVQLVESGGGLVQPGRSLRLSCTASGFTFTDYYMSWVRQAPGKGLEWVGFIRSKADGYTTEYSASVKGRFTISRDDSKSIAYLQMNSLKTEDTAVYYCARDAAYYSYYSPEGAMDYWGQGTLVTVSSGGGGSGGGGSGGGGSMADYKDIQMTQSPSSVSASVGDRVTITCRASQNVDSAVAWYQQKPGKAPKALIYSASYRYSGVPSRFSGSGSGTDFTLTISSLQPEDFATYYCQQYYSTPWTFGQGTKVEIKREPKSPDKTHTCPPCPAPPVAGPSVFLFPPKPKDTLMIARTPEVTCVVVDVSHEDPEVKFNWYVDGVEVHNAKTKPREEQYNSTYRVVSVLTVLHQDWLNGKEYKCKVSNKALPAPIEKTISKAKGQPREPQVYTLPPSRDELTKNQVSLTCLVKGFYPSDIAVEWESNGQPENNYKTTPPVLDSDGSFFLYSKLTVDKSRWQQGNVFSCSVMHEALHNHYTQKSLSLSPGKIYIWAPLAGTCGVLLLSLVITLYC

SEQ ID NO: 206596 - protein, 531 aa, Artificial Sequence
  Description of Artificial Sequence: Synthetic Chimeric Antigen Receptor
MALPVTALLLPLALLLHAARPEVQLVESGGGLVQPGRSLRLSCTASGFTFTDYYMSWVRQAPGKGLEWVGFIRSKADGYTTEYSASVKGRFTISRDDSKSIAYLQMNSLKTEDTAVYYCARDAAYYSYYSPEGAMDYWGQGTLVTVSSGGGGSGGGGSGGGGSMADYKDIQMTQSPSSVSASVGDRVTITCRASQNVDSAVAWYQQKPGKAPKLLIYSASYGQSGVPSRFSGSGSGTDFTLTISSLQPEDFATYYCQQYYSTPWTFGQGTKVEIKREPKSPDKTHTCPPCPAPPVAGPSVFLFPPKPKDTLMIARTPEVTCVVVDVSHEDPEVKFNWYVDGVEVHNAKTKPREEQYNSTYRVVSVLTVLHQDWLNGKEYKCKVSNKALPAPIEKTISKAKGQPREPQVYTLPPSRDELTKNQVSLTCLVKGFYPSDIAVEWESNGQPENNYKTTPPVLDSDGSFFLYSKLTVDKSRWQQGNVFSCSVMHEALHNHYTQKSLSLSPGKIYIWAPLAGTCGVLLLSLVITLYC

SEQ ID NO: 206597 - protein, 531 aa, Artificial Sequence
  Description of Artificial Sequence: Synthetic Chimeric Antigen Receptor
MALPVTALLLPLALLLHAARPEVQLVESGGGLVQPGRSLRLSCTASGFTFTDYYMSWVRQAPGKGLEWVGFIRSKADGYTTEYSASVKGRFTISRDDSKSIAYLQMNSLKTEDTAVYYCARDAAYYSYYSPEGAMDYWGQGTLVTVSSGGGGSGGGGSGGGGSMADYKDIQMTQSPSSVSASVGDRVTITCRASQNVDSAVAWYQQKPGKAPKLLIYSASYRQSGVPSRFSGSGSGTDFTLTISSLQPEDFATYYCQQYYSTPWTFGQGTKVEIKREPKSPDKTHTCPPCPAPPVAGPSVFLFPPKPKDTLMIARTPEVTCVVVDVSHEDPEVKFNWYVDGVEVHNAKTKPREEQYNSTYRVVSVLTVLHQDWLNGKEYKCKVSNKALPAPIEKTISKAKGQPREPQVYTLPPSRDELTKNQVSLTCLVKGFYPSDIAVEWESNGQPENNYKTTPPVLDSDGSFFLYSKLTVDKSRWQQGNVFSCSVMHEALHNHYTQKSLSLSPGKIYIWAPLAGTCGVLLLSLVITLYC

SEQ ID NO: 206598 - protein, 531 aa, Artificial Sequence
  Description of Artificial Sequence: Synthetic Chimeric Antigen Receptor
MALPVTALLLPLALLLHAARPEVQLVESGGGLVQPGRSLRLSCTASGFTFTDYYMSWVRQAPGKGLEWVGFIRSKADGYTTEYSASVKGRFTISRDDSKSIAYLQMNSLKTEDTAVYYCARDAAYYSYYSPEGAMDYWGQGTLVTVSSGGGGSGGGGSGGGGSMADYKDIQMTQSPSSVSASVGDRVTITCRASQNVDSAVAWYQQKPGKAPKLLIYSASYRYSGVPSRFSGSGSGTDFTLTISSLQPEDFATYYCQQYYSTPWTFGQGTKVEIKREPKSPDKTHTCPPCPAPPVAGPSVFLFPPKPKDTLMIARTPEVTCVVVDVSHEDPEVKFNWYVDGVEVHNAKTKPREEQYNSTYRVVSVLTVLHQDWLNGKEYKCKVSNKALPAPIEKTISKAKGQPREPQVYTLPPSRDELTKNQVSLTCLVKGFYPSDIAVEWESNGQPENNYKTTPPVLDSDGSFFLYSKLTVDKSRWQQGNVFSCSVMHEALHNHYTQKSLSLSPGKIYIWAPLAGTCGVLLLSLVITLYC

SEQ ID NO: 206599 - protein, 531 aa, Artificial Sequence
  Description of Artificial Sequence: Synthetic Chimeric Antigen Receptor
MALPVTALLLPLALLLHAARPEVQLVESGGGLVQPGRSLRLSCTASGFTFTDYYMSWVRQAPGKGLEWVGFIRSKADGYTTEYSASVKGRFTISRDDSKSIAYLQMNSLKTEDTAVYYCARDAAYYSYYSPEGAMDYWGQGTLVTVSSGGGGSGGGGSGGGGSMADYKDIVMTQSPSSVSASVGDRVTITCRASQNVDSAVAWYQQKPGKAPKALIYSASYRYSGVPSRFSGRGSGTDFTLTISSLQPEDFATYYCQQYYSTPWTFGQGTKVEIKREPKSPDKTHTCPPCPAPPVAGPSVFLFPPKPKDTLMIARTPEVTCVVVDVSHEDPEVKFNWYVDGVEVHNAKTKPREEQYNSTYRVVSVLTVLHQDWLNGKEYKCKVSNKALPAPIEKTISKAKGQPREPQVYTLPPSRDELTKNQVSLTCLVKGFYPSDIAVEWESNGQPENNYKTTPPVLDSDGSFFLYSKLTVDKSRWQQGNVFSCSVMHEALHNHYTQKSLSLSPGKIYIWAPLAGTCGVLLLSLVITLYC

SEQ ID NO: 206600 - protein, 531 aa, Artificial Sequence
  Description of Artificial Sequence: Synthetic Chimeric Antigen Receptor
MALPVTALLLPLALLLHAARPEVQLVESGGGLVQPGRSLRLSCTASGFTFTDYYMSWVRQAPGKGLEWVGLIRSKADGYTTEYAASVKGRFTISRDDSKSIAYLQMNSLKTEDTAVYYCARDAAYYSYYSPEGAMDYWGQGTLVTVSSGGGGSGGGGSGGGGSMADYKDIQMTQSPSSVSASVGDRVTITCRASQNVDSAVAWYQQKPGKAPKALIYSASYRYSGVPSRFSGRGSGTDFTLTISSLQPEDFATYYCQQYYSTPWTFGQGTKVEIKREPKSPDKTHTCPPCPAPPVAGPSVFLFPPKPKDTLMIARTPEVTCVVVDVSHEDPEVKFNWYVDGVEVHNAKTKPREEQYNSTYRVVSVLTVLHQDWLNGKEYKCKVSNKALPAPIEKTISKAKGQPREPQVYTLPPSRDELTKNQVSLTCLVKGFYPSDIAVEWESNGQPENNYKTTPPVLDSDGSFFLYSKLTVDKSRWQQGNVFSCSVMHEALHNHYTQKSLSLSPGKIYIWAPLAGTCGVLLLSLVITLYC

SEQ ID NO: 206601 - protein, 531 aa, Artificial Sequence
  Description of Artificial Sequence: Synthetic Chimeric Antigen Receptor
MALPVTALLLPLALLLHAARPEVQLVESGGGLVQPGRSLRLSCTASGFTFTDYYMSWVRQAPGKGLEWVGLIRSKADGYTTEYAASVKGRFTISRDDSKSIAYLQMNSLKTEDTAVYYCARDAAYYSYYSPEGAMDYWGQGTLVTVSSGGGGSGGGGSGGGGSMADYKDIQMTQSPSSVSASVGDRVTITCRASQNVDSAVAWYQQKPGKAPKALIYSASYRYSGVPSRFSGSGSGTDFTLTISSLQPEDFATYYCQQYYSTPWTFGQGTKVEIKREPKSPDKTHTCPPCPAPPVAGPSVFLFPPKPKDTLMIARTPEVTCVVVDVSHEDPEVKFNWYVDGVEVHNAKTKPREEQYNSTYRVVSVLTVLHQDWLNGKEYKCKVSNKALPAPIEKTISKAKGQPREPQVYTLPPSRDELTKNQVSLTCLVKGFYPSDIAVEWESNGQPENNYKTTPPVLDSDGSFFLYSKLTVDKSRWQQGNVFSCSVMHEALHNHYTQKSLSLSPGKIYIWAPLAGTCGVLLLSLVITLYC

SEQ ID NO: 206602 - protein, 531 aa, Artificial Sequence
  Description of Artificial Sequence: Synthetic Chimeric Antigen Receptor
MALPVTALLLPLALLLHAARPEVQLVESGGGLVQPGRSLRLSCTASGFTFTDYYMSWVRQAPGKGLEWVGLIRSKADGYTTEYAASVKGRFTISRDDSKSIAYLQMNSLKTEDTAVYYCARDAAYYSYYSPEGAMDYWGQGTLVTVSSGGGGSGGGGSGGGGSMADYKDIQMTQSPSSVSASVGDRVTITCRASQNVDSAVAWYQQKPGKAPKLLIYSASYGQSGVPSRFSGSGSGTDFTLTISSLQPEDFATYYCQQYYSTPWTFGQGTKVEIKREPKSPDKTHTCPPCPAPPVAGPSVFLFPPKPKDTLMIARTPEVTCVVVDVSHEDPEVKFNWYVDGVEVHNAKTKPREEQYNSTYRVVSVLTVLHQDWLNGKEYKCKVSNKALPAPIEKTISKAKGQPREPQVYTLPPSRDELTKNQVSLTCLVKGFYPSDIAVEWESNGQPENNYKTTPPVLDSDGSFFLYSKLTVDKSRWQQGNVFSCSVMHEALHNHYTQKSLSLSPGKIYIWAPLAGTCGVLLLSLVITLYC

SEQ ID NO: 206603 - protein, 531 aa, Artificial Sequence
  Description of Artificial Sequence: Synthetic Chimeric Antigen Receptor
MALPVTALLLPLALLLHAARPEVQLVESGGGLVQPGRSLRLSCTASGFTFTDYYMSWVRQAPGKGLEWVGLIRSKADGYTTEYAASVKGRFTISRDDSKSIAYLQMNSLKTEDTAVYYCARDAAYYSYYSPEGAMDYWGQGTLVTVSSGGGGSGGGGSGGGGSMADYKDIQMTQSPSSVSASVGDRVTITCRASQNVDSAVAWYQQKPGKAPKLLIYSASYRQSGVPSRFSGSGSGTDFTLTISSLQPEDFATYYCQQYYSTPWTFGQGTKVEIKREPKSPDKTHTCPPCPAPPVAGPSVFLFPPKPKDTLMIARTPEVTCVVVDVSHEDPEVKFNWYVDGVEVHNAKTKPREEQYNSTYRVVSVLTVLHQDWLNGKEYKCKVSNKALPAPIEKTISKAKGQPREPQVYTLPPSRDELTKNQVSLTCLVKGFYPSDIAVEWESNGQPENNYKTTPPVLDSDGSFFLYSKLTVDKSRWQQGNVFSCSVMHEALHNHYTQKSLSLSPGKIYIWAPLAGTCGVLLLSLVITLYC

SEQ ID NO: 206604 - protein, 531 aa, Artificial Sequence
  Description of Artificial Sequence: Synthetic Chimeric Antigen Receptor
MALPVTALLLPLALLLHAARPEVQLVESGGGLVQPGRSLRLSCTASGFTFTDYYMSWVRQAPGKGLEWVGLIRSKADGYTTEYAASVKGRFTISRDDSKSIAYLQMNSLKTEDTAVYYCARDAAYYSYYSPEGAMDYWGQGTLVTVSSGGGGSGGGGSGGGGSMADYKDIQMTQSPSSVSASVGDRVTITCRASQNVDSAVAWYQQKPGKAPKLLIYSASYRYSGVPSRFSGSGSGTDFTLTISSLQPEDFATYYCQQYYSTPWTFGQGTKVEIKREPKSPDKTHTCPPCPAPPVAGPSVFLFPPKPKDTLMIARTPEVTCVVVDVSHEDPEVKFNWYVDGVEVHNAKTKPREEQYNSTYRVVSVLTVLHQDWLNGKEYKCKVSNKALPAPIEKTISKAKGQPREPQVYTLPPSRDELTKNQVSLTCLVKGFYPSDIAVEWESNGQPENNYKTTPPVLDSDGSFFLYSKLTVDKSRWQQGNVFSCSVMHEALHNHYTQKSLSLSPGKIYIWAPLAGTCGVLLLSLVITLYC

SEQ ID NO: 206605 - protein, 531 aa, Artificial Sequence
  Description of Artificial Sequence: Synthetic Chimeric Antigen Receptor
MALPVTALLLPLALLLHAARPEVQLVESGGGLVQPGRSLRLSCTASGFTFTDYYMSWVRQAPGKGLEWVGLIRSKADGYTTEYAASVKGRFTISRDDSKSIAYLQMNSLKTEDTAVYYCARDAAYYSYYSPEGAMDYWGQGTLVTVSSGGGGSGGGGSGGGGSMADYKDIVMTQSPSSVSASVGDRVTITCRASQNVDSAVAWYQQKPGKAPKALIYSASYRYSGVPSRFSGRGSGTDFTLTISSLQPEDFATYYCQQYYSTPWTFGQGTKVEIKREPKSPDKTHTCPPCPAPPVAGPSVFLFPPKPKDTLMIARTPEVTCVVVDVSHEDPEVKFNWYVDGVEVHNAKTKPREEQYNSTYRVVSVLTVLHQDWLNGKEYKCKVSNKALPAPIEKTISKAKGQPREPQVYTLPPSRDELTKNQVSLTCLVKGFYPSDIAVEWESNGQPENNYKTTPPVLDSDGSFFLYSKLTVDKSRWQQGNVFSCSVMHEALHNHYTQKSLSLSPGKIYIWAPLAGTCGVLLLSLVITLYC

SEQ ID NO: 206606 - protein, 531 aa, Artificial Sequence
  Description of Artificial Sequence: Synthetic Chimeric Antigen Receptor
MALPVTALLLPLALLLHAARPEVQLVESGGGLVQPGRSLRLSCTASGFTFTDYYMSWVRQAPGKGLEWVGLIRSKADGYTTEYSASVKGRFTISRDDSKSIAYLQMNSLKTEDTAVYYCARDAAYYSYYSPEGAMDYWGQGTLVTVSSGGGGSGGGGSGGGGSMADYKDIQMTQSPSSVSASVGDRVTITCRASQNVDSAVAWYQQKPGKAPKALIYSASYRYSGVPSRFSGRGSGTDFTLTISSLQPEDFATYYCQQYYSTPWTFGQGTKVEIKREPKSPDKTHTCPPCPAPPVAGPSVFLFPPKPKDTLMIARTPEVTCVVVDVSHEDPEVKFNWYVDGVEVHNAKTKPREEQYNSTYRVVSVLTVLHQDWLNGKEYKCKVSNKALPAPIEKTISKAKGQPREPQVYTLPPSRDELTKNQVSLTCLVKGFYPSDIAVEWESNGQPENNYKTTPPVLDSDGSFFLYSKLTVDKSRWQQGNVFSCSVMHEALHNHYTQKSLSLSPGKIYIWAPLAGTCGVLLLSLVITLYC

SEQ ID NO: 206607 - protein, 531 aa, Artificial Sequence
  Description of Artificial Sequence: Synthetic Chimeric Antigen Receptor
MALPVTALLLPLALLLHAARPEVQLVESGGGLVQPGRSLRLSCTASGFTFTDYYMSWVRQAPGKGLEWVGLIRSKADGYTTEYSASVKGRFTISRDDSKSIAYLQMNSLKTEDTAVYYCARDAAYYSYYSPEGAMDYWGQGTLVTVSSGGGGSGGGGSGGGGSMADYKDIQMTQSPSSVSASVGDRVTITCRASQNVDSAVAWYQQKPGKAPKALIYSASYRYSGVPSRFSGSGSGTDFTLTISSLQPEDFATYYCQQYYSTPWTFGQGTKVEIKREPKSPDKTHTCPPCPAPPVAGPSVFLFPPKPKDTLMIARTPEVTCVVVDVSHEDPEVKFNWYVDGVEVHNAKTKPREEQYNSTYRVVSVLTVLHQDWLNGKEYKCKVSNKALPAPIEKTISKAKGQPREPQVYTLPPSRDELTKNQVSLTCLVKGFYPSDIAVEWESNGQPENNYKTTPPVLDSDGSFFLYSKLTVDKSRWQQGNVFSCSVMHEALHNHYTQKSLSLSPGKIYIWAPLAGTCGVLLLSLVITLYC

SEQ ID NO: 206608 - protein, 531 aa, Artificial Sequence
  Description of Artificial Sequence: Synthetic Chimeric Antigen Receptor
MALPVTALLLPLALLLHAARPEVQLVESGGGLVQPGRSLRLSCTASGFTFTDYYMSWVRQAPGKGLEWVGLIRSKADGYTTEYSASVKGRFTISRDDSKSIAYLQMNSLKTEDTAVYYCARDAAYYSYYSPEGAMDYWGQGTLVTVSSGGGGSGGGGSGGGGSMADYKDIQMTQSPSSVSASVGDRVTITCRASQNVDSAVAWYQQKPGKAPKLLIYSASYGQSGVPSRFSGSGSGTDFTLTISSLQPEDFATYYCQQYYSTPWTFGQGTKVEIKREPKSPDKTHTCPPCPAPPVAGPSVFLFPPKPKDTLMIARTPEVTCVVVDVSHEDPEVKFNWYVDGVEVHNAKTKPREEQYNSTYRVVSVLTVLHQDWLNGKEYKCKVSNKALPAPIEKTISKAKGQPREPQVYTLPPSRDELTKNQVSLTCLVKGFYPSDIAVEWESNGQPENNYKTTPPVLDSDGSFFLYSKLTVDKSRWQQGNVFSCSVMHEALHNHYTQKSLSLSPGKIYIWAPLAGTCGVLLLSLVITLYC

SEQ ID NO: 206609 - protein, 531 aa, Artificial Sequence
  Description of Artificial Sequence: Synthetic Chimeric Antigen Receptor
MALPVTALLLPLALLLHAARPEVQLVESGGGLVQPGRSLRLSCTASGFTFTDYYMSWVRQAPGKGLEWVGLIRSKADGYTTEYSASVKGRFTISRDDSKSIAYLQMNSLKTEDTAVYYCARDAAYYSYYSPEGAMDYWGQGTLVTVSSGGGGSGGGGSGGGGSMADYKDIQMTQSPSSVSASVGDRVTITCRASQNVDSAVAWYQQKPGKAPKLLIYSASYRQSGVPSRFSGSGSGTDFTLTISSLQPEDFATYYCQQYYSTPWTFGQGTKVEIKREPKSPDKTHTCPPCPAPPVAGPSVFLFPPKPKDTLMIARTPEVTCVVVDVSHEDPEVKFNWYVDGVEVHNAKTKPREEQYNSTYRVVSVLTVLHQDWLNGKEYKCKVSNKALPAPIEKTISKAKGQPREPQVYTLPPSRDELTKNQVSLTCLVKGFYPSDIAVEWESNGQPENNYKTTPPVLDSDGSFFLYSKLTVDKSRWQQGNVFSCSVMHEALHNHYTQKSLSLSPGKIYIWAPLAGTCGVLLLSLVITLYC

SEQ ID NO: 206610 - protein, 531 aa, Artificial Sequence
  Description of Artificial Sequence: Synthetic Chimeric Antigen Receptor
MALPVTALLLPLALLLHAARPEVQLVESGGGLVQPGRSLRLSCTASGFTFTDYYMSWVRQAPGKGLEWVGLIRSKADGYTTEYSASVKGRFTISRDDSKSIAYLQMNSLKTEDTAVYYCARDAAYYSYYSPEGAMDYWGQGTLVTVSSGGGGSGGGGSGGGGSMADYKDIQMTQSPSSVSASVGDRVTITCRASQNVDSAVAWYQQKPGKAPKLLIYSASYRYSGVPSRFSGSGSGTDFTLTISSLQPEDFATYYCQQYYSTPWTFGQGTKVEIKREPKSPDKTHTCPPCPAPPVAGPSVFLFPPKPKDTLMIARTPEVTCVVVDVSHEDPEVKFNWYVDGVEVHNAKTKPREEQYNSTYRVVSVLTVLHQDWLNGKEYKCKVSNKALPAPIEKTISKAKGQPREPQVYTLPPSRDELTKNQVSLTCLVKGFYPSDIAVEWESNGQPENNYKTTPPVLDSDGSFFLYSKLTVDKSRWQQGNVFSCSVMHEALHNHYTQKSLSLSPGKIYIWAPLAGTCGVLLLSLVITLYC

SEQ ID NO: 206611 - protein, 531 aa, Artificial Sequence
  Description of Artificial Sequence: Synthetic Chimeric Antigen Receptor
MALPVTALLLPLALLLHAARPEVQLVESGGGLVQPGRSLRLSCTASGFTFTDYYMSWVRQAPGKGLEWVGLIRSKADGYTTEYSASVKGRFTISRDDSKSIAYLQMNSLKTEDTAVYYCARDAAYYSYYSPEGAMDYWGQGTLVTVSSGGGGSGGGGSGGGGSMADYKDIVMTQSPSSVSASVGDRVTITCRASQNVDSAVAWYQQKPGKAPKALIYSASYRYSGVPSRFSGRGSGTDFTLTISSLQPEDFATYYCQQYYSTPWTFGQGTKVEIKREPKSPDKTHTCPPCPAPPVAGPSVFLFPPKPKDTLMIARTPEVTCVVVDVSHEDPEVKFNWYVDGVEVHNAKTKPREEQYNSTYRVVSVLTVLHQDWLNGKEYKCKVSNKALPAPIEKTISKAKGQPREPQVYTLPPSRDELTKNQVSLTCLVKGFYPSDIAVEWESNGQPENNYKTTPPVLDSDGSFFLYSKLTVDKSRWQQGNVFSCSVMHEALHNHYTQKSLSLSPGKIYIWAPLAGTCGVLLLSLVITLYC

SEQ ID NO: 206612 - protein, 531 aa, Artificial Sequence
  Description of Artificial Sequence: Synthetic Chimeric Antigen Receptor
MALPVTALLLPLALLLHAARPEVQLVESGGGLVQPGRSLRLSCTASGFTFTDYYMSWVRQAPGKGLEWVGLIRSKADGYTTEYSASVKGRFTISRDDSKSILYLQMNSLKTEDTAVYYCARDAAYYSYYSPEGAMDYWGQGTLVTVSSGGGGSGGGGSGGGGSMADYKDIQMTQSPSSVSASVGDRVTITCRASQNVDSAVAWYQQKPGKAPKALIYSASYRYSGVPSRFSGRGSGTDFTLTISSLQPEDFATYYCQQYYSTPWTFGQGTKVEIKREPKSPDKTHTCPPCPAPPVAGPSVFLFPPKPKDTLMIARTPEVTCVVVDVSHEDPEVKFNWYVDGVEVHNAKTKPREEQYNSTYRVVSVLTVLHQDWLNGKEYKCKVSNKALPAPIEKTISKAKGQPREPQVYTLPPSRDELTKNQVSLTCLVKGFYPSDIAVEWESNGQPENNYKTTPPVLDSDGSFFLYSKLTVDKSRWQQGNVFSCSVMHEALHNHYTQKSLSLSPGKIYIWAPLAGTCGVLLLSLVITLYC

SEQ ID NO: 206613 - protein, 531 aa, Artificial Sequence
  Description of Artificial Sequence: Synthetic Chimeric Antigen Receptor
MALPVTALLLPLALLLHAARPEVQLVESGGGLVQPGRSLRLSCTASGFTFTDYYMSWVRQAPGKGLEWVGLIRSKADGYTTEYSASVKGRFTISRDDSKSILYLQMNSLKTEDTAVYYCARDAAYYSYYSPEGAMDYWGQGTLVTVSSGGGGSGGGGSGGGGSMADYKDIQMTQSPSSVSASVGDRVTITCRASQNVDSAVAWYQQKPGKAPKALIYSASYRYSGVPSRFSGSGSGTDFTLTISSLQPEDFATYYCQQYYSTPWTFGQGTKVEIKREPKSPDKTHTCPPCPAPPVAGPSVFLFPPKPKDTLMIARTPEVTCVVVDVSHEDPEVKFNWYVDGVEVHNAKTKPREEQYNSTYRVVSVLTVLHQDWLNGKEYKCKVSNKALPAPIEKTISKAKGQPREPQVYTLPPSRDELTKNQVSLTCLVKGFYPSDIAVEWESNGQPENNYKTTPPVLDSDGSFFLYSKLTVDKSRWQQGNVFSCSVMHEALHNHYTQKSLSLSPGKIYIWAPLAGTCGVLLLSLVITLYC

SEQ ID NO: 206614 - protein, 531 aa, Artificial Sequence
  Description of Artificial Sequence: Synthetic Chimeric Antigen Receptor
MALPVTALLLPLALLLHAARPEVQLVESGGGLVQPGRSLRLSCTASGFTFTDYYMSWVRQAPGKGLEWVGLIRSKADGYTTEYSASVKGRFTISRDDSKSILYLQMNSLKTEDTAVYYCARDAAYYSYYSPEGAMDYWGQGTLVTVSSGGGGSGGGGSGGGGSMADYKDIQMTQSPSSVSASVGDRVTITCRASQNVDSAVAWYQQKPGKAPKLLIYSASYGQSGVPSRFSGSGSGTDFTLTISSLQPEDFATYYCQQYYSTPWTFGQGTKVEIKREPKSPDKTHTCPPCPAPPVAGPSVFLFPPKPKDTLMIARTPEVTCVVVDVSHEDPEVKFNWYVDGVEVHNAKTKPREEQYNSTYRVVSVLTVLHQDWLNGKEYKCKVSNKALPAPIEKTISKAKGQPREPQVYTLPPSRDELTKNQVSLTCLVKGFYPSDIAVEWESNGQPENNYKTTPPVLDSDGSFFLYSKLTVDKSRWQQGNVFSCSVMHEALHNHYTQKSLSLSPGKIYIWAPLAGTCGVLLLSLVITLYC

SEQ ID NO: 206615 - protein, 531 aa, Artificial Sequence
  Description of Artificial Sequence: Synthetic Chimeric Antigen Receptor
MALPVTALLLPLALLLHAARPEVQLVESGGGLVQPGRSLRLSCTASGFTFTDYYMSWVRQAPGKGLEWVGLIRSKADGYTTEYSASVKGRFTISRDDSKSILYLQMNSLKTEDTAVYYCARDAAYYSYYSPEGAMDYWGQGTLVTVSSGGGGSGGGGSGGGGSMADYKDIQMTQSPSSVSASVGDRVTITCRASQNVDSAVAWYQQKPGKAPKLLIYSASYRQSGVPSRFSGSGSGTDFTLTISSLQPEDFATYYCQQYYSTPWTFGQGTKVEIKREPKSPDKTHTCPPCPAPPVAGPSVFLFPPKPKDTLMIARTPEVTCVVVDVSHEDPEVKFNWYVDGVEVHNAKTKPREEQYNSTYRVVSVLTVLHQDWLNGKEYKCKVSNKALPAPIEKTISKAKGQPREPQVYTLPPSRDELTKNQVSLTCLVKGFYPSDIAVEWESNGQPENNYKTTPPVLDSDGSFFLYSKLTVDKSRWQQGNVFSCSVMHEALHNHYTQKSLSLSPGKIYIWAPLAGTCGVLLLSLVITLYC

SEQ ID NO: 206616 - protein, 531 aa, Artificial Sequence
  Description of Artificial Sequence: Synthetic Chimeric Antigen Receptor
MALPVTALLLPLALLLHAARPEVQLVESGGGLVQPGRSLRLSCTASGFTFTDYYMSWVRQAPGKGLEWVGLIRSKADGYTTEYSASVKGRFTISRDDSKSILYLQMNSLKTEDTAVYYCARDAAYYSYYSPEGAMDYWGQGTLVTVSSGGGGSGGGGSGGGGSMADYKDIQMTQSPSSVSASVGDRVTITCRASQNVDSAVAWYQQKPGKAPKLLIYSASYRYSGVPSRFSGSGSGTDFTLTISSLQPEDFATYYCQQYYSTPWTFGQGTKVEIKREPKSPDKTHTCPPCPAPPVAGPSVFLFPPKPKDTLMIARTPEVTCVVVDVSHEDPEVKFNWYVDGVEVHNAKTKPREEQYNSTYRVVSVLTVLHQDWLNGKEYKCKVSNKALPAPIEKTISKAKGQPREPQVYTLPPSRDELTKNQVSLTCLVKGFYPSDIAVEWESNGQPENNYKTTPPVLDSDGSFFLYSKLTVDKSRWQQGNVFSCSVMHEALHNHYTQKSLSLSPGKIYIWAPLAGTCGVLLLSLVITLYC

SEQ ID NO: 206617 - protein, 531 aa, Artificial Sequence
  Description of Artificial Sequence: Synthetic Chimeric Antigen Receptor
MALPVTALLLPLALLLHAARPEVQLVESGGGLVQPGRSLRLSCTASGFTFTDYYMSWVRQAPGKGLEWVGLIRSKADGYTTEYSASVKGRFTISRDDSKSILYLQMNSLKTEDTAVYYCARDAAYYSYYSPEGAMDYWGQGTLVTVSSGGGGSGGGGSGGGGSMADYKDIVMTQSPSSVSASVGDRVTITCRASQNVDSAVAWYQQKPGKAPKALIYSASYRYSGVPSRFSGRGSGTDFTLTISSLQPEDFATYYCQQYYSTPWTFGQGTKVEIKREPKSPDKTHTCPPCPAPPVAGPSVFLFPPKPKDTLMIARTPEVTCVVVDVSHEDPEVKFNWYVDGVEVHNAKTKPREEQYNSTYRVVSVLTVLHQDWLNGKEYKCKVSNKALPAPIEKTISKAKGQPREPQVYTLPPSRDELTKNQVSLTCLVKGFYPSDIAVEWESNGQPENNYKTTPPVLDSDGSFFLYSKLTVDKSRWQQGNVFSCSVMHEALHNHYTQKSLSLSPGKIYIWAPLAGTCGVLLLSLVITLYC

SEQ ID NO: 206618 - protein, 532 aa, Artificial Sequence
  Description of Artificial Sequence: Synthetic Chimeric Antigen Receptor
MALPVTALLLPLALLLHAARPQIQLVQSGPELKKPGETVKISCKASGYIFTNYGMNWVKQAPGKSFKWMGWINTYTGESTYSADFKGRFAFSLETSASTAYLHINDLKNEDTATYFCARSGGYDPMDYWGQGTSVTVSSGGGGSGGGGSGGGGSDIVLTQSPASLAVSLGQRATISCRASESVDNYGNTFMHWYQQKPGQPPKLLIYRASNLESGIPARFSGSGSRTDFTLTINPVEADDVATYYCQQSNEDPPTFGAGTKLELKRSDPGSGGGGSCPYSNPSLCSGGGGSCPYSNPSLCSGGGGSAPTTTPAPRPPTPAPTIASQPLSLRPEACRPAAGGAVHTRGLDFACDIYIWAPLAGTCGVLLLSLVITLYCRRGRKKLLYIFKQPFMRPVQTTQEEDGCSCRFPEEEEGGCELRVKFSRSADAPAYQQGQNQLYNELNLGRREEYDVLDKRRGRDPEMGGKPRRKNPQEGLYNELQKDKMAEAYSEIGMKGERRRGKGHDGLYQGLSTATKDTYDALHMQALPPRE

SEQ ID NO: 206619 - protein, 646 aa, Artificial Sequence
  Description of Artificial Sequence: Synthetic Chimeric Antigen Receptor
QVQLQQPGAELVRPGASVKLSCKASGYTFTSYWMNWVKQRPDQGLEWIGRIDPYDSETHYNQKFKDKAILTVDKSSSTAYMQLSSLTSEDSAVYYCARGNWDDYWGQGTTLTVSSGGGGSGGGGSGGGGSDVQITQSPSYLAASPGETITINCRASKSISKDLAWYQEKPGKTNKLLIYSGSTLQSGIPSRFSGSGSGTDFTLTISSLEPEDFAMYYCQQHNKYPYTFGGGTKLEIKEPKSPDKTHTCPPCPAPPVAGPSVFLFPPKPKDTLMIARTPEVTCVVVDVSHEDPEVKFNWYVDGVEVHNAKTKPREEQYNSTYRVVSVLTVLHQDWLNGKEYKCKVSNKALPAPIEKTISKAKGQPREPQVYTLPPSRDELTKNQVSLTCLVKGFYPSDIAVEWESNGQPENNYKTTPPVLDSDGSFFLYSKLTVDKSRWQQGNVFSCSVMHEALHNHYTQKSLSLSPGKIYIWAPLAGTCGVLLLSLVITLYCKRGRKKLLYIFKQPFMRPVQTTQEEDGCSCRFPEEEEGGCELRVKFSRSADAPAYQQGQNQLYNELNLGRREEYDVLDKRRGRDPEMGGKPRRKNPQEGLYNELQKDKMAEAYSEIGMKGERRRGKGHDGLYQGLSTATKDTYDALHMQALPPR

SEQ ID NO: 206620 - protein, 649 aa, Artificial Sequence
  Description of Artificial Sequence: Synthetic Chimeric Antigen Receptor
QVQLQQPGAELVRPGASVKLSCKASGYTFTSYWMNWVKQRPDQGLEWIGRIDPYDSETHYNQKFKDKAILTVDKSSSTAYMQLSSLTSEDSAVYYCARGNWDDYWGQGTTLTVSSGGGGSGGGGSGGGGSDVQITQSPSYLAASPGETITINCRASKSISKDLAWYQEKPGKTNKLLIYSGSTLQSGIPSRFSGSGSGTDFTLTISSLEPEDFAMYYCQQHNKYPYTFGGGTKLEIKEPKSPDKTHTCPPCPAPPVAGPSVFLFPPKPKDTLMIARTPEVTCVVVDVSHEDPEVKFNWYVDGVEVHNAKTKPREEQYNSTYRVVSVLTVLHQDWLNGKEYKCKVSNKALPAPIEKTISKAKGQPREPQVYTLPPSRDELTKNQVSLTCLVKGFYPSDIAVEWESNGQPENNYKTTPPVLDSDGSFFLYSKLTVDKSRWQQGNVFSCSVMHEALHNHYTQKSLSLSPGKIISFFLALTSTALLFLLFFLTLRFSVVKRGRKKLLYIFKQPFMRPVQTTQEEDGCSCRFPEEEEGGCELRVKFSRSADAPAYQQGQNQLYNELNLGRREEYDVLDKRRGRDPEMGGKPRRKNPQEGLYNELQKDKMAEAYSEIGMKGERRRGKGHDGLYQGLSTATKDTYDALHMQALPPR

SEQ ID NO: 206621 - protein, 653 aa, Artificial Sequence
  Description of Artificial Sequence: Synthetic Chimeric Antigen Receptor
QIQLVQSGPELKKPGETVKISCKASGYIFTNYGMNWVKQAPGKSFKWMGWINTYTGESTYSADFKGRFAFSLETSASTAYLHINDLKNEDTATYFCARSGGYDPMDYWGQGTSVTVSSGGGGSGGGGSGGGGSDIVLTQSPASLAVSLGQRATISCRASESVDNYGNTFMHWYQQKPGQPPKLLIYRASNLESGIPARFSGSGSRTDFTLTINPVEADDVATYYCQQSNEDPPTFGAGTKLELKEPKSPDKTHTCPPCPAPPVAGPSVFLFPPKPKDTLMIARTPEVTCVVVDVSHEDPEVKFNWYVDGVEVHNAKTKPREEQYNSTYRVVSVLTVLHQDWLNGKEYKCKVSNKALPAPIEKTISKAKGQPREPQVYTLPPSRDELTKNQVSLTCLVKGFYPSDIAVEWESNGQPENNYKTTPPVLDSDGSFFLYSKLTVDKSRWQQGNVFSCSVMHEALHNHYTQKSLSLSPGKIYIWAPLAGTCGVLLLSLVITLYCKRGRKKLLYIFKQPFMRPVQTTQEEDGCSCRFPEEEEGGCELRVKFSRSADAPAYQQGQNQLYNELNLGRREEYDVLDKRRGRDPEMGGKPRRKNPQEGLYNELQKDKMAEAYSEIGMKGERRRGKGHDGLYQGLSTATKDTYDALHMQALPPR

SEQ ID NO: 206622 - protein, 656 aa, Artificial Sequence
  Description of Artificial Sequence: Synthetic Chimeric Antigen Receptor
QIQLVQSGPELKKPGETVKISCKASGYIFTNYGMNWVKQAPGKSFKWMGWINTYTGESTYSADFKGRFAFSLETSASTAYLHINDLKNEDTATYFCARSGGYDPMDYWGQGTSVTVSSGGGGSGGGGSGGGGSDIVLTQSPASLAVSLGQRATISCRASESVDNYGNTFMHWYQQKPGQPPKLLIYRASNLESGIPARFSGSGSRTDFTLTINPVEADDVATYYCQQSNEDPPTFGAGTKLELKEPKSPDKTHTCPPCPAPPVAGPSVFLFPPKPKDTLMIARTPEVTCVVVDVSHEDPEVKFNWYVDGVEVHNAKTKPREEQYNSTYRVVSVLTVLHQDWLNGKEYKCKVSNKALPAPIEKTISKAKGQPREPQVYTLPPSRDELTKNQVSLTCLVKGFYPSDIAVEWESNGQPENNYKTTPPVLDSDGSFFLYSKLTVDKSRWQQGNVFSCSVMHEALHNHYTQKSLSLSPGKIISFFLALTSTALLFLLFFLTLRFSVVKRGRKKLLYIFKQPFMRPVQTTQEEDGCSCRFPEEEEGGCELRVKFSRSADAPAYQQGQNQLYNELNLGRREEYDVLDKRRGRDPEMGGKPRRKNPQEGLYNELQKDKMAEAYSEIGMKGERRRGKGHDGLYQGLSTATKDTYDALHMQALPPR

SEQ ID NO: 206623 - protein, 657 aa, Artificial Sequence
  Description of Artificial Sequence: Synthetic Chimeric Antigen Receptor
EVQLVESGGGLVQPGRSLRLSCTASGFTFTDYYMSWVRQAPGKGLEWVGLIRSKADGYTTEYAASVKGRFTISRDDSQSIAYLQMNSLKTEDTAVYYCARDAAYYSYYSPEGAMDYGQGTLVTVSSGGGGSGGGGSGGGGSDIQMTQSPSSVSASVGDRVTITCKASQVDSAVAWYQQKPGKAPKALIYSASYRYSGVPDRFSGSGSGTDFTLTISSLQPEDLATYYCQQYYSTPWTFGQGTKVEIKREPKSPDKTHTCPPCPAPPVAGPSVFLFPPKPKDTLMIARTPEVTCVVVDVSHEDPEVKFNWYVDGVEVHNAKTKPREEQYNSTYRVVSVLTVLHQDWLNGKEYKCKVSNKALPAPIEKTISKAKGQPREPQVYTLPPSRDELTKNQVSLTCLVKGFYPSDIAVEWESNGQPENNYKTTPPVLDSDGSFFLYSKLTVDKSRWQQGNVFSCSVMHEALHNHYTQKSLSLSPGKIYIWAPLAGTCGVLLLSLVITLYCKRGRKKLLYIFKQPFMRPVQTTQEEDGCSCRFPEEEEGGCELRVKFSRSADAPAYQQGQNQLYNELNLGRREEYDVLDKRRGRDPEMGGKPRRKNPQEGLYNELQKDKMAEAYSEIGMKGERRRGKGHDGLYQGLSTATKDTYDALHMQALPPR

SEQ ID NO: 206624 - protein, 657 aa, Artificial Sequence
  Description of Artificial Sequence: Synthetic Chimeric Antigen Receptor
EVQLVESGGGLVQPGRSLRLSCTASGFTFTDYYMSWVRQAPGKGLEWVGLIRSKADGYTTEYAASVKGRFTISRDDSQSIAYLQMNSLKTEDTAVYYCARDAAYYSYYSPEGAMDYGQGTLVTVSSGGGGSGGGGSGGGGSDIQMTQSPSSVSASVGDRVTITCRASQVDSAVAWYQQKPGKAPKALIYSASYRYSGVPSRFSGSGSGTDFTLTISSLQPEDFATYYCQQYYSTPWTFGQGTKVEIKREPKSPDKTHTCPPCPAPPVAGPSVFLFPPKPKDTLMIARTPEVTCVVVDVSHEDPEVKFNWYVDGVEVHNAKTKPREEQYNSTYRVVSVLTVLHQDWLNGKEYKCKVSNKALPAPIEKTISKAKGQPREPQVYTLPPSRDELTKNQVSLTCLVKGFYPSDIAVEWESNGQPENNYKTTPPVLDSDGSFFLYSKLTVDKSRWQQGNVFSCSVMHEALHNHYTQKSLSLSPGKIYIWAPLAGTCGVLLLSLVITLYCKRGRKKLLYIFKQPFMRPVQTTQEEDGCSCRFPEEEEGGCELRVKFSRSADAPAYQQGQNQLYNELNLGRREEYDVLDKRRGRDPEMGGKPRRKNPQEGLYNELQKDKMAEAYSEIGMKGERRRGKGHDGLYQGLSTATKDTYDALHMQALPPR

SEQ ID NO: 206625 - protein, 657 aa, Artificial Sequence
  Description of Artificial Sequence: Synthetic Chimeric Antigen Receptor
EVQLVESGGGLVQPGRSLRLSCTASGFTFTDYYMSWVRQAPGKGLEWVGLIRSKADGYTTEYAASVKGRFTISRDDSQSIAYLQMNSLKTEDTAVYYCARDAAYYSYYSPEGAMDYGQGTLVTVSSGGGGSGGGGSGGGGSDIVMTQSPSSVSASVGDRVTITCRASQNVDSAVAYQQKPGKAPKALIYSASYRYSGVPSRFSGRGSGTDFTLTISSLQPEDFATYYCQQYYSTPWTFGQGTKVEIKREPKSPDKTHTCPPCPAPPVAGPSVFLFPPKPKDTLMIARTPEVTCVVVDVSHEDPEVKFNWYVDGVEVHNAKTKPREEQYNSTYRVVSVLTVLHQDWLNGKEYKCKVSNKALPAPIEKTISKAKGQPREPQVYTLPPSRDELTKNQVSLTCLVKGFYPSDIAVEWESNGQPENNYKTTPPVLDSDGSFFLYSKLTVDKSRWQQGNVFSCSVMHEALHNHYTQKSLSLSPGKIYIWAPLAGTCGVLLLSLVITLYCKRGRKKLLYIFKQPFMRPVQTTQEEDGCSCRFPEEEEGGCELRVKFSRSADAPAYQQGQNQLYNELNLGRREEYDVLDKRRGRDPEMGGKPRRKNPQEGLYNELQKDKMAEAYSEIGMKGERRRGKGHDGLYQGLSTATKDTYDALHMQALPPR

SEQ ID NO: 206626 - protein, 657 aa, Artificial Sequence
  Description of Artificial Sequence: Synthetic Chimeric Antigen Receptor
EVQLVESGGGLVQPGRSLRLSCTASGFTFTDYYMSWVRQAPGKGLEWVGLIRSKADGYTTEYSASVKGRFTISRDDSKSILYLQMNSLKTEDTAVYYCARDAAYYSYYSPEGAMDYGQGTLVTVSSGGGGSGGGGSGGGGSDIQMTQSPSSVSASVGDRVTITCRASQVDSAVAWYQQKPGKAPKALIYSASYRYSGVPSRFSGSGSGTDFTLTISSLQPEDFATYYCQQYYSTPWTFGQGTKVEIKREPKSPDKTHTCPPCPAPPVAGPSVFLFPPKPKDTLMIARTPEVTCVVVDVSHEDPEVKFNWYVDGVEVHNAKTKPREEQYNSTYRVVSVLTVLHQDWLNGKEYKCKVSNKALPAPIEKTISKAKGQPREPQVYTLPPSRDELTKNQVSLTCLVKGFYPSDIAVEWESNGQPENNYKTTPPVLDSDGSFFLYSKLTVDKSRWQQGNVFSCSVMHEALHNHYTQKSLSLSPGKIYIWAPLAGTCGVLLLSLVITLYCKRGRKKLLYIFKQPFMRPVQTTQEEDGCSCRFPEEEEGGCELRVKFSRSADAPAYQQGQNQLYNELNLGRREEYDVLDKRRGRDPEMGGKPRRKNPQEGLYNELQKDKMAEAYSEIGMKGERRRGKGHDGLYQGLSTATKDTYDALHMQALPPR

SEQ ID NO: 206627 - protein, 657 aa, Artificial Sequence
  Description of Artificial Sequence: Synthetic Chimeric Antigen Receptor
EVQLVESGGGLVQPGRSLRLSCTASGFTFTDYYMSWVRQAPGKGLEWVGLIRSKADGYTTEYSASVKGRFTISRDDSKSILYLQMNSLKTEDTAVYYCARDAAYYSYYSPEGAMDYWGQGTLVTVSSGGGGSGGGGSGGGGSDIVMTQSPSSVSASVGDRVTITCRASQNVDSAVAWYQQKPGKAPKALIYSASYRYSGVPSRFSGRGSGTDFTLTISSLQPEDFATYYCQQYYSTPWTFGQGTKVEIKREPKSPDKTHTCPPCPAPPVAGPSVFLFPPKPKDTLMIARTPEVTCWVDVSHEDPEVKFNWYVDGVEVHNAKTKPREEQYNSTYRWSVLTVLHQDWLNGKEYKCKVSNKALPAPIEKTISKAKGQPREPQVYTLPPSRDELTKNQVSLTCLVKGFYPSDIAVEWESNGQPENNYKTTPPVLDSDGSFFLYSKLTVDKSRWQQGNVFSCSVMHEALHNHYTQKSLSLSPGKIYIWAPLAGTCGVLLLSLVITLYCKRGRKKLLYIFKQPFMRPVQTTQEEDGCSCRFPEEEEGGCELRVKFSRSADAPAYQQGQNQLYNELNLGRREEYDVLDKRRGRDPEMGGKPRRKNPQEGLYNELQKDKMAEAYSEIGMKGERRRGKGHDGLYQGLSTATKDTYDALHMQALPPR

SEQ ID NO: 206628 - protein, 657 aa, Artificial Sequence
  Description of Artificial Sequence: Synthetic Chimeric Antigen Receptor
EVQLVESGGGLVQPGRSLRLSCTASGFTFTDYYMSWVRQAPGKGLEWVGLIRSKADGYTTEYSASVKGRFTISRDDSQSIAYLQMNSLKTEDTAVYYCARDAAYYSYYSPEGAMDYGQGTLVTVSSGGGGSGGGGSGGGGSDIQMTQSPSSVSASVGDRVTITCKASQVDSAVAWYQQKPGKAPKLLIYSASYRYSGVPSRFSGSGSGTDFTLTISSLQPEDFATYYCQQYYSTPWTFGQGTKVEIKREPKSPDKTHTCPPCPAPPVAGPSVFLFPPKPKDTLMIARTPEVTCVVVDVSHEDPEVKFNWYVDGVEVHNAKTKPREEQYNSTYRVVSVLTVLHQDWLNGKEYKCKVSNKALPAPIEKTISKAKGQPREPQVYTLPPSRDELTKNQVSLTCLVKGFYPSDIAVEWESNGQPENNYKTTPPVLDSDGSFFLYSKLTVDKSRWQQGNVFSCSVMHEALHNHYTQKSLSLSPGKIYIWAPLAGTCGVLLLSLVITLYCKRGRKKLLYIFKQPFMRPVQTTQEEDGCSCRFPEEEEGGCELRVKFSRSADAPAYQQGQNQLYNELNLGRREEYDVLDKRRGRDPEMGGKPRRKNPQEGLYNELQKDKMAEAYSEIGMKGERRRGKGHDGLYQGLSTATKDTYDALHMQALPPR

SEQ ID NO: 206629 - protein, 657 aa, Artificial Sequence
  Description of Artificial Sequence: Synthetic Chimeric Antigen Receptor
EVQLVESGGGLVQPGRSLRLSCTASGFTFTDYYMSWVRQAPGKGLEWVGLIRSKADGYTTEYSASVKGRFTISRDDSQSIAYLQMNSLKTEDTAVYYCARDAAYYSYYSPEGAMDYGQGTLVTVSSGGGGSGGGGSGGGGSDIQMTQSPSSVSASVGDRVTITCRASQVDSAVAWYQQKPGKAPKALIYSASYRYSGVPSRFSGSGSGTDFTLTISSLQPEDFATYYCQQYYSTPWTFGQGTKVEIKREPKSPDKTHTCPPCPAPPVAGPSVFLFPPKPKDTLMIARTPEVTCVVVDVSHEDPEVKFNWYVDGVEVHNAKTKPREEQYNSTYRVVSVLTVLHQDWLNGKEYKCKVSNKALPAPIEKTISKAKGQPREPQVYTLPPSRDELTKNQVSLTCLVKGFYPSDIAVEWESNGQPENNYKTTPPVLDSDGSFFLYSKLTVDKSRWQQGNVFSCSVMHEALHNHYTQKSLSLSPGKIYIWAPLAGTCGVLLLSLVITLYCKRGRKKLLYIFKQPFMRPVQTTQEEDGCSCRFPEEEEGGCELRVKFSRSADAPAYQQGQNQLYNELNLGRREEYDVLDKRRGRDPEMGGKPRRKNPQEGLYNELQKDKMAEAYSEIGMKGERRRGKGHDGLYQGLSTATKDTYDALHMQALPPR

SEQ ID NO: 206630 - protein, 657 aa, Artificial Sequence
  Description of Artificial Sequence: Synthetic Chimeric Antigen Receptor
EVQLVESGGGLVQPGRSLRLSCTASGFTFTDYYMSWVRQAPGKGLEWVGLIRSKADGYTTEYSASVKGRFTISRDDSQSIAYLQMNSLKTEDTAVYYCARDAAYYSYYSPEGAMDYGQGTLVTVSSGGGGSGGGGSGGGGSDIQMTQSPSSVSASVGDRVTITCRASQVDSAVAWYQQKPGKAPKALIYSASYRYSGVPSRFSGSGSGTDFTLTISSLQPEDLATYYCQQYYSTPWTFGQGTKVEIKREPKSPDKTHTCPPCPAPPVAGPSVFLFPPKPKDTLMIARTPEVTCVVVDVSHEDPEVKFNWYVDGVEVHNAKTKPREEQYNSTYRVVSVLTVLHQDWLNGKEYKCKVSNKALPAPIEKTISKAKGQPREPQVYTLPPSRDELTKNQVSLTCLVKGFYPSDIAVEWESNGQPENNYKTTPPVLDSDGSFFLYSKLTVDKSRWQQGNVFSCSVMHEALHNHYTQKSLSLSPGKIYIWAPLAGTCGVLLLSLVITLYCKRGRKKLLYIFKQPFMRPVQTTQEEDGCSCRFPEEEEGGCELRVKFSRSADAPAYQQGQNQLYNELNLGRREEYDVLDKRRGRDPEMGGKPRRKNPQEGLYNELQKDKMAEAYSEIGMKGERRRGKGHDGLYQGLSTATKDTYDALHMQALPPR

SEQ ID NO: 206631 - protein, 664 aa, Artificial Sequence
  Description of Artificial Sequence: Synthetic Chimeric Antigen Receptor
EVKLVESGGGLVQPGGSLSLSCAASGFTFTDYYMSWVRQPPGKALEWLALIRSKADGYTTEYSASVKGRFTLSRDDSQSILYLQMNALRPEDSATYYCARDAAYYSYYSPEGAMDYWGQGTSVTVSSGGGGSGGGGSGGGGSMADYKDIVMTQSHKFMSTSVGDRVNITCKASQNVDSAVAWYQQKPGQSPKALIYSASYRYSGVPDRFTGRGSGTDFTLTISSVQAEDLAVYYCQQYYSTPWTFGGGTKLEIKREPKSPDKTHTCPPCPAPPVAGPSVFLFPPKPKDTLMIARTPEVTCVVVDVSHEDPEVKFNWYVDGVEVHNAKTKPREEQYNSTYRVVSVLTVLHQDWLNGKEYKCKVSNKALPAPIEKTISKAKGQPREPQVYTLPPSRDELTKNQVSLTCLVKGFYPSDIAVEWESNGQPENNYKTTPPVLDSDGSFFLYSKLTVDKSRWQQGNVFSCSVMHEALHNHYTQKSLSLSPGKIYIWAPLAGTCGVLLLSLVITLYCKRGRKKLLYIFKQPFMRPVQTTQEEDGCSCRFPEEEEGGCELRVKFSRSADAPAYQQGQNQLYNELNLGRREEYDVLDKRRGRDPEMGGKPRRKNPQEGLYNELQKDKMAEAYSEIGMKGERRRGKGHDGLYQGLSTATKDTYDALHMQALPPR

SEQ ID NO: 206632 - protein, 667 aa, Artificial Sequence
  Description of Artificial Sequence: Synthetic Chimeric Antigen Receptor
EVKLVESGGGLVQPGGSLSLSCAASGFTFTDYYMSWVRQPPGKALEWLALIRSKADGYTTEYSASVKGRFTLSRDDSQSILYLQMNALRPEDSATYYCARDAAYYSYYSPEGAMDYWGQGTSVTVSSGGGGSGGGGSGGGGSMADYKDIVMTQSHKFMSTSVGDRVNITCKASQNVDSAVAWYQQKPGQSPKALIYSASYRYSGVPDRFTGRGSGTDFTLTISSVQAEDLAVYYCQQYYSTPWTFGGGTKLEIKREPKSPDKTHTCPPCPAPPVAGPSVFLFPPKPKDTLMIARTPEVTCVVVDVSHEDPEVKFNWYVDGVEVHNAKTKPREEQYNSTYRVVSVLTVLHQDWLNGKEYKCKVSNKALPAPIEKTISKAKGQPREPQVYTLPPSRDELTKNQVSLTCLVKGFYPSDIAVEWESNGQPENNYKTTPPVLDSDGSFFLYSKLTVDKSRWQQGNVFSCSVMHEALHNHYTQKSLSLSPGKIISFFLALTSTALLFLLFFLTLRFSVVKRGRKKLLYIFKQPFMRPVQTTQEEDGCSCRFPEEEEGGCELRVKFSRSADAPAYQQGQNQLYNELNLGRREEYDVLDKRRGRDPEMGGKPRRKNPQEGLYNELQKDKMAEAYSEIGMKGERRRGKGHDGLYQGLSTATKDTYDALHMQALPPR

SEQ ID NO: 206633 - protein, 672 aa, Artificial Sequence
  Description of Artificial Sequence: Synthetic Chimeric Antigen Receptor
MLLLVTSLLLCELPHPAFLLIPQVQLQQPGAELVRPGASVKLSCKASGYTFTSYWMNWVKQRPDQGLEWIGRIDPYDSETHYNQKFKDKAILTVDKSSSTAYMQLSSLTSEDSAVYYCARGNWDDYWGQGTTLTVSSGGGGSGGGGSGGGGSDVQITQSPSYLAASPGETITINCRASKSISKDLAWYQEKPGKTNKLLIYSGSTLQSGIPSRFSGSGSGTDFTLTISSLEPEDFAMYYCQQHNKYPYTFGGGTKLEIKESKYGPPCPPCPAPEFEGGPSVFLFPPKPKDTLMISRTPEVTCVVVDVSQEDPEVQFNWYVDGVEVHNAKTKPREEQFNSTYRVVSVLTVLHQDWLNGKEYKCKVSNKGLPSSIEKTISKAKGQPREPQVYTLPPSQEEMTKNQVSLTCLVKGFYPSDIAVEWESNGQPENNYKTTPPVLDSDGSFFLYSRLTVDKSRWQEGNVFSCSVMHEALHNHYTQKSLSLSLGKMFWVLVVVGGVLACYSLLVTVAFIIFWVRSKRSRGGHSDYMNMTPRRPGPTRKHYQPYAPPRDFAAYRSGGGRVKFSRSADAPAYQQGQNQLYNELNLGRREEYDVLDKRRGRDPEMGGKPRRKNPQEGLYNELQKDKMAEAYSEIGMKGERRRGKGHDGLYQGLSTATKDTYDALHMQALPPR

SEQ ID NO: 206634 - protein, 672 aa, Artificial Sequence
  Description of Artificial Sequence: Synthetic Chimeric Antigen Receptor
MLLLVTSLLLCELPHPAFLLIPQVQLQQPGAELVRPGASVKLSCKASGYTFTSYWMNWVKQRPDQGLEWIGRIDPYDSETHYNQKFKDKAILTVDKSSSTAYMQLSSLTSEDSAVYYCARGNWDDYWGQGTTLTVSSGGGGSGGGGSGGGGSDVQITQSPSYLAASPGETITINCRASKSISKDLAWYQEKPGKTNKLLIYSGSTLQSGIPSRFSGSGSGTDFTLTISSLEPEDFAMYYCQQHNKYPYTFGGGTKLEIKESKYGPPCPPCPAPEFEGGPSVFLFPPKPKDTLMISRTPEVTCVVVDVSQEDPEVQFNWYVDGVEVHNAKTKPREEQFQSTYRVVSVLTVLHQDWLNGKEYKCKVSNKGLPSSIEKTISKAKGQPREPQVYTLPPSQEEMTKNQVSLTCLVKGFYPSDIAVEWESNGQPENNYKTTPPVLDSDGSFFLYSRLTVDKSRWQEGNVFSCSVMHEALHNHYTQKSLSLSLGKMFWVLVVVGGVLACYSLLVTVAFIIFWVRSKRSRGGHSDYMNMTPRRPGPTRKHYQPYAPPRDFAAYRSGGGRVKFSRSADAPAYQQGQNQLYNELNLGRREEYDVLDKRRGRDPEMGGKPRRKNPQEGLYNELQKDKMAEAYSEIGMKGERRRGKGHDGLYQGLSTATKDTYDALHMQALPPR

SEQ ID NO: 206635 - protein, 679 aa, Artificial Sequence
  Description of Artificial Sequence: Synthetic Chimeric Antigen Receptor
MLLLVTSLLLCELPHPAFLLIPQIQLVQSGPELKKPGETVKISCKASGYIFTNYGMNWVKQAPGKSFKWMGWINTYTGESTYSADFKGRFAFSLETSASTAYLHINDLKNEDTATYFCARSGGYDPMDYWGQGTSVTVSSGGGGSGGGGSGGGGSDIVLTQSPASLAVSLGQRATISCRASESVDNYGNTFMHWYQQKPGQPPKLLIYRASNLESGIPARFSGSGSRTDFTLTINPVEADDVATYYCQQSNEDPPTFGAGTKLELKESKYGPPCPPCPAPEFEGGPSVFLFPPKPKDTLMISRTPEVTCVVVDVSQEDPEVQFNWYVDGVEVHNAKTKPREEQFNSTYRVVSVLTVLHQDWLNGKEYKCKVSNKGLPSSIEKTISKAKGQPREPQVYTLPPSQEEMTKNQVSLTCLVKGFYPSDIAVEWESNGQPENNYKTTPPVLDSDGSFFLYSRLTVDKSRWQEGNVFSCSVMHEALHNHYTQKSLSLSLGKMFWVLVVVGGVLACYSLLVTVAFIIFWVRSKRSRGGHSDYMNMTPRRPGPTRKHYQPYAPPRDFAAYRSGGGRVKFSRSADAPAYQQGQNQLYNELNLGRREEYDVLDKRRGRDPEMGGKPRRKNPQEGLYNELQKDKMAEAYSEIGMKGERRRGKGHDGLYQGLSTATKDTYDALHMQALPPR

SEQ ID NO: 206636 - protein, 679 aa, Artificial Sequence
  Description of Artificial Sequence: Synthetic Chimeric Antigen Receptor
MLLLVTSLLLCELPHPAFLLIPQIQLVQSGPELKKPGETVKISCKASGYIFTNYGMNWVKQAPGKSFKWMGWINTYTGESTYSADFKGRFAFSLETSASTAYLHINDLKNEDTATYFCARSGGYDPMDYWGQGTSVTVSSGGGGSGGGGSGGGGSDIVLTQSPASLAVSLGQRATISCRASESVDNYGNTFMHWYQQKPGQPPKLLIYRASNLESGIPARFSGSGSRTDFTLTINPVEADDVATYYCQQSNEDPPTFGAGTKLELKESKYGPPCPPCPAPEFEGGPSVFLFPPKPKDTLMISRTPEVTCVVVDVSQEDPEVQFNWYVDGVEVHNAKTKPREEQFQSTYRVVSVLTVLHQDWLNGKEYKCKVSNKGLPSSIEKTISKAKGQPREPQVYTLPPSQEEMTKNQVSLTCLVKGFYPSDIAVEWESNGQPENNYKTTPPVLDSDGSFFLYSRLTVDKSRWQEGNVFSCSVMHEALHNHYTQKSLSLSLGKMFWVLVVVGGVLACYSLLVTVAFIIFWVRSKRSRGGHSDYMNMTPRRPGPTRKHYQPYAPPRDFAAYRSGGGRVKFSRSADAPAYQQGQNQLYNELNLGRREEYDVLDKRRGRDPEMGGKPRRKNPQEGLYNELQKDKMAEAYSEIGMKGERRRGKGHDGLYQGLSTATKDTYDALHMQALPPR

SEQ ID NO: 206637 - protein, 685 aa, Artificial Sequence
  Description of Artificial Sequence: Synthetic Chimeric Antigen Receptor
MALPVTALLLPLALLLHAARPEVKLVESGGGLVQPGGSLSLSCAASGFTFTDYYMSWVRQPPGKALEWLALIRSKADGYTTEYSASVKGRFTLSRDDSQSILYLQMNALRPEDSATYYCARDAAYYSYYSPEGAMDYWGQGTSVTVSSGGGGSGGGGSGGGGSMADYKDIVMTQSHKFMSTSVGDRVNITCKASQNVDSAVAWYQQKPGQSPKALIYSASYRYSGVPDRFTGRGSGTDFTLTISSVQAEDLAVYYCQQYYSTPWTFGGGTKLEIKREPKSPDKTHTCPPCPAPPVAGPSVFLFPPKPKDTLMIARTPEVTCVVVDVSHEDPEVKFNWYVDGVEVHNAKTKPREEQYNSTYRVVSVLTVLHQDWLNGKEYKCKVSNKALPAPIEKTISKAKGQPREPQVYTLPPSRDELTKNQVSLTCLVKGFYPSDIAVEWESNGQPENNYKTTPPVLDSDGSFFLYSKLTVDKSRWQQGNVFSCSVMHEALHNHYTQKSLSLSPGKIYIWAPLAGTCGVLLLSLVITLYCKRGRKKLLYIFKQPFMRPVQTTQEEDGCSCRFPEEEEGGCELRVKFSRSADAPAYQQGQNQLYNELNLGRREEYDVLDKRRGRDPEMGGKPRRKNPQEGLYNELQKDKMAEAYSEIGMKGERRRGKGHDGLYQGLSTATKDTYDALHMQALPPR

SEQ ID NO: 206638 - protein, 699 aa, Artificial Sequence
  Description of Artificial Sequence: Synthetic Chimeric Antigen Receptor
MGWSWIFLFLVSGTGGVLSEVQLQQSGPELVKPGASVKMSCKASGYTFTDYYMKWVKQSHGKSLEWIGDIIPSNGATFYNQKFKGKATLTVDRSSSTAYMHLNSLTSEDSAVYYCTRSHLLRASWFAYWGQGTLVTVSAASGGGGSGGGGSGGGGSMESQTQVLMSLLFWVSGTCGDFVMTQSPSSLTVTAGEKVTMSCKSSQSLLNSGNQKNYLTWYLQKPGQPPKLLIYWASTRESGVPDRFTGSGSGTDFTLTISSVQAEDLAVYYCQNDYSYPYTFGGGTKLEIKREPKSPDKTHTCPPCPAPPVAGPSVFLFPPKPKDTLMIARTPEVTCVVVDVSHEDPEVKFNWYVDGVEVHNAKTKPREEQYNSTYRVVSVLTVLHQDWLNGKEYKCKVSNKALPAPIEKTISKAKGQPREPQVYTLPPSRDELTKNQVSLTCLVKGFYPSDIAVEWESNGQPENNYKTTPPVLDSDGSFFLYSKLTVDKSRWQQGNVFSCSVMHEALHNHYTQKSLSLSPGKIYIWAPLAGTCGVLLLSLVITLYCKRGRKKLLYIFKQPFMRPVQTTQEEDGCSCRFPEEEEGGCELRVKFSRSADAPAYQQGQNQLYNELNLGRREEYDVLDKRRGRDPEMGGKPRRKNPQEGLYNELQKDKMAEAYSEIGMKGERRRGKGHDGLYQGLSTATKDTYDALHMQALPPR

SEQ ID NO: 206639 - protein, 702 aa, Artificial Sequence
  Description of Artificial Sequence: Synthetic Chimeric Antigen Receptor
MGWSWIFLFLVSGTGGVLSEVQLQQSGPELVKPGASVKMSCKASGYTFTDYYMKWVKQSHGKSLEWIGDIIPSNGATFYNQKFKGKATLTVDRSSSTAYMHLNSLTSEDSAVYYCTRSHLLRASWFAYWGQGTLVTVSAASGGGGSGGGGSGGGGSMESQTQVLMSLLFWVSGTCGDFVMTQSPSSLTVTAGEKVTMSCKSSQSLLNSGNQKNYLTWYLQKPGQPPKLLIYWASTRESGVPDRFTGSGSGTDFTLTISSVQAEDLAVYYCQNDYSYPYTFGGGTKLEIKREPKSPDKTHTCPPCPAPPVAGPSVFLFPPKPKDTLMIARTPEVTCVVVDVSHEDPEVKFNWYVDGVEVHNAKTKPREEQYNSTYRVVSVLTVLHQDWLNGKEYKCKVSNKALPAPIEKTISKAKGQPREPQVYTLPPSRDELTKNQVSLTCLVKGFYPSDIAVEWESNGQPENNYKTTPPVLDSDGSFFLYSKLTVDKSRWQQGNVFSCSVMHEALHNHYTQKSLSLSPGKIISFFLALTSTALLFLLFFLTLRFSVVKRGRKKLLYIFKQPFMRPVQTTQEEDGCSCRFPEEEEGGCELRVKFSRSADAPAYQQGQNQLYNELNLGRREEYDVLDKRRGRDPEMGGKPRRKNPQEGLYNELQKDKMAEAYSEIGMKGERRRGKGHDGLYQGLSTATKDTYDALHMQALPPR

SEQ ID NO: 206640 - protein, 487 aa, Artificial Sequence
  Description of Artificial Sequence: Synthetic Chimeric Antigen Receptor
MALPVTALLLPLALLLHAARPQVQLVQSGAEVKKPGASVKVSCKASGYTFTGYYMHWVRQAPGQGLEWMGWINPNSGGTNYAQKFQGRVTMTRDTSISTAYMELSRLRSDDTAVYYCARDMNILATVPFDIWGQGTMVTVSSGGGGSGGGGSGGGGSDIQMTQSPSSLSASVGDRVTITCRASQSISTYLNWYQQKPGKAPNLLIYAAFSLQSGVPSRFSGSGSGTDFTLTINSLQPEDFATYYCQQGDSVPLTFGGGTKLEIKTTTPAPRPPTPAPTIASQPLSLRPEACRPAAGGAVHTRGLDFACDIYIWAPLAGTCGVLLLSLVITLYCKRGRKKLLYIFKQPFMRPVQTTQEEDGCSCRFPEEEEGGCELRVKFSRSADAPAYKQGQNQLYNELNLGRREEYDVLDKRRGRDPEMGGKPRRKNPQEGLYNELQKDKMAEAYSEIGMKGERRRGKGHDGLYQGLSTATKDTYDALHMQALPPR

SEQ ID NO: 206641 - protein, 487 aa, Artificial Sequence
  Description of Artificial Sequence: Synthetic Chimeric Antigen Receptor
MALPVTALLLPLALLLHAARPQVQLVQSGAEVKKPGASVKVSCKASGYTFTGYYMHWVRQAPGQGLEWMGWINPNSGGTNYAQKFQGRVTLTRDTSISTVYMELSRLRSDDTAVYYCARDMNILATVPFDIWGQGTMVTVSSGGGGSGGGGSGGGGSDIQMTQSPSSLSASVGDRVTITCRASQSISSYLNWYQQKPGKAPKLLIYAASSLQSGVPSRFSGSGSGTDFTLTVNSLQPEDFATYYCQQGDSVPLTFGGGTRLEIKTTTPAPRPPTPAPTIASQPLSLRPEACRPAAGGAVHTRGLDFACDIYIWAPLAGTCGVLLLSLVITLYCKRGRKKLLYIFKQPFMRPVQTTQEEDGCSCRFPEEEEGGCELRVKFSRSADAPAYKQGQNQLYNELNLGRREEYDVLDKRRGRDPEMGGKPRRKNPQEGLYNELQKDKMAEAYSEIGMKGERRRGKGHDGLYQGLSTATKDTYDALHMQALPPR

SEQ ID NO: 206642 - protein, 487 aa, Artificial Sequence
  Description of Artificial Sequence: Synthetic Chimeric Antigen Receptor
MALPVTALLLPLALLLHAARPQVQLVQSGAEVKKPGASVKVSCKASGYIFTGYYIHWVRQAPGQGLEWMGWINPNSGGTNYAQKFQGRVTMTRDTSISTAYMELSGLRSDDPAVYYCARDMNILATVPFDIWGQGTLVTVSSGGGGSGGGGSGGGGSDIQLTQSPSSLSASVGDRVTITCRASQSISSYLNWYQQKPGKAPKLLIYAASSLQSGVPSRFSGSGSGTDFTLTVNSLQPEDFATYYCQQGDSVPLTFGGGTKVEIKTTTPAPRPPTPAPTIASQPLSLRPEACRPAAGGAVHTRGLDFACDIYIWAPLAGTCGVLLLSLVITLYCKRGRKKLLYIFKQPFMRPVQTTQEEDGCSCRFPEEEEGGCELRVKFSRSADAPAYKQGQNQLYNELNLGRREEYDVLDKRRGRDPEMGGKPRRKNPQEGLYNELQKDKMAEAYSEIGMKGERRRGKGHDGLYQGLSTATKDTYDALHMQALPPR

SEQ ID NO: 206643 - protein, 336 aa, Artificial Sequence
  Description of Artificial Sequence: Synthetic Chimeric Antigen Receptor
MALPVTALLLPLALLLHAARPQVQLQQSGAEVKKSGASVKVSCKASGYTFTDYYMHWLRQAPGQGLEWMGWINPNSGDTNYAQKFQGRVTLTRDTSISTVYMELSRLRSDDTAVYYCARDMNILATVPFDIWGQGTMVTVSSASGGGGSGGRASGGGGSDIQMTQSPSSLSASVGDRVTITCRASQSISSYLNWYQQKPGKAPKLLIYAASSLQSGVPSRFSGSGSGTDFTLTISSLQPEDFATYYCQQGDSVPLTFGGGTKVEIKTTTPAPRPPTPAPTIASQPLSLRPEACRPAAGGAVHTRGLDFACDIYIWAPLAGTCGVLLLSLVITLYCK

SEQ ID NO: 206644 - protein, 486 aa, Artificial Sequence
  Description of Artificial Sequence: Synthetic Chimeric Antigen Receptor
MALPVTALLLPLALLLHAARPEIVMTQSPATLSLSPGERATLSCRASQDISKYLNWYQQKPGQAPRLLIYHTSRLHSGIPARFSGSGSGTDYTLTISSLQPEDFAVYFCQQGNTLPYTFGQGTKLEIKGGGGSGGGGSGGGGSQVQLQESGPGLVKPSETLSLTCTVSGVSLPDYGVSWIRQPPGKGLEWIGVIWGSETTYYSSSLKSRVTISKDNSKNQVSLKLSSVTAADTAVYYCAKHYYYGGSYAMDYWGQGTLVTVSSTTTPAPRPPTPAPTIASQPLSLRPEACRPAAGGAVHTRGLDFACDIYIWAPLAGTCGVLLLSLVITLYCKRGRKKLLYIFKQPFMRPVQTTQEEDGCSCRFPEEEEGGCELRVKFSRSADAPAYKQGQNQLYNELNLGRREEYDVLDKRRGRDPEMGGKPRRKNPQEGLYNELQKDKMAEAYSEIGMKGERRRGKGHDGLYQGLSTATKDTYDALHMQALPPR

SEQ ID NO: 206645 - protein, 486 aa, Artificial Sequence
  Description of Artificial Sequence: Synthetic Chimeric Antigen Receptor
MALPVTALLLPLALLLHAARPDIQMTQTTSSLSASLGDRVTISCRASQDISKYLNWYQQKPDGTVKLLIYHTSRLHSGVPSRFSGSGSGTDYSLTISNLEQEDIATYFCQQGNTLPYTFGGGTKLEITGGGGSGGGGSGGGGSEVKLQESGPGLVAPSQSLSVTCTVSGVSLPDYGVSWIRQPPRKGLEWLGVIWGSETTYYNSALKSRLTIIKDNSKSQVFLKMNSLQTDDTAIYYCAKHYYYGGSYAMDYWGQGTSVTVSSTTTPAPRPPTPAPTIASQPLSLRPEACRPAAGGAVHTRGLDFACDIYIWAPLAGTCGVLLLSLVITLYCKRGRKKLLYIFKQPFMRPVQTTQEEDGCSCRFPEEEEGGCELRVKFSRSADAPAYKQGQNQLYNELNLGRREEYDVLDKRRGRDPEMGGKPRRKNPQEGLYNELQKDKMAEAYSEIGMKGERRRGKGHDGLYQGLSTATKDTYDALHMQALPPR

SEQ ID NO: 206646 - protein, 276 aa, Artificial Sequence
  Description of Artificial Sequence: Synthetic polypeptide
MALPVTALLLPLALLLHAARPEIVMTQSPATLSLSPGERATLSCRASQDISKYLNWYQQKPGQAPRLLIYHTSRLHSGIPARFSGSGSGTDYTLTISSLQPEDFAVYFCQQGNTLPYTFGQGTKLEIKGGGGSGGGGSGGGGSGGGGSQVQLQESGPGLVKPSETLSLTCTVSGVSLPDYGVSWIRQPPGKGLEWIGVIWGSETTYYNSSLKSRVTISKDNSKNQVSLKLSSVTAADTAVYYCAKHYYYGGSYAMDYWGQGTLVTVSSHHHHHHHH

SEQ ID NO: 206647 - protein, 276 aa, Artificial Sequence
  Description of Artificial Sequence: Synthetic polypeptide
MALPVTALLLPLALLLHAARPQVQLQESGPGLVKPSETLSLTCTVSGVSLPDYGVSWIRQPPGKGLEWIGVIWGSETTYYNSSLKSRVTISKDNSKNQVSLKLSSVTAADTAVYYCAKHYYYGGSYAMDYWGQGTLVTVSSGGGGSGGGGSGGGGSGGGGSEIVMTQSPATLSLSPGERATLSCRASQDISKYLNWYQQKPGQAPRLLIYHTSRLHSGIPARFSGSGSGTDYTLTISSLQPEDFAVYFCQQGNTLPYTFGQGTKLEIKHHHHHHHH

SEQ ID NO: 206648 - protein, 276 aa, Artificial Sequence
  Description of Artificial Sequence: Synthetic polypeptide
MALPVTALLLPLALLLHAARPQVQLQESGPGLVKPSETLSLTCTVSGVSLPDYGVSWIRQPPGKGLEWIGVIWGSETTYYSSSLKSRVTISKDNSKNQVSLKLSSVTAADTAVYYCAKHYYYGGSYAMDYWGQGTLVTVSSGGGGSGGGGSGGGGSGGGGSEIVMTQSPATLSLSPGERATLSCRASQDISKYLNWYQQKPGQAPRLLIYHTSRLHSGIPARFSGSGSGTDYTLTISSLQPEDFAVYFCQQGNTLPYTFGQGTKLEIKHHHHHHHH

SEQ ID NO: 206649 - protein, 276 aa, Artificial Sequence
  Description of Artificial Sequence: Synthetic polypeptide
MALPVTALLLPLALLLHAARPQVQLQESGPGLVKPSETLSLTCTVSGVSLPDYGVSWIRQPPGKGLEWIGVIWGSETTYYQSSLKSRVTISKDNSKNQVSLKLSSVTAADTAVYYCAKHYYYGGSYAMDYWGQGTLVTVSSGGGGSGGGGSGGGGSGGGGSEIVMTQSPATLSLSPGERATLSCRASQDISKYLNWYQQKPGQAPRLLIYHTSRLHSGIPARFSGSGSGTDYTLTISSLQPEDFAVYFCQQGNTLPYTFGQGTKLEIKHHHHHHHH

SEQ ID NO: 206650 - protein, 271 aa, Artificial Sequence
  Description of Artificial Sequence: Synthetic polypeptide
MALPVTALLLPLALLLHAARPEIVMTQSPATLSLSPGERATLSCRASQDISKYLNWYQQKPGQAPRLLIYHTSRLHSGIPARFSGSGSGTDYTLTISSLQPEDFAVYFCQQGNTLPYTFGQGTKLEIKGGGGSGGGGSGGGGSQVQLQESGPGLVKPSETLSLTCTVSGVSLPDYGVSWIRQPPGKGLEWIGVIWGSETTYYNSSLKSRVTISKDNSKNQVSLKLSSVTAADTAVYYCAKHYYYGGSYAMDYWGQGTLVTVSSHHHHHHHH

SEQ ID NO: 206651 - protein, 271 aa, Artificial Sequence
  Description of Artificial Sequence: Synthetic polypeptide
MALPVTALLLPLALLLHAARPQVQLQESGPGLVKPSETLSLTCTVSGVSLPDYGVSWIRQPPGKGLEWIGVIWGSETTYYNSSLKSRVTISKDNSKNQVSLKLSSVTAADTAVYYCAKHYYYGGSYAMDYWGQGTLVTVSSGGGGSGGGGSGGGGSEIVMTQSPATLSLSPGERATLSCRASQDISKYLNWYQQKPGQAPRLLIYHTSRLHSGIPARFSGSGSGTDYTLTISSLQPEDFAVYFCQQGNTLPYTFGQGTKLEIKHHHHHHHH

SEQ ID NO: 206652 - protein, 276 aa, Artificial Sequence
  Description of Artificial Sequence: Synthetic polypeptide
MALPVTALLLPLALLLHAARPEIVMTQSPATLSLSPGERATLSCRASQDISKYLNWYQQKPGQAPRLLIYHTSRLHSGIPARFSGSGSGTDYTLTISSLQPEDFAVYFCQQGNTLPYTFGQGTKLEIKGGGGSGGGGSGGGGSGGGGSQVQLQESGPGLVKPSETLSLTCTVSGVSLPDYGVSWIRQPPGKGLEWIGVIWGSETTYYQSSLKSRVTISKDNSKNQVSLKLSSVTAADTAVYYCAKHYYYGGSYAMDYWGQGTLVTVSSHHHHHHHH

SEQ ID NO: 206653 - protein, 144 aa, Artificial Sequence
  Description of Artificial Sequence: Synthetic Chimeric Antigen Receptor
MALPVTALLLPLALLLHAARPDIQMTQTTSSLSASLGDRVTISCRASQDISKYLNWYQQKPDGTVKLLIYHTSRLHSGVPSRFSGSGSGTDYSLTISNLEQEDIATYFCQQGNTLPYTFGGGTKLEITGGGGSGGGGSGGGGSE

SEQ ID NO: 206654 - protein, 246 aa, Artificial Sequence
  Description of Artificial Sequence: Synthetic polypeptide
DIQMTQTTSSLSASLGDRVTISCRASQDISKYLNWYQQKPDGTVKLLIYHTSRLHSGVPSRFSGSGSGTDYSLTISNLEQEDIATYFCQQGNTLPYTFGGGTKLEITGSTSGSGKPGSGEGSTKGEVKLQESGPGLVAPSQSLSVTCTVSGVSLPDYGVSWIRQPPRKGLEWLGVIWGSETTYYNSALKSRLTIIKDNSKSQVFLKMNSLQTDDTAIYYCAKHYYYGGSYAMDYWGQGTSVTVSSE

SEQ ID NO: 206655 - protein, 248 aa, Artificial Sequence
  Description of Artificial Sequence: Synthetic Chimeric Antigen Receptor
DIQMTQTTSSLSASLGDRVTISCRASQDISKYLNWYQQKPDGTVKLLIYHTSRLHSGVPSRFSGSGSGTDYSLTISNLEQEDIATYFCQQGNTLPYTFGGGTKLEITKAGGGGSGGGGSGGGGSGGGGSEVKLQESGPGLVAPSQSLSVTCTVSGVSLPDYGVSWIRQPPRKGLEWLGVIWGSETTYYNSALKSRLTIIKDNSKSQVFLKMNSLQTDDTAIYYCAKHYYYGGSYAMDYWGQGTSVTVS

SEQ ID NO: 206656 - protein, 251 aa, Artificial Sequence; identical to SEQ ID NO: 205107
  Description of Artificial Sequence: Synthetic Chimeric Antigen Receptor

SEQ ID NO: 206657 - protein, 254 aa, Artificial Sequence
  Description of Artificial Sequence: Synthetic Chimeric Antigen Receptor
RCDIQMTQSPSSLSASVGDRVTITCRASEDIYFNLVWYQQKPGKAPKLLIYDTNRLADGVPSRFSGSGSGTQYTLTISSLQPEDFATYYCQHYKNYPLTFGQGTKLEIKRSGGGGSGGGGSGGGGSGGGGSRSEVQLVESGGGLVQPGGSLRLSCAASGFTLSNYGMHWIRQAPGKGLEWVSSISLNGGSTYYRDSVKGRFTISRDNAKSTLYLQMNSLRAEDTAVYYCAAQDAYTGGYFDYWGQGTLVTVSSM
